United States Patent Application Publication US 2015/0376612 A1 - sequence listing, part 45

SEQ ID NO: 106895 - DNA, 1054 bp, Homo sapiens
tgtgtgccactacacctggcctgaccttctcttgcatctcgttagtattctccacaaaaaaatcaaggcatccagcttcttggaagcctccaaaaaaggatctgtactagctcactagggaaatagcaaagcacaatggttagaatttagaggtttctgaccagatctggggtcaaaccctgaatcttccatttcctctgtgaccttgcatgttatttagcttcctgaaaccctacatttccccatctgtaaaatggggctgttatatatacctatattatgtggtcaactcacttggtaaagcatctgtagtatttagcattggaaacataagttgtattcaataatgttatctaaattattaagtataacttattaattataatatcaaataatattgatagtatttgtttattcagctgatcttcactgagcccctataatgtatcaagctctatgttagctatctgtgagacatatctatctcacaatatccctcacagtaaataactctgtaaattgcagcatgggtcccagtttgcttcatggagaacttttccacataccaccccttctgaagacagttgtcatgaccccatatatgcttctgtcctttagaatgaatacttggctgggtccatggttcacgcctgtaatcctagtactttgggaggctgaggcaggaggatcacttgagaccaggagttggagatcagcctaggcaacttagagagaatccgtctctgtaaaaatgtaaaaaattagctgggtggggtagtagtacatacctatagtcctagctactcaggaggctgagatgggaggatcacttgagaccaagagttcaaggatgcaatgaatcatgatcgtgccactgtcctttagcctgggcaacagagcaagaccctgtttttagaaaacacatttaaaaataaaaaagtagaatgaatcctcatacctcttcattccatctacattagcgttgaggccttgttccttcattatctcgttgttccgaaagtatattaaagattaatttagcatttatggatat

SEQ ID NO: 106896 - DNA, 1053 bp, Homo sapiens
gttttccaagtatctgatttttaaaaatagactttatttttcaggacagtttttggttcacagtaaaattgaaatgaagctgcagatatttcccatacacctcattcccccaagcacgcacagccttccccattatcaacattccctaccagagtggcacatttattagaatcaatgaacccgcagtgacatttcattatcctccaaagtctatactttacattccctctggtattgtacattttgtgggtttggccaaatgtctaatgacgcgcatctaccattatagtatcatatagagtggtttcacaggcttaaaagtcctctgtgctctgcctatttcagtgttttatctttactcttattataggaacttgaaatgcaggctcgagctcatggactttcccttattccatccacgggtctctgctctccagatttggtgaatcggatcatcaagcaagaacccgttcttgagaactgcagccaagacctccttcagcatcatgcagacctaacctgtacaacaactctcgatctcacggatggcaccatcaccttcaacaacaacctcggaactgggactgaggccaaccaagcctatagtgtccccacaaaaatgggatccaaactggaagacatcctgatggacgacaccctttctcccgtcggtgtcactgatccactcctttcctcagtgtcccccggagcttccaaaacaagcagccggaggagcagtatgagcatggaagagacggagcacacttgttagcgaatcctccctgcactgcattcgcacaaactgcttcctttcttgattcgtagatttaataacttacctgaaggggttttcttgataattttcctttaatatgaaattttttttcatgctttatcaatagcccaggatatattttatttttagaattttgtgaaacagacttgtatattctattttacaactacaaatgcctccaaagtattgtacaaataagtgtgcagtatctgtgaactgaattcaccacagactttagctttctgagcaagaggatt

SEQ ID NO: 106897 - DNA, 1018 bp, Homo sapiens
tctttatactgcaaactatttaaagaaatatgtattctgtaaaagaaaaaaaaaatgcggccttttcatgaggatcgtctggttagaaaacataactgataccaaccgaaactgaagggagttagaccaaggctctgaaatataaagtctaatcttgctctcttttattctgtgctgttacagttttcttcatcaatgagtgtgatccagtttttcataagatattttattttgaaatggaaattaatgtcctctcaaagtaaaatattgaggagcactgaaagtatgttttactttttttttattttatttttgcttttgataagaaaaccgaactgggcatatttctaattggctttactatttttatttttaaattatgttttactgttcatttgatttgtacagattctttattatcattgttcttttcaatatatttgtattaatttgtaagaatatgcatcttaaaatggcaagttttccatatttttacaactcactggtggttttccgcattctttgtacacccatgaaagaaaacttttatgcaaggtcttgcatttaaaagacagctttgcgaatattttgtaaattacagtctcactcagaactgtttttggacacatttaaggtgtagtattaataggttaaaaccaggctttctagaaagaataaacttacatatttatttttaggacatgaaaatagcaatattcttggagattgataaccatagcattaatacgcccattatggtcatttaaattggggtttatttcagcaaacttgttgaatttatttttaagaaagaaatactgtattgggaagttactgttacttgataacaatgttttaacaagaagcaatgttataaagttagtttcagtgcattatctacttgtgtagtcctatgcaataacagtagtgttacatgtatcaagcctagatgttttatacagatgccatatagtgttatgagccaggctgttgaatggaatttctcagtagcagccta

SEQ ID NO: 106898 - DNA, 3394 bp, Homo sapiens
aggaccaccggcatcacttgggggcttgttagagatgcagagtctcaggccccaccccagacctgaatcacacactgcatttcaacaaggcccacaggtgactgcagcgtgtgttaaagtatgagaaatgccaccagggaggagaggcccacaccagtccagagactagtgattcagagcatcactacccaagagaactttacgcagtgatgcaaatgttccgtctgtctctgtgctggccagaattaaccgctagtcacatggggcctttgaacataaatgtggctagcacaactcagaaactgaatattaaatgtagtaagatttcgttcatttcaatttaaagagccacgtgtggctaatggtaacaatactggacagagttctagttctagagtgcggcttttctgttgccccaaacttttcagtgcacctgagctgcaatgggctgggaagtaccctcactgaacctctgcatattttttccaggcatcctgtacacgtcaaagaagagcccctcgatccagaggaagctgaagggcccctgtccttagtgacaacagccaaccacagtccagattttgaccatgacagagattacgaagatgaaccagtaaacgaggacatggagtgactatcggggcgggccaaccccgagaatgaagattggaaaaaggaaaaaaaaaaaaacacgtcaaaagttagcagtgaaattgttctccatttgttgtacagtctggaggattttcactacgttttgacaactctgaaatgtgttaactcttagtgccatcaagaaccccatttgggagtatttttgatttttctactttttgttgaaaaaaggaatttgtactctgtgcattggatggacttgtttggtacttgggattttcctctcttaaccgtcaacatcagtgttgtaaatttgctaaactgattcacttttagcagcagactttgaactgcagtcctgccaacgttggacactgaggacgcccgacagagcttgtgcacctaagctgcagaccaagcctttgcccagaatttaaggattccaatggacgacctatttgcacagtactgcatgttgattatcactgcctttactccttttttttttttttttttttttttttttttgcttccagttgggatggggaaggcctttgtgtgtgtattggggggaggggttaaaaaataattatcccaaactttttaatgtattgctttttttttttttttttttccttctactataccattttaagttctgacctcaggcctccatttgggccgatggcctcttggaggcttaaagttttctgtaccttgtgatgaatgttaataggtgtttttattatacaaagctgaatgtcatttctcgtttgtagctttctgtcactcattccatcttccttcagacatcaccacgtttctctaaagtcagaaaacattccgttttggtctttttcaaaaaggtcccaaatgctgcactctacacatgaaggccctctcacacagacgtgacgtcctgccagaaagagaatgaatgacagaaaaaaaaaagagagacaaactctaggaacaatgccgattcattccacgcagcagtattgggggtggttcgggggaggggtgtttcggattttctttttttcttttcttttctttttttttttttgcagcaaccattaataaatgccaccacattctaccagcacaaggaaacataggcagcactgaaaaaaaaaaaaaagctcatattaattagactgacaatatggccttggaaggctctcccttgtggaaccaagttgccatgggccttgggtgctctgcgataacgggtgtgggttggttttgtttgcaaaatggccaaaaaaaaaaaccggcttccccgagcagctgccctgaaagtaggggtggcggcggcggcgctgagtttatacattagttcagacctacttggtggcattaaactgtttgaatgcaaattcgatttcagattgaacttgttaagggagttaacgagggctgagttcagcaaatgctaaagtgttaatttcaaatatgcaaatttggtactgcagtttgttatgcaatattatatcaccaacccagtatcacaaaaactcatagaagatatcatgtaggccctgggctttgggggggtcccaaacatggtatgcagaaatgtgatggttacaggtcagtacaacctcagtccttagaacccctccacacttcagctctgcacccactttcctgtcatttatttatataggactgtagttttttttagttcgagagcctttcgaagcttaatttatattctttctttgtaccttttttctaaaattaccaaagatattacacaaaggtaaattatgttctctgttttatgctttatctgatgaagccaaatatcctcttattgttgatcaaaggaggcaaaagaatttagaggcaaatgacaagcgataggctattgcaacctgagaaagagaactgctccttcatcgtaaatttagaagaccaagtagataatggaaccaaagttgttacttttttctagtagttatttttcctttttctttttgtgtacctctacagagaccaaaactcattctcttaaagagattttatggggctactgcagataaaaataggacacaatattaaaggagctacagaaggaagggagtcccatctcaaaaaaaaaatgaatgtatgccactgcaattagagtatccaataaaggagacagtttagagtcaggacagaaaagcttccataattgaactagattacataatagtatttctagaaaaagagatatttttagattgtatgccacttttgtttaagaactgtgctgtgatcactgtattaattttggtttatcttggcatatatccttcagtttgtttttatttttaatttttcctttttttccgattaggctttggtcagcatttttcatttaaagaaaagtaacactcccatccactcataagcttggtacaaaaacttctctggcagttacttttgaagcttcactctgctttctgtataaagggcagtctgtggtcacgcaagactttaaaaaaaaaaaaaaaaaaaaaaaaaaaaaaaaaaaaaaaaacttttccaggcagcttcatgatgtgcaggcagtagccagacagggtcatgggaagggggccctgtgcttctaaactgagtggttgctggttagtttggtattcaaaagaggataaaaatctggtagattagttcattctcagcatgtgtagctagacatgagtaaagataacagcatgagaaactgttagtacgcatacctcagttcaaacctttagggaatgattaaaatttaaaaaaaaaacat

SEQ ID NO: 106899 - DNA, 1082 bp, Homo sapiens
ctctgaataagaagaaaattttaagtaaatgacctgaatctctttagaatgtcttcatgtccagcgttgagtctggatccgtaagtttaaccaggcgggactaaagaaatgaagccttgcttgttactgtacccagtaagggttggggattcttctgaaacccaaaggaaagatgagatattaaaagctcttcacccttgagttgagatcctcctttttgataaattatcgatgttaagggtctcagcttaggaatggccagaaaggacttttaaccataagcaagatatgtctgcagaaaccatcaactgtaggaatatagtcattttgccattgagagttccactcgtgttcctttggcatttactcagttaaaatacttgccgatagttagggccaactctcatattctggaaggtgagacataacatgatagctactgatctcttgaccggggcggggcggggcgggggcggggggtccgttcaccaccccccgatcctttgactatacaaggcgatactctcaacggtaaaatccactttagaattcttcataggacctctggaagttttaaaagccagaagccatcaagaacaaaactgtatttagcagtattaaccaagtgttcctctttcgtggtttgaaaaaaataccccctttttatgggaggtaggtgggcttaaaaagggcagtttcatactttgcatgtgttgttttgaagtcacagtaacattttcagatttgtactctggaacctattttgggcttgtatgcatattaaaaaatatttctgctggtcagttattaccagagactagacgaaaatgccaaagtacgattaatttataattttggtttatttttgcttttggaaaagacatccttaaccatgagaaggtcctccacgggggtggtagctacagctcttggggatggttttacaaatgtggactgttaggctgaatttactgctgtttttggagtcttttcttatagaaaatgtaaatgttctctcttttatacttgctgcagaatgcagtgcgtcataatcttagtcttcacaagtgttttgtgcgagt

SEQ ID NO: 106900 - DNA, 1616 bp, Homo sapiens
ttctgtcagaaggtatatgtgtacatggatatatattgatgaagtagatttaaaaaccgtttagtatgcaagcatgctgaaaccttttctataaggttttttaaaactgcaatatataacataattgcttttgattaagtattacaatacgatgtgattattaggaaattcatttcacacaacagtgaaaatgagcctgtttaaagatggcaagtcaattatcacaagctacagtaatctctgatccctagaattaatctgagctctaaataattactgagctttaatcagctagtgaaatgttttgcatttctctttgattctgctttatgaatgactaataaattaatatttctgtacggaaacagaaataaaaactcaaaacaattagataattccattttgaattttgctattgaactgttaaatacaaccattaatcttagatcattttgtaaaacctttctcaggatttagctctgaatcacagtgattttatattttcgagaaactgtggaatgacgactctgctgatttggtcataaattatcttctgttacattctgcttcacaggccattctcgaatctccagaaaagcagctaacactaaatgagatctataactggttcacacgaatgtttgcttacttccgacgcaacgcggccacgtggaaggtaagctttctcaggcctgtttattcttggatcttgacgttcatagaacagtttgttgttgataaaatgcagttgtgctataaggaagctacatttatattgttttgatactcttaaagtgtccaatctctaggtgtatttgattgggaaaatagtgccattgtggttgaaatgctctgatggaagactcccattataccagcatcagcagtgtggaggggccagccagtaaagtgatctctctctggttggaatatgtagagaaaaggagacaacaccgtcgcccagaagtggaggttgccatattacttgcacaaacctcatgccgttaggtcttcagccacagccgatatttgcagagatgtatctccagcgatctatctccagagatggaacctggagaaatgaccaaacttgacacagccttcaatggttggataaatagctcattaacccaattagtagagaaagctgtgcaatccaagcactagcactgtttgtaggagttattaatggagaacacaatgtattattaaggggcaggggtttttgtttttctttttttggttttaagtcaagagattgtcggccaggcacagtggctcatgcctataatcccagcactttgggaggctaaggcaagaggatcacttgagctcaggagttagagaccagcctgggcaacgtagcgagaccctgtctctacaaaaaaaattcaatgaattagccaggcatggtggcatgcacctgtggtcaacagctactccagaggcagaggtgggacgattgcttgaggcaaggaggttgaggctgcagtgagccctgttcatgccactgcactccagcctgggcaacagagcaagaccctgtctcaaaaaaaaaaaaaaaaaaggagattgtccctcatagatatactaaggaagaaaagtagatttcgaac

SEQ ID NO: 106901 - DNA, 1803 bp, Homo sapiens
gggatttgtctattcttcgtagctgtgaacacccaaaaagatgggcttgcacttgctgaatgagttttgatttctgacaatgaaactggaactcagttaacttggtgatcttcctcccaaaactgaaagggagcaggcatgaaggacatttgtgtttgtaattttcattgcatctttcagaaagccacagtgtttagggaaaagttcttaaactgaaaagagaagccgagaagtatagtcagtcctcagaactgctttgtggttactgtgtacctttgccctttgactgacgtatgtgtttgatggtaagcgcttcaagggcagcaattagctgttttcttcctgtttttgtcattgtaggagtaactgccttatatttgctcagttacacgtgttgattgtcatgcataagcagggataaaatgctctgcacggaatcttttccaaaaatgagcatacagaaaaatgaaactggttagtgttcatttttgctattaactaggcataagatgattatacaaaggatctagaatcatacaagtgtgtggtttgaccttgggtctgggttgggaatatgggcaaattatttaatctctccaagcctcagtttgcttatctgtaaagtatgagtaataacatctcagatattagtggtggtatgagaattgaaggagaccacacagtggcaggtggttttaaaacatgatttttacaaatgttacccatgactttccaaagcgctctgagattcttaggcttagcagcgtctgaattataaaagctgtatatttatgagcattagcctttcatgcactaatttccttgaccctttgcttgggctgatgcttatacatactgttcctggacttggtcagtgattaaggcccgaggtgaagaagaggtcagccccaactcttccccccttggcttctcagctctgccccatcctgcggctgctactctgaactgttcacacttagtttgcaaatgtgtgtcagaaagccaggtttccaacattatagagaaaaacccgctcatggcatctgctcagcttgctggggcatttgtaagggcagtgccatctccagagcttgctcttcgcaggcattgtctcttgctcaccgagacaacattctacgctgaaaataaaaaggaaagcacaactcaaagctcacaacattctgtttccagcgccatgtttacatttttccattagtatttcttcatgatatttgatctttcttttcttcaggttcattgcttttttatgaaactctcctgaaacatattagagaggattctcaggcccccctccctttttttttttttttaactagagtgtgagtaaaggtcgagtcttcccaacatattggaactctcttttaataagttctttgattatgatctcagaggaatctcatttttaataccttccacaaatactgccttgtacttaagactgactatagcaatggtgaattagacttggtgaaatagacttactatggtaagtgatttgaaatctggtttgagaaaatattaccaagtaagcctactttgctgaagtttattggattttagggtgggtctgtgtatctgagacagcacataaacagtaatacatacgctgaaaacaaccaaattcttcagcattgccagacgtaaaataatatttctgttgcaacaaattttggggaagggttatgccttttagtatttgtaagaacagtactttaaggtgaagataagaaagataaattgaaacagtgctcattaatttatttttttctttttttttttttt

SEQ ID NO: 106902 - DNA, 1036 bp, Homo sapiens
tcaaacctttgacagctagagcagcgctacaagccaatataaagaactccaagatgtaaaccaacaataggccgtctgtgtgaggtttgccattgtcaaatacatagattgtttggattagtttatgtaaatgtactgttgtattaccctttgaaaaaaaaaaagatcacatttgtgtatgaaaagtggttcccttcacaggcagcattataaattccttatcctttaacttacatgtaagaagtaaaaattggtgcctgacaagcagatattgtgtgacactctgttgtcggagtgaacctgccttcttttcatttattggaaaatagaaaattttattaaagataccatcttataaatcaggaattattaaaatatgtataggtgaggcattgggaaattaattataaaaggtagacgtgtaatgttttgcataaattttcacttctttgccaaaaagaaaaaaaaaagggcacacacatacagcaaacccttgatgctttcaactttaagggcccagagctatctggtgactgattctcatgtgcaaaatattccctgcagtctgtaattaatttattccgccctaaataatagaatgcatggcgtttgtttgaatgagtatccttctagaatctttaatttgaaacaggcagtcaccaggattcaaatctaaccatagatggggactttcatgttacaaccttgccagtaagttcatgaagctttttcttttttccatttctgtgtagaagaaacctcgtgtttattttaaaattcttagtcactaagtgatagaatgctttgctgtaaatgttgcttttcactaaatgccatttgggtgttaagtgtcatttgctgtatccaatcatccaaccagtcctcatttcattgcatcaaagaaactgctaaaacgttcttagattgtttttacatcagctcatagacgcattttctggatcttattgtgggactcatcagatttggatagttagaggatacgctcatctcgggaaggtgcccaagtttttggaca

SEQ ID NO: 106903 - DNA, 1009 bp, Homo sapiens
gccaggattgtaaggaaacacttgaagcttccgcgatattgggcccccactgtccaccggccgtgggcctagggatttaaattcatatgaatccagattacttgggtcctcttaggtgggacattcatatgaactcttccagcctctaagctaaagaagagatgtcacaaaaagttgcagtggtggttggattttaattccgtttggggaaaaggggaaaccatctgatttcacagacagaaaaaaaaaaaatacaaaaaacatctgacagaattgacttcacttaggaagctgagacagtggtacagatacatatttctgatcacatgtagtggttttaatttgttctgtgatcatgtgacattgctaaactgctgtatattttttctgatggatgaagatgtcctgatgttttcatcatgtgtcatcggggcaggttcaggacaggctccctacaacccctcagcctctaggccctttaaaatgaatattgaaagcaggcaagggaaaaaggaatcaaccaaaccaaggttgatctgcctggcaggcgacgggggtggaggtgtgtgtaccttgtattctttaatgattttattccattcagtcactacttaccaagcacctattatatagggagcactggatacagatagtaaggtggtgtggcctcttcccgtaatacacaacctagtagggtaagaccaggatgcctttaacttccctgccaggcagagtttctaaaagcaaggggtgagggattggggaaggtgacagtggaaagggttgttggcaaggacattccaggccaagggagccatggaagacgttgcctagattgtaggataaggaagaaaggatagtggaaggatatattgctcttaaaattaatctgtctgtttaacacgaaatagggtgaccaactgtcccagtttactttcttggactgaagggattcctgggagttgggattttcagtttcaaaactggaagagtcctgggcaagctggga

SEQ ID NO: 106904 - DNA, 1051 bp, Homo sapiens
ggcagatttttcagctttgatagacatcaaagatgatctggccagaagttagtacaatgtggtcgttacctgtgatgttcctcgtaatgtttttgtcggggagtttgccgtaatggaagaagggacaggctaattctgacgtgttccatttctgcaaagcttgagggaattatcagagtgatgacatagacctcgttgagagcaggggttagcaacccacagaccccaggccaaatctcacaagctaaggaatgtttttatattttaaatggttgagggaaaaatctgaagaacattatttcgtgactggtgaaaagtctaggaaattccaatttcagtgtccatgcgtaaaattatatgagaacacagccatactcatgcccattcatctactgattacctattgctgcttttgcactacagtaggagagtcaagtaattgaaactgaaatctacatggcctgcaaagctgaaaatatttatgatctggctcttacagaagtttgccaggcacccctggtcaagaggatcagaaaaacaatttatattatagtattagcaacttgtccccttaggttctggctgcctaagctctgctcacccgcttttatctctttcttcttagccagggtgtataaaaccagtctagtctccacatgggtcaattttccctactagctcttcacatggcaagtgcctgccagttttggaggtcatggaaagctggacgagggatagtaattcattctttcatccatgcatccatccatccattcatccacccagacatccattcatccatccacttatttagcaagcatatttcgaacctatcagatagcaggaatcttgctggagctactgcagagtacaatgattaaaacagataaagctgccctccaagttcttacactctagaaggaagaatagactacaaaataatttgctagtgcgactgtccattcattgggcagtgctagctgacattaacaggttcttgagaacaccagaaatttattcaaaagagagtttcagtgctagaaaggggcca

SEQ ID NO: 106905 - DNA, 1032 bp, Homo sapiens
tttaattgtacctagtcaagtaccagaggtgaacatttgttttacttagttgtttcaaagggttacagacctgggttttaaatctctgattcaaaccacatttggaacaaaaacctgaaatagggtagcacccagaagccttaaaaatcagctgtccctgttgttgttgttgttattgaagtattcaactatttttatcttacatccaaattgtaatgtggcctaaatatcatgacagtcttgttcatagaatttgaggcaaatatcccattacagaatcaggtctgctgtatcactagtaagaaaggactgagtaatgtagagacatgaatttttattttcaagactttaggctttgattcagccctctgattaccagagctcctgcgtatgctaaaactgattgaaatttcaatttgttagccttttccctgttggaaagtctaataaatagtaaaaggaccacaagacaggcatactcagcatgtggcctgaatcatccgtaaactggatatctagaccatcaacaatcaagaacccaggcagagttttccttttaaataattgtctgcatttctctcccccaccccccaccattggtacataatttgcatgtgtaggctcatgtttcaggtttcatatgtttaaagttgcttttctaccctttgccatttctgacattcacgtgaatgcatttcagtatatggatgtatcatcagttatatgaagtcagttttcctgtggtcagacgatcctgttccaacccatacaaattagactcttccgaaatacctagcaggccctgtctctgattgctgcccattaaggtggtcttgaaatgccaccctggctgaatttcttacttatttatgtgtaaatggttatctccagacgccctgcagaacttctccctggaaggcttttctttgggtgataacagtgtgtgccacattatacataatgacagcattaaagggtggggatggaaaggacaggccaccccctggactactatctcctgggagctagacc

SEQ ID NO: 106906 - DNA, 1448 bp, Homo sapiens
tagaaaatccataattttgattgctggtacttcataaacgtataactggtactttttagctgtctctttagggaaaaatgagttttatcacctgcggtacctgggttaatgaaattgtgtgttggaatttagccaggatgaaagatgagatcattccaagacactaatattggcaacaggtctcataaaaagctctgactcttgagtgaagtatcattagatttttttattattattattttatttaaattgagagattaagttagttgtcattttcaaagcttctgtactagcgagattctcatttggcattacgttcaaaacccagtgacctaaaaacctgtacggagccaagagaaacagagaagtgtccatcagtgcctagtacaagaatttccttgcttcaaatttcaactccagttcctgttcagccctttacaaatcacgactctcagctcaaatttgaaataatgctgcctttttcccccgtgttcctcctgtgtttgattgtttgtggatattagctgtccaggaaatcccatacttacagatataaatccagaatgatcttgtttttccgcagccagcccaggatgtattagacagttatgatgatttgttaatttttgtgacctgtatttattttatgtgtgctgtatacttcgaggctggaatcagctgttgaaatgctctccgtctctcacaggcagaaaggaagcgctctacttttccttttctgctttggattttcttgctttatttttggaaggttttttaaatctcttcacgtctgctttttatgcgcttcttccatatggtgataaacaagaggtacattgtgtttgatagacttaaactcaatcctatcaagggtgggtctttggagatgcatgaacagggtcacattctttccaaatgtgttttccatccatgatgtgtcttgactgtgtaattctattctcgtttttatggtgatatacatttcccccaaataatatattaatcctcagatttaatatgtgtttcagtagaattctgcctattacagataagaaaattatattatagtcttgaagaagaataaaaatcaactgaagttagcattattttttttctcttatacccgtcttcataaagggcactccttatgattctggtttttttttttttttttttttttttttaaatcaggtatttgtttctctccacctctgattcagtttctattcacagagacccactactgctcctgagtctcagtgtcagctcactggctaagagatgctgccagtttttgatgtctcaacttaggatggttatagaataatggaaactagggcagtctaccaaaaaattaaagaaaaagtaataaaaattcaatcctaccaaacaatctatatttatagtagcctgttgtttttatagctgtattttagcaagattttata

SEQ ID NO: 106907 - DNA, 1017 bp, Homo sapiens
cagagagaggggttcagaaaaaagagaggtgggggggactcacaggtctaaaactgaagcatatttttttttccctcctgaggaagaaatatcataactgttggtaaatcaaaaccagagatttgacacttttctgtgatcattctgcagcatttgttcccaaggtgaggtataccacagggcccttgatttcaaagataaatactgtacaaataaccatcctgttgtctttccctcaccgccaacagagggacgctttatcagaatcagcagatacccagtctattgtatgcatttatttccctgtttcttctgaaaacaacttgcagttttagtgttgatttttttttaatctatcaaccatgagttatcatgtgactgttgcatttgttagtgctaactgatagcagcaggtgctcctgctaactctaatgaaatcgtccagccctgcattgcttggcatcctccgataacagaaaaacaaaaacaagtcccgtatcatccagagtggtgtgaagctcatcggcgttcttccatcttctccccacttgagtcctttcttttttcttcttttcaaaccaggtgaaagacacaatcttcactagtaaaaacgtggatttgtaattcttccctttcctccccctccctttttttaatgctcatgtaatgcattggcaaaatgaggagtagatttgaaggttaaatcctgaccacatttccctgtttttaacttagaaggtaaaatcaaatgcaggcccatagtttcacaaacaccaggtactcttatgtgcttgggggaaaatgtttccatttctcctagtttttcttttaagtgaccacttgtataacgtctactaaaagtatcatttgtatccttgcttagtatcctatttgaaaagaattttttttcttttggtgatttctcagggagaaaaacttcatgcagaacaaaacaaaaattcccttgcttgttagatgtatgtaatttatgaaagccaaaataaactgtatatgtgc

SEQ ID NO: 106908 - DNA, 1017 bp, Homo sapiens
ttagaagggatttcttatggtttaggcaaattgatagcagtgttgcttgaattctccttggtattcttacttaataaaggtaacattgctttgaccttgatttaagtgttacttcatagattattttcacctattttctgttcccttgattttacactcccctagtaatagtttataattaaatagtactgaaccttaaaacaggcatagtcccgaaatgcttcacatatattaactcatttaatcctcacaaacagtttatgctagtattgtagtagtattcccagcatagagttaaggaaactaatgcccagagaggttaaatgatttacccaaggtcacacagctaataagaggtggagtcaaggtccaaacccaggcagtctggcttcagaagacttattcttaactgctgcattatacagcctggttagaggcagcacttcttattgacagtttgctttctgcttggcagtggatgtaaagaaagttttggagaaagcctgactgggtagtgaggacattattaatatgttctttgaactagccacatgtcatctgagcctcagtatcagcacatgtgatttgggatgttaaccactttttacggttgttagaattaaaaggtacaccaggcaagacacaggtggtttacccctgtaatcccaatgcatttggaggctaaggtggaaggatttcttgaggccaagagtttgagaccagccaggtcaacatagcaagaccctatctctgccaaaaaaaaaaaaaaaaaaattcagctgggtgtcgtggcatgtgcccatagtcttagttaattgggaagctaaggtgggaggctcacttgagcccagaagttcgaggccgcagtgagctatgataatgccactgtactgtagcctaggtagcaaagcaaaaccttgtctctaaaaattaaataaatgaatgagtaaataaaaagtacatcatataaactgcctagcccatactaggcactctttaaaagcgttagaacttctt

SEQ ID NO: 106909 - DNA, 1013 bp, Homo sapiens
ctaaatgattaggctcactgctttatttaccatcagatgcccaaatcatccttttcccaccatgtttcatcctgtaaatgtagctctaaattaattcaagataaaaacattattctcctcatttttatttcccttcttgtcttttttggcacgacccaaaaggcagtaagaatataaatgcttgttccacttttttgagaaaacagaaaagctcccattcagaggtgcagctggtgttgtccaatgatgcttcatacagaacgactgcaaagctagaagcgagtcccagccacacatgcagcgggtgtgtggtattcattgtgccactgttagagcactcagcagactggaaatcaagtcctgcatagcacttgattctttttctactacatacatatatgcaaacacacatatgtgtgcaaaaaaattaacaattgcacagcaacagttcctacaatgtgcaaaattaaaacttcaaaagatgtaagaagtatggtgaaaactgagtttccctgctactcctgactccctgtacccctccccagaggcaacagttgttccagtttcttaggtatctttccaaaaagatgctatcgaggcacctctgccagcttgttctctctccttccaaagccaaacactttatttcagacaattgtgtatttaaaagtatccagttatatattaaatatgaaaagcaaatgacaacagtgtgtacaggatgtttccatgttttaaaataataatgtgttagaaatgcaatataaacccgaatggtaaatgatgcctaggttggggtgtgggggtgcacttccttcgggaaccactgcagtttaatatgtgaacttgtgaaaacaagagcatgtaattttttcataataaagaaatttttttaactaagagacaaattcacaagcggtcttctgaatgtgtaattgtacccgtgtgtgacgagtatgagtttctttagacttcaggtataactgattgcgttctaaggccctagtgtgtcg

SEQ ID NO: 106910 - DNA, 1054 bp, Homo sapiens
gaccttttcctccgatgctacagtatggaatgtgaagaaactttacctgtcgttctgttttctgcaagagattgtgatttcttttccagctgatttccagctgatttcgaggggatatacaacagtatgaaaaacgccagaagaatacactgtaaagtggaaagtggtgctaagtatttaaggaatcatctctttgagattgtgaatctaccttgctcttcttagaaaaggtcgttgcgatcaagtttcaaggccagctcgtctagtttggtatcattttgtgtgactgagcatatttcattcgagctaatgatcaaatatttcacaaatatttgatagcaattagtttttgtaaatttagtaatttcaaatcagaagtctgattatattttcagataggacctcatcactagaatattctcggatcaaattcgtattcccatcttcaaacctaagaagtacatgatatggttcggtacaatctcattgaaagtaagctatgataacagagtcacaggcagggaaatgtgataagaactaaaaagtgaagagagaaaagggaaagtaggatcattttgtataagctgtcattgaagaatcagcaaataaatctgaaagctttaaaatagtagtggcttccatcgatgcctgccattgtagcgtaagtgtagcttaagacactctttattagtagatagggctaaaattgtatatgaagagaacagctttctagaaacccaaggtgtctgatttaatgtaatgttttggctgggaataagcagtctcttaccgtgcagacaaaaatcacaggctgggatggacctgaaaaaggaggattctgtggcttacagtgttgttaggttgacataaagttgtgcacatggacatgagaccaaataatttggaaggataacagacaaagagagacatggaagtcttttgtcaacaaagcagccttactgatgagtatgctcggtgcctgtctcagggtcggagttcataaatgttggctggacggatgaaagtcctaaatggtgggaatgaagaaggtggc

SEQ ID NO: 106911 - DNA, 1601 bp, Homo sapiens
gcacaccaaccagcctccagtactacagctctgattctctgctccgttctcctgctatgccacataaatactcctggcatctgggaatcaagatggcacattttgcccagtgtggctggaaaggggggagataggggagattggtgacatggttagtgatgaaaataactgccagacttactacctttcgtggcacctagcctcaggttcttaccattggtaaagcagccagttgctggtcacatagatagcttacaaatgagatgcccttaaatctggaggaagaagctctagtcctaaaagcatcagacacactacactgtgctgttggggcctttgtgggtctttgacccctaagtccagaacgaccgtgaggctctgccatcccctgtgaaaattcaaattaaagtacgtcttcagagacttgctactttgtcagtgtcaacctgcgaagttaacccagctacagactggatcctcaaggactactttatgagcttttacttttccaaacttgagtcgtttgaatatgcgccccattgttgtgaggtttgccctgtctgcttatgtgattatttgtattattttctttaaatcaagtcatttcttaaataaaatgagcctcattctaagaaatgatatctgtgaaatcagaagttggagacactagatatattttagtccattacaaattaagatacatctgcaaatcttcaaagtatgctttcttgctccatttgacattgtgtggaccccactgagtgtgtgcatattatgagttggtatgttttcataggtttttctcatttttcagagggaagggaccttgactgaatatggtactgtgccaagtgcatggaaaccctgccttcctagtataccctaatttcttagaaaaattcaagactgtcacttaaccttcctaaaaagttgattgtgactctgcttttcctcacatacatcctcagggatatgaaccaggcttagaagatacttaaagcagacctagagtttggggactgtgaagttttcaaactcattgattcagtagtttactctgggataatcttgatcagtgtaatatctggtaaacattaatcactgaccatatcacccaacagatctgtgctgatgtaaaattggtgtttgttaaacagaaacagaaagtgaccttttccctgtgctaacttccttcagccttacctgttttgttacgtttaaaaaacaaaaaagaaatacagccttgcattaatttttaaataattttgagccagcaagcatttctgtgagtttgcaacaattacttggggaggttgcccagtgccacccccttacatatttatctatgtccatccatcttgttataaagagggcatccttgtgactgtttctttaagcatagacatttttaggtcagatacagatcagggaacacccaagatccttggtactcatgttatggtccatggcccagcagctctgggggcttactccacatgcatagtcgtgcgccaccccaccacccagaaccaccgaatcggatttatatctgtaataaagttcgagaagcactactctaggaatagcaatgggaaaggaag

SEQ ID NO: 106912 - DNA, 1074 bp, Homo sapiens
ctacgttagggtgagttgtaaaattatttcattatatgttacaatgtaataataatagaaataaatgcatgataaatattatgtgcttgaatcatcccgaaactattccctgccccccagttcctggaaaaattgtcttccatgaaaccagtccctggtgccaaaaaggttggcgagcacttctgtaagagaacctggttagctgttgtcgatacctgtagctgctccaaaccatgagaaaacttaagtttctgctacaagtacatctcaatctttagcttgcctcagaatccccctggaggaatggctaaaatacaggctactgggccccacccttagtgtttctgattcagtaaattggggtggggcccccacatttgcatcttttacaagttccagacccgtactctgagaaccactgccttacaacgtccccacctggtatccttatggtgtggcattctaccgaagttcaaagtgacggataagtgatctggattaccattacttaggaaaatacaggtttcagagccaagactcaacatttcagagagaaaaattctcaagactgtggcccaatataagctattttatggagcaaaatttaaaaaaaaaatttcaattttggccttaatttcattcatcagggctctggttttgtcttcctagattttttgtgtgtgtgcttcggttctctgctctcactctattcctttcatcacctgagctcctactgatacgttaaggcccagatcaaatgttacagtactttatgttccagccatctgttcagttatcactgtctccccaactagagaattgggtagaactctttccgaggatgagaacttacttaaagttgcagtcaatgccagtgaccaccaaacttgattttttacccatcagtataaaagtgttgaatgtgtacccctactaagtatgtttattaattatatacatgtttctaatatatattccttatgttataaaaattggtggctaagagggtgagaaatgtatatatacattttcaagttctaatattaatatgtgtatacagaaatcttaatattg

SEQ ID NO: 106913 - DNA, 1028 bp, Homo sapiens
taatatttgtggtttctaagtcttaaaatgaaagaagagaaagaaaaaagaaaatcattatccgcctcagaaatctgagagtaaaacattggctggaggtgtgagaagtgcaaagaatcaagaaaacagagatttcccagtgcacagggtgaaaaatagggactttttaaaaagacactttggaaaattcaccaggaggcaaaaagccttctccatttatatacccaaggcttgttctgcttttgtgtaactatttgtgttcttgtttggtaaacaaacagaccccatagcaactgtagctgatgatatttatactacctgtaagacttccctaaacaaatagacagacttttatgaccttcaaatttcattccttttatagtcttcaaggaaatcagtctaatggcaagccgatctctctctttctctccattgctttttttacagtactttgagatatgtctttgaaggagcttttgtgtattgtgtattttacatcttggctgtgaatgttgagtgtttgaagatgtactatggcagaaggaaagaggaaacctgaagtgtttgtgcaaatgatgtgatatttgctttcaaaggagtcattttagtaatcagtggaattctgggtcatacatccaaaaagcgaacactccaccgaaatcatgaccatagacctgagaatcaggcggatatctatgtctgtgactctactttcatgtctgaaatattgatagaaacattgtggtacatatgagcccctatattcaacttaaatttttccatatgagtcagatttatgacaagaacaagatgtctcgtgttaaagatcagtgtgagagaaaaatggcagtttactttaattagaaaaaaattgacaccaagagctggaataatccagtggcgtttgaataaattagaggactgtacagacagaaataaaaagaaactcaacaaggataaatgggaagttgtccaaagtgcaagaaaaaatgtgttcctcagtgggacagaagtcacaggacacttcc

SEQ ID NO: 106914 - DNA, 1055 bp, Homo sapiens
acccctgaccttcaccattagcctggtgtttctcagattccctgatgatattttcatagggtatttgttaaacacacagcttcctaggcctttcttctgaaacctggactttcttggtctgagatggggtgcaggaatttgcatttgccctacataccctggagtcttgctactcagaggctgcagaccagcagctctgctgtgacctggaagcttgttagaaactcagtctctggccctgccccagacctgcatcaggatctgcattgtaacaagagcctcaggggtttggaatacatgttcaagtttgagaagcaatggaagctgtgtgtttatcactgaggttttgacacttggaaagaacaggacttttctccagacacttgattcacatcccagacaggttctcatcaaaagtcagggctgtagttaaggtggtctggggagcagcccactggggagccaccagacaggttcagtcctcaaaactagtgacttgccattcttacgtgagccaacagagtagaaatcatatgactgaagggaccagaccccatttgcttcctttccttaggagctaccacgagaccttgacttgagacccactccttggctctgtgatcacaggcaagagacacaaatttaaggttctgttttgctcttgtcaaggatgaaaggacctgacatgtgatggtggtgatgagaatgcagctaacatttatgtaactcttactgtgtgccagacacaatgctcaacagacttgacatagggcttgatactatactgattttcctatttttaattttttttattttttatttttattttttgattttcctatttaatcctcatagtaaccttatggggtattctcccctttgtacagagggtgcagctggggcccagaatgatgttatcgcttgcacacgtcacatagctagttagtgaccatacagggactagacctgagatttccctgaccctcagggacttgcagtgactgccagattctggtggctcccagtgggctgctccccagaccaccttcactaca

SEQ ID NO: 106915 - DNA, 1308 bp, Homo sapiens
gatctgggggtgctcgatgggaaaatttgctggaaaaaggtagtgttgtgagagttactgttgttttcaaagtagtgagatggctaatgatctcaactgagttgcatatgtatttccatgccatttggaaaactccttctcccccactcttgcccccgtgcattttgctggctcctgtgagcagccactgcagtagcagcagctctggggtttggtgagctgcaatctgttaaggagataaataatgtgcttggcacgacactcctactctcctctttaatttgtcttacacaaggaaaattataattaaatcattcagggtaaacccttgagtgtagagaagggaaaaaacacactttggtaaagattgccaatagaaacccacttccctgttgcgcagggtagagacatttatcaatattcagcactattacgggaggagcggcccatgtgatttgtgaggcggatgccagcgttcaaatcaaggcttgttaagatcctgtccctgtgtaatcatggacattcagcatcattagaattcagtactggcaccatgcttcgtgctttgattttctccgacaatttaataatgtttattgtgctgattgtatataaattcattggtgcaataaacatgcctgtgttgtcagtgcctgagaaaagtgtggtggggatcaagttcaatggcgcagctaagggggagcagcaagaggaagcaggtgcattcaagcctcttgctgtcattttattccatagggacagagagtctcgacttcttagggaaacagacaaaactcaggcctgggataccggtacatatgaagatactgtcttgtttccctgtctaattgtcttgctttagaaaattccaggttttggtgtgggtaaacagaatcaacagaatgcaaatgaaacatctattaaaatgctaaatttagtaaagccctttgagcttcttggatcaaagcagctatgtaaatactaatagcaattactacttaagtaattgcctaaattaaaatttgaaatatcacattacattatggtgcactagggaaagggacaagaactcacatttaatcagttccttctctgtgccaagcactggctagacttttgcatatggagtgatgtctcattttatccacctgaccactcaggaagcagtaaggatgattatacccattttacagatgaggaaatcgaataatagaaattaaataactaacccagggtcatagaactggtggttagtggcatatccaagatccaaattcagatctgtgttttagtctgcaaaatagtact

SEQ ID NO: 106916 - DNA, 1075 bp, Homo sapiens
cgaagaactaaaagatgcattaagcatgttggtttggaagagtttgaagaatagatagaggaatagaatggtggacactgacaatctttggagccattgagggaaatgtggcttctgttgtttctggcaaggatagatatgtatgtctggaagccaatcttagctcttgctttacaatctcttatgatgtcttcttttttttttttttttcaagaaagaaaaccttagagagcattaaagaaaaggttctaggctgttgtcctttgctatacttggttttgatgccctaaggttgatgcgtccatttgctgcagagcgattgaattacatctttatccataggcagagcaggaggccatacactgaaaaacgccgactgatgcacttaaggtatttgtggcaatctcatcggctgttgtggagcctgcacagatttcctgtgacatagaaaactcttcttgtttagatgcgctgtgctcagtttcattttctaaaaggttatgtatctgcagtcaggtgatagattagcaaggaggcaagtgggagaagaatagcccttttcatgtcttaaggcacatttgaaagtaagtggatctgagagacagtctaattctgggagactaagtttgtttgaatttttttttatggtccttatttgtctgcacaaaagttgtgcttaatcttcatcatactacacaccagaattagaatatggatcagaaaagaattcagattccaatgagccttaatctggatgtaaaagcaggctgagttttccaattgtacatgcaaaaaagaagcaactatgaaattatatgccactacttaatctcttgaatctctcagtttgtattatctagtaggttcctaaacgtggctggattaaaagaaaattccagtcagcacattttaactgaatgtagccatcaagacaaatgagcaccttcagttaaagatagttcagtttaagcttgtggaattgataattaaaaaatcaattaggcctggtacagtggttcatgcctgtaatctcagcactttgtgaggccgaggcaggaggattgcttgaggccag

SEQ ID NO: 106917 - DNA, 1601 bp, Homo sapiens
cgaaaaacccccctaacactaggctttgtttactgactctttgatttaattgctgtttgaagaggacggaattagctgttaattgatttaattatccaatttgtttgtttcaggcatgattccaacagaactgcagcagctctggaaagaagtgacaagtgctcatactgcagaagaaaccacaggcaacaatcacagcagtttggatctgaccacgacatgtgtctcctcctctgcaccttccaagacctccttaataatgaacccacatgcctctaccaatggacagctctcagtccacactcccaaaagggaaaggtaggaaccagccactgagatgggtccaaaactgcctttaacatgagaggggtgggtggccctgcctcgtcatatctcagtgatccctaattggatccatgtgacttgaatgtgcatataattactgaggaatgtattcagtatggtttgggtgtgaagcatctaattattttcaccttttcaacatggaattagcacttatgtagatctactctcagcttaggaacccgggcagaagtcgtgtagtttctcattggatgggttggatttccaggcttccaggcctactccttctgccaagtgctcactccgtacaagctgaattccttggctggaagtgccttctaagggaatagtagtgtctgctgtgggcaattttgaattatggtttgagaaaacatagaacttatgttactctacattgctccccttgaaggctgggcgcccatgtttttcatcattgtgccctggagcacatggtctttcccgtatgtattctgagtgaaggtttggaggatggagagacagaagaggtagtggtggtggtggctggtggaggtgggggatctgttgtatatactcacataaacagacacagcacactttctcttcattgtgggatatagtgtagtattgtctcagcagctgtattcctatttagaagttaagacattttatttttgaattgccctgggctttacatgaatgttacttgaagctgagcttgttttagagatccagaatatgccatgttagcatgcagttctaagaaaataaagctgttaattcatgttatggtattcttagtacccagaagcattaataccactgttgaagtgcttttcaagaatagaaaatacaatgcccctaaaattgaaaactttttgtttgctattcctaaactgttttctatatatttcataggcagagcttccacacacagaggtaaagaaaccgtaaaagtagtatgtgacagtaaatgccatttctctcaggagaaagcaaattctgtattgtgttttttaataaaaatggctcagtgaaaaaacatttaattatatatttcagttatgcaattacaaatgtaatttcatatatttctcaaaatattgagtatttaagaagcctactgtttaattagatgtgtatctttataccagaaaaatattatctgaacacacacacacacacagatacacacacacacacagagatacatacatacacacacacacacacacacacaccatgttcaagtgtaaaaccatgagtggttaccagag

SEQ ID NO: 106918 - DNA, 1071 bp, Homo sapiens
tgaaatgtcatggaaagcgggttttaatggtattgcacataatatgaaagaattgagacatctgtgtgctgggtgaataaggaagagtaaaaggcatcatgcgaagggtctgtgtttaagttcggaaggtgtgtccaaggttcccttcccagcaagtataagcattgattggttgttcttaaaatcactgtccacagagcaagtgtgctcatatgggctccacctgcaaaggtgctggttaccatttgtcttctctcaaacaaaattcaagtctgggttaacttcccacagatggttttgaccaaaaactcactctcaataagcaattgagaactgtcgtatcttaactccagttagcatttattaagtttgtcctttttgtgtgcttgcaaggctgcctggaacccccatcagtactgcaagattttacttttctttctttaaaataaactccatgatagattaaataggatctgttgctgcatcccctctggataaatacatgttgcatgggaaattggtcaactctttaagcaggctgatggcagtcagctgctgaacctgggaggctgcgtgcttctgatttcctggcttcctatttatccttcattaacattctaggttcccgtgtcagtggctatgatgacacctcaagttatcactccccagcaaatgcagcagatcctccagcaacaagtgctgagccctcagcagctccaggttctcctccagcagcagcaggccctcatgcttcaacaggtaattgtccttcctccacctccagcctgtctcccccagaacccaggggcccccatcactccattcgcaatctcccctccaccagagcagctcctttgctcagtgaagagtaaagcagcgtgggtggggcaggacacagaccactccctgaataatcgatgtgcttttgcatgcccaaaagagaggagccctgccatggtgactagtgtttgggcctggagagtacccgatggactgagatcagggctgtaattggacttggtagcagtaagatcttttaggtttacatggctcctaaatggtgtgaatcaa

SEQ ID NO: 106919 - DNA, 1024 bp, Homo sapiens
ttaagggacaatgttgtttctcctttaagaagatgcttctagttttacctgagttaaggggaaaaagtattttaggagacatatgtaacttttaaaatcagttttattgagggatgatttacgtgcgctcaaatatactgattttcagtgtctagttggaagagttttgacgattgtatacacgtgtgtgagcaccacctcactcgagatatggacatttccatcgcccccaaaagttcacctgtgcccctttctagtataaggtttctatagctcttttaaaaacgatgaccaggaggttatttctatcatgatttctgctctaactctgttaagttcatgttcatcaccagtttagattttacaccaccctattcctgtctgttttcctgttcatcaccatcagaatttggctcaagaatatttatattgtacatcatccaagaaacgcagaggaaaaaagaaaccttaaacatggttcttttgtttgcttaatcaaacctccccgtatgatgatgcaactctcaaggaaaagtaaacttctattgtgatacgctggctttagcagctcaaaggataccgattggcacccaaaagatacttaaaaatccgaaaagtttcttctgtatgaagacaaagtagactaactggaattaatttgtagatggttagatgttttgataatgtcttcctggtgtttgccctaaactgaatgcgagttcactgttccaatcgttggtgatatttcgtgctacaaattatctttttaaaagggtaatttatccattcatatacatctgtcccattttgcatatgaaaatattcagacatgcccatctgttttaaattacagtgtatctacatctacacttaaaaggccactggaataggaagaattcatggatgaccttccagagctgggttaatgaaatttttcgaatgttctaactagtgttttccaaacacacgacactggcacatcaacatccccacacatgaaacaagcccacaacaacagtggaga

SEQ ID NO: 106920 - DNA, 1049 bp, Homo sapiens
atgcttaaaaatcgagggtttgcctgtgggtgggccaaaaatactgtcactcttcgggagggaaataacaaattacacttggtggtggtggtggcagtgatgttttccccccgatatctgaagggtacagcactttgggacatgctctactgccccaaaacatgtaccttttcaagaactttgcacacttcagtgtaatctgttctaaccccatggcagaagcagtccattaacaaattttacattatgttaaaacaggggattatagtttcatcataaatgagagagggtaatttattactgtcaaatgcagagttaggaaaggatgttgtcatttttcttttctgtcatgattttgtttacctctgatgcttatgaatgcttttagagtaagggatttgtttttaggttgatgttttccatagctcatcatacttacaagtcacctgaatgttgacatgtcacactgtgtatatacaaattaaccagaagcaatggctttataaaatgttgcattacatgaaaatgcaaatggcaatttggaagatgcattaaggggaatttaaactcctatggaacagtgagaactcagtgttttcccttggccaaacttgcaggcacagaagaaaaacaacataattagcttcattgtcaacatatgcataacagtgacataaacaatatcaatatggagctaactgccttagctccctgtagatggatgatgtattaatttatatttttaagtaaaagcactgcttaaatcaagacagaatggtggttccttggagacaaatccccagatctcaggaatggggcattgctgttgcaatttagtaactctaattggctgccccattgccattctttggagaaatacttaaagcagtcctccttctggggaggcgcgctttcctgagtaggccatcaggcatgttactgggcttacattttgtattcctgttgctttagctttctctctccggaattggaatcagttggttgaatctctttaagttctgtcatttcagaatatgtcctggatactc

SEQ ID NO: 106921 - DNA, 1026 bp, Homo sapiens
atcataccatgtctccatcctgctgccttcatctagttaattagcattccagctttgcattaaattagatgtcccgagaagaagtttatagccttctgactggggagaggggagagagtcatgaattcagagtcatcattcctttgtaaggagctggataaaagtgcagtccatttgataacagttcagagtccccaaaatccagaattgcagatactgtgtactgtgttgcctgctgtttagagagaagacctttggtgattaaattgtgtgtgagtttaatttcaggagattatctttgtctgctttcttcagaaagaaactaaaaaccacatgatgtgaagggctgtcccgttcctaagttctccaccatgtgactgcctgcttcttttccattggtatctaccactgccccctagaaggtttcttctgatctcctctgactataagaccttaaggcgagacactcccttgtctgcacatgggagagccgctttgtcagacttaatgaaattgcttttaataagacatcagtgaaattatgtctggtttgttgtttgtttgagagcgtaaagggattgttatttattctagaaacagaataagagtctgaaccacatagaattacacaccgaagaggttttgttgtgactaccaactttgttgaggatatgaagtggctctacctagagtgctgtttgaaggactgtgggtctgagatgggctctgaagagtgccacgattgattaggtatgtctgccatgggcactggagatgggagaagtgctatgtgcaccttctgtttgccaagcttgccatagacctatctgaccatagtctatgctgatccatgtcagagtggagaggtctttttctctgggaagtctaatagactctgtggtaactattgaagtattatctaaacttaaacatatgctttgtgtttttccctgtaaccttaaatgagactgggcaaattgcattcttatcctaaaaccatgtctcttcttgatcagctctgaaatg

SEQ ID NO: 106922 - DNA, 1049 bp, Homo sapiens
agctactgtggaggcaaacctccctgaggttgcctacaaagggcaatgttccagtgtgttttctcttcgagtgtgcttcagccgcacagtacttcctgtttattcaaacatcttttttaccactcggcaacccccgcttcgcagaaacagccagaacccatctacagcaagaagacggaaatccaaaggcagacagtacgggctcccttcgccaaactcttcattttctctgtaagtgtccagagaaaaagaaacatttttttgctgggttaaacttttaaactagggatccgttcttgtgcagacattctctgaagggcgaaataaggtgatccaacttgtttactgctttttttcctcccccttccctcctctctccatcagaggcttttttctttttagagatttgagaggaccgtttccttctaactccttgtttaattcactcttgttttcaaatatgtctttggatataatcagctaagtaagcagccgggtggtgtcaggatagttttataggctaaacgtagattggaacctctctctgcttactgtgacattgtttcgtgttgccttctttttcttcctgttatcacaagtagtaagagaatgtggggatggtgcctttgtaattctgcatctacagaattgtcccctgatgtttgcatcacgacaccgtcatcatttgtgaatcggtcttggtaatatttgtaccaatttcatgccaataaaagtcagactgctgaaacacgcacggtcattatctcattcatattcctattgtttcaacggagtgggctgcagagggaaagggaaagcctgcctcactttccgtgatggttgttaactttgatgttggaaggctcttttcaaaattttccttgtggataatcagtatagcaggaaaagcccttggacttgggctgcctcctggctctgagtagaagagcaatctaacggctctcttagtcctttctgttgaaatgactttttaaacacatgatttgacatttttgaaaaaggttccaccttttcctgtctgtagtcac

SEQ ID NO: 106923 - DNA, 1085 bp, Homo sapiens
atggcaaaatccatcccttcattagtttttgttagtgaaattgctggtggacattgagtagaagaagaaagctgtctcacaaacatttccagctttttaactgcctctgtgagaaacaatgcctgcaagaaatagctgttggtgtctgtactggcagcaaccaccactggatgaaggtgcttattgcatctcattctttggatctcatttttacccataggcctctggggcaccatattaaaattccagaggccattcctggccttgtttcataccttatgggaaatgacgcaggttatatggtatggatctataggtgtaaagactgggtagcaatggctggattggccgtaccattctaccacttttttctttgaaaaaggtggcttatgaactttgttagaaatgccctcaattggcctttcccgttgtagctgctggagactgactgtgtctgaaaggagggtctcttgatgctgacagggaaaagctgatcagcacctctgtgtcctagaaggggaacttccagaaagggggcatagaagaaggtattattagtatttattgaatgctttcatggggccaggtactgtgctgggggctagcaccttcccttgctagtaggtaaaaacccagctgtaattttaaaggaattgctatgctgagatacacttttattgaagaccttgcatagttcaaataacgtgaaaagtattgatggtcaaaaatattttgtgtaggaatcaatgccaccaaaatgttagtgataaccgtacaaacaaattgaaacaaaactgagacaggattcagataattctgacaaataaagaaaaagcagccacaacactgaccccccaacatgttcttaattccctttggggctgtttctagaaaaggcatatttcaccctgaatgctaaatttagttctctactctgttagtttagacctgccttccatcaaaatattgttgtcaaagatttatgtaacttgtgatttgagccttgtatgaaattctttcaagttttgattactaaacagttatgtgtcattaatctctccattgaaaattaaaatggcacaaga

SEQ ID NO: 106924 - DNA, 1038 bp, Homo sapiens
agtgttgctctctaagctgtcattagaagaaatgttgactttattgatgttatagtcctcatatagccaggagacagcagcaaaacacatttttttctttaagttgaactgagaattcagtgttagttcacgttcattttatgatggggagaagagtatttgcacttgagaattttccagtggcctcccaaagggctgggttttatgagctagtaataatcactgtgatttattgagcacctactacatacaagacactttacatacattattcctctgtgctctcagaacactgtgcatttttcatggtagcacttatcacaattctaatctccacttatttatgtgtctaattgattaatctgtgtcttcttgattagacaatcaccttcatgttgatggaactgtattgatttttgttccatgttggcaccctaacactcagtacagggcctggcatattttgtattaactatagaataaatattgcttagaaggacgagtgaaatcagatgcagaacagcatgattttatagatgaggaaatgagaatagggagtggtgggatatcttgttgaaaacttaaaaattggctgagctagaaatcaagcccaagtatgtctgcctgttttccaccagacctgccttcttaaactttaatatgcatgtgaatcaccttggggatattttaaaatgcaggttctcatttagtaggtctgagatgggctcaggaatttgcatatctaacaagctcccaggtgatgcctttgcggctgtccacagaaccatgctttgtgtagtcatagcctgcaacacagttgcagtgcacaggttgatcactttctcatctgttggaggtatatgtggttctattggaaacccttgtcatgagacagatcccttgtactagtctcctctggaaggtgccacaggggtctactcttggataaatgcactggctcttctcatcaattggttgtgcctaggttatgatcctctctcccccgctcctctctctcttttgggggagaacgtgatc

SEQ ID NO: 106925 - DNA, 1049 bp, Homo sapiens
ttcaaacgatcctcctgcctcagcctccagagtagctgggactagaggcacatcacacctagcttatgtttttattattattagtagtagtagtagtagtagtcgtggtggtggtggtggtggtagtagtattgtagagaaccactgcacctggtccccatttttcttgctttttttttttttttttttgagacagagttttgctctgtggcacgatctcagctcgttataacttccattgccagggctcaagagatcttccctcttcatcccaagtagctgggactacaagtgtgcatcactgcaattggctaaattttttgtatttttggtagacacagggttttaccgtgttgcccagactggtctcgaactcctgaactcaagggatcctcccacctccacctcccaaagtgttgggattacaggcatgagccaccacacccagccctgaccctatcttctttttgttttttttgtcggagtttctattctctgtttcattttttgagatctatggatgtgaataagcttcctgccgtaaagaagacatcattatttatttctgtagcttttgtgtactaccatggagatgacatggagcatcagttgaggggtcctgtagagtgacagctagcagatgggtagaataactattattagtgctgcttctcctctctgtcagttctcatagcagacattgctaattgatcacagtactttttctcagcaagcctgactgtggcctatgaatcttcctctcaaggagtgccagccactgataatcgatagcacttgactgaaatgtatttcccctcccttctctaattgttgtgatttactacatgtgaaattggctgatgagatattattaataaatagtggcacatcttttattttgatactatcagattctttttatattatctcagtttgctaagccacctagccccttccaaatgagctttttaaacacatgctctttcttcagatgtgacctgacaagagagacagacaacccccagaaatccctttcaggtgacgatgct

SEQ ID NO: 106926 - DNA, 1053 bp, Homo sapiens
taatttctaaaggatgatttgacaacagtattttatgctttttgtttatttgtgggtggggggggtggtgattggaggaggtgggaaagagctttatcatgtaaaagtaaccatcctagaaatttcaggtaataaattttcaggtgcatgaatggttaagactcttcactcagtgacacagtatgtgaatgaggaatttttatgaaggtaacggtcttgttctttaaaaatctgatttatttagcaggtacttctaaatgaccaagtaattttaaccttcagagaaagatggggagggggtgggtgggtagagaaggcttgtatctctgcaagggattgaaaattcacatcccttttaatgattaaactggcacggtctttatttggatgttaaaagccttttcttacattgcaaacattcttagcaaatttacagtcagatatttggaaacagctaacacttgaaaaaaaaaaggaggaggagggcctgtttgaactaggaaacaaaattagtaggaatggctgaaaagacaggactgaccccaacaccattagctggagaaaaaaaaattccatttcattgcaactatgttattgtttactttaccatacacatcctaatatggttacctccccgtcagaggaggccaagccaggggttgagaggccccctccgggagaaagctcctaactgcttctcagacaataagaaacaaacggtacaactccacaaaaggcttcccggaaaataagtgtcaaataaatcctacggaactctcgcttctgccactgagctctgtatatgcaaacctgtttttatgccatcgcttccccaggctgagctgcgtttgtttggaaatgtaagccactgccttttctttttttcttttttccttttttttttttcccccctcacttcatctgagggctctggattaattccttgagacatatctttgcatacatatctcatgagttatgtttcctggagccttttactaggaacattaaggtaagaatgttgatttagcctgggacctttgtcactcaaac

SEQ ID NO: 106927 - DNA, 1067 bp, Homo sapiens
tttttccagggagattttatcagacttacaagtcaaattagttgaatgcatttcttttgctaataaacagagaacctttaccctggaagcatctccccactgaattccaataatttagtgtttccttgccttaagagctcaaccagtaaatgacctaggcatcaaaagaaatttattagcctaaaagaagattgttaagatgggagaacttaagagtatgaaagcgaggaaacataataaaatcaaaatgtaaatattgaatacatatatgttaggtatttttttaaaacttcattttagagggttaggcttaactctcccccaccccaagcaaaacatttcggggtacagatttttctgtctctatagttgcatttacttctatgttgcacatggggacagtgtaaggctaacgggctattatattctgacctaaacaattcctgtgtttctaatttagaagataattgcagtcaaggtaggacaagaccattttggatggtggctagtctgattgctgcctctgtcttgagttgccttatgatctataggtccgaggttaattgtgggaagattttggccatgaaactacagcaagcctttacaggaatggaaaaagggtgtagtttctttcaagtgcatttattagggtaggtgtgatcaccgactcactgcttggcgttaagtgggcccattggttattgctgtgaggtggttctaaatcctccttttaaaaagctccgttcaagttgctgtgaccttctcatgctgcttgctcccaagtatttcaaatgttgcaatgctgggcattttgtcaagctcataactgaaatgctttctccatataagatatggagtttgaccctatagtagagatatgaatgtggatttgcttttaccctgtagataagatcagctacagtgaaagacacaggtaaatagaatgcttaggcagaaactgttggaatccagtgtacatgtgaaaagagtgaaatttttcagggctaacagtaaagccctcttcagtgtgtaactggaattcaccttctctagtatttttgcacaag

SEQ ID NO: 106928 - DNA, 1040 bp, Homo sapiens
taaatgaaaaaaaaaaaaaacaaaaaaaaccccactctgagtagctgtgagtccaggaagggcctgcatgggtagtggtgccactgcagagtgaagtttctatctgtctacgttcatttaccttcccagatttttgtcttccttctgcacagatgaaccacgaggctacatgttgggtaataaaagaagtaatgatacaggctggtgatagggagaccctggaatttgattccaggctggctcagtgggcacaggaagctctctcttaatatctcagtgatagagatattaaatcatcctggtggacaggtggacacctgtggaacatcacttgttagacatccccaggttgacagcacaccagcgataaccgccctttgggtgtggtatgcctgcttgcatcttcccagcccactgatgagaatgtcacaagggacagaatcaggggactaacagaagtctgtaagattacatctctcatttcccctttatctacctgtcttatcacttggtcagaggggctggcatgatgtgtctccaagcaaaccatgttggttgtttttctcaaagtgatggtaaaaagattatttcccctcagtatcgcccctggtgtggaagagaagaagatcggttttaattacttggctcatcagtttttgaagcttcttcattatatcccactacccccccaactttcccagtcttctggggcttttcctgccccttggaatctcggaaatacatttgtcagttctcaagcattttggaatactttatccttgtgatgtgactgtatctgatttttagaattattttccgcctccttcatctagctgatggcaatttagaagctgaaataaattagccgggcgaggtggcgggcgcctatagtcccagctactcgggagtctgaggcaggagaatggcgtgaacccgggaggcggagtttgcagtgagccgagatcgtgccactgcactccagcctgggcgacagagcgagactctgtctcaaaaaaaaaaaaaaaaaagaaaagaaaaga

SEQ ID NO: 106929 - DNA, 1038 bp, Homo sapiens
agaagtctttgttaattttttgtcttttctctctccctacatttgtatttgtttaccacagatctttagatatgtttctgttggaaggaagtattctctttttttgagacagagtctcgatcttgtcacccagactggagtgcagtggcattatctgggctcagtgcaacctccacctcccaggttcaagcagttctcctgcctcagcctgccaagtagctgagattacaggtgtgcgccagtacacccggctaattttgtatttttagcagagtcggggtttcaccatattggccaagctggtcttgaactcctgacctgaggtgatctgcccaccttggcctcccaaagtgctggaattacaggcgtgagccaccacacccagctagaagtattctttaaacagatgggtgcagtagcatttacttcatatcttgcaccttgggagggagaatataacttgcctaatggcataataattgatttccccccttgtcactttagaataagactttataacgcccccagaaagagtcgaagatgaaacatgacaaaccagaaaaatttattggccaaggtgtccactccacttggtaactttttgagggcctgatctggggttatctgtcctgtaagaagattaagatcaacccagttaaaacacggtgggccccatccctgctaagaccaggttacaggataaaactctcatccctcttggttgttaagacgaaattttcattcacttaaagcataaatcctttgcataatatttttatgcttgttcttctcctgtgtgtaaacctttatttggcgccttctctcttctgtgggattgactttttagggcaaatgagaattttgaagataattactctcctcctccattcctgtatctttaacaactgccaggtcccagtgacactttgataaaatgtttttagagccagtcacttgtgttgctgtggtctgccttgtcgtagaggcacatcatttttgcacatcagtattaacagttcaaacaccctgaaatgctaa

SEQ ID NO: 106930 - DNA, 1048 bp, Homo sapiens
cataggtgtgatcagagcttactgcagccccgaactcctgggcttgagggatcttcctgcctcagcctcctgaatagcttggactataggctcacaccactgaactactgtatccatgtattttttaaatgatgtttttgctgtcctatctgccaaaggcacaaatattccaactgctcaccttgagcattttaggaacacaaacctcatgttaggtggcaacttaacgacgtaccacagatgtaggaaatagagcctttccttggcaattcaaaagcctctgaaagaaatctgaagcttaactgtacaaaaacaaaatattataaaaggtagcacatctgtgttaaccttgtgggcctaccccctcagtatctagtaacaccaaggacctcaaagaaacaaatagtgtactgatgacagaatccttattttatgagcccatttaaaagttgaagctgtagtgacagttactaagcagtgctgagtttggatttgaagtttgtggtatcttttaaaaacactattggtgaatgggactttgtgaatttgaaatgaagatgaatcgtttcagtttgttcctctctgccactgatctggctttgcatggggtcgggaagaaaaaggaaaaacatgaagtctttctgcccttgtcaaattcactctttttaaagggtgaaaatcatgcagatctttcctgaattttgtatattggcatatatgtggtatgtaattaaaggtaattagatgttttgttaattatctgagagtgtgaccagttatttaaaattaccttttaggccgggcatggtggctcacacctgtaatcccagcactctgggaggccaaggcaggtggatcacttgaggttgggagtttgagaccagcctggtcaacatggcgaaacctggtatctgctaaaaatacaaaaattagctgggcatggtggtgcacacctgtagtcccagctacctgggaagctgaggtgagagaattgcttgaacttgggaggcagaggttacagtgatctgagatcatgccactgctctac

SEQ ID NO: 106931 - DNA, 1029 bp, Homo sapiens
aggtggttgctacttctcttgacattcagattttgatgttctcttttgttttcagggtaagacgtgaccttttgaggtgactataactgaagattgctttacagaagccaaaaaaggtaaatgcaaatgtgattagtgaagttatatccagggctgtgtcttttgccttccaggcattttaattcagttgctttttggtctgtatttgtcaaataaacatgtatttatttgcgtgtaaggacatatgtggtgtatttttggaggtcctaagaaaaatggttgcccttaagaaatggtctacaggttcacatttcccccccaaatattatcaaactcttctctgtttgttgaagctgaacttatttttattttttaaatttatttgtttcttgttgacttggtaggtttaaagttagaaaggaatattcacatcacaaaagtggtgattcataaaattaacttgctgcaaacaagagtaacgcatgtcagtattgtgtgctgaagtggtgtcatccaattgatgttcatctggcggctttataatcaccttctttcagaaattaacagtcaggcaccatagcaacacgccacattgatgtaactgctgagcagtgtggggcatatccctgtaatgtcagcgctaggctgccttgttctcttgaccttgcttgaaaatcaaatgagtacttgattttaaaattagaagttttcagagagactaaagtagcttaatgaattaaagccaaatttaattttctcaaattcgcttttgggagggggagtgaaaaagtactccggttaaaatggttatggatgctacatatttacttgatttcaaaagtacctctctgataaaggcaatgatcatcttacagaagatgatcctgccggtcgttttaacatctgatatttctcaagcagtagcatctttgtttcatttagaatttttggcctttaatagttccatttgatttagtagatttgtgtctgtctaaaaacaggttacctgccagcatggttgaacaaagc

SEQ ID NO: 106932 - DNA, 1054 bp, Homo sapiens
gggacatacatcagcagtaaagcacacgattttcattttcaatttgaattgttttgtgtaaaaacaaaaaggttttggtcaggctgcaaaatagtaattttaagtcccagagctagggttttcccccacccaaatggtgaaaatttatggtgaaaacctccaatttcctcttacagtaaacatgaaaattatgatttcactcagagcctgcgtctttttccaatcttaatggcaagaatctgcatacacttgcttgtggaaatgtcataaattggcctcggatcaattcctcaaagatagtacacaccaaagtgccactttcaaatttttagccctcgtgaaataagattttactcttctcaatgatgtttgcctttccacattcagggctgacagcagagggatgagcagggatatattcctataaaattaaaccacttcattacatgctattctgaagagtgagcaaaaagatattaacattttggtaaaatgatgatatgatttcgccaccttaaaaattatatgagcatttggtcaatggatatggaatgaatcctgtaccctcttagtaacttgatctaaattaataaacaaatgtttttcttttcactcgtgccatatgttgatcccagttacatgggcagaaagaggcagcttgtaatgtttcttaaaggattaaacactgttttgcatacgggagtatgcagatgcaggagtaggatgtggggtaaaatgtgttccatggtttctttgtgttttaggaagcttgatttcaattgtttgtttcatgtgacatgaaccctttttaatttaacttagtagctccggtagatacatggtaagagaaaaacattctgtgaacagctttcgccagcaattaactccctgcccctccccaaagtgaaaatggtgctgctttcattcattttgaaaggtccgaagtggcagaaagcatcttgtctacaagacctaactctcttccaaaaggggaaaaaaataagtctttgctttaatgaaataagagatgttgtggatattaaccaaacagaga

SEQ ID NO: 106933 - DNA, 1050 bp, Homo sapiens
gagtatatatgcacatatatatatgtgtgtgtatatatttttatatgtacactttatatgcatatatcaaacagatctttgtaggtacagagtcacaagtatcaacttacaatgtgacaaagcagagaaacgagacgtatatctgacaattgtgactaaacaaaccgattgtttaaaattcgttgaatgttaaagattgaaatgcaacccatagtagaactccagggatgggtatactacaagttctttttggagtagctggagatacaacaatagcactcccccccgccccacgagtgagttcttaattactaatgaatacaattcattttaattgttattatagcaacataacatttaactgactcctgtttagtggtgtcccctggaataggcagtgtctcctgtcagagtgaggacaggtagaaggcacagcgggcgtctgattgagccagttattcatttgctgagtgtttgtgtttatgcaaaggggcctcttcctgcatatttaatctagagtaaggcagtggcttttgttgtgtttagcccacataccttcagtccttcctcacactgccgccagcctgggagccctgagagccagcaggcttccaagcgcctgtagtttctcccttacaaactctcaactttcttccgttgtgtgaaaattgcctctcccgccccaaagctttgcctcctcaccatgaacgggtaagtgtgtgcgaagccaaggctgacacttttgtttcattttactaatgttgagagggtactttgctgcccttctgagcgcctcctgaaagcagtcctggttcctgggccgttgtcagcttctggctgcattgaaatagacaagtacaggtgcctcttaggaaatgtggctgaattttggactcgcagagaaaggctcgtgaggactagggggaattaaaaagaaaagagagagagagagcagctttattattctttgtcctaacaaatcctgttttgtaactatcctgcagataatgctgccattgtttgctaaaagccttcaaacagtgtctaaga

SEQ ID NO: 106934 - DNA, 1037 bp, Homo sapiens
tccctcataattatccactttctataacactgacccttgtcctgctaataaccgaagaggattagtggacacccctgcctttgtacctatttgttctctgagattctttgttttgacctctaagtaatttctttttaggccctctgctctttatgtaacacatgtttttgcagatctcactttgatctgtgtgaacatatagcctcccatttctcttatgtcatttatcctgcttagaaacattttatgagagcataagccatgctttcattttttcctttcgtacacctctttcgaatctcttcagaggaaattcctccttaatacttactatgagctcagcagcagtacagaggtatgatgactgtgacctaaggatgtccagccctgtgaaacgagcgcttcctcgtcctccttgtgtataacggaggtacatatcttgagtcccttgtttggagtgtctgtctggcatggatgctgctgctccactctgccatagccttctctgttcccaatgtctaataaatgtttaatgataattgaaatgattagttatcaatccataatggagaagagcttattaaccttttctgatcacagctacattatccttgagatgaaagtttttgctaccatgtaccagcaactggaagtcagatccattggactgattggggtccctgctgtgtcatggcataaaatggtttcatatcattgatcaatcttctggaaggtatatgccctttgttattacttcaaagaatagccaatatttctatatttgagataatatatgtatagctatgtaatgtatttgggggcctgcactttcaatatttttataaagtagaacagttatagaaaactacccacccactcccaactatacacatgctcgcgcacagatcagttctgaaccagatgtcctatttccatactgtataaaaggtagccattgtctactgagcactgcagatgtggctagtataactgagggactaaattttacctaattttaaatttccgttttaatagcc

SEQ ID NO: 106935 - DNA, 1049 bp, Homo sapiens
acttatggagtaactagggttatctaggaaattaaaatagccatttcttttattaattcataacttgtactcttgcaacttaacaataaaaggacatgattaaaatatagtttaaggcatcaaacgtggttactaatatccttttaggaaaggaaaagatgaaatccagtaagtttcagtcaaagtaagtgaataaatcagaaaaaaaaacattggttagactcatgataaccctcagagtggctaacacccagattttttgcatctctaaaaatatataacacccctgtctccaaatatcacttcagaaactaaaataataattcgtgaaaggggaaacagatccgtgtaatatgagacttgatcaggcagtttacgcgggatgcttgagggcctagatcagcccttgtgctgccctcttctcaataccctggtgcctgaggagcagcggggaagattaggagctttctgagggtttttactttaatgctttgaaattttgctgcatcgtctgagtccaatttggttcagcagtctctcagtgccaggtgactctggctaagatgctctagggctgaattttttaatgccagctttcccaggggatcagtaaaggttttgccctgggtattccaaccaggagagcctgtgtcctgtctttgtccacatctgtccccagtcattaatggtgacacaaaatagtctcccactcctgactcacttcctaaacctggcagtttctttgggattctactcctagaataattggtgcttagaccttcttaggtttatctgtatgtatgtacctagaagaacttgcatttcgtgctgtcaccaatattctgcatgcttaaaaagtagggagaggtggaagtagaattttctaaactcatgaaaaatctaaccctaaaaaatctcaataaacagcagttttttaagagaaacattctagcttttgaaaggtctaccctataatagctacctttactgtctgtatgccagacatgattctaagcctttgatatttattaactcatagtaactctgtg

SEQ ID NO: 106936 - DNA, 1070 bp, Homo sapiens
cttggcctcccaaagtaatgggattacaggcatgagccaccgcacagggcgtgattctattattatgcgtagttaacagagatgagaagactgagtcttggaaaagtcatgtgatcttaccctgggcacgcaatggtcagatggagccaagatttcaaattagactctgtggcttaagaatcagccttttgaggactgactctattgccagtgggcacaaccagggatttttgagcagaggagtctctggtcagaactgtgctctgggataattcatctgtcatatttcaaagcaatgtagtgaggagcccagataggaggaaattgtgatgttctgaagagcggcaactacagtctgcagttgagtgtttgatgagattggaaaggcagtgatggagaggtcccaaaatccttaacgttttgggcggtacttggtgtgaaagacagatgattgggagaatggagttggtattcttatcccttgctaatggaagaggagagagggcaggctgggaagggatgagctgaggtttggatgtggcttgaggtgcagacgttaatttcaggcagagtcttttggaaggtgatgaaatacacattgaactagaggttacgaagatagtcagggctggagatgtggatctgaagccacagaagccagtagaaagagtgagactggtacatttagagaggtgcggggaaaagaaagtggctggagaaggagaccacgatataaatcagtcttaggagataaagaaaaatctttctgcacattggagatgacagatttgtaggccatgcttcagacacatacctatacatattcatgtttgtatacatattcatgtacatatttatatatgtattcctatatacattcatatgtattactgtgtgtgtttgtatatgtatcttattcatgagcatgcgctgttctcttatgctcacatatgtattcttgggagcctttcccacctcagcaagtggggagaggaagagtggggtaggcgtcagtctctccccagagcagctgattggggcaggttctgctccctgctgctgcagtttga

SEQ ID NO: 106937 - DNA, 1046 bp, Homo sapiens
attgagtgatgtgaaatgggagcaaaatcactctgcacccccagcccgtggttcttggtgtgagtgacatagttgcttctggaagcatgacaaatgagccacatgttttattgttgtgtacaaattttatgttggaatttaaacagggtgaaaagggttcacattagcttataccagcaaagtaggtgtttaaaggaagctaatgagactaaagggctggcgatgttttcagcgtgcttagtgcttcatagcaagaactgaaatatcttatgtttctgtcaagtttcaaagagggaaaatcccagcactgttttaaaaaaatgagagtggttaatatgagaattcaaagaaatcagaagcaagtggagacaagatattacttaagcactgttgacatacatattgcacacatcgacttgacatatatacaatcagattagatagatgcttctaaggaaagaggcacaatttctggttttagcattatttgcacacacaaagctctgttaaaataatgttaagacattggagtgttagaagctatgagtggtacgaagagtgttttcaagcttttggaggaggataaaaaaagaaaatggttgtatcttaaaagctattctgtggacagaaggtagtgatctttctggttttccttccttcctctccccttctctctctttccccactctctctgcttcttccttctttccctgtctctaccttctccctccttcccttgcatccctgtaaaatgttatacggagaacagttaaactgtaggattaggtctgtctgtacagcttgggacctggaattatactagacataggaactttcctgccttttccagtgtagatggagaaattattctaaatggtataagttgaagacttcaaaggtttctagattaactctgtgaaatcagtgagagctttggtggggttttccttccttgtcctctcagctgaaaatatggggtcctcctattgttttctcccatagtactgcagacttgatagctcttgtagacttgaccatacattgta

SEQ ID NO: 106938 - DNA, 1051 bp, Homo sapiens
ttcaaagggatgttttattgattctgtaattgcacagtagaatggacgagctgaacgggacctcagggccaggaaagccccggcttcagcagtgcctcctggccgagccaggttgtggggagagctcactgagcagttgcagcccaaggtgaagtgtgtgcttaaccccttctttccaatgttccccttcaagtttcttttgtgtgtatgtgtgtccaggccacatctcattgtagggatcacaaatgtttaatttcctttgaatctcatgacctgcctaactattattgttttatgactctgcttcttgaagggctcttttcaaaccttgggcatgaaagacatttcataggggggcctctttagaacaatggactctcaatagggacttctcatgacattaaaaaccagaaggcaggcctctgaacaagacttgttaagatacagtagcccattctctgctaataagctgattgctttccaaacccgaaggggtggaccaagctgttttgccaaaacaattggaaattagctctgtcaacttctactgctgccatattttgcactggcatgcatatctgtactgttcccattaatttggttacagcaggaaacatttggaacaagggcgtttttaaaaccaaaaagggattgcagaggacttgacagagtgtcccacttggaggttaggcgggcaggagacacagtttccagaattgcttcataatatcttcctgatcttcatggtcctgttgggcagaatgatgttcagtcttttcttcctgaatgccttgttctgagggtatgagggctttgaatgtagatgggacagtctcaccctcctacgggaggaaaagggctcttcccttatcacacagtatttatcaacttgattaaaagctatgatagcagtgcctgaagatgggacttgtttctgacttaatttaccctcctctctcccagttccactctttacctcagtatagaggactctgagatagccctgttttgagctgatctttttcttggaattcattttcaggttcctgga

SEQ ID NO: 106939 - DNA, 1183 bp, Homo sapiens
tccctgtgccatcaggggatggcagacaatgcaggtaagtgtagacacgcctttgcttgcctgccgaccagggcattcacattcatccaggtaaccagtcagggaagagaaaactcacgtgggggattggatgggcttggagctgctctcccgagtaacagaaaaacaggctagcagggttccagaatacattgcaagctggggagaacttatctcaccagggaggaaaatagagcccccgtgaacctgttttatattctgtttgtatagcatgcacgtttttaatgtggatttttattttagtttacagacccttcccccttgcacaatctgagattattcaaagtctcccctgcctgccctctctctgatgtgtgatgtcagatactgaatgtattggaagcctttgcatgtttttatttctcatggttgaacccgtaaagttgtttccctgatcaattgcacgtgcatttcaggaacacacatgaaacccttgctctgttctgatagacacgtagagtgtttatacatttagagacaaagggacacagcaaaagtctggcacctacagtctgattttatagttttaaaaacaatgcctaaagtggttgggggtagttcaggctgacttgctgtgttttcttcagggtccttgtatgtcaatagttcatgacatgatttttaccatttgatggctgaagtcttacatatgctaacatatatgagttacatataagaacatgtatagagttacatgtaataactctaccatcatcactaatttgcccatcgctgagaagagggtaaaaggacaaaatgagttactcaagtcactattttttttttaacaccaaaagatccaagaagaccaagcaggtacaaaatgatcagggtgttctaaccattagaatcattcaaattattttgtctgtcttaaagctcagactctggtatatccttggaaacattgcaaagaatagttcctcagccaaatcatggggcttttttttttaattttttttttttttttttttaacatgttcacatttcctgtcagtgttaagtgtcgaactgctttgaaggcttgacttaggagctccacacttaagcctgaaaatgaatgtaaatgctgtaaatgctgagttctgcttctttggatgggggggatagggtgcttggggat

SEQ ID NO: 106940 - DNA, 1058 bp, Homo sapiens
tttaaaggacttatgtttataaagccccttttcctttttaatgctcaattcgtagacatgttgggaaagaaatttcatgccttatgactgaagtcacctctctgagattttttaaacttttatttacctcgtatttcatagacctatgtgagattgtatttagttatactttgttatggtttagcttttctaaaaataaactttgtgaatatttatctaatgaaacaatgattcatttataaacagccccttaaaaaagaattcctcaattcgagtggtcagattgcatgatcagtaagtgacccctattcattttacattgcacccctttcttccatagggtttacatgggcaaaaattatatctgagaataggattttctgctgcttgtagaattaatccctgtttgtatgggagaggacaagaaaaggttgttgagggctgatgaaaggaaaccctcacaaagttgcaaagagctgcctttgaacttggtaaggttctaggaaatagtcctttgcctgggctgctcccagccatgaaattctgggttttaaaggaaagatgtgttgtaatgttgcccatcagtgtacatcttggagcctccttgcaggttactgccacacacacacaaatgcatgaaaattacatttcacttcttttaacaccggattaaggggagccacagagggtgtttagggtggaaaatttaaggaggcatttgctgtcaatgctgatcttgaacttggacgatcctgagagctagtgcctccctaaattttgcaccctaggcaccttgcttgcctcctataatttgggccctgctctatttttgcaattaagaaaaaccttgacccaagtaaaacacatcaattttttgctctttctatatttctaccctgtttttattaccaaaatttaataatgacaatgaatatgatcatataatattgtttgattactgtttctatgtagtttccccgaattggcaggcattctgtttctgaaccaaaaaccagtttggggttaggtctggtcataacacgcattttgttctttga

SEQ ID NO: 106941 - DNA, 1048 bp, Homo sapiens
tgcaaatcagagtaaaaaggcagaatatttcaccttgtcaagcacagggatattacactttcccaaaattaaaaaaatgtatatttcgtttgatctgatgcttgtttggggtttttgaaaatggggttgcaccttgagaaattgacagtatgtaaagttctgatcctgggtgatttctttatagcttgacatgtgtctatgtaatgtgtgtatgtggacatgtatacattggaaggatttttgcctgcatgctgctttcatggttaaactcttttttgagatttgcattgcattaaacaaaaatgttggcattctgctcacataagcacatgaaaataatctgggctgcatctttcttgaggggcaatgtttttgattgttggagtattatatagcttgatgtggtccagaagtgaagtaatcttgtatcaatgagatagcattgtaatagcaagccctttagtaaaggtttagtgtaaatatctgactggtaggggagctggtttctggaacagttgtgcctctgtgagattacgaaaatggagagaaagaaagggctgaactctaattttcctgaaattggtgcgtggtgctggagttgtagccaatactggttgagatgtgctgcaaggaagcctggagcacaatagtccctgtcctgtgcccccatgttgggcactgggaagcggagtgtgttttgctaaaaggaagaaagtaaagagaagaaatggctaaggcttgtagtaaacaaacttacccataaatatcaataaaatcctatttcccaggcatatctcttcgagtgctttgattgtgcatgtcagagcaactgcaaattttgacccagtggttaagccctttcccctagtatttttgtgtacaggagttctcagttgctgcagtgtgagacatagtatactaaaatatgctttagagggatttgcactaaatgcgaatctgcaaaagcactgtaattcataattaatgctttcttgtttcacactcctgagtccttttggtcttctactttgataaagttgttgcttta

SEQ ID NO: 106942 - DNA, 1053 bp, Homo sapiens
tttatctgcaatattttgaaatcaggaggcagttggaaagcgagaggagagagagatcaccagggctgtgagtttttagagttcatagattaccccacatgaggccatttctgtcctacagacaggatgctgcctataggtgttgctttgaattttatctataggcataagaccaaagaacttgcagggatgtggagagctactgcacatcatctgtgtgcaaaattcactgggggggaactgatatttgagaaagttccagtgaaaaatcgggctttcagttgagggtggtctgcagcttttacggtttttagctccctggctttccattttggcttttgcttcttttcctccctcattacattcagcaaggaaatggacactctaatatgatcatcaaagcccagctaagatttcataattaccagttggtaatccatgtgaatttctgtgtgggctaagtcacttagtagatgttattttcttcatcatactcccatttggatcccaggaatgactcaagaaatttgcttctttcctcaattaaaatggaaacaattttgcaactgtttgtttgagggaagactggctttacaagaaggtgacttagaaggggtggttttctgggaaagagattaaactatagaatggtcctgtgtgttttaaataatgctgacatattttgttgatgctggctattttatttgattgctatccgttctgaagtcttcccctcctttttccttctttgaaatctgttggttactatggaaacagtgttgttttgggtttgggtggagctgtatccacaaatgcagtataaagtcatttataaaatgggttaatatttattctggctgggcatatatggaacttgatgtaatgataatcatgatcacacatgcagaataaatttgcacttttattgttattttcttagtcagtctaaatgtgtgccattttgcttggaatgcactgtcatttcctctctgatttggatattgccatttacaaggcaacacccagcgccggtggaattgctctgagttggaa

SEQ ID NO: 106943 - DNA, 1077 bp, Homo sapiens
ataatgaatactttacataaatcagatggtggtattacggatccatggcttatgtagggggctgaaggttgtattctatcagaggacttttctagaggtccaagataggtggtattttaacatattttaatttttgagtgattcagcgagtgattaaaaaagaagatgtggaatctggaagacattaaagagatgtcaaggacagacgggttttgatttgtagcctaatgaatgttttgccaacttttaaagatttttttgagagtagaactttaaccatttgcttgtgtttctggcatggtaaggttattcctgtttctgttataatgaatccaaagtgaaaatgggataatttttaattagcaaaattataaaacgatttgcagccaaatgtttcttgtcttgtataaactgtgaggtttcacattttactttaatcattttaggaaatttcattctgaagatctatttcagttggtacttcatgtatgcatacaaatcttcaatattagaaattaccttgtaatattcttttccattgtcacttgaataatctgacaggatttcagtcatgtgcattgcttgtgtgtattttgtaggtgtcatggttaccttagttggatgtagcactaatattcaatctagcattatgaatgcaaggctcaacatcataagagaaatagaaatcaagggttagaaatgtttgctaactctatgttgtatggttttatacagttcagaattgcttttgtcgagcttacctatgtaattatttgaatcaaaaattttatatttttactttttgctataaataatagagagctatttaaaaatatattttattaaggaaatgagaacaatgagttaagtcatggcaacctacacataattcccagacttttcattttatgatgcttcaattgcatttgattacgagagttttacagtttctggaggctcattggagccctacatggagatgaaagaattctatggaaatgcaaagggatttaagtgttcagaatttgagcatctgcctagaatgggacacttccagcaccttgaacttttctactt

SEQ ID NO: 106944 - DNA, 1025 bp, Homo sapiens
atatatgctgcttgtaactgtatttgaacctttttgagactttgccaatttcctgataaaaccaagaatattgaggatgtagcaatgaatgctccaggtggcactatttggtgggtgaaatttaaaccttacatatccttgaagtatgctttttgtgattattaaaagcattttaaaaataagtattagagtttttacttagatgtttgaaaaagaattctgtcatcaaagtgtatgagagttgacaagtgtaaatatgcagttagacagtttcaagggacgtgtattatttactgatcaatgtactgtctcctttggagccattacactcagtcatttcctgtcaatctctccacgctgttataatcagactatggatatgcatattaaaatataagaaagttattgtgtatgtgtggtggcagctttttaattgttaataatgttgctgctttaaaaaggtatcagggtagtttactcttaggatggttaatattctgcagaattgcatgagaaattaggggaaccaaaattcgagctggtggataatgaggccaataggtgggtgtctgtgcttctagtcgttgccccggttacaaaaaaatgagcttttaatggtggtcctaatatggaggtaggttccttctgttcttttttcaaatttttatttatttttatttttttttactactgtgtttttaggaaaacttttgtaattaaaaaaaagttcgtgtatgtgtgtgatggtgggaggctcagtctaatttctgcctgtaacagggatcagcgaatcttttctgtaaagagccagatagtaaacattttaggctttgcaagccacctggtctgttacaactatttacctttgtcccctctaagcagccatggatggtatgtaaatgaaggggtgtggctgtgttccagtacaatttatttacagacgccgaaattagaatttcacatgattttcatgtgtcactaagtagtagtaggattttcattttcccccagccctttaagagtaa

SEQ ID NO: 106945 - DNA, 1048 bp, Homo sapiens
gcttctctctccatggctagactgtggcatttggagtagccacaggacttggaaagcgttggaaaggacttagtagccactgccagaacgcatgcatttttaaatatgtaaattgaaaagggagaaagcttcattctttctaatgacccccaagatggtaatctggcttttcaaatctctaggaaaacagattgaatatggcacaattaatgtttcagcacttctcggcttttctctaaaatatttcaatgggcttttaatttattgcagctcttgattagcagggttgaggcagggttactgctgacctcctgggccaaggtacttctggggctgtagtgaagtggaaaagaacaaaggtttgatagtgttctcagctggagcctcccagggatgagcccctgggggttcactgaataattccttcccctaaagtagtcagagagcaatgcagtgttcttcagatctttatcagagttacctggggtatctgttgggtagaacagcagattcctggaacttgtttaagaatctctggactatggagggtgggaacttgggcttcaagctggtgcctccctgcacactcacatttgcagtccatggccttggtgattgatattgctacagtgtaaataccgtgagctggggtagaaagcaagtgggggtactgctacattttaaaaaaatgtttgagacttgcacattgtttgttagtgcatttacttttcacttactctacttcacaagttggctgttccctaccttcttaaatcaaaaaactttctcctggaaattgtttctttttggtctgaagtaagtcttttagaatgtccttatagagaggtgataaacttctgtttgtttgaaaaagcttctatttcaccctcagctttaagagatagtttttctagttatacaattctacgtaggcgggtgggggtttctgtcatttttttcttttcttttttgtttttgcctctgtactgtggaaaggataatttatttgggtatctatcttctggtatttttaaaaatttcagttgct

SEQ ID NO: 106946 - DNA, 1054 bp, Homo sapiens
attcaataaaagagagtgttttctcttctctctggtatgaatattatactgaagataaaggagaaagaagtgataccagttcagtgttcctggaatgctggccatttctgggaaggattggatgaaaaatctcgagttgattggtcaagttgctgtgttggtagtaaaataaacatcattccactgacaattattataatagacatttccctgacagttaataaagtggtatagaatactactgataatataatccctgttgccagtttggctgctaaatccaagaaacccctgggcaatggttagacaaatacattcttgcattgttacttatttaagtcatgtcacacatgactagacagcatttccatcatttgaaagcctttcgttattgccttctcttcaatgctgtgaatctgtatggacttggacttgcagatgtgttgtcattatcatctgtgttttgcatagccacatgtatttttttttttgatagatcaccttcagtgtaggttaatatttttagcaaaagtaagacataatattttgatcctcttttctgactatttgaaactttgtattaaagtatgggttgttttctcaggaccaactaatgtggctgacatcatttccaaattggaaagccatgtttttctcctaccaatgatgtagctatttaaaattcacagggggtgaaagagaaagcacacacacagtcagctctgacaggcgagacacacacgtggccctggatgggtgcttcatatatggcgtatgtgtcgattggctaagtgaatgaatgaacagaagaatgagtcttttcttttcttttcttttttgagacagagtcttgctctgtcacccaggctagagtgcagtgatgtgatctcagctcactgcaacctctgcctcccgagttcaagcgattctcctgcctcagcctcccaagtagctgggattgcaggtgcccgccacaacacccagctgatttttgtatttttagtagagatggggtttcaccatgttggccaggtgggtcttgaactcctgacct

SEQ ID NO: 106947 - DNA, 1021 bp, Homo sapiens
gtaccttttctgtcttttaagaaagaagacgctgagaatcaggaaagtcaattccctggcttaggtcacatagctaattcaagattgaaactcaagcctttctgaatccagagcctgttttccttctgtctctctggctctgacttattaagtgccccaatttcctatcttctcttggaaaacaccatcacaggaaaaggaatctggtggtatttcctgtctttgggtctgtctgtctgtctctttttaagcagagtagagtttaccctgagaaataggaatattatgaaaaaataagtttctctagattggatgtcccagcgtggacagatgagcccagggacccttgcctctgtcattgggcagctgcccacagggagctcagtgtttttggtgccagtgtctctctcggaactcttggcaggcccaagggtgtacttgcaattgctggtgcgtggtatttgggatgtttgtatgtggctgttttttattttggttttgttatctaccctttgtaatagtaactggcaccatttcttgctgttcagatgttctgttgctttcaaacaaagagatctgaaaatgtaccaaatcagcgggcttcataaaaagtttggtgcattggagccaaggccgaggtttcttgggccatcagtgatgtgcttaaaagtccaatgcgcctttccatgagcagttccccctgcctaggaggatacagatgccagagccgacaggagcaagcagatggcctcaccctgttgttgctgtgggagaaacattagtttcatgtggccagatctcctctcctcatatcttccaaagaaaccagaaaactcaaattaacaaatgcttaatcttgattattaagtgttggaaatagaataaaaataaagtctgtctagtctggcccaagcgaaacaaatctttggaccacatttggctctcaggtcattgatttacaattttaggcttagaacagagcccctgtccttcacccaggtcccccccctccccctgccct

SEQ ID NO: 106948 - DNA, 1068 bp, Homo sapiens
ttttaacagggactgagaattataattgaccagtgagtttggtaaaggtgtaaataggtgtgcgatgaaagttgattacctaataattgaaagcttggaaaaagcatgaattggtagaatcctagacttggcaatggccttataaattagggcagtgcagtttgctaaaagaagggacttgtccaaagttacataccacggttgagacagattcaggactcaaagccagcattgcctcagtggctgcaggaaacaatggaatctcaggcttcatggtttgtggggttttaatggcaagatatttgtaacctttttgttaatgttctcctacctctttaacttgtggtcctaaaaaccttgtttccttctaatctttcattggtgtttggattcacattagtaactaaacatattcaccaccatattagggcactggatatttgctacacttgtaagtgtacacaatatgcgtgtatgtctgtattcatacatattcagcatagtgcacacatttggagtcaggagacctgggtttaaatgccaacggtggcagtttggagaagcgaggccttaggtgaattaccctgacatctccaggtctctgttgtccctgctctagaatcgtgatgataataatacttgccttaaggttgtcccaagaagttaatgagattatgtacatgagacacttagcatggtgcccctgcagcacatacagtattcttgtccttaacgaaagtttattattttaattgattatctgttacccttgacaacaaaggaaagtagtgataaatgccatatttagccttgagtttcaacatttttctcctgtagattggtttgtgtttctcacccttcttgtccccccttcactctttcttttctagcaccttctgcagcatttcttgttttacctttgggtgtcattagacgttgtttacatcattgtctggcggaccagtgctgtttgcaaaaagctcaggtgcttcctctcctgcttactcttattctcttccttgtctagtgacattgtcttgaactttctagctgggaaagactaaaggg

SEQ ID NO: 106949 - DNA, 1027 bp, Homo sapiens
ggctgagctttggtgaaaaccagtccttctctccctcagaccagtggtatttccatgacagcatgctgatttttttcagggagcatatgcgcgcatgtacatgtgtaaataaaatggttatttttaataaaaaaaaaattgttttaccacccatggtcctggttaaaatcgctattttgcttccttttaacagactgcaagcgtggtgacttggaaatatcattttctttctcatcctttcaagaagcaaattcagcgtattgctttacagtcttaacatttttttatgtctctagatacagaattgactttgtcttttctttgccttctaagctgtttagagcaaggtgagattacaatcataagctgaatctggaaaaaaaaagccctattatctttcttgactaccctcattgcctggaaaagaactattatccaagtttcacttaatcatatggtaacttacaacagttgtgatttgtaaaatacatgacgatttggtcttgtctcctttgtctctcttacctctttgtgatcatattctgcttattttaatgcatgaccagccaactgtgttatttttcagaaagaccaccccacatataaaatggagtggtctttaaatgtcttgggctttgaaagattgtttagccattccttcccaagtgcttcaggtttggattttggaaacgtatgtttttgccattggtgtcactgcaaatgttctcatcttccttttttctttgaatttgatcaaactttgttcacttgtagtacttccacgatcagcagagtctgtctagtctttcctgctttttccttttttttgttccaaattttcctttttttttttttccatttctttactttcctttgatacatctttttaaaaagtcaaagtggaaatatatgtaattgaccaatgctatagcagtttatagatgatataaattattaaaagaaataaatacatattttataactggatttatatcataaaatatttctaacctttatagaaggattt

SEQ ID NO: 106950 - DNA, 1058 bp, Homo sapiens
ggcaattttatgaaaataataaaaataataaagactgacatttttcctgacattcttctagaaacttactggtgatgtggtaagagacaagtacagccaagaaactgattgaagtacaggtgtatgtactaagaagattattctgcttatattattgttggtgttcaaataccaatttcaaaagaatctaatagtctatcttaggatgataaattatttggtaactgtaaatacaaagcacctggcatttaagtaactacgcaaatacttgctgtcattataataccatcaatattattattatattttgcctagttctttgccagttccatactgtctgaattattgtactttataatatgtttaatatcaaatatttcatagtccctatttgactttaaaactttttatttgcttttattttttagtttttctaaatgacctttggaattttttgttaaaaataatttccttttttattttgattgtaatactaaatatttaattacctcagaaaaatttatcttttctgtattacatctgctcatccaggaaactaatataattatttattcaagtattcctttttatttctcatgaaaattttgtagttatgtgtctgaacctagaaaataaagaaatatttatattttcttactggttatttttaatatgtacatagttctgttttttgtacattttatatttgattatctttttgaaatttcattagggctgtgtttttgttatatttccaaaaactaagaaatttgacatctgataggtagcaatatcagcaccttttcccatatttctttctcctgctttattgcattggttctgccttacagaataatgttcagtaatactggtagcagttagttctttatacagttctctttcaagctagacttaattctgttgaaggtggattttgttttgttatctgtgtgtctttgtggaatctttgcacaaagacaggcacttagtaaaggatgaatggcatgcttggttgaatattgttgcagaaaattaggataaaataaaggcactaaatg

SEQ ID NO: 106951 - DNA, 1021 bp, Homo sapiens
cttttttaaaactttttgtggagacagggtcttgctatgttacccaggttgattttgaactcttggtctcaagtaatcttcctgtctgagactcccaaaaggttgggattataggtgtgagccgctgtatccagcctaaatttgaattttggtggagaacatattgtggtaaaaactggttttactagattcagaaacccatggagcaaatatgtaccatacttggaagtgattatagtgaccatatattttataattgcatccaaactgcaatatatatcacttgaatagaaactgtagctaactaccaacatttataaataattttatatatacgtagataaccaaactacaaagtttctgttttgagactaatgttgaatacaaataagtacttgagctatcagttaggttttagaaatgtttgagactttgagaaactattttgtaaatcagtgtaagtgttccattgatgttattaaacttttgtaaatgtgcactctaaattgtagttacatgttgttcagactctgttggaaattttaataactcaaagaatgaacatacatatgtacacaatttcttttgagactgttagcaaatttcagttgttggtaaaaaaaagattgcaaacaggacaatattaccatttttatccctgaaaaaaccagtgaagaaccgaacaagttaaatgtgagctcaaaaagtgaacattttttaattctgaaattctgtaactgtatttggaagcctctcaccagtgggaagaagcttttgatggaactcctattttaaatcagataatgtgaattccgtatagaaatgaaattgatgaggcctacaattttgcagcatccaaatttggccaaacatttcaagcaattataaagcaagtttatttatttgatgaatttcatcttgtaaaaatatttgtcaaagatattcagaatagagtttaaatgatgacctataaaatatttgggctgttatatttagggacttcaataccacatagtagaat

SEQ ID NO: 106952 - DNA, 1383 bp, Homo sapiens
ccaggatcaaatgggccatctttatgcatagttaccatttctgcaacaaatacggcttttagttacattttgactaccgaaaatatactaggtactataccaagtataagctgccgctttttctttctagcctgagcacttaattaagacctgacagattgatttttccattaggccagaaggcaggtgtcgtcttgagtaattcttgatttgaatttcttattaagagtctgtttagctccccccccatcactgccaccaaatatgtgtatttagcagagactctctcttacccaacgagttttacacaacgaattggtaacaaccaaaataaaatatcctaacaataaagtactgtttcaaaggtaccaataaggaatgttgccttcctgctgcagtgtgcctggtatccctatagaaggcctgcccgtgggttaatgtggtctggtagtctgaagcccgtgaagccatcatttctcatcctttttttaacccctaacactccactatggacaaattgacagaagacattggtatctgtatagcccctaactcctcagtggatgatttgacttctttcatttttcttttttctttgagacaaagtcttgctctgtcgcccaggctggagtgcagtggtgcgatctcggctccctgcaacctcgcctcccgggttcaagagattctcctgcctctgagactacaggcgtgtaccaccacgccctgctaatttttgtatttttaatagagacggaatttcagcatgttggcctggctggtcttgaactcctgacctcaggtgatccacccacctcagcctcccaaagtgctgagattacaggcctgagccactgcctgtaatgatttgatttattttctttctcttttcaatttccatcctccaaaaatgttatggaaataacttccccaaaatgattgtctgcccgtccactgaaatataaattcccacttacaaataatttttaagaaaactctgtaattgacatttaactccagggataaagagtgttgctaatctcagcctgcatcactggccaagggtgtaaccaaatcctcatccaatgtggtcatgtgtgtcagtcacactgcaacgtggtagttacgggcagcgactcaaggtcggccaaccagagacttttaacacttgttgggtgactcaaagcttattaacctttctgatttaccttgatcttccataaatgtgtgtgtatgtttgtgtgggtttaaaaggacagaataaagaacttacctcatcaatttgttcggtggattaaatgagataatccatgtggaatgtgacacagggtgcctggcaaatacaggagctttatatatgttagcttttctgattattactattgt

SEQ ID NO: 106953 - DNA, 1025 bp, Homo sapiens
cacctaatttttaatttccattttggctttaggtgtggctttattttaatagctgccaaaaagttggcaattgtttttacgtttagaacttcacagtttgcttttctgtaggtttaggtagcattggggatattcgtctaataaaaacttttaaaatttctgttctgaccctgaggcacttaaaaaaaactcttatgggccaaattttaaaagtagagtgtctctactactgcataaagaatttctataaaagatgaaacatggagctgattgaaagaatagacggcgcaatggtagaggacacatagttaccactgtcactggtaatctacagcttgatgcgaagtcattccgccttgtttgttgaaatgttaatcatttcattaagaaaggttaagtaattaactgatatttcattagggaatcaatgacagacctttttttagtgatgtatggtagatattttctaatagaaagtttgccccatttaattatttggaaagaagctagttgattgagccttgggaaggaggggtggggcatcttcagataacatctatgtccataagcaactttaaataattttggagaaaatggtctattagaatagaaaatcgttcagtccccagttttcttttatgggctccatcaggcatgttgttgcagacctgctgttgttttgcatgccttctctgggtttaagaagggttcagctgcttaaatgtgttcatcttattttctaaataatggcttttgttgcagtgtgatgcatgttgacagtaaacgcgcagccgtaactttggtaagcttacaacaaattcttatacttgtagaagcaagttatcctccttgctgctgactgggggtgcttctcccttttgtctggctatccttatggcaactgcagcaaaaggtttaagtattctgggatgaggatggggtgggggtggggacggagggactctccacctggcgaaagttcaccttttctgatacctttttgtcctgaaatcacacacaaagta

SEQ ID NO: 106954 - DNA, 1026 bp, Homo sapiens
aggaggccgaggcataagaatcacttgaacctaggaggcagaggttgcagtcagctgggattatgccactgcactccagcctgggcgacacagcgaggcgctgtctcaaaaaaaaaaaaaaaaaaaaaaaaaaaaaaaaaagtacagttgatgaaaatgttttagaggctgaacaaattctcactgaagcataagtctcctattgtccatcttggattgcagacactcaaacttgtcactgaggggacaattgtgagaagctcccaagagttccctgtatgatgtgcatattatgttttttatatatatatatatatatataattattatattattattttaatcctggctaccttaaaggaaagttaataggccttagtattgctgagatatagaccatatacaatattgactcattaattcaacaaatatttcttgaacagctatgatgtgttaggcactggggatacaaaaacaagacatgacatcattcctatttcatggagctgacaatttagtggattggtaaatattaaaactgaactactagactataagaaatgcaggaagtgtatcttagacatttttgagttgcacatacctggcatgtaagtatgaatgcaatgcatgtttgaatgaaggaatgtttgaatgttgtcataagcggtgtttttttttttaagtcaaaaaccccttagatttctaaagctgagtgtttttttactaatctcattattgttttcaaattctccaataataataatagcttagacactgaattcagtaaccacagaggctgtttataatttgttggtgctttttaaacatctttgaaagccaaacaagcccttgactcctggccaataattcactgtgtcttcatgtatatacctgaggggtagcagtcatcaaaaggcctgtgcaccagcatgtgaaatatggggatccttatactgtggaatgtataaagattgcttactctgtaatttttaaaagccctgtaactctttataaagcatatatagc

SEQ ID NO: 106955 - DNA, 1045 bp, Homo sapiens
ccgtgtccggccgctgctgccgtggactcctcttccagttcttcctcatccactgggcaggtatttcctgaacacctacagtggagccacacacctgctatgcgctggagattcaataatgagcagcagctgaccttgtcaggaagggggtgaattatggctttctcaagggacaacccaggtgccatcttttcagaaagaccccctgactaccgtatctaaaatagaaaccttgctccctcgttttgtattctcctgccctgccttctttttcttcctaatgcttaatgcagctggattttattatatatgaatttgtttactttcagtctgtctccccagctcctcaacacctcccctcagttaaggataaaagagcagtggatttttgtttttggacattttggacctagaactgtgcctggtccctagtaagaacaccagaaattgttatgaatgaatagatggatgaatgcaaagccccttcttagtgtctgccctgcagtgggtgcccaatgatgacacctcaaggttgtcccaagagcatttggaaattttgatgaaaccgtgtctattctggctaagtgttaggaagaaatgtgtgacagtgttctgagaagtttgcttggtacacacaaatctggttttaaaaggctttgcataaaatgactgcaagattttgttttaaaaaagtgatattcattttttttttggttaagacaagctcatttcttttttccttttgggttcttatagcacccgtctataagaattgtcacttgctgccattttctttgccggagacccaaaaaagttgggggtgggggagatggagtgagtttcgttctttcaaaacattttcactttcattatgggatgctaagagagcattatactgtcataacaagcgtgcttttggcagaccttagcagaatgaaatcgtgtctgttttcataggtgtgctgcaactgtgctattgttacctggtatctgttttcaaggtgttaaacctggacctgtggtctaaattgtgaatactgctgac

SEQ ID NO: 106956 - DNA, 1055 bp, Homo sapiens
atattgacacatcattatcaaccaaagtccatagtttacattagggctcactctcggatttgtatattctatgggttttgatgagtgtccaatgacatgtatccaccattatagtatcattcagaatagttttattttcataaaaatctttgctccgcctattcattccttcctctcctacacctgaacccctgacaacccctgatcctttaactgtctccatagttttgccttttctgcaatgttatgttagttggaatcatacagtatgtggcttttcagattggcttcttcacttagtaatatgcattaaagtttccccaatgtattttcatggtgtaatagctcattgctttttagcagtgaatgatattccattgtctggatgtaccatagtttactgatctactgactgctaaaggacatcttgtctcctttcaagttatggcatttatgaatgtagctgccataaccatctctgtgtgggtttttgtgtggacgtaaattttcagctcaattgggtaaataccaaggagtataattgctggatcatatggtaagagtatgtttagttttgtaataaactgccaaactgtctttcaaagtggctgtaccattttgcattcttactagcattgagcgagagttcctgttgctccacatcctcaccagcatttggtgttaccaacgtttcgggatttagacattctaataggtgtatagtggtatctcattgttttaatttgcagtctccagtgacatatgatattaagcatcttttcttggtacctatttgccatctgtatatcatcagcaagatgtttgctcaggtcttttgtccaattttaaaatcatggtgttcattttcttattgttgaattaaaaaatttctttgtagattttggagctattggtatttttatttgaattactattatcttaagtgcttggacaagagtttcattaagacctcagcattttaaccagtaaaacatgaaaatgttttcttctcattttttggagggaggtggataaatgatcttcacttgaaaaaa

SEQ ID NO: 106957 - DNA, 1012 bp, Homo sapiens
gcccgcgcttgtgggcatccggcccgcagggccgggccgcggcgcgcgccgcctcctcgtgctggaagaattcaagacggagaagaggctgtgcaagatgttctacgccgtcacgctgctcttcctgctcctctgggggccctacgtcgtggccagctacctgcgggtcctggtgcggcccggcgccgtcccccaggcctacctgacggcctccgtgtggctgaccttcgcgcaggccggcatcaaccccgtcgtgtgcttcctcttcaacagggagctgagggactgcttcagggcccagttcccctgctgccagagcccccggaccacccaggcgacccatccctgcgacctgaaaggcattggtttatgagggaggccccgccacatagacccccaacccagcctttccctttggctcggacggtgacgttgtatcttttccttctggcccctgtttaattttctaagctgccttcaaaatgactcgaagtggacagacacttggattgtactgactcctttgggggtggggtgggtgaggagtaggatgctcagcccactccagctccgcacattcgtcctcctaactcgactttcttcctgacaataggccctgcagtctttttgtagcggtactgacgtcttttattccatgtgtggttcctttttttctttttctataaaggctgtactaattttcttcatgcaacgtttcctaaagaccatggccagttttctacagaagctatttttgacaacctcaagtggcattacattttgcagtgaagtagaggaacctagggggacttcttcacaagttagatttcttgaggatcttctgttggaagcaggagaaagtggggggtggggggaagttgtccgaaatgccctctgaattgccggctgcagggtccttgtgctgcgctggttctttgaaagtctcagtgttgatattgaacttaaagagcagagatggagatcagtagcaaggcagtcatttttttaaagc

SEQ ID NO: 106958 - DNA, 1086 bp, Homo sapiens
ttgtgttggcttgggttggtctctgtttcatcctcctgtgaggtagtcccaacagctcaggcaccctctctgttcctcatttattggaagtagggctctaactcctctccccttcttccaaccggttcagcagaaatccaaggattgagtctctgtggaccattttgggttaggtgttcattcggaatgaatcactctggccacggggatggaatatgctgattggatgggcttgcaatgtggaggtgtctgctgatgctatacatatgggggtagctccactctgaccacctgaattgagggtaagtgggggtggttctcctaaggaaaataaaggttaacaaaggaagaggggatggatgctgcagcggcaaaggcaagagccgtgtatcccacttctgagcaaagcagggttactctgtacacacccatcagtgaccgacgtgccctttgtatctctccaggactgaagaagcaacataactgcccgtaagagggacttctcaacctcttaggaaaacacatagtgtcttaaacatgaactgttctctttcccaaggaaaacattgctgaggactttatctttgggttttcatttttttataccatcctctttgactctataaatgtactttatatgttgaaattggatagttatgtatctaacttcctacttgatgactacatatattctctatataccagaacgagataaaaaagaaattagtaggtgctatttcagagacttgtggcacagagatcagcagaaaaaaagccagaaacaaacaaaaagcaacccatgattactcataataaagatcaccactgaacaatgagattttatggaactaaaattatgatatatttatagatcagtttatttcgtttgccacagcaaactagtttttatttttcacatttttctctgtgcttctattagaagccatggaaacaacgctctcctttttttttcttatgcaaattgattcacctcagcatttactgaccttttcttggcatattctctttgactctggtcatgtcagttgtaaaagcatgcaaagaagctgataatgaatgctttca

SEQ ID NO: 106959 - DNA, 1033 bp, Homo sapiens
ccctaggtctcattggctgcctccaggtctctccttcggcctcttgaaccttgtgtcatccctgttggagttattacgggtcccacatgcgagtgacaagacactaagaccctggaggttggagtggggtgcagggtggggaaatccaaaattgtgtttgggtatatccattaactatttcagtggagaggtggagtaactgcagttagtgtcccttgcttcgtgcttactggtttaggcactttccatagattaagtcatttaatcctcacaacgaccctatgaggttagtacttacacctttttccatttaggaaactgaggagattaagtaattgttcaagggaacataacaaaaaaggcaagtagtcatttggttacacgattttggagaggtgtgtgtggtgggagtgagaacaaagctggaaatacagattcggaagtcaacagctgataagatgatatttagagctattgatcccatcagtcttcctgggaaagcacctagactgggaaaaggagagtgtctggaccaagccctaagcactcccaaatttagagatgagaatatagaggggtaggagccactactgggaactggagaaaggtcagtgaggtaagaagaaatcaacgacagtgaggtattccggaagccaagaaagggaagcattccaaagaccaggaagtggccagttgtgtctggagctgctggatggccaagtaagataaagtctgagaagtgcttttgcagggaggaagacattgtgcttttgacaggagcagctgctttggaggagaggggacaaagtccaattgtggtagagtgggaggcgagaaagtaatgttggggaggtgctacctttcaagaaaaatccagggactgagctgcaagggcccatggtccctggcattctctccagctctctccacacagcaacttcatttttttccccatatatgctgtagagcattttctataggtcacaaagaaggtcttgtcccattcggtcaataattgtaccaaggaggtgaa

SEQ ID NO: 106960 - DNA, 1006 bp, Homo sapiens
tgtgtttgggatcagtcacaaaaaggaatgccgccttctggtgtgggactttggtggcattcactccctgtgctgcaagcgttgctgagaagttacatctaagataaaacaggagcaaaggatccagctttcagttttcataagactcaagagcagcatcagcatcactcaaggaacggagatggacacagtggggtattaaaaatactggtgactagcgctagggaggctgaggcaggagaatcgcttgaacccaagaggcaaaggttgcagtgagccaagatcacaccactgcactccagcctgggtgacagagcaagactccatctcagaaaaaaaaaaaaaaaaaaaaaaattgctgatgactgcatcagtcgagttcctgccaggacacagatggtgctctcagcatgagtaatttgaggtgtgtttagtaaaggcactatctacaaaggggtgggcagagtatgggacaccatagtggacttgcaaaaacgcagggctggtaacagagagctattatcaccctgatgccttgaagggacaggaagggacaattatggggacctggaggtggcatgggcttcccgggaggagctgtgatctttgagggatgctgccactcccaggcaattccagagggaaagaatgaattggtagaacccaaccagaagccacaggaaaggtgcctcctgggccacagagcagggtggagaatggccaagaatagattgtgacaatggaaaatacccagcacggtgacagtaaaatggaatatcagcaatcactaccaagcaggaactcactacattccagacctggtgctgagcattttacaggcattcactgatcgaatcatcgcaaatttatcagcacagtttctattcatattgcccacatcacaatttactaaattgtccagcactgcacagctaggaagtggtacgactggggtctgtccttttcattgtctttaatgagctctttcaaaactctgttgtaggaa

SEQ ID NO: 106961 - DNA, 1049 bp, Homo sapiens
ctaattcttcccaatgcaccaggctgactgggactcctaccctgctgtgtaggacagtgtcatggtgtggaagtgagggcttaagtcaagcccaaacatgacttccagacagtcagatctgctttttctttctagggattctattatatgcatgttgggtctcatggacatcatttttttttcttctttgattctcacctctttaatcttttccacagagctcttgaagaagctcttaagcctatctctctcttctgtgatcttggttttcttcagtgactcaggaaaggcactgcttctattgtgtttttaatatgacacctataattttcatctgcagtctttatagactggattatggatcttggattatgtttattcttcatgacaacctgctgtcatttaatagatatgatgggtctttaagttatcttgaaaatactaatgatgacttacctagtttcacatgtttttctttcaagataaatttgctgttttcacattggcccctttccattgccacaaacagtaaattcttttttgttttcttatttattcagagaatagcctatatttgcaaattactgagatgggctaagtttctttcagagactgtattcatccatgtctgaatcactgatactcagatgaaggagaaagaccatgcaagatagtaatgttaatgggcagggccctgaaactagactgcctgggttcaagtcccagttccaccactttctagctatgtgatttggggtaagttacttgactgggctgaacctcagtttcttcctccataaaatggagatattaataatgctgacctcctgggtttatgtcgtgaggattctatgagcctagatatagggtgcatagaagagtgcccagcatatggtaagctcagagaaagtgttagctgtgaagatgatgatgacaatgataacagtaataattttactccattcatgcagactcctctgtttgctttccgaattcattgtttctgtgaagtcaggtcaagccagtctttaatcttgtcttgaaccgtc

SEQ ID NO: 106962 - DNA, 1071 bp, Homo sapiens
gtatttgtctgtgtaatccagtcatttctcaggctcatgtaatggtgttttgggtggagtaggaaccagaatttgaacgaccagatgaacagaattagatgagaatcctttttctggttgtctatttgcagcctctaagaagtgaagtctcctgactcatccacatttgagtttggacatatgctactgggactaatgaatttagatagcttggatggtggtccagtttcggggacccccatgatgggggatggtgtctttcgtggtaaacaagatatctgacagcataaacagcacagggaggagctctgggtactgtataatgaatacaagaaactaccctacctcacagtggcatatgtgttttctggaaagtcacagctgtcaactgaaggggagacatctctaaactcaaatgcttcaggggcttaagcagctttgctgtgtgacccctctaagtgagtgtgatgcggagagcatgtcattcatttcttccagttgatgataggacttgctggccaccgggagctggtgccaggagagatttgggtttctggaggatggtggattttcatctccagcagcaccagcaaggaaacagcagtttcagtgcaaagagctgcgaaatcccagccttcctagcctcatggcacctgggtctctttcacagatacacgcaagcagtgttggagccggaactggcctctagaaatgtcgaccagttgtcatcctcaccagcagactaccggagtgtttatttctcttctgctttcgccagctctggacattctcactaaaaaataaaacaacaaatcctgcatggctttaagaagtctctttatacatatgcatacatagaagccgaagggtcccgaagccattctgattgggcaacaatttggaagacaaatgatgacagccacattatggggcatggccaaccgactgccatcctgcttgagagggtccagcaagctgcacacatttgaatgttcactcgggagagcgctcctctcttcctcttcaattacccagcatggttacatggtgcttttcactcaccaagccctg

SEQ ID NO: 106963 - DNA, 1028 bp, Homo sapiens
acttcagaacctgaatctcagctgtgaacacaatacaaagaaagtgccccttgattctgaacaggaggaagaaaaattgagaaactagttgagcgtgcagatcagaggaacttgcaaagagggcaggagggttctccagcagcacaagcggcatcatttgcagggcccagtgcaaagtgagaatgcagggacccctgttaaaaaatcattgagaatttcaagtcggtgacagctgagcattaactaagcatagggtccttctaagtgtggggtcctgtttgactgcttgggtcacatgctgctgatgctcgtcctgtgcctctgttttgaacagtgagtgggtacagatggggtttcctgcagcaggatgggtaaagggcaaactcctgggtcagatggcttgggtttgagccctaggaattcccagcttcttagctaatgactttgagcaacttctttaactcctctgggcctcagttttctcgtctgcaaaatggaatgttgttggctcttcttttctaggagtattgtggggcagatgcagtaaagtattgtgcatagcgcttggcccatagtactgaccagcagtaccgggtattagagttaatagtccctactgccccagctccccagggcacggtgcccgtggaaataccaggtccctgctgtctttacctctgtgctgctcagcctgggttggaatcttggaggctgtagcctccccactctggcagcccttctttccctccccatcccccaggcttttaatgagtttagtattttcatcaaatcattcttcctacaacacagggctggggaggctaaaaatagctccccgagtcacgtgacagctccaaatgcggaggctcccagcaaaggtgcaagtgcgactccctgtttcctaggaaatgagagtcattgtgatgcctgaagccaggccgctgccaatgcagccgggccctcgcaggggcacattgtttcctgtgacatcctccagtgtgacagacggagggcgggggggcagagag

SEQ ID NO: 106964 - DNA, 1128 bp, Homo sapiens
ccaatgtgatcacaaggctagtaagtggtggagtccaggtgccagaaagaggtccagagagcacctctgcctagagtgtggcccgctcgagcagaaagcagccccagtcagcctgagatgaacagctctcccctcgggcttagaactcccagctgcttctctgagctggactcctgccagtgttcacccaggtaacggaattgcctggggagccctgcttgactccagggaagccggcggggggggcccccaggcagagaaatgaagtgagcaagacacctcccgtccccagccttcccccgctcatccctctcctccagaggagctggaaggaggagttcctgcagaaagagtccacacccaggaggacactgtgctcgggcttatgccaggaggccgccccctaccccagcaagggcggcgacaggaggcggaaaccctgggagcagagggggaggggccggcccaaggagtgtctgagcgccttctcccaggctgcctggaacaggatgttccaaaacgaggaggctagccaagaagcagggcgtgtgtgcgtgtctgtgtagcgtatgtgtgtgtgtgcgtggtgtgcatacgtgcatgtggtatatgcatgtgtgcatgtgtggtgtgtgtgccctgtgttgtaagtgcacgtgcacgtgggagggtgtggtgtgcgagggctatgtgtgagtgtggtgtctgtgtgtgacgtgtggcatatgtgatgtatgtggtgtgtgtgggtgtgtatatgcatgtggtatgtgcacatgcacacggtgtctggtgtgtggcggggagtgtttgtgtatgtgtggtgtgtgtgtatgtgtggtgggtgtgggtctgtatgtgtgtgatgtgtgtgggtgtgtatgtgtgtatatgtggtgtgtgggtgtacgtgtgtggtgtgtgggtatgtgtgtggtatgtgtggtggtttgtgactggtgtgtgtatgtgtgtggtgggagtgtttgtgattgtgtggtgtgtgtgtgggggggagggactggcactgtggaacaccaggacaggatctgagtgtgggtgggttaggttcacctatgtagagcaaggcggaagtgacgaggaagtggaggagcaagaggagaggga

SEQ ID NO: 106965 - DNA, 1537 bp, Homo sapiens
tgttgacaaggttagatgattgattgactgactgactgactgactgactgactgactgatggtcactgtgggtttcactgtagctggctggctgtgatctggactgaccaggccatggactgtgggagcttgtgactatgactgggccaactgcaactgggctgatggattcagtggattgaacatgactggtgaggagacaggttgacaaggagaccaactcattgaccacatgcatgatggactgactggccagttgatgacaatgggtttggtgtatggttgactggttggttgtttaattcaaactgactggataactaggcagcttactatgactgactattgtgactgcctgcctggctgactgagggaataactgagtcagtgtgactggcaggctgattcagactgactggatgtctggatgactatgatctcctaactgatagccgtcagtgatgatcttgactgactgactagccggctctgggattggctgtctcttccagactgacttggtaaccgtgggtctgactgtgacccctgcgtcttgactgaccgccttgattgcatgcctgacattttgagatcaactgactggctggttgcctggtgtttcattgtggctgtggcacagcctacggctacctgtgactaaccatgaaactgactacacccaactcacaggacagaccgggtggactgaccacctgccttagtcatggaaaactgactctggctgactcaactgccagagactgactgagatgaacaggccagccaagagacagctgggtgactcgtggtgagtggctttgtctgactggatggctgtgacaatgtaactgagtctggctgtgagacaataacctgtggattgactgacttgaatgtgttgactgggtggctgaatctgattggctatgtgggtgactgatgactcctggctgactggctaaccctgccttgactgactgattgatgggctgacagatcgagtttgaccaggcagcaggagacctgctgaccacggctgtgactcactgtgtgagcggccatgtctgactgtgtaacacaatctgaccaagagacaatgactaattgactgaccaactgactgagattggctgggtgtctgactgaccagctgtgactgcaactcctgatgtgagtgggcgttgactgggtggccctgactcgtataggcaagtctggctgtgagacaacagctaactccctgactggcccagtgtgccaactggctgactgcttgaggctggccaacagaccagctgaccgtgcctgggactcacggtgtgcgtggccatgcctcactgtgtggccctggctgtgtctcggagtctgactgtgagacaagggcagactgactgactttcctggccaactgcctccaggtagcctgtcaacacagtccctacccttcccaaaaccattaaagtgctgcagtgggagctggcccagcctgaggggacagagcagcttctgtggagcagcagggacaggaagagggaag

SEQ ID NO: 106966 - DNA, 1063 bp, Homo sapiens
gctgggtgggggtggggcgggccacgggcagccatttatggggcttggattggggccaaacgctgccctagaaaatccaggtcttggaatgcagggctggagaagtcttaggaaggagcaatgtgtctgtcagtcacacctctgttaccgccaccattttatagctggggaaacagaggcccacagccctcaagagcccagggcatttcccacacccggccccccctggggctgtcccccagagcccgggcaggtggtgagcctcagccctcccttactctcccgcaagatgctgggcagcagaatttggggggcagggtcgatgaccttgggcaagttactccatctctctgagcctcagttgcttcatcagttaaacagctgtttctgatagaagccacttggcagaactcggattgggtgcccagatgcctctgccaccacctgtgtggtctccagcagggagctttgcattttgcgcctcggtgtccccattcacaaatgggaacgggctcaagaaaggcacttacttcataagcttgtcatgaggaggaaaaacacaatccacatgaagacttcagctcggtgcctggcacctagtaaacaacccagaaatgtgaacctgcacaatgattaatcctcatctcttgggaggcattaggattaatcaagatctttgacgcgcatgtacttgggaagccatgacgttcagccccaaagtgttgggaggcacaggggcacagcctggtaatggtgccaccgatgagcccagctgggccctccgcagccaccctgaaatgccacctgcttccccaaaggatcttacagaccctctgggaggcaccagctgctcctgataccacagccactggggcctggtccccagggacagggaggtgaaaacaggaggaaattttctggggttcccccaggtaagagccaagggcccaggtgtcacacataggccttggtggggacaggagcctcttccaggaacgcccagagtctcaggccctccagaagctgaagaaaaagccagactcttctctgaagctgagaagag

SEQ ID NO: 106967 - DNA, 1053 bp, Homo sapiens
gggactttacagggataatcaagttaacgtgaggtcattacagtgggccccgatccagtgtgactaatgtccttataaaaaagggaaattcaagcacagacgtgtacagaaggaagacagtgtgaagatacagggagaagatggccatctacaagccaaggagagaggcacagaatagatccatcccctacagccctcagaagaaaccaagtctgcccatgccttgatctcagacttccagcctccagaagcacgagacaatttcagttgtttactccacccagtttgtggtactttgttacggcagccccagggaacaaatacagcatccaaaggcatccacgttcaaaagcgtttttcaaccctggctaggccaaataagatttgtctggaggccacgttctgcccgagagggcgcaggtggcaacccctgcagcctggagagttctcagagcacaccctgtccaccagggaattggcactgtgggaggctgaggtcaaacagatcaaatgggaattcaattatggtttggagacgagtccgtgaggtcacagattaaatgagggcagggactgcagcctgggcctcgctgtggtgttcatgctccgggctccagaagctgcactcctgcctgtcacagagccggacgaggcccagcctgcttgtcacatagagaagaaaccgaaatttaaaagatagataggtcagatcagtttatatgtggctgtggactaatacccccagcatatggcaaccaatactctgcgaggcacattggaactcctgtaatcaagtatctgttaattattaaaattgaatctatttttctaccctttatttagttgagaaatctcacattacacagaaaggttaattacaaaccgacttcaagaaccctttgttggaagcttctgtttcagtttctccaagatgagtccttgaactccatatttgggaatgcagacacaggctggcttagcaaaatcgcttcctcatgctagcagaccccagatatagcaaacctctcagatggctccatggagctgggatta

SEQ ID NO: 106968 - DNA, 1010 bp, Homo sapiens
gacggaaagggaggcaaaaaggttttctctaatcctcagccaaactctagtgttaacaccaagtgtccagatccccattgagaaatcccatggctagagtgtgacaggatcatggaagcagctcttgctcaattattcttgatcaagggtggaatgacgacttcagccagcaagggcccaggcttgtgctctctgatttcatagccctacggcgtggaaatggaaaccagccagactccaccttgggcagtgaagagaacataagggacgtccaggaggcccttggtctagcacgcccctgacctcccagcggttctggaaggccactcctaacccttcaaaccatagcaaggaaggttagagctatctttgtgttaggatcaaaactcgagaaggttctgtttgctaaccactgaaggaagcccacggcctgtctttagggcttctgtcaggagaggacaatggacatagacaactagatactgcaggagggctctggttttctcagacaggatcctaggatgtgtctggaagcctgcggagtgaaggtagacatgcaggtgtgatgttctgcctgatagtgcctctctccaggcattaactacaaggctgggtgggggcttactgtaaggcatcgagtccctaagcatttatacagtcccaattgtgcatcagtgcagtgctggttataacagggaagaatttgtggaggggagggcacaggctgaaattggcccattcctacacatgctcttgacctagacctagagtaagtgacattgaccccaaccgtccccctacccacctccagcttgtgccagacatcactaatcagtcacagcgcttctttccagctgaatccagactcagaatcctcattagagctcattgttagcacgtcttcctgaagtgcaacccatttgccattccttccctggacgaaacccaccccaaataactgggaaacccttcaaggcagtttttaatcaacacttcaattgtggaactgc

SEQ ID NO: 106969 - DNA, 1047 bp, Homo sapiens
aacagacccattttcaactcaacatcctgcgctatttacactctcttccttccagtgctagttcaggtgcagacccaggacaaaataatcggggatggatcttgacatgttttaagtggtttcttaattctttggaaggttatagactggtatgcctcagcacctgcagcagcaggcaggagtctccctcgcatggggcaataagtgagcttgtgtggcttttaggttagtaacacactttattcacatctctgagacatagttgacctaaatccagttggccagaaacaggggttgtcttttgaggattttcagtcctcaattagcatattttagcatcatctccattttctttccttaaatcccatttccttcctttacatcattgcaatctatctcaaaggttacacttaggagacagttcattttctttcaaattttggtgattcttttgccccattatgtctccttttgcatctttgaggtatgtacttaagatacccagctatttcagcttctgataaacaagttctaaaatacaaagtgagcttcctattcacattggaaatattccacagattaaaaattaactattattctaaaggctaaaatctatacacacaaaaataaagatttccaatgtaaattttactattttatttgtgaaaaaactacaagcagaattcataaatagacatttctatttaaagcaggaaaatgataaagtggcttctaataacatagtcgtgcacatgccagtaacaggaatatattaacatcttttatttgctagacaaagagcagtgtccaatataaatttcccccaaaacatttaagacctgtgaatttttgaccagttcacaaaaccaccaactgacactttagcatgaagaaaaaaacaaacctaacagactgtcagctctaaagacattacagagcagaaacttccaaaagcgttatacaagctgtctttctgggcaaatgaaaaatatagctcgtataatacattaacaaaaattcacaagataagattgttttgacatactt

SEQ ID NO: 106970 - DNA, 2048 bp, Homo sapiens
gtcatgcattgtgaaagtgtttggcatctcttagaatttgtgaacaatagtgctaagagccagtgtcagttggagattggcacagacataatggtttatggcacaatgaatgtgtcacttgtgtatgatttttttacagtgactttcagtcttcactcccttgggagctagtatgagccatagttacctttgttgctctctatgtgttgtctgtgccaatcacagagctgcaggggaacagaacaagttggaataattagattgaggagtgaatgtcacacttctaatttcattctcttttcaagggattaccagtgtccatttaataaaatgagattaaccctctgcagcaggagtacttgaaagctgtcagtcagtataatcttgacggcttgaaagaagtagtgttctcagcactcttagaaacactgtcatgttttattggctcaaaaactattttactgcacagggatgtgtatgttagtgttatcacatgtgaatgtatcatttcctttgaaaaaggaaaagtttagtatccatactaaataatccatacaaaataatgcagaaataacatgaaccttataatttagttttgagttggcagatatcagtaataaaatacccaaggaatgtgagaccagataaaaatgtttaaaaactttataaagcaaatagtgatatatattttttgaacatttcagaaaacctcggatcaattctcagctggtggcacaacaagtggcacaacagtatgccaccccaccaccccctaaaaaggagaagaaggagaaagttgaaaagcaggacaaagagaaacctgagaaagacaaggaaattagtcctagtgttaccaagaaaaataccaacaagaaaaccaagtaagtttctggttaactaagtacaggatattactttgcaagtgaattcaagatatcttctaaatgcctgttttttttgtttgtttgtttgttttgtatctccctcatttagaccaaagtctgacattctgaaagatcctcctagtgaagcaaacagcatacagtctgcaaatgctacaacaaagaccagcgaaacaaatcacacctcaaggtacttggaaactagaatgacatactaaatcactgctctgatttacttaatcgtaatcatgaatccagggtggttttgtgccttgggtttgtaggctaagaaggtgaagagctaagtatgggtggggctggtgactttttctcttttttaaatactgtggccagaacaggaaacagataatagtaattttacattggtcccaagctttgctatccgtgcttgttggattattgctaaaactgagtagcacactctgtagtcggctttggcatgtgtggtaggcagttcggattcattgccacagtgtcatgaagtcttgtgcgtattgatgatattctgccagaagctgtttttgatccataacttacttaattggctcttcccctgtggtgttgcttctaggccccggctgaaaaacgtggacaggagcactgcacagcagttggcagtaactgtgggcaacgtcaccgtcattatcacagactttaaggaaaagactcgctcctcatcgacatcctcatccacagtgacctccagtgcagggtcagaacagcagaaccagagcagctcggggtcagagagcacagacaagggctcctcccgttcctccacgccaaagggcgacatgtcagcagtcaatgatgaatctttctgaaattgcacatggaattgtgaaaactatgaatcagggtatgaaattcaaaacctccacctgcccatgctgcttgcatccctggagaatcttctgtggacatcgacctcttagtgatgctgccaggataatttctgcttgccatgggcatctggccaccaaggaatttcgcaccctgacgattactcttgacacttttatgtattccattgttttatatgattttcctaacaatcatttataattggatgtgctcctgaatctactttttataaaaaaaaaaaaatctgctgtgcacaatttt

SEQ ID NO: 106971 - DNA, 1652 bp, Homo sapiens
aaggagaacatttcagaatctgctgtttattaaggtaaagatacctgttagtcgtgtggagccagttatttctaaccaagcagtatctggtgagagtttgtgtaacaccatgtgtggatattttacaattgaagttcagtggccttccctaaaggcatcctcttttaaaagggatttctgcaaaaccaaaattctctccgaaatacgcagaaaaactggcagctatgttagtgaggctccttagtgctgctgttgctgttagacagcataattaactttaggatgctaacatatgcgaaggatttatgtctctagaaccatttcccagggcgcagacttaccagctcctttcacttgtaaatctttccatttgccttccagtatctgaagaagggtggcagacacatctacggctggaaaagtagtgctttggaatgtatgtattacttgtacagggaattgtcttgtggaatatctctctacatgtcctgttgcaagagctaagtgaatggtacctaattttgtcctcatttcatcctgacctcagccctgtgaaaataggtgtggcctcattctcatttcaggtaatttaccttagctcagtagcaggtgtggataaagtccaaaggctgtcttaactccaaagtctatactcttcctttatactactccgtttccctattacctgtgaagatgacagaaggaaagatcagggagaaaggggatgacttgagttttgaaattctgataggatcaaatttgagggaagttttagttctctaatacagagcagagtgattctcttgagtcaaggatgtgtgtgggaaagagtaacctagaatgggactaagacccccttcaggtcacctagtagctccttgtagatgggtcgaaggatttgagaaattgaagaaaagtgtttacatgaaagaggaaagtactatttaagaaaaaaaagaactacaaaaaaacaatactgtttgggaagcagagggaaattaataatgtcctgcaatgtatgatcctggtaaagtgacagttgagtttttaattatccatattataatgatggttggcttcagtcaagtcatgaggtcatataggttccttggtatataaaaaatacaatggaacagactgtatgggttaagtgaacagaaaacaaattttattaatcatcaaagccagagaccaatactgtttactggacagtgctgttgggataaaacaactcaggtgctttcacactttaacactgctttccttagaagtaaatacatatgttgcccaacttaaaaatggattgtattccacaaacatatttgcaatttggttatttacaacttggaatacattatcgtagacaagtccagacaaagatttagcctcagtatgtctttaacaaggtacttttgcaaagaaaaaaaaagttgtgttcagtttataaagcattttcacacatgtggcccacctagtttcctgcagttggattttactaccattcctattttgtttttagaatgttttagtcagcaggtgttaaagaataacagccgagttgtatacttcggtaggttccaacctgggatatatgcattttgggacatcagtaatataaaaattcagtcattattggatggggtaaaatctgt

SEQ ID NO: 106972 - DNA, 1755 bp, Homo sapiens
agccagggctaaaattccattttcttaacatctgttactcttttcactggcgttacattcagattaagaaatgcaagggctgatcacgtgtctcatcctgggggtcccagcaccttgggaggccaaggctggcggattgcttaaagccaggagtttgagaccagcctgagcaacaaagcaagattctgactataaaaaacaaaacaaaacaaaactggaaacggtggtacgcacctgtactctcagctactctggagactgagggaggattgcttgagcccaggagttcagggctacggtgagctatgatcacaccactgcacttcagtctgggtgacagagcaagagcctgtcttaaaaaaaaaaaaaagcgagcagatgagctctataaatattactatgctgtgaaatcttgtctgatctcagaatctattattccagttctctgaaccccttcagattttggttgtctcatccaaagtgcagcatatccatcctgctctcctttccagtagacgtcgcttgtctactgtgtttacttccaattcaccgattctacaaacctttatgcagtgcatacactcttactcatctaggtcagtgcttcatttttaagagatggttgattgtaccttcttataaagctgtttagcttagagtaaaaaatgctttactctattactctgctccaaaattagacaagtagctgtctttactttcattctcttctgagttcttgtacctcaattaagacattctttggccatgaaactgcgtgggcttctagtttatttttaacttttaaaaatggatataactgaaacacaagaatagaaataatctccctgttcatcacccagcatcaacagtttgtatattggcaggcctcttgatcttcataaatactgtacggacttattgtttttgttaagccatcagcttaacagtgcacttgtataaaagtgcattctgggcaaaaaactggctcaacaccattagtcattggggaattacaaattaaaatcacattgggatgctactatacacccacgttaatggctcagattaaaaagactgacagaacgaagtgttgttgaggatatggagcaattggaatgctcatactttgctggagggaatgtaaaatagtacaatccctttgaaaaagagtttggcagtttattatataattgaatatatatcttgccataaagttaaacatatacttgccataggcattttagccaagataaatgaaaacatatgtctgcacaaagacttgttaatgaatgttcatctcagctttatttataatagtggcaagctggaaaaagcccaaatatccatcagcaggagcctggataaacaaaacacataacaacatggatgattctcagaaatactctgcaatgaaagtagccttacacataaagaagagtatatagtgtataattccatttatgtgaaattccaggaaagacaaatggaatccgtagttacagaaaacatcagtggcctcctggagctgggaatggggattgtctagaagcggcaccgaagaggatgaggggtgatgattaatagctgtatacatttgtcaaaacttcttaaaactgtacactttattgtatatagattgtacctcattaaaatttaccctgtgcaagcattggccatgtcagtaaactgcagcacctgttcttcttcacgttttttgtttttatttttgtttggatggcaggtaatcattcacct

SEQ ID NO: 106973 - DNA, 1986 bp, Homo sapiens
cctgtgtatataaccagtattgggggcagagtcctattggtacagataattaacactggctatcaattttcctatataacaaagcacaggctttttatccaaggtgtctctatttgtatttaggcaattttaatagctaaggagttgacctatacgtgacttgcatttgaattcttaactgtaatatgccagtaactttagtagttttgaatgcagctcctctcttcgagcctcttgggacactgcgtctgtccttgtctgtcagattctcaaaaactttacctgggacacacacaagtaaacctgggttcagtagtttccctttccttttttcctttcttgagagtggggagaagcttctttgttggacagaaatcactcatctcattttttttctggcactttatggattttacaccatctcctacagaatagagttttgattagagtattcaagaccaaattgcttactttcagggtagctttattattccagcccaatactgcactccctactgcatttttgatacaaacttgctcatttgaaagggtgtgaaaagaatgatgtggttcctgagatttagctactcagggagtaggaggagacagcaggagttgggttaaatctaggaggaatgaggtgggggaatgtctagtgttttgaggaagggctgtgagaaacaaaatgctattttctgagaagcttgttaagagagttgtccctaaggcaagtagttctctactgggatttcacatttctagaatctcctcgggggatctatttaaaatacctttgtttaggtgggcccatctcctacccattaagtcagtgtctctgttaagtaaacagcatttcacctgtttgaacttaggagttttagaggctgaaggcatttactaagcagactttgattttcttttaattaattcattcaaaggctccatatgacacttgtgtcagggtgacaagtctccatttgtgacatagtttaggctggaccagagcatcattgttctttaaaggctccccagctgatctaatgtgcagtcagatttttgagccactgatctccaggacaagcatggttgagaatcagtgatgtgatctggtggctttgtctcccaagctgcttattttttagtagtgtgtgtgtattttgtttaatcttcaagtgaattttaagtttccagttagatagtacaatagtatggtataggggttcatagtagctgagtacatacgtgatccctaagtaacagtgctgatctggctccttgccttcagttcctgccttgtgttgtcagcccggtcttgtcagcccagtctcttcagcttagccaccctagtcttcttttagtgttaactaacgtatgatttttcttcctaccacagggtcgttttccatgtttttcctggctgagaccacccatgcgtggccacccccttaccccaccgctggcccagacgtggccacaatttttgaaaaagtccttgatgttcctgtcctttggaacacttccctcatttgcaattttctatccatgtgtgtgattatttgcttgtttggctcccttattagaccaagctttttggatctgcctattcttatccacttttatttctagcatctcctcagtgcctgagatacagcagatgttgaatgaatgaataaatgaaaagtgcaaggtaactagacagaaattcaattagttgtatgtgtctgtagaacagaataggagagcagtgcaataatgtaaaagcttctggggctggagaaattgtaatggacaggaatagtcagggaaagctgtaaattggaggtagaaatagggaagagggtaatggttgtcaggtttgggggtgagaaatggtgggaaaataggtaaggtaaccagacctatttgtttagggtatagggatgttgcttgggaaaggcaaacattaaattggtatcaaattgaggggtttaggttttagttgaaaga

SEQ ID NO: 106974 - DNA, 1051 bp, Homo sapiens
tccaggctggtcttgaactcctggcctcaaatgatcctcccactttggccttccagagtgctgggattacaggcatgagccattgctgggccttgatttttgtcttttgtgatcattgaagcactttgtgatatacttaccgtaccacacaatcatgttgtactggaatttcgtgttcacatttgctgctccatatccgccccgtatgaggctctcagggatagagactgtaacctgttgaatctttagaggcaaggtcttactatgctgcttttgtgttcttcaaatgtatttagagggcagtctgttcttctgatttcttatttaaaatgtttactttttaaaataattgtgtgatatattggctaaccccctctgcaaataggtttattcatttaaaacctttgggaaatgccttggaaatactgctacactactttcctttttcacttcagtttctagttttactctgtgcatcatctcttttgttactcttaagatgattcccttgattgtctgtctctctttgaagttcatgcctgcttttctgttcataacaggtacaacagttgattgctaaataggattcttctgaagcactgtctgttttaaaacggtgatccctcttagtagagctcccatagaatgccttccgaagttctcttctgctctgtactctctggctgaaagtttcagaaacagagcgactagagtggtctagagtcagaatacagtgtaaggaagcaaaggggatgaaaattgagaaaatcgtgaagtctgtattcttcatgagattttgcagctgaataggactcagaatagttgtagttctcttgggctagataattgtttgaactgataaataatttagataccggaattttctctctcctttttcaggagccacctcctagataatcttcctcttcagctggtactgttttataaatgaagcctctgaattgttcattagtattttcagacctcttttatctagtaagttttatgagagaagacatttttcctgatgaattggaatgttttgattaaa

SEQ ID NO: 106975 - DNA, 2936 bp, Homo sapiens
ttttttttcaattaatactcaaagcaatcctgagagatagttgttactctaactttcacaattgaagacgctgagtttcagaaaagtaacttacttggtgtcatacccagttaatagaatagaagacaggtgatttaattaaatggacaaatttaatgtgatgtttaaagtgtttcagctacactcctttgattatttcccttccaactttgccatcttttccaggaccatttaaattagaggaggacaataagatgtcacttgaggagttaccttgctccgaattatcctgaggttattagcctattcagataagctataatgtaaaaagttaacataagcctgtatagattagatgatttattttgcttgttgcagtgtttctctttataaagttgagtattcttcatcctgtcttttggatacatatacctataaaaacgggccaagaatatgcattctgtgctgactgccttaaaatcggattctttgaagtgtagtttgtcgcttcacttattcagaaaattacacaattcttttaaggaactgcgtgccaccattaaaatcactagtgaaaggcagtgagtttgtgaatgattgactttcccagggcagtggtgcagtggaaggcactcgttacctgggcagagttagatggagcatatttcattagtcgttcaggctctgtgttctaatgtgtagattttgttttcactgtatgcgttgctggctttatttccagtttcttctctagttaaaatatggaggaagtcacaggacatccagtttgttcttgggtactatgggacaaaatatatgacagtaaactatcagctcatcttggcaagtacttttggtgtggaccactgaagcatatttgtaggaagggagttacattttggtgctcaggatgggagtgatgatagtttcaaagatttctattttggaagagggatctcaaatgcctagggtttctgaaaaatttcactgtatacagtttctgctactgcaattacgttataaataaatgctttaattataagatacaactttatatgtgtaaagatgtgtatactaggttaagatttaaaaccgtgggttgcaattaaaataaaagattccctgaaattcatggaactggacgatgtctttcctttccttctttatgtttttttaaagacagggtctcgctctgttgcccaggctagagggcaggagcatgctcataggccactgcagccttgaacttctgggcttaaacaatcttcccatttcagcgtctcaagtagctaggactacaggcttgtgccaccaggcacaatttaatttggttaaatttttttttttttttgtaaagatgaagtcttgatatgttgcacaggctggtcttgaactcctggcctcaagtgatccttctgtcttgacctcccaaagtgttgggattacaggcatgaaccactgagcctggccagaactagatgatgtctatgtcttttccagttctaaaatactgtgttatgtcagtttgggcaatttgtcatacagtaagatgactcttaaaattttacagtgccaagttacttgtctacaaatatatagagaagataatttgtcatttattctcccccaatgtgttgtatagatattcatgcgttttgtgacgacttttctttctttctttctttctttctttctttctttctttctttctttctttctttctttctttctttctttcctttctttcctttctttctttctctctttctctctttctctctttctctctttctctctttctctctttctttctttctttctttctttctttctttctttctttctttctttctctttctttctttctttctttctttctttctttctttctttctttctttctttctttctttctttctttctttctttctttccttgtttttgatggagtctcgctctgttgcccaagctggagtgcagtggtgcgatctcggctcactgcaacctccacctcccgggtttaagtgattctcctccttcagcctcctgagtagctgggactacaggcgcctgccgccatgcccagctgattttgtatttttaatagagacggggttttgccatgttggccaggctggtctcaaactcctgacctcaggtgatccacctacctcggcctcccaaagtgctgggattacaggcatgagccaccgtgcctggccgcattttgtgacttctaaagaggaaagctttatcttaaaaatttttggtagtgttatttatgtgtagctgaacggttttcttatttaagttataattaaggttttaatttggaaatcttcattcaggggttaacaaatctttgccccattctaagaaattaaactcaatgcagactgaccaaagacaagattcagtcagtctccttttcaggatctctgagatgagggcttcaggacagaacacctggtatggaaggctagtgttttcaagtataaacaggtgtactgcagccctaaggctgttcttacttagaccttggttatattaattaaaagaatgacactgatacatctttttttttgaaaagtgtttttattactgaaatggttaatactgaatcatgctccatagcaaagcttggttctaatagaacaggtgtacattgggtgtttttcctgcttaacattttttgatacccatccctagcattcagtctgacaccaaattctgctgactttatttgtccagtatccctgctgcgactaccttaatttaggttctcattatatttcattttttatttcaattcttaattacaagcctgtattgcccagacctgtaccattgcagtagccttgaaactgttctgccaagtctagtctgttgtgctgcctagagatatctctagaaagcacatagatcatgtagtgtgc

SEQ ID NO: 106976 - DNA, 1019 bp, Homo sapiens
accttaccttcatatgcttttcctttgtgtcttcttctgaaatgcttcttccttttgtccaggctgactcctgtttgtctgagacttgtgtctcaggaagcctttccgttcccctccagtcattcatacctctgtcataacacatagactgtatttttaatttgatttccaatctgtctcttttaggttgtcaccttttttgagggcaagacctttttgtttcatggctttagtttgctgtgtttgttacagtgcctggcatttggtaggggttgagtaaatgtatacagaataaatgaagcctgggagaaggagttccagttaagagttctaataaataactgttttttcaaaatcttggggctttcatcttgtgtgttgaatgttactggattaggggaaagttgtctttatgaagtgggccctttaaactagtattcctgtttttctgttatagttccctactccccgccccacaccccctctaaaaaaaaagtactagaagttacacacagaactgtagccttggaggctgtaggcagtgcatttaaagtacttctggagtggttttgagcttcagagcattgacacacttccctaaataactgtgacaattctttctatttgctgttgcccatcggtgatttcagtggccagtagtcatactggaaagtctgataataaagcaggggatcagtcatgtggtaccaaaccagttgtggggaatgttagatgtgttaagatgtgattagcaacgacattcctgtttgtaaactggcatctatggcggtttaaaaatggtggcaaaaccattttgagtattgttggaaatgttatctgttctgccgtgttaatatacctataagttggtagttgcatcttgtacccttgatagtcatactttgtacattgtgtatgccactcttctgttgagtaatttggattaattactttggagattgaagtcttgactcattcacttcactcatttatttagctgtattttcagttccatgcaa

SEQ ID NO: 106977 - DNA, 2188 bp, Homo sapiens
tggcctcccaaagtgctgggatttgcccagcccctaactgttgttttgttaagttgcatttctcaagattgggcagagtagcttcctagacttggtgatttaattttacttttcttgtcttgttatttctctgcattcaatgttaccttaattgtaaaataaaaattaccaagacattgctgaatatagttgttgattagtgttcccttgatagtagtcctgcatttttactttcagctactgcttaatcacattcatttgcaaaattggaaaatttttactttggctaattaccataggtttagaactttctggtcttcagctccagaaatgtatcgctgtgttgagatcatgttttatttcatccatgtttatttgaatactgcccctctgaaaagctgactgtttttggagcttttatacacaagtatgagtgaggaaattactttaggtgtagaataaaattgtgtagaaataattatctttgaaaaaatttggtattcaggatattgaattggaagtgttgaagaagcagctgttttgtgtgtaatacgtttctcttgtttgagaatttaccagttttttgcagttgtagctttgaactatccattccccccttaaatttagataccctgacaaccaaaaatctcttgaattgtcatgaagtactttagtagaagttttatggaaaaacacaacatagctatgatctttgctggaagcttcaaaaaggcatcatcgtgtgatgctttttaggtagaaaaactcccagaaataagataaggtacctacactgggcaaagcccaagcctcttactcatgtttcctggtaatccacagcagtggttttgctcctttcatgacattgtttttgttgtagtgtttgtctttcataaaaattctccataaaaatatataaaaattacctgtcttccaaatcaaacttttatcaaaccttccaagctgaaagctggtacaatttaagatcattttacccaggaacagagtaataatttattttgtgtttactgtttcattggacttactgatttattggtggtgacttgatcttatgtgtacttggtgaccttaaagtaaattacctgggtagttgtggtcatttgacaagtttttattgagcacacagccatttgcgctcttggtgtacagtggtataaagacagaccaggtccctgttcttacggagcttaaaatactatggaaaggaagagaaaataaactaacagaaaaataacaatttcagctggcgacaagtgctacgaagaatttagagaagggtaaggaactacagagtgatgagaactgggtggagtgactgctttatagacaatgttgagataatgcatttaattttttaggaaaaagtaatgctacttccttttggagccggggataattcttatgtaggtttacctgtgccatttagctcatttggttgggggacagacagcttttagatttggagcccttgtgcataggctgctaaacttataaacttagttccatgttgtagactaaacctaggccagctaatttactagtattgttagtcattagggtgggagattatgaatggattcacttacatattatttattcatgtggcatatatttgttgtgtatttcagtaggtgctgaagaaaattccaggattaagaaaaactttctcaagtagctgtagtttaccaaaatagttatcagaactaatttggttcattaggactttgagtaaatagtaggtctctcgtgtcctaaatgacttgagctaacacattctgcagtctttctggcacttcttttctcttttgcctcatcacccatgctttttctctttgtggcatcttctgtgttacttttcataactagtactcccacttccctttttacctatagatacaaactttttcaacggtcgcatacatagaagtgcacaaatcgtaagtataaggatttgataaagttttgcagaatgagcatatctttgccactagcacccagattgattttttttttttttttgagacaggtatctggctctgttgcccaggctagagtgtggtggtgtaatcacagctcactgtagcccctactttgaggcccaggtgatactctcacctcagcctcctgagtagttgggaccatagacatgtgccatcatgcctggcac

SEQ ID NO: 106978 - DNA, 3419 bp, Homo sapiens
cgtctgtgttttgctgtctctcccccgttttcctgctccctgcctcttccctcccttttcccccactctccactcctcggaaggccaaaaagacaagcgaaacctgccgcagacgaagggttttgggattgtagcgtctgcaccttcagaaacagtgctgaagcctttaaatgcagcatctgcgatgtgaggaaaggcacctccaccaggtacttgaagatctgtgttaccttttgttaaaggactttttttttttttttttaagtgagagggtagtgagccttactttctgccctttttccaacttgttgattacggctttttttgtatttgcgggtgggttgtgtgtgtttttgggttgagtgtattaagtgttgggtgaaaagccttgtgttcgctaaatgatttatgggagggaatttttccaggttttcattttatttcaaacggacactggatttatttgacacttgtgtctattggcttattggtattggctggggaagagaggaagcagtactatcgctatggattgtaggacatagatgttttatatttttgccatgtgtagaatggttttaatttgcctgtcccgagttacttttctcttgtctgagaaatttagtgggggtagtaaggctggctgtgcttttcctgtcttgagctgcaaatgtctgttactttcttgcacttgaaaataaatgtcggtatttgataaagtaagtgcattttgtgggagactgagctgtcagttttttttttctttgactagcttatgtggggtggtgatgggggacgattttgtaaaatggtgaaatgagcagtgactgtggaagtttgtgtttaaagctctgtgatgatgaaaagaatgttgaaagaattccttttcattttgatgaaggtcgtaaactgcatgtgatgttaaaacgagttaactactttagatttaacattcataaatacttggataaaatgtcaagactcatgtagtcttttggtcatcttttaatttatgtctgaatttgtttcattggcgttagagtttgaagttaaactgttcttggtgtcatttaatgaacaggcattgggtgtgtgtgtgagacaagaatgagtttttggtggatcctttagaacattacagttgattgccaaaagtctcattttatcaggtacttatttttgaattggtgacatttcagtgtgactgtgtagtagtacttcacagttccaactggatattgttctttgattagatgaatatgtcatgttaaggtttcattggtttatttatacttgggattaaataggattattgggcaacctaaaataatctaactctgagattaattggcctaattattgtttctgtgaattgcactctttaaatgatgatacctttgaataaaaataatcaaaaactaaaaatattactccatacgttgttttaagaaatttttgtcggtgttttgtattatcatggaatatatctaaagtaaaaaacacgcatcagtagtttcatagattttgttttgctgtctaaaatagggaattccatcaaatggcatgaaagtttttagaaatgtatttgttatttaaagcagtagtgattgtatattatttatgagtaatgttttttacatgtagaagccctcagaggccaaacctctttattgtggttttgctttgagtgttaccgtagatggtgttcaagtaaatgattaggaaactcctaagaacttgagaacattactggtgaagagaaacgtaaaccaaattcaaaagtttatgtctgatttatcgctgggaatgattatctcataatgaagtgcatttcagcttttaacatgtattttaaaaaaccttactcatcaatttttcggaagcacatggaaggtgttgacttttaaaaaaggtatgtatgtatgtttaaagttttttcagagccgcagatgactgttgaaacttagttaaaactactgaattatttacagtgaaaatattttagagtctattcaggaacagggaaaggcgtctactttaagggtcttcgagtaattttctgatgtcatttaatagaatttgaatacagatttaacaggtgtgaggactgaaaactgtgtgcattcatgacactcttagctggccacagttggtttcattttggttattgtcaatattttggtgttttagatctattcagaagtcatcgttggttggaatgcaaataacgttttggttttcctacattatgaacaggttttatgtggagaagtgagtttgacaggttttcatcctatcctgtcttgtgtgttaactgttggttaatccctttgtgatactggttactgccatgtttttttcttggccctcttgtattttttttgtacctcaaaagtttgagtatgaacttgacattttctatcttgtgtagttttaatcagacttggtatagattgatggcagtagaaaacttgtgttttggatgctgggtaataggcaatatttgtgatttttagaataatttgtttcgtggcacagaaattgtattttattgctctgagctggtgttatgtattttaacaattctagctagttggctagccggtggttattttgcagtttttgatcattctcatcactgtcaccttcatctaccagtcaaccaaggaaaccacctatgacttagtggtaggccagtatgatagagaactatatttgccctttgagggtagaattgatattgctgatgtgattgggaaaatactgccattcgtctgaagaacacttattaaattcgtaggatatgaaagatgctgctgaagggattggagagaggagaggggagtgttaaaatgttgataagccgtgtatgggaatgaccataattccaattataaaggctgtacggaagcaggggtctggcttagggaatcagttagaaggattccttcttctccacttcttttggacaaggagaattaaaaaatcacctgtcaccttttcactattaccatgtacgtcagatatttttagttctgcaggtggaattgttaaggtgattgagaatgaggtcttttttttctttttggagcagcaatagagcagaatgaaaggtgagatggtcttaaggaatctgttaagggaagaaggtggcctaggctgtgtggaggttcaggggcagcaggagagatctatattttagatgtattatcagtatgtgttgggtgtctttggttttttgataaacttgtttttctaactagactgtccactctttgtgccttttctggttatatatatatccttttgtttggagacagggtctttctctgtcacccaggctggagtgcagtggcatgctcatggctcactacagcctcaacctccgtggctcaagcgattcttccacctgaacctcc

SEQ ID NO: 106979 - DNA, 1080 bp, Homo sapiens
agcactgcctcatcttctaggcttgcattatcattgacctatttttctatgttctgtctctcttgtcccattatccttgaagaataatcggaggccttgctgtgggcatggccaggttttaggtgccggtaactaagctggtatcacctttcactggcacaagattaatctgcaaatgagacaagagtgctccctaccacattctaaattggttgacagctggggagcggttttcacacctgctaatgaaaaatccactttggttacgtggatcaaattctattattaataccaagaattgggaggagtagagagagggccatatttaagactttataaaattatttaaaaaaaaaaaccagactcctggatatctactttgttacaaagggatttttattactttatatgttataactggaaattgacttatatagtcaatgatgacaaaacagatatctctaaaataaatggaaatgagtttaaaacttagtataggaataaaattataaatatacatcagatcctaagagtgtattaattataaaatccttaaagatgcagaaaccaccccccccccccaatgtatcaaatgacctgtcatggaatgtcattgcatgtcaggtaaattcaaatgaagcttcataaacgcaaatctctgattgtttggtcaggggtctccattagagcaaatgaaagattgcaaatgtttctctaacatcattccatctaaatccctgatggaatttttgtgatctgctgcttttctctcctgttttctgagtgtgttatatatagtttcaatccataccaaatgaaggaagcattgattagacttgatttaaggcagcaagtgataaatgcagctggaaattgattcatgtctctcaagtgactggggcacagccatccacagttgacacaactcttgtctcaaggctggagaaaacaaacaggcaaacacatgtcaaacagataaatgactttgctgttttgagctctccggggaggccatttgtttcttagataaggaagactgctttccaaagtcatgaaaagataagttagaggaaaaggatg

SEQ ID NO: 106980 - DNA, 1103 bp, Homo sapiens
aactgctttgttggaatgtgttcacaagacttctctcagcttccctggagagcttccaaatccttatgaccattgaaaatgcatttcttctcactagtacattatctgaagccagtttgaaaaagtattatctgtaactcccctcatttacttccactgaagtcaagccagttaagcaaatcctctcgtctaaaaatttaacgccatggaagttttcttccttccatcaatttttgttcttaggaatcttgacaggatctacttcagtgagacttgtcttgggtagaaaaacctgttattcccttcctcaaagaatgagcaaacatgatccttcccggacatcctcaaagccaggcagctcattaaacaaccctcatgagtattaaagacaacgtgagtgagctccttaatttcagagtccgtgtcggcagtgtttctcctaccctttctttgttcatggaggttgaagctttgttatatcacgttactctgtctttgtttaagatgggctgagaacactatactacactagctcagtaacccaaaacacctccagaggtgctgcctttcatttatttttttaaactagacaacctgccaggcaactttagggatctcctataaccatatgggtttcccaaaactcctagatgatgggagaaaaaaataagttggggcaagaatagggaagagacccagtgactgcctagtcgcagctcagtgggaaaaaccaagactttgcagttgacaagaggcagcctccaattcaacccagctccactgtagctggctcacgagggggggactccaaacgacacctttcccttcatcttagaaacggggctgggcgcgatggctcatgtctgtaatctcagcactttgggaggccgaggcagacagatcacttgaggtcaggagttcgagaccagcctggccaacatggtgaaaccctgtgtctactaaaaatacaaacaacttacctgggggtggtggcgggcccgtgtaatcccagctactcgaggctgaggcaggagaatcacttgaacctgggaggcggagattgcagtgagccgagattgtgccactgcactccagcctgggcg

SEQ ID NO: 106981 - DNA, 1010 bp, Homo sapiens
gattactattgtatcccttctcagtcttcccgatcaacctcttctgccttaaattattcttataggtccaaatttccaacctttgtccatcttggtctctttttgggcagactactttgtcagtgtccctcaacccctccctttattttttggtccagacccttttaaagtatcctccagtttaaataaaatgcttcaggtttgaccagagagaagcaattgcttttggtttttgtgaatattactttgtcagtcatctgcttatcactggaaaccttaactcactatattcttagtttatgactagctgaaattcttcatattcgtctttaagtataattcctcttctttgctagctagttcacaatctttgcatttgtccctgtttagtttcaccttgttagatttggcatatcccatccacctgttactaactttttggaactggaatctgtcacctaggttatttcctgatctttgtcacctttgtaacactgtttataaacttgactcttgaaatctaatgagcagtcattttttggagcaagcacaaggttaggcgctgtggaactaaagaagaattagatacggcttctggccttaaggaattagagtgagcattctctgttttcacctaagacagtgagtagaatgtaaaatgaggaaggctgaggtcagaactttgtactcttccactagataccttccttcaggttgaaatcagtctgacctctaaggtcaaatatgagtctagacaactgtataatcatacactcatactctgtattttgcccataaagagactacaggagattgttatatgttttgttaaaatccagacacaatctttgcacagggttcccaggtgcgggctagtccaagggatggcatcagtttgtgaatccatagtaacttctggggatcacctacttcgtctcttatctgcctatatgcagttcacatattttgagttcatggtctatggtttcatcactttcctccttcttttc

SEQ ID NO: 106982 - DNA, 1110 bp, Homo sapiens
aatattcatgtaactaccactgatttcttttttttcttttcttttcttttcttttctttttttaaagagacagggtttctgtcacccaggctggagtgcagtgatatgatcataggtcactgcagcctcaaactcctgagctcaagtgatcctgccatctcatcctcccgagtagttaggactacaggcatgcccagctaattttttattttttgtagagatagagtcttgctttgttaccccaggctggttgaacaactgggctcaaatgatcctcccatttcaacctctcaaaagtgctcaaagtggatcgattataggtgtgagccaccatgcctggcctccaatcttaagaaatagaatatcaccaatttcctagagattccctatgggaccattcccaattgtattaacttctggtaaccacaactctaaattttatgtcaatcattactttacttttccatatagttttaccatttgtgcatatatctcaagtttagtttttagctttgctttcttttggactttatgtaatggaatcatgctatatgtatggttcttctattacttgtttcttttgattttaaaaagatttatccatgatgatgcatagagttgtagatggttcttttctgtcctgcagtgtactatcccattgtctgaatatagtgctgtttgtctgtctgttattctgtggaaccactaataaatggtttccagtttgggctattcagaaaatgctgctgcagatatcactatacgtgtttcatggtgtacttgtgcaactttttggttaagccctatacctaggaatggaatttctgggattagggacaatgatatgttagcctttaatgggcagtgtcaaactgttttccaaagtggccataccagtttatttcaacttatactttaaccagcaatgtataataattttcctgattccaccttcatgccaacacttacatggttcagattttacgatttgacaatctgaaggggtatgaaatagtttctgttgtaattttaatttgcattttcctaattactagtgaagctgagcatcttttcatgtgtttatgagccattggtgtttcctctactatg

SEQ ID NO: 106983 - DNA, 1201 bp, Homo sapiens
cccaaagatgttctttgtggatgtcacttttgacaccttaagaacccaaagacacattcttttggcaaagaataaaacaccttctcgcatatggtattaagtacctttgtgccattccaaataagcttgccagccaatttagattttatttctatccttagattatcctaatgcttcagaaaaataagggtttagttcttactagaagaaattgacttcactttcaacttgatatttaaaattacagttgtcagcatttgtcctgtctgcttgtttaagggacataacagttaaaaggacttcacttaatgctgtataagttagtgatctgaataaaactattggcaaaggatctccactctgtattaaatactggattaatcatacaggtcaagctttcacaattctagttgtgaagcttgtgttctgaatgtggcagcactacatatccttatgtttcagaagctttattgtgatccatggtttcagatgcatatttcaaatccagaaattttgcctggtaagtaaggcttatcataccttttttaaaaaattaaatattttttaaatagtagaggcagggtcttgctgtgttgctcaggctggtctcgaactcctggcctcaagcagtcctcctgccttggcctcccaaaagtgctaggattataggcatgagccacctcgcctggccttgtacctttttatcagaaagatccaaccttgctccaggtttgtgtgaaaacagttttgctttgtttttaaaccagagccacatagatctttccatcttctgtataggtcagtgttacttgtttctgttaatcatactatttcaaagtcccctgccattttaaggtgggctctcctcttgaggcttgggcatgagagttaagccagatactgacttcgttttctatcttttggggtcttgttatcctaggtggaaatggtggttgtttaattgtgactgctttagacttgagtatctgttcatcagtccattcattcaacaaatagtttatgagttcctactgtgtgcagggttctctgccaggggcctgccaatggtaaacaaaacttgacttggcttctgcccttctagaatttgtggtctgatgaggagagaagtattaatcaaatacttgcatacacaaaaagtaaaattaaaaccttggaaagtggtgcaaaagaaaagattcat

SEQ ID NO: 106984 - DNA, 1129 bp, Homo sapiens
ttttcaaccagtagttattgagctctattatgtgccaggtggtgagataggtgctgggaatactgtggtgaacaagagagacacgtcgttgtgaagttggtcttctagtgggaaatgcagatgtaatgtattatacccaatagcggctacagtgggcaagtatgggagctgtggaagcatctaagaggacacagggctgtaggaaaaggcttccagaggaagagtttaagctgagagctgaaaggtttgtaagaattggtcagatgcaggtggggaagtggggatgaagagtatttcagacagtagacaaaagaatatggcccatttgaacagcctgaaaacccaggatgcataggttatagtacagaagggataggaaagaagtgaggctagaggttcatgtagaggcttggccacctaaagatgcttggcctttgtcctgggagaatatggagcatctgaagagttttaagcgatgaactgcctgtgtgagtgagggtatgagactgacattctgggaagatccatcaggtgattgtggggaatgaattgtggtggggcagagctcagagctccagacttaaaggccagttaagaagcagggtaatccaggaaaaatagcctgagccaggtgagtgagaatggggaaggagactagtcatcagatttgagaggcaggtgagacagacttagtaattgattggatgctgctgggagagagagaaggggaggagccaagatgagatgtgggttttgacttgggcatctaactgggctgttaaaggtggcatatgccaagattaaatagtaatgaagaaggtgtagtttgggagagaaggtgaggagttcagttttggaaatgttgatttaatgcctctaaggaatatcagtaaagagggagccaggaacatttggagcacagctgggacagatgtataaagaagagtttagacaagaagggaaatgaattaagtcacaaaacataaaaaatgttctctggttacatggtactgtgttacctataagtataataataatcggagtggatgcatttcaagctgggaaaataacatcatgcagatgagtagacaaggagaacatgtatgcaacatggtgaacaaattttctt

SEQ ID NO: 106985 - DNA, 1020 bp, Homo sapiens
ccagcctgggcaacattgagcactgagtgagcgagactccgtctgcaatcccggcacctcgggaggctgaggctggcagatcactcgcggtcaggagctggagaccagcccggccagcacggcgaaaccccgtctgcaccaaaaaatatgaaaaccagtcaggcgtggcggcgcacgcctgcaatcccaggcacttggcaggctgaggcaggagaatcaggcagggaggttgcagtgagtcgagatggcggcagtacagtccagcctccgctcggcatcagagggagaccgtgcaaagggagaggggagagggagggggagggggagagggagagccccaatgcatttttaaaccagtggaagcaatactgcacataccattctgtagcctgttttatactcatgataataccttataaaccatttccctttataacataatatccattacagagttttttttaagtaactaatttattcctcattataaaaagagtacatatatgctcactgagaaaatttcacattaaaactgtatggttttaatacatagcacattttgaaatgacaagggatcaagaacggtgttcttttgtttttgctacatggaaaaattttattgtttttaaatgaaactaaaatctaaaatcctgactcttatcagtacaaatgtgaacctgtaattaagatgttaaatcacacttttcctctctagtatagtttttttaagtaggtagttctggggaaaaagaaaaaaagtgtttttgaaattctaaaccctctttgcattaaactgattaatggttaattaactctaatagtgcaattaactttttttgctgaaatcttctgaccttttggacactaatgtgggaagtttgtagagggaaacagctatatcacaagatagttatctgtcatttcataagtcatgaaccttaatttcctcagttgtaagtaaacctaagtcatttcagcactgaagttctaaaattttagaaagcttaagaccttatgatt

SEQ ID NO: 106986 - DNA, 1034 bp, Homo sapiens
gccattatatgggatttattttttatttctcttcatgggggagcaattatattgcagaatgaaatatgaaaaaacttgaggctatacctgttgtacagaaaatgcttagggattgctcaagataatgcctaataacatacagcaggtggtgtcagcatttgtgttggaaatctagatttcgccagatggaaaattgaatgtttaacccctgaggtcataatggcatgtcatcacttcatttgatcctcctgctaattgagcttatcaaataccctgctgccatttcctgttgttactttcattttcataataaaattaaatggggatagtctatttgtgtgggttttggtttttcttttttttaggaatgatgattttgtaaacatgtaatgaatattgaggtatgtaccaggatctcatttctgtgagtgcctgtttctctctttgtgatattctttattagctagagagaagtttatttttcattaaagaagaaagatataggctgccaagtagatgtagggattatcagaccttccctgaaaaaactttttctcttggttttatgttgtgggaaatgaagtgaaattcttaggttctttgtaattgttgtgctaatagtacttttaaaaaatgggataatgtattggggagtgaggtaggagagagaaaccagcaggaactcttcaaattactttgcaaaagttgttttttcaactttaccaatttgaacataactttcttttccctaaacaggcgtgttgctttcagtttgtatgttaaattttaactgtagcccagctatttttttctctcttttgaaataaaacatttgtttatctaatttttataaaaatttctagttttattcttaattttacaagcacaacatgattgagctttctagtattttctttactgtgaacttcttaggtctaaataattctactgcagtgtagatccatgattttcgtaaggaattttttcctcacttttaccttctggtttatttcttctacatatagtttatcagt

SEQ ID NO: 106987 - DNA, 1044 bp, Homo sapiens
ttaattgggctcaataaacaaattttcagaaattactgctttactaacctcttccatagataaaataacacaatcaatgagaaaggaaagaagagctatggtaccaagcacagggcttgtgactgatcaattttttaaaagaataatggatgtttaaaacattgaggtttggcaagtgtattgtatgagctccaagtttggaggagactttaaaggtgaatttctttttaatatttacattttatttattccagagtcagtttagcaaatgacttttaaaaaaattgaattgtagaggagatattgcaaactcgaaaactaaaagatgaaatcactgccattttccagtgttgacatttatctatatttaacttctgtaagttcccagttctggacattttaaagaattgttaggccttttaatttttactctttaaatacattgtatgaaactattttgagatttattcaacaagtatttgttgagaacctgccatgtgaggctgctgagctggatcctgaagatataatagttctaatgggggcacagggcacagaattacacaactaccagggtttttgaaaaattgcatttgtaataagtagctcaaaagagaaatatggagagtgaaaatataagccagggaaactgacctacatttaagtcactgaagacatgtaacttcctactgtgggagcctctgccttatttgacctctaattctcagctcctactagtttcctaacaccctcaagtacttgttaattgcttgatgagttcatttattcattgatttgttcaacacatattttgaatgtatgcctactcaggagccagtccatacaaagcaccctgtaaatataaagagcactagaaaaataatttagatgtgtgggctgtatttggggacgtgttcactagccggggagcgtgttcactacctagggagctaagatgtccatcagtaacataaaatatatagtcagccgtggtaagtgccttacaagaaatgtggattaagtagttcaaaaaagagagagacg

SEQ ID NO: 106988 - DNA, 1045 bp, Homo sapiens
ttttaaagtagacagtaattgtaaaaatgaatcatggttagatgaaagatgcctttttattcatccagttggtttagactagctgtattttattttgaaggattgttgattataggatgaaagagctatcattgagaaatctatcttctttaacttaacagtgggaaacaaactgctttgttttttcatgtgttatttcttcttgccttccatctaagatattttttgaattgctaaaagtaccttggaaaatcaatctactataaatgactgtgtgagcctcagttacacgtcacaattcatttcttttttaagtcatgctagattatctgggcattattcatggacttaaaccagtgagaatgcagtttgcgattatcctgttatatcatggcttccagatggagaattggcaaaacctccacatgcctgtttgcacacacactcacacactctcactctcactcacatatacagactattgcttgttactttttattctgggaagtaatctagttcttttgactttcattggaaaagtaatcagtactatgattgcataaccaaaaataaattcgattgccttgacttacacaggaatcaattacccagttttagtaggtcagaattgaaattgagacttaatttttattcattatcactctgacaagaaatagttttatcagctgtgttatgatagtaacataaaacttgaagtaacacactggaggcctctgctaaaaatgaacctgaaccctctatgtaccatgtacagtgtgttctgtgactaatttgggttgtggctagttagtgctaaaactgagggctgggttgtctagaatttgtgccagaagctgtagagatgacatgttctggatgagaatcgtcacctgtctttgtacaggtggatggcacggggatgccattattgccgctgaagaggctcatttgtttgaacaccccataatttaaataaaggtagctctggtttggcatttagtgttttccaagaatgaattcatgcctacttataattcaaaatgca

SEQ ID NO: 106989 - DNA, 1141 bp, Homo sapiens
cacacctggctaatttttgtatttttagtagagacggggttttgccatgttggccagggaggtctcgaactcctgacctcaggtgatccacccgcctggagtcccaaagtgctttacaggcatgagccaccactcccggtgagttctacatttttgatctgtgccatcttgaatagccttagctgacaaaaacatgaaatgtaaattatattaaaatgtcctttatgtgcatctgtattttgttaatgccatgtgttttagattcttatttgtaatctttaggactttatttaaaagctttcttgtgacatttgtgatgtattgatagtgtgagaaattacaaaaactaagattctgttttattgtaaagtatacaaaaagaatcttatttcatggttttatgtttctcttctacttggcttcacaatgatccgaacttgcagcttttaaatgagaaaagcttcctatttcattgtgtacttttgtttgtgtaacattttgtggaaatgactgcttattaaaatgacacttcacagacttggactaacgttcatgatatcatggtgtcttttggaagaagggtgttgtgttacccactctatcgccatttcaagctggtgatgaaggcctacagggacactataaagatattgcaactgggtaagatattactgtacttgcaaatttgggagggaaaaagttgtaagtttttagtctgtgaagatataataatgatttttgcttttttactgtatataaataagtaatgaaaaatgaatccaaccacttttaaagtatagaattcctgtgtataagacatatgtagataagtaattgcatagaggcataataaagactcttttccgagaggagtaaggaaggtaaacagagaaggcacacatagtattgcaaaccgttttacattataatagctgcatcattcagtatttcttggctgcctataatcttctaggctctatggtgggactgtgggtctaataataaagaaggcagaaaagttccctgctctgttgaagtttacagttttgtcagacagatgatgggtaagttagcaattccaaagagagtgaaaagtactctgctgggagaagtccagggatcgtttaggaggggacatgta

SEQ ID NO: 106990 - DNA, 1006 bp, Homo sapiens
tgaaaatactttttgttttcactcgtcttttaaagatactgtaattggagaaaatgttttctttgaccaaaaaatgcttcatattaaatcttgaaaagatgagtgtttaggtatatttgaaaaaatttaccattttttattcttgtatttgtgtatttgaaatcatgaagtcttacaacttgagaccttctctagcatttacttattctcaccagcattctctgaaagatcaaattttctagcagcttcttaagtgccacaggtaatacttcaacattatctttgattcctttgatagattatttatggattgtttgggaggcatgtaacttagtggaaaaaggacagaaattgagcagggattactttgctttaacttttagtttcaaaacccctggttgtttgctcttgtgttctggtactcttatcagtagaaaagttttattttcgaaaatcccaaggagagtaaacagaaacttcccactggtagtctctgtatcagcaaaataattatttttctatagtcgtgaacacttcttagttctcatatgtcagtgatcctcagacactggttgaataaatggatttgtttggtctatttaaatgacttcacctctaatgtgatggtattcttttctccaaaacaaataaaggttgaatctgcatggaatatcaggaaactgagtccaacactatgctggtttgaggtatgatttccagttgcaattgtttagaatttgttgttcaggaagttatttttgttgtttttacatcatttggggtaattcaagcaattccttgaatttttaaaagtagaagctctattgtacaagtatgttttccatctttttaataaaattctgataatgaaccaggtagagtactttggaagctgggggagggaaacacactttggagagaggatggagacatggtttgttgggaaagaatgtgggggcagagtgagaggtgtgtttgtaagttggcatgtattggagcttgaaac

SEQ ID NO: 106991 - DNA, 1020 bp, Homo sapiens
acaaagtcagtagagatatggtagctttggaaagatgattagggtttatatctataatatacaggattcttaatttgacaagacaagccatccaatagaaaaaaactggacaaaacacattcgaatgggtcactcataagagtgcaaatccagattgcctacaaaccaaggaactagtgcttaaagttgagcaattggagaaatactaagtgaaataacaatgataagtcactgttttagttttctcttgctgcataacaaattatcacaagcttcacacagtgtacattcatgatctcagtttccatgagtcagaagttgggccaggcttagctgggtccactgtgtaaggtcttgcaaggctgtagccaaagatatccatcttatttttttaaaaaacagatgttggaggctgtgttctttcctggagctcaaggtcttcttccaatctcacatgattgttggcagaatttagttccttgcagatatagaactgaggcccctactttgttgctggctgttagctgggggccactcttagatcttagaggcctctacaggtccctgccacatagccttctcacaggctctctcacttcaccatgtgacatcttatttcttcaaaactagcaggcgagtccctggctttggtctgctaataatggaatataatcatggaaatgactgtcccattgccttggtcgtattctgttggacagaagcaggtcacaagctccatccccacataatgatatgactcattggaagtcatcttagaattctgcctactatactcaatttattaacctggaaatgattgtaaaaaagctattacatttcttgccagggggaggtgggaggtatgtgtaggaagaggaacttctattcatgactgtgagaaaggagagttattgtagcctttaagtaaagtgtctttctaaaacagatacttttttaacccagtcaatacagtctcgagagtctactttatggaaataaagcctctaataatcaaggaca

SEQ ID NO: 106992 - DNA, 1047 bp, Homo sapiens
tagtgatttcctggtttgttgttattgttatttatcatctctgatttctttgcttgaatttcagaatttaaatgcatttgtgtgttattaatgaagtaggccacagtggaacttataaatgctcagtaaaaggtggaagtgttttagggaaagtctagcagctcctagtatccaagaattcagaagaataattcaagtaggtttttcttctgtgcacagttattgaaaatgactaatgtagaaatacttacatgtggataatgtaacgtcagaacctacattgcctaggtcaacttttataaatggataaacgtcgataggtatgattacttaaaaatgaaggcataaatatgtagagagttgacatgttgctaaatagtttctgggcatgcttactttgtgattgagaattatgtgggagcaggggtctattagtcaactaggatataaagacttttctctagtcagagatcatgaacacctggcattttcccattagctaaattaatgaacatctcaaaaaccatacctaagggaatactgtctctaaccttcttgctaaatacaaggagtcataaaatattttgtcaggtatgctttcttcctgcagtgagtatatgccttcatgccatttccttaaatcaaattgcttaaaatgaactgagagcttttatttaaattaaggaacttcagatgcgtcctccaatgaggcagtcaacactcagtttatctgtcttattaattaaatccagtaaattttaaattaaatacagttgacccttgaacaaaacatgtttgaaatgcataggtctgcttatatggggattttcttttgcctctgccacccctgagatagcaaaaccaacccttcctcttcctcttattcctcagcctactcaatatgaagaccaggatgaggacctttgtttatgatgctgtacctccacttaatggataataaatttaatcttaaagagacttcatgtacaattcaaggattggggaaaccttaactaaagctataaatccagaatcttgtcttaaaaa

SEQ ID NO: 106993 - DNA, 1116 bp, Homo sapiens
ttgcataaagaacttatctaattaacagataggtacatgatgacttgagagattgtgatacctcccactggccaggatagcagcatttcttccaaggattgtcgcttgacctctcttggacatgtggctctgctaggatgcgtggagaatgagggttttatgttgatgtagaccttaattattaattctgggtcaagattttccaaactgttacatatatagctataatcatcatatctccttatattggtatagtacctgcagcttataaagtgcactcatgtgattattcagttttcacaacagatgaggagaggagtttaagggacttgctcaaggtcacactactactaagtggcttggccaagacttgaaaagagtctctccatttgtcattttgtatatccttttcatgtacactatttcagtttaactgctgtagctctcgtgattaacattctatctcctgtgacacagtaggatactaattggaatggcagggatatatcttgtgatgtgcaaatggaatgagtgatgtgtaatgataaatggttgaactgttcaacatcctaagggaaactgggtaagagcagggtatgttacattttggaggacatctgagagattcaactccatttacactgctatttctaattacctttatctctccaattgtggttttaaaggtccactgaagagcaatttgaagaaacccatttaaaatcatgctgaatatttaaagtggaaatttcattgtcagcaaatttctcaggctagcataaaaacagaatgaactttacaagactgaaatttcaagtgggagggagcttaattagaagaactgcctatctcctctcttctaaaactagaagaataactatggcctgagagaattaggaaattggaatttatagttagcagtgtgatattataagcagcccttatttttctccatcttctgtgtgtctttatccagaagctcattttctttaatactatgcatgaaatattctttccacttctcaaagaactgttcttacaagaatggtttaaatttagttatgggctaagtgaggagagtgggagtcatgaggtaaagattctttgtgacttttc

SEQ ID NO: 106994 - DNA, 1040 bp, Homo sapiens
cttatacatatagccagaagatagttttatgtaattttttaatacttttgtgtatgcagccaagttttgactgctttttgactgtgactcatcacatgaggtcaagtgtggagttttccactttgtggtgtcatgttggtgctcaaaaagtttcagattttggagcatttcagattttcagattagggatactcaacttgtgttataacaatagtgataactactatttattatggcttttctttttcagtatctattttgttggtgactaggggtattcaaatagaaagatgagtcatctctaatttctactttcttggttggggaaagaatctaacttagtttattaaaatgtgaaagaaatactgaggaacttcttaaaaaatgattgatatattttgatggttaaatgtttgcaagtattgatggccacttatgttacgttataatttaaggacttcatgagacctgtgttaaatctgcagattaacccttcctggaagaattgtagaaaatggaagtgagcaagggtcctatgatgcagataaaggtattgtctttggaatttttgttagtttatttcttgggatttttcacattatttacataataatcttacaagataccatggggaccttttgatgtctttcaaatacaatctgttcctatcactctttcttgtttcttagtgtccagtgcctgttattgatgttccccacccctcacaagtcttttaaagtatttcacaatgttcttcaaagtaaagttaactgctccggttctatttcctagagtacttcccctacatttagtagacatttaaaagtaaaaattagaacatgtgaaatgattgatcataaaaaatgtagatgacttatgagcttatgaatggaatctttctggtataattttcaaacttgaactttaataacaggtaggtgagagagaaactatgcatgggtggcatttaaaggctaattgaattttctcctcatgattgataagcccttcatttcagctagccatgaacccatttattt

SEQ ID NO: 106995 - DNA, 1059 bp, Homo sapiens
ggttttgtaactttcccaaggtcttacagctgagaagttgtggccaggaagggattcaaacgcacgtctgtttacctgtcaagccagtgctgttaaaatcatctctaagaacctcgaaaaaggctcggttgctagtcatcccgccggttcaacgccggctcccaggcaccactcgccacgccctttctccgcccgggggttttgaaagttccgcctcttctcgaacggcgtcccgtctccatggagattggcgtggggagagacttcctgccttacgcgcgagcacttccgcctcgagccggaagctccgtccctcacaccgagagttcctgcgcgtggggagttggagagtttgcgtggcgggaacgcggcggcagtgagagcgagcggcgccggcccttgcgtccggtgcggcgatgctgaccccggcgttcgacctcagccaggatccggacttcctgactatcgccatccgcgtgccctacgcccgggtctccgagttcgacgtctacttcgaggggtctgacttcaagttctacgccaagccatactttctcaggcgagttcggggtgcctggccgcaggaaaggcgcattcgttagatagctgctttagagggagaatgcaaggtcgagagagcagtgctcgattgcgcgaatgccttttcccgacgtttccgcagcttctcttggtgccagggaactgccctcttccaggggtgcgttttagatgctgcggaagcccttttccttcttgagctttcttaaatcccatatcaaaggattgcggaatcacttgaaaaagtgacgtttggaccgtgtcactttcccgtttctgccctgtcgccctagttctcgtcccgttctgacttgttctgttctttcctttcactccgcgtttgctctcccagtctctcccttcctgggaacggcgcgcgctgacatctccgtgacttcccaacccgtcggtccttttaactttgcccaggccgccttctgttgatctatctcttgtctgtccgctccctacttaccgaaattcttaccttttttggacctc

SEQ ID NO: 106996 - DNA, 1050 bp, Homo sapiens
ctactgtatgtttgataccctgctaatcattttacatgtatgtttaaagtttaatcatcaaaataagatagaggttgtattattcccatttacagatgagaaaacagaagtacaggaagttaagtgactagacatggatttcagtggttttgagtgagagagttgagatttggacccaggctgcctcgtgcctgtgtttgctttcttatttaagatgcaacactctcttctttttttggatgaaacctacatcatcactgtgtgccccttcaattcttgatctcagaattttgacaaatggggcaaaatttgatctatgagtaaaaaatcacactcctgtactttgaaattacatgctgtgtacagttagtggaaacagtttaatcgtgccacatgtgcatgagagctggcactaaccgtggacatatatgtctttctctttttaccaccagagtgtctctatgtattcccctgccagtggaactaccgtcccgatcactgcatgtacggaagcaactgcagagaggctgagcatgaaggtgtgtctgttctgcatggaaaccgaggcgtctaccatgacgataagcaaccaacgttcagagcactctatgaagcaatacgggatgtaagtgtgcccttgctgctgttagcagatgtgcttatcagcatgaagcaatattggcgctttagtcacctgtccctttgaaggccaaatattcccaaagcatagagttataccagttattcccgacctcagtcacgctctgtcactatatcctcttgccaccttgtactatgtcatatctacttgacttatttccacgtacaccattcattatcttttacttaaccaaatttactttaggaggaaatttctgttttttgtttttgttttctgagatggagtcttgctctgttacccaggctggagtgcagtggtgggatcttggcttactgcaacctccacctcctgggttcaagtgattttcctgcctcagcctcccaagtagctgggactacagacacgcgccgccatgcctggcaaatttt

SEQ ID NO: 106997 - DNA, 1095 bp, Homo sapiens
gggaaaaaggaagtttgtcctgtcctggatcagtttctttgtcatgtagccaagactggagaaacaatgtgagttgaaaacatgcatttgtcgttatagaccagtgcattattaagaattgctcaggaaagggaaaaaagtatattttgggataattaaataattcattctaaattgtagaagtcctggtcatttaaataatttatatatttacatttaaagaacgtatacgcttacttactttatacatggtctgtaacggattttaaaaacctgtgtatgttaaaattttctttatagctaggctttggcacgcttagagaatgtattagtcttaacgagccagagaaaggaagaatgcctattccattatgaccctttttggccataacaaataggcttattcctagaattttgtggctttgattctgtttcagagtcttggtggtattttctcatattgtcgtgtgtccagcctttttttggtcatatttgcatatgtaggtgtttaaagtgtcacttctatttatcgtctggaggactctgttattatctgacaaattccagatgctacagttttgacttgtagactttctaagatagctgacttgttacatatgctcagcattttattcagctcgtttccaaatgttctgaatctgaaacttacgctataaagttagggctgtgttcagaaggaacattccaggtcattgttttgcagtttgtgtggtagacacaatctggctaagtttatttgtagacaacagtgcatctttgatgacttctttttgtagtctttgggtgggggctggggcagcaggaaaggggtaggtttctatggtttcaatgttaataagtgggttatctgcccagtatgagtgtagctttcagcaagaattgtataatttctctggctttattattagcaagtgttcatttctcacaagatttgcttatttgtagtctagccttttaacaactagcctaattttagaaagaaaaaaacctttgctgcctcagtgcttgatttaatggtcatgcctgcaagctgagtctccttagtattctattaaaatacaccagtcattttga

SEQ ID NO: 106998 - DNA, 1019 bp, Homo sapiens
ctttgatatgcagcataatttttttaatacctgtttctcattttgttacacagaatatgtaaaagatgtattcaagggttgggatttaatgaaattagtaatttttatatcttttacactttaagtggaacagatttttaaaattacgagtttgtgaaaattctggcttctgctacagctagtaatacagtttggtgctgctgtcctgactcttgctacatggattatcagttttatccaccttgcttttataccatcagtgcacacattaacagtgaactagtcagcccttattcttttgacaatagctttgacctcttggaccacaatttgaaaactgctaccctagtttatagggttgctgcatgggatggaaggtgattacagatgggctcccgttaatttgtgtaaatttgtttaagtagtcaacctgtgtaaagagattgatctgctgtcactaatggtagtactgtctgcctgaggaaatggttagcattcctgactcccgtgtctcctggaatttacactattcaggcaggtatcctcacaaaatttccttttatattactggtgaaatgtgaggaaagagggataaaaaggtgtttatgttaatttgataaatgaatagatgtgaaaagtacctaagcaaattatgtatttttattgtgcaagtactggttggatagaacctgtgattatgtgccttaatcataggtacatgccttttgtctcttaagtgacaaaagagcctgaagatattaactgaaaggggaaaaaaaaggagaaagtaaagtttattttgttatttagtagataatagacaaattttactagtccatgcaaacattgtaacttggatgattaaggtatggattcattctgacttaataggatagtgtaactaatgcccacctggttaggtttgttatgagtgaaagagtcaaaatattattttaaacatactaagaataggacctaacacaccatagactttcaggcagaggtagttcatttaaaag

SEQ ID NO: 106999 - DNA, 1003 bp, Homo sapiens
atcacatcagggtaaatgggttatccatcacctcaagcgtttctttatgctttgtgttacaaacagtacacttatactcttagttattttaaaatgtacgataaattattgtagtcaacctgttgtgctatcaaatactagatcttattcattctaactatatttttgtacccgttaaccattcccccctccctccccccccacctttattgctttttaaaggaagggagaatggtttttttgttaaatagaaaggtatgcttattttattgtctttttttaaatgactcatccatttatttccctattatagcattttcttttgtagcttaatacatgggtgactagatacagctttacctagcaaaagaaataatgttcctcgttttcttgattatcagtgatctcacactgtaaaattatatttttttgcagtatcccttttactattcagcgactatgtgaattgttaacagatccaaggagaaactatacaggaacagacaaatttctcagaggagtagaaaaggtatttattttattattggaattatattatgctgtggtgtaatagcttttattttagaaaagaacattgagtaagatctgtttcgggtaccacttcttgaaatatgtttttcagcctaccttgagtttcccaaattgttttccaaattgcattctgttttacagagagatttaataggaccgggtagaggagggtttgtgtgttggtcattgaagtttggtgaaagcagcttattatttcttggaaattcatagtgtatatcaacttattaaaggttctgtgaagttataattgctattttaactttatagagtgttttataaacttacacatggaattcattttctcaattctggagttcaaaggtacataactttggaaacttactggtgccaagcatgtaaatgaggtattgagtagaaagatgcaggtcagatttagagataaacattagtgtttgtgtgtggagggggt

SEQ ID NO: 107000 - DNA, 1021 bp, Homo sapiens
aaattagaatcaatgggaatttaacccaccagagtgattttagaaacaaaaatgatgaaactttatgttgtagtacttttcttcatactaaatcactgatttttgttattgcagaatgtgatggttgttagctgtgtttatccttcttcagagtaagtatattttttctatttctagtatattatttactatatttaatcattttattgcttctaatatattattcttaaaatagactgaatttatttaatatgtaattaagtgtgataacatacttgtgaacctaccattcagtccccaaagtagaatattactaataacattatctatatgttttttccattaaagagatttggattaaagagattggtgatttactgtaattttaatattgttggatttacatactgtggtggcactcattgccctgagatgccattctagatgcctttccagggtgtctctagggcataattcccatgtttggaataactacttgatggcttttctctttatgatggaaaatatttccagttgtcaagatttagatatagcaaagtaagaattaaatttggatacaatttctcaaccttggaactatggacattttgtaccagataattctgttgtgagtgggtgtcctggggattataagaggtttagcactgtccttgacctctacccacttatgccagtagtgttcccctctccaaatatctttagacattgccaaatgtctcttggagatgtgaaaggcagggaggggaggttgtcccctgctgagaaccattggtttaaggttaatctggctctgctttcatagactactctgttacccaggctggagtgcggtgatgagtgatcatagctcactgcagccttaaactctagtgatcctcccgccttggccttccaaagtgctgagattacagatgtgaaccaccacacccagcccagtcaatttgtttttagaatgttcccaagaatatagttatgttgctaaataagatactaaaataat

SEQ ID NO: 107001 - DNA, 2159 bp, Homo sapiens
gggccgatcacttgaggtcatgagtttgaggctagcctggccaacatggcaaaaccccgtctctactaaaaataaaaaaaatagctgcgcatggcatcacacgtctgtcatcccagctacttgggaggctgaggcataagaattgcttgaacctgggaagtggaggttgcagtgagctgagattgcaccactgcactccattccaccttgggtgacagagccagactccatctaaaaaaaaattaagtcatccacaagtgtattttcttttcttataggaaaaacaattccaatagtttaaatcgaatgaatggtgttatgtttcctggaaattcaccaagctatactgagaggtgagattctagatttttaatacctacagagtttgcattgtcctgattttgagtagcaggcttagtgtactttttaaaaattgggcattttatggacaccataggatgaactacatagaattagttaatttggtaaggcatgggcctgaaaacaaagttgcagcaaatacttctgtgatgtattcacatcaacataccttaagagggatgactttttataaaaataggaaatgatgttcatttatcttattataggtctaatataaatgggcctgggacacccaggccacttaatcgaccaaaggtttctttgtcagcccccatgacaacaaatgggttgcctgagagcacagacagcaaagaggcaaatttgcagcaaaatgaggagaaaaatcacaggtttgtatgttttatatttaaaaacagtgtttttattaaaagttaaagttaacatttaatcagtacttatcacttactatttataagttctgagggacagaacaaggttttcatgcggtttataggagcactggcttctctttgcagctgtagcaaatgttgaaggtggacatagacaagacttaaaactgctaatttgtggagactgtttatgtagggtctaaaagtaacgtagatatgatgatccatttcatttgttgtttctgaaagttacttgaaaagaaatgatctttataaataagttgatttttgtgagtcgtttctcattgtagttcataaaaggacaccttttgtttatatcttcaaattttctgtatcacattaagggaaggaagactaaatgagggagaggacttaagagagtatgtccgtatggaagacttgcgggtttattgtaggagaatatttaacttactggagaattgcacagaaaggtcatatagcttttctgagtcctactgggaattattcatcaaacagtttagtttaccttgaaattattctcttgtgtttttctttgttcaggtgttataatttaactttgacactgaaatacaatttaaaacattatttaaccttaaaaatggggatgtagaagatggggaaaataatcttattaatgacactttaaaaaaacatttacagtgactcttcgacctctgaatcagaagtttcctcagtgagccctttgaaaaataaacatccagatgaagatgctgtggaagctgaggggcatgaggtaaaaagactcaggtttgacaaagaaggtgaagtcagagaaacagccagtcaaacgacttccagcgaaatttcttcagttatggtaggagaaacagaagcatcatcttcatctcaggataaagacaaagatagccgttgtacccggcagcactgtacagaagaggatgaagaagaggatgaagaggaagaagaaggtatttagagaccatctgtaaaagggtggagtaaggagatcctcaaattcttgtacttcatttttttcgtgaaagaattttacgtaatggaactccttataatgctgatgttgggcttttctcccacctgtatgtagttgctgctgaatttcaggggatgtgatttgaactatagaatatcagaattcatgaaacttaactgtggaggtattttgaaaatacaatttaactacaacaacatttgcttatttttagagtcttttatgacatcaagagaaatgatcccagaaagaaaaaatcaagaaaaagaatctgatgatgccttaactgtgaatgaagagacttctgaggaaaataatcaaatggaggaatctgatgtgtctcaagctgagaaagatttgctacattctga

SEQ ID NO: 107002 - DNA, 1942 bp, Homo sapiens
tcatccatggaaaatgatgacgaagccacagaagtcaccgatgaaccaatggaacaagactaactatttagaaacatttagatgcagtattttacatacagttctggttttaacactgtataaaacttttgtgtaataaaatggacctttagttttacaagagaagcaggttgtaaaataaagtactttatggataattcctgaaagagttgtacatgtaagaactgtgaatatcagctcctctgggtcctgcttaccttaccgctgacttttctttctttctttttttggtctgggcaaatcagtggtttgtgtatagatttttttttttttttaatttaggattgaagtttttaaactggaaagtaattacaattttgaaaagttttttgagattatcacatttagtttatacatatgcaagaagctttttgtcttgtctctttctgatagctctagcagttttcatattttggtcatagtttcaacattttaacatgtgaattatagggtttcatgctggtttccagattttattgtttggctacgtacaatggaactttaagtcatatatacatacatatatatatatatatatatataattctaaggggggaaatgttatatttttctgtttctataagagatgaatacagtggatactttttctattggtaatgattgagttcacctctttcagaagacattttctttctcttctgagtaattgaaataaaatctggcccttgtgaaaccctggaaatcttaagtctgttgaaataccaggttaaacacattccaagagatctgttcaaactcaaattcttttgtatacttctgaggtgcctgagaaaaagacttcattatttatgagaaaatatgctttatcttggaaattgtgttcaaatgttagcttactattttgtagaatgaatgtttatgaagctgatatgagaccatctcagaagaaccaagtaggttccttgaccttttgcttgcttttctgaacattgtgaatattacacatgtctttctaaattattctagggtatgcaaatgtcaatggtatgaaacaccactgtactggaagaattaatatattactttagtatgtacctgagctaaatgactgaagctttaggggtgcatagaaaccaccataatttgtatgacattttgaagtgaattaaatatttttgaacatgcttcttcgacagccagtgttatatttttcagatcaacacaaagcacaatgattactcgaaattcagtattttcaaatttacatatttaaagtcatgcaagctgtaacttccctgtcaaaattactggctgccaaatttatacctgtttcttcagctgtaccttttgatatttaaagtttttaaatttctgtaaagtagattttgtagaatgtaatgtgttcactgcctttgtgaagcggtatataattgtataatttctgtgtgtaaactgaatgcttgggctttcaatacagtattcatataaagcaataaatattaatgttatgaaatatttgactacatttttatcaaaatatgaaagaatccccccttttttagtttcagatacctgaactacacagatgagcttctaaaactgatgcaaacagtttctgacactgtataatatgcttttgggtgatttggggggcaaccacaagttttgcgttttgactacttaaatcatcatggctataaataccaaaacgatttggatccatttatgtttgtaggataatatactactgactgacttgactgtcaggttcacaacagctagatgatatatttatgactatgtctaatagttgaaataaaatctgaatattgatttactatacccaagaggggagaaaaattaaccattgtaaatttttaaaaaatttttcaaaaatgttaaaatgaggcaaatttaagtt

SEQ ID NO: 107003 - DNA, 1100 bp, Homo sapiens
caactgccagtatgtatttttaatggaaccctattttataatggtacgttactgaatgtgtttcatatgcgtgaccgttaagatattatcatttaggtgaaggtttcaactcaaaaccacccaacccggtggttaacgatttaatacatataaccaaaccggcagcgtttagagttgggatatacatttaaacattttcctggttaaggttcccaagagagtgtaaaggttttagcagaaagcaaaatatcttgcatctttatggaagtttaaagcatgtttgcaaatattgcagcccattgaaagaatttgcatgtacaggaaagttgtggatggagacggtttgtggaattttaagtgctcattgtagtaaacttttgctttgtagatttgaaggtacagacttatacaggcaagttcacaaaatcatgattagttacaaacagtaaaatgaagttaaaataaattattattttctatttgatatgttttgatgtgattcctcattttgcagtggtgcctataaaataaaagccttttgcagtgtttgctttttttcccttggttgtggttgtattacatgctactttggaaggatttaagtattttagaccatctgatgtcttcacattcagcctcaaacctaatgatggatataaagcgaaggtctagcagtgaagaatacagggtcaaatttacaatacaaccctgcattctcactgcctgtctcacaggaagtttcagcctggcccaatatcctataaacaagaatagctatgagcaactttatcaatcaatcagggtcatgtttacagtgaaatctctttcgtttattgcaaccattactgcctatcagtaataacaactccgggtggctaggtccagctttccatttctaagatgcatctgcaaatcaggcaatattttcatagaaaaacaggggtcaccaaactgggtgggcttcaaatctggtatctttctgactactgcaaccaccaggatcctaaataatgaatttgctacaaataattgtttcctgattgattgtaatgtttacaccaatttcagctgtaatacttactgaaaaaaagtaagataaa

SEQ ID NO: 107004 - DNA, 1057 bp, Homo sapiens
agaacagtttcattctcagccttttgaactgatctcagaggccagcacatatcttagactgttgcctgggctcgagcctagttctctgcagagataaaatctaacaatgaagcaataagcagtaaaatattgtcctgtttcctgcgtagagatggagttagaaatcagtcacgctgaatcacgtgactggcaggctccgggatgggctctgcaaacaacaaagcccatcaggcttgcactttgcatcttaagtccttcaggaggaaatgtactaaaggcaaatggtaaaattaggatgatggaggtcctgaccgtgctgagagccccatccagagggaagtgagtcatgaaagggcccacaccctgggaattgctactgtgccactggcctgacaatgggtgtaagaaaaacagatactgacaacggaagaagggctgtaaagatgttgcatctcttttcaggcatccctcagcccatgaatactacgatccaaatgactacattggagacatccatcaggagatggacagggaggagctggagctggaggtatgaagaacatccttgtctcattttaggagtcattattaagaacacagaatgcctaataagttctctataagcataaattagtttacggatgccgatggaaagtaacaaaagcagaaccacttttactgatgccctttgaaaggcacaactgagattcttcttccttccttggaaacagagcttaataatcaagtcccaaaagcagaaatgtaaactttttttaatttgaatcacttaaaagttaggacagtaaatcctgttgtcaacctttgaatccacataatccatacattcttgtaactaacataagcctcctcaccttcctcccttttatgtcatcaccactctttactcaaaggcagatggctcaagagtaggtggataaattacttgagtgaatgctagcccgccctaacaaaagggtttgttcactgcttcacttgcttcaagtttgctaacattgatacagaagaaattaaacaagtctgcaactcttcttaagtg

SEQ ID NO: 107005 - DNA, 1017 bp, Homo sapiens
tagcaaattctacccatgtctaataaatcatcttacaaaatgctgcaggtttttctccgtcatagggatctagtccacacgctaattgctgtgcccctgtgaagttttattctcctacctctcactaaaagcaacccctttagcttcattgttaaaactctaacaattcgacaacaaagaaaagatttcagaactgtgctttggccaggccaagtccccagagtcatttcaagcttgctgagctggaatatacccagggttattctgtcatctaaacaaactttctccaggtgaacgcaggcaaggcatctgtctcttctgtgtcccctgttggacctgggagtcagggagatgaatgatccattgtcctgaggcaacactaccatgtaactaacctgagaacaagaaaatgaagtcaggaagttttaactgcatagccatagggtggggaaggacgggggcccagttcctgcttccaggatgtgataggattattggggctggagattgtggagttgtagctacaaaggctgtaaagcattcatagaagaccagatggggagtgatctgaaataattcagaagggtgtaagtaccagtctagtgaggttcctcttatattaaaaatcaacattatctaatttcccagtttctacaggtaaggaaattgaggtccagaaatgatcagtagtttcttcagatgcaagtatactattttgtttactttatcatttgattcccagcatgtatcaatggactcacctatacatgaatcttgcagtgtttttagcccagttcatactttccacaaacatgtttatttctgttcagttctccaaaggtattgtgggcctcctatgtataagtcaggtgttctgtgcggctaagataaggtattaacccaccattcttatttttaaaaatgtaatcacaaaaagcaaggatcaattattataatatggccatattttaaagcccttctgtgcctgtgaagtcgagagggtgagtcattttattt

SEQ ID NO: 107006 - DNA, 1048 bp, Homo sapiens
agtcccagctactcaggaggctgaggtgagaggatcacttgagcttaggagttggaggctgtagtgaactatgctggtgccactgcattccagcctgggtgacagtgacagagcaagaccccttctctgggggaaaaaaaaaacaagcccatcttctcctcccaccttgacaaacagggccctttattgaatatggagccagcatatggctgagaaagtcactttttaatacatggccgttatttgtcactaactgttgttttcttgttaattaacaatggattataaaccacttttatgttgattctgaaaagaaacgacctagggtgggaccagagattacctctcttctttcagtttgtctcctcttaagacacaaagctttagaggaccataaaggagttttccttcctttcccttaggactagggcttgatacccaccgtcctagcttaggtgtccttctgaagtattccaaggtgccctgcacttccttccaccttgtttccatatatatgttaatttggcctcccatgttacactgtaaactaggaagtctcatcaccactgttactctcagcacatggttggttgaataagttggattttgtagtgtttgttaggaagagtgaggagcaagaaaagaagaatacaaatcaggaatttagaaagagaactaggtgttgaatgaaatgaccatggtttggaccaaggaggtgaggatgtggaacagaggggacacaagacattcatttttcattcattcagccaacacgttcacccgacccaccaagtgctgagaaccgaggtgctcacccacttgctcactggctccccagtgcccttggaattcagtgaattaactgtggctcacagagccctgtgagatccagcctcttctgacctctcccataaacctcctgccctgctcatctgccctggtcctgcaggcctcctttcaagacccagaacccaccttattccttccttctcaagactttgcagctggctgttcctttctgcctgtaagttagttcaccaattcatct

SEQ ID NO: 107007 - DNA, 1138 bp, Homo sapiens
catctttgtcaaatgttttatttttaaatattcaagtcctactcttaactaggaggtttaatactgctgttggtaacctaccttggcaggtaaggattttctcctaaaatcattcttcaaatgtgtcttggcagtaataaaaaaaaaataatccagctaaggttttctttttagataagcactttaaaagaaggttgttacagcaagtgagaaacaaagggtgtgtgtttcttgatttataacaatcaatggcatattaatatattttttaaagagccagagtttttaaaaaagaatttgatttgagtgtcattttttgcttaggccaccagggggtgatatgcttaaagagacacagggagacgcggcaaaaggtgggttggctgcctctctggacaaaacctaaagataaaatgaccctgggtgaacaaaaagtatctctctgtctgtctgccttccccactgagacagagagagggtcaaaacaaaccttttgaggcttgctactctccttaggcaaggggtacatatcttacaaaaaacaagcatcttaaataagtcttgtgaataaatacatttccgacctgtgacttcacactcaggacttcactggacttaagtccttttcaaagcatttgggagacatgttggagatctcgggcaaaagcgctttcaccactggcgatctggcccccatcccttgtgtgatcatgtggtgaggtgtagtcctcagtttgccaagttatcccactcagtgagctggggagttctcagtgagtccagcacgcaggcaggaaacaagtggaacagcagacgctgccatttgggcaaggtggttctgttacagacttttgacgctatatttgaaatagctcaacatagtaagtcaaaaggtagtttttaaaatttgccttttaaaaatgttttgctttttaccatcaatgcacataaaatatcattcagcagtcacagttgtggatgtattaattacactggcaccctccaaaaagtaactctactacatctctggcaaatctaagtgaacctgtcttttattcttctgtatcatttgtgctcagtccccccagccccacccccaaacacacacacacgactgcccccaaaagagggagcctgg

SEQ ID NO: 107008 - DNA, 1085 bp, Homo sapiens
cagcctgagcaacaaagtgagacccaccccatctctacaaaaaaataaataaaaaaatagccaggcatagtggtgcccatctgtagtcccagctactcaggaggctgaggcaggaggatagcttgagcccgagagttcagtgctgcagtgagctatgatcgtaccactgaactccagcctgggcgacaaagcaagcgctgtcccccccccaaaaaaaaaaaaaaaaaaagaaaaaggaaaataaatcaagttaatagtagtagaggctgtaagtcaaaaatcatggtagttccctgcagccggaggtttggaatgcacaaatatggaagtgggaagactccatgtggaaagtcacccaggccaatgactccaaagacttggggatggttggagtttggcaactgggaagccatctgcgaacttagagcagctgttgtcctggggtggctgcaagtcagatgcacacagcagcttcaggagggtagggggggttttgtgtgttttgtttaccactaaacaacagtgtctggctcatagtaggcaatcaatacggaggcgtgaatgaataggtggaaggtatgaggtgaggtttttatttccacccatgacactgacacccactgggccggtggtggggcgcggctgggagcagccggattcccacgcccccacttgaagtgagctcataggagacacagcctcccttcaggtgaaggaggaagaaagggagggagggaggtaggctgcagtctctgcctctgatcttataccaaggctcttctgttttatattgtcctttataaacaacaccacagggacctaggcaccttagtgtactccagctgaaagtggccagtgaagaggcctgggaggagctgtggcatggggggaccacataccccatctcaagggacagctttaccctgcttctgctcatttttgtcacatgggaatgcaaggtcatatgtgccacacactaggaattttcaaaagatgtaaaaaaaaaaaaaatccacacattttcagacgactgctgctgatttttttaattagtgcctaagttaaaatgttaaagacaccacaac

SEQ ID NO: 107009 - DNA, 1019 bp, Homo sapiens
cacagtgggcaggtgtgctggggcaggaaatatattttacctaatcaaatagcatttagccaggtagttggcagctcagcctctctctaaaaccaactttgctttggtatttttctcccatttatttactctctttagtgaccctgtttggcacatctttgcaccatgaccaaagtgacagactttggtctctgttggactaatcagtgtgttctctgatccatgacatatgttccctgtagacatttaaagtcaacatattcagcacttgtggtctggcaggtcagagttattaactgagctgatagactggtttggatatttgcatccaaaagactttcctcctcatcctctaacacatagagccacacatccactcccaacaacacaaatattgactgtaccaatcatttattagcagtaaaaatttgagagcaattatttttttactgcgcttgccctgaaagacaccattaattactatattgcctgtggatgtgagccagtttcggtgtcccaggggcctgctccccacccggaagaagtatttgcagctccgaggaacacagcataggatgtcatctggcaagcagtgcactgacattgtcttctgaagtgagatgtcaagactgtttctgccatcctattggattcctcctgacttgcagtttacaggtcaggattggcggtgacggtaggtttccccaatggcctgaaaactccaaatagaggtgggtgtgggtgaaatttgagatgtgccagcttttttttttttaaagagcatgagaaatattccaaatcatcctagaataattatcagcggaagaacttttttgattgttgattctgcaggtctcatccagagggtgaaaagaattaaggcttctgatgggcagcaccagccagtctgccttttcagttctgatctttcaaaggcaggtgtgatgcagagatagtaatggtgctgttggatggttttcctcctcttcctactctagttagcagaaatgcaaaaatgc

SEQ ID NO: 107010 - DNA, 1051 bp, Homo sapiens
ttatgcctgtggtatgattatagctacctttaacatttggcctagtcttgaacgttggtccaggaaacaaaacttttcagccctacgtatcttgcttaacctatcaatggttgaataaatggatgccttttatcttaattcctatttatacatgacgatgttattgtgatgggaggcatatatctgtgtactgtcctatcagtcattttattcttcaggggaaaaactgtgaacatcatctggcttcaaatttggaaatggtgactatttaaaatgttaagcaggacttaaggcagatagttttttaaaaagaataattttattttttctttctttgtagcaatagacattattttgtttcacttctgtcaaatctttattcaaccataaatgtaaatcttgattgcctttagaagaataagattggctcacttgggactttgtttaggatgagcaaggctaaaatgaaagctcctgtgatatcagggtcagatacaacaagtatttgccaactctaggaaagtttcaccatctgaccttaattattccacagaagggagggtttcaccatgataacaaggagaagcgcacgcgcgcacacacacacacacacacacacacacacacatttttcttctcttcagtacctaagacgtcaacatttatacgtagaccatatgaacaatgtattaggtttctgccctaacaccattccaagaaagcaaagcccattttctgatactaacaatttagtttttgaatctgtttcttccttccaccattaccactattttataagatacccagaagaaatggttattatttatgcagggtttgtgctccctctgctggttctgtaattaactaataagtctaattcccataactatgctgatgtcatcaattatttttgtgcatggacatggaattacccaaatcagcatgttctgctcaaacatcatcaggaaaattagcagggggtcagaggaggacagttggcctagcgaagaaagtgtaccttttgatttgtccaagtctgtatttgaaaaac

SEQ ID NO: 107011 - DNA, 1033 bp, Homo sapiens
tggtagtgtttactttgatttaatgactccaacagatgaggggccactgggcttgctgattgggtctgtactgacttttagccatcatgatggagagtaaagctcatgtccatgaaagacacaaatcataatgcagggaggaaggatcaatggagagaatgttagcataggtagtgatttgccctgtcatcgcactctcacctattgatatattttttcagtgacaggattctttcgctcagacttttttcttttgctattataatagttctcaaaatcaacaaacttttagttgcttagaacaaccaccacagaaaagaatgtgaatgtttattaccactgaactgtacacttgaaaatggtaaagatgatacattatatatgtatattttacctcaaatcattttaaaagcccccataatgtatatatgagaattctaacaataacagattctgtcatcttccacaaacattgtcatctacatttttcacttggaaggggaagtgcagtgagctctagtgaaaaggcatgcatggacttccacaggcagacatctggatgtgactcctgcctgccacgtattagctgggtgacctgggcaagttctttactgttctgagtctcaggctccccatctgttaggcagatataaaagaagagtgcttctattcacaatagcaaagacatggaatcaaccaaaatgcccatcaatgacagattcgataaagaaaatgtggtacatatacaccatgaaatactatgcagccgtaaaaagaagaagaccatgtcttttgcaggagcatggatcgagttggggggcattatccttagcaaactaatgcaggaacaaaaaaaccaaataccacacattctcacttgtaagtgcgaactaagtgatgagaactcatggacacaaagaagggaacaacagatactggagcctacttgagggtgaagggtagaaggaaggagaagagcagaaaaaaaataactattgggtactgggcttagtacctgagtgatgaaataatg

SEQ ID NO: 107012 - DNA, 1272 bp, Homo sapiens
gctttaattgactcaaagaaaaaaaaaaagagtaagcgactgtatttggggcatggagaggggggaaaaggtgcttaaaacaacacaaatttgtaagccctggaagccagaatcaaaatgtgtaaccaaactataatcaaggtgtgaacatggctgcattcttttctggaggctctaagggaaaatctgtttccttgacttttccagcttctagaggctgcccacatttcttggctcatggtcgcttcccatttccaaagccaacagtgtgccatctctctgatgatgcttccatagcacagcttcctctgatcctcctctctgcctccctcttcagctttttttttaattattattattatggtacaatatacataacataaaatttgccatcttaaccatatttaggtgtgcagtgcaatggtgttaaatatatttgcattgttgtgtgaccaatctccaggattttctcatcttgcaaataatgaaactctttatccaataaatgacagctcctaattccctccttcctctaaccctggcagcctccattcgacttcctgtctatgaatttgactaccccaggcacctcatataagtggaattatatagtacttgtccttttgtaactggcttatttcacttagcatgagtaactatattttccatgaaaacattctctgacttctagaaatggaaaatcagtaatgcttgtcataaatagagggaatagccataaaaatgaacagaatgaaagcagcccattattagatgctagctgagttctactgtgtgacactctgaggttcttatctcccactgagattagcaaatattagcaaggcgcaaaagatgtagcagcaccgaactgagactctttcataatctggaagatggtaagacatttgataaagccaaaccctcttgctatgggactcagtgttaactcaaggcctgcctttccttccactacttcaaaacagttcaggtgttactgggaatcgctgtgtagaacatctaggcaggaaagaagaaatgaacaggaacactgagtgagcaactaatctaattggagaaacaaatatttgtccttttgtatttgagcgtgtgtgtcattgagtatactgaaacaaaaaaattggctttgccatcctgctgcttccttcacctgggtagattccagttgattgtcaattatatgtcaccaggtggtatcaaaaggcagtttaattccccatgaaaattaggacttaacctgactctgtggcttta

SEQ ID NO: 107013 - DNA, 1028 bp, Homo sapiens
acaccgtggttagtcaattaaaaggaacacccagcaacgtgtccctgagcctcttgccacagaatggtcagtggtgagatcccaaaggcctatttaaaagagtctgaagattctgtaagtaaatgtctactctcggcctcaggctatttagccctgacaaatgacgtgggtgagcccctatgggcagatttgaaggaaaggacacctataaacaaatccagcctggcagctctaacaaagccagaattgaaataattagataacagcactggcctcgctcaccaaagagaggagctgtgtgttgttttctgcattgctttgctaacaccagatgtgaactttttaactttcacctagatttctctccacaacagtatcttaaaaatagtaaatcagcatggcacttcagcttaagacattttgagaaaaggctttgttggtcttttccccgtagcccactaacttatccctgtctacccgcatttcaggtgagtgtgaacattaatgccgcttgtgtttcagtgattactaaatagtcttcctttttgtcctggacccatttatatagctgtcacatggtaaatttttaatctaagatgtgatattttacaaatccattagaattcttgtgaataaacattctaaacggaaggggctaaagccaggaggccattttgcctgggaactagaaaagacaagccttcaggatgtggactgagaggccaagaagcagggagaagccagtgacagacagcaagggagtcccagccctccttgagggcaaaaccagtagggaaggctgactgggcccagctgctagttggcatgggtgaggacccctcagaggacatggcccggctccaagacatgcatatggcaggcaccacttggatgacaagccacctcaaaacacttggtttgctttacagtcataaaggtaaagttctctagaagcccctagattaatttattacatagatactatatgagttttttagggctgcatttacaaagtactgtaaactagg

SEQ ID NO: 107014 - DNA, 1021 bp, Homo sapiens
tttagaaatactgcataggtaaagtaaacttcctaagctgatcaaagcaaggagaagggcgcacctgccaagcactgggaattttcccatctgtctgtaccatgaaccatgttacctttgatctttttctttggtgattgacaggctggtgaaaaccatagcaacttctgaaagtgcctatcaacgtggcagtgggagcaaaattaatgtgtgttttcccccaaagaagatactaggtgtgtaaaggaatggtttagaagcatcagggagacagggtagcactgtggttaagaacatggaccctagagccagataagcttaggtttgagtccaggctctaccgcttagtagatgtgtgacaagtatattagttatctgttactgtgtaataaattactccaacacctagtgacttaaacagcaaccatttattatgtcacacagttgctgaatgtcagacacccaggagtggctcacccgagtggttctgtttcagggtctctcacaaagctgtgttaggatgttgactggggcagcagtcatctgaggcttgactggggccagaggatccacctcgaggttcactcccatggctcttggcaagaggcctcagttcctcaccacgtgggtctgctcctggcattttactcagagtgagtgcctaacttctctgagcctctgtttcttcatatatcatataaggaaaagagtagtacttcaaaggattatagtgaagattgaatttcaatgaaagtgcttagcatgtcatctgattcatgattaaattctcccttactcttcttaccatttttatcatcattgtgatcgtcacctaccccataattcctataatgtttaaatgggcctatgtatctccaatttctgtttttttttttcctctttgccaccaacaatcttcccattcctctgaatttcaaattctttcttgactgcctacaattagaacccatcaaaatgtcaatacccaaagacagatggagccctcctggggtctcagttg

SEQ ID NO: 107015 - DNA, 1074 bp, Homo sapiens
tgtcaggcatgttgttaattacttgatagagatgctatatggactgccttttggttgtaattagaggtttttatcatctttgccttgcctgtaagcttttccaaatttctttatgaacattacaagtggagatggataggctaacacatatcagattacctgccagtttccctgaaattgtcttatttaattgtcactctttgcatgccacttgcatttctttgggtgcttggattagaaaaatgatttttcatcgtcttatagtttaaaattagcatttcctgccaccagtaagtttggacttgaccaagatctcattcagaaagttgttggaagattaaaatactctcacctatgctaaaataagagcttaattctttgcaatgctttgtagtatttgactttgaagctgccagaagttttagtagccaagtagtagtaggaaaactacttcaaccacgaagaatctgaattaggagcaagctctaaaccactgaaaaatatttcaaaatttgtttgaatctgtaagggtcttcttttgtaaagaagtaaaaagagtttgaggaaagtatttcttattccacgatgatgctattaaaatattaatattataaatattaatattataaaataatataaattattttgatattaccaattataagttaattggtaattttcctgagtgctgaatctgtatgtcagatttttttctggggctatgtgtgtctatcatgtaatattaggttggtgaaaaagtaattgccactcagtggcaaaaccgcaattatttttgcaccgacctaatatttcatgctcagaacagtcttgagacaggtatcttcattcttcttgttttacaagtcagagaactgagactaataaaaagcttgtttttgtcgcttacttggggcaaaggaagaaaggttagaatagatgaatgctccttctggtttcattttaaagttaaatttactctattttaatctcatctcacttcctctaggagaaggttggctcgccctggtttcgggtgcctcccagtctgctcaaaaagaaagcccaggcctcctt

SEQ ID NO: 107016 - DNA, 1036 bp, Homo sapiens
cctcatagcccattccataggcacatgagcacagccagcaccagaccaagaccataaatggatctgtagaaggtttgggcaggtgtccaggactccgtgtcctgtaacaagtgtaaacgttttctggagtgtttgttttaaatgtcagaacttgaggataattttggccagggttgtttttacatttttcatggatgcctatttataggtctgaatctaaatctattttttatccagcctacccagaaaccataaagaaaaagattggtcatttgactatataaaaatttaaaacttatgtatggcaaaaaacataacaaactagcaagaggagatgaagggctaattttctcctttcttaacgtgtttctacatgtcaaggaaaaagacacactacccaatagaaaagcaagataagaatataatcaatagacatgtgaaaaggtactcaacttcattcataattaagaaaatacacaaccaaatgatgttggcagagatgtaacagttggataataggcaacattgatgggtgtgttgacataagcactcataaactgttggtgagagtttacattggtgcagcttttggcaatatctattaaaattaaaatgttcattctgtctggcttataaattccataatctatactgtggatgtaatcacaaaagagtgtgccaagatatgtatgtatacaggcacacatacatgcacacaagaatgctacttgtaacattatgcaatggaaacccaccacaacaatatatcccttcctcccaaattagaaacaagataaatgttaaataacaatacatctatacggcaggaagccctattaaaaagaatgaagtagagctccaaacgctcagttagacagatctacaaactttgtggcaagcatttatagaagttatttcttaaaatgagatctctatactggtatatgcttttatctgaaaggatacattaaaaatgagcagtagttaaactttggggactgttgttttaggtatgtgcataggcctggtttgtcct

SEQ ID NO: 107017 - DNA, 1026 bp, Homo sapiens
tgaagacggaaggcaacatctatgaactgggaagcaggccctcactagacactaaatcttccagtgccttgatcttggagttctcagcctctggaactatgaaaataaatgtctgttgtttataagccacccagactatggtattatgttatagcagcccaagcaaactgagaaagtaggtatacctcagtctttttttttaagttttaaaaaaattattgtggtaaaatataaataacataaaatgtaccaccttaaccatttttaagtgtacaattcagtggcattaagtgcattcatgttattgtacaacctttaccattatccatctcctgaacttttttatcatctcaaaccaaaactgtatctgttaaacgataattacctatttttccttcccccagcccatggcaaccaccattctccttcctgcctcttgaatttgactactctagataccacataggtggtatcatacaggatttgtctttttatgactggctaatttcacttagtgtaaggtcctcaacattcttccatgtcatagcatgtatcagaatttcctttctttttaaggctaaataatatggcattgtatatcacattttgtttatccattcatccactaaatgaacacttgggttgcttctaccttttggctattgtgaataacaccactatgaatgtgggcatccaaatatctcttcaagaccctgctttccattcttttgggtatatacccacaagtggagttgctgaatcatatggtaattctatttttaattttttgaggatggccatactcttttcatctccagttatgtgtattctttgctttgacctgaaagacataacagttataattgccctatctgtatggtatcccacatcaaagaaacttattttagtcgtgcatgtgaggtcagctgtttttgtcttaaccatttataattttgatgctggaaaatattttggtgcacaaaacatattaccaaagtattatacattacagaaactctacatcgt

SEQ ID NO: 107018 - DNA, 1066 bp, Homo sapiens
ttgggaggccgaggtgggtggatcacgaggtcaggagatcgagaccatcctaacacggtgaaaccccgtctctactaaaaaaaaaatacagaaaatcagatgggcgtggtggtgggcgcctgtaatcccagctactcgggaggctgaggcaggagaatggcgtgaacctggaagcagagcttgcagtgagccaagatcgcgccactgcactccagcctgggcgacagagcgagactccgtctcaaaaaaaaagtttggaatttgttgccaatgattcaaaattgggagacttttacagaaaagtctggagttttggcattattttatacaacactctcctctccctgagtccccacagggccagctatcagcaggggctgaaagtggctgcttccgttgggtggagatgtatgtgctgggttcatttccctccttcatgtttctgcctgaaccctgaatgcagctaaagtattgatgacactcggtctagacattaggctgattagactcgatgagcaaatgtgtgtattttctgtgtgtagcattgggaatttgggaggctacatgtaggccttgagatgtgtttgtctctggaccaggaaggcagtcccttatacaccaatgactgaaggagagatgcctccttctgaggagcctgtctctttgattgagaatgcagctttggtagcaactaatcagaagtagtatttgggaagagggttgggacactgggtcaggcagaaagatcagccactataaccagccatggagcacagtgatagatacaatcccaagtcatcctcaagtgtaacacaggcaaacatggttatgatagagataggaacaagggaagattagggaaatagcatcagtagaataggacacatgactgaccgtggagaagccagggagaaaggcaggattcatttgattcaaaacaaacaggatagttcattttccaacaccttttgggacagtgttagcactcctttttttttttttttttttttttgagacgaagtctcgctctgtcacccaggctggagtgcagtggcgcgatctcggc

SEQ ID NO: 107019 - DNA, 1104 bp, Homo sapiens
tttccaaatattagactgattagtgtcacaggtttaagccacctggtcaaataaagcaaatttttcacccttattagagtaggttaactgctgtaacaaacaaccgtaacacttcagaggcttaacacaatatttattacttgttcaagtcaagggccaaatacagttcagcaggccaagggctctgttctttgcagggatttaggaacacagtcttctccatctgtggccccaccttccctaggatctctgaatctttccacttggaaagaggatgaagatccaacaggggagatttttatggggcaggctcaggagtggtgtacattgcatctgctcacattctgttggccagaactctgttacctgacccccagccaactgcaagagaggctgaaggctgaattgagctcagagcccagagcagcatcagtgagcattagcagtctctgccctagctttcctgttgaggaccagggcagaaggtcatggcaactgggactctcagacatagttttcagtctgagtacaaaataggaggcctctccagtgggcctggattatatgcaacgaaaacaactcttgcaatacaggagaaattctctgcaaacagagggattaagaccccacctctgcgacccccgtgacctaacagaagtaaagccacttgatcatatttatctcagagtccatttcctttcttgtgtctgatgcattggttcttgaatgtggaaaacctctttcccttgggtagagacctaccaccatgtgggacttaaggaccaggacagctgaataacacgtgtggcattctagacacatggccttcctttcagtctctaaattacgtatattggtttaaagaagcctttgtttcttaaaataagttctcaatgctccagattagaagcagctggaaatctttgggaaggggcagaggtttcagatgtgcttctgtgtatttttttcagtggacatgacagatgctccaaaatgacacacatacctgtcatgccagcaaagccacatcctcagggtgtctgccttagcagcagtgatgcctgggttgtcagggtgggctctggaccaccacaagcagtactg

SEQ ID NO: 107020 - DNA, 1050 bp, Homo sapiens
aaaattggaaagtggaaataaaataagatgtggtctctgcactcagtgacctgtgcaatacattgagctaaacaccacagtgtaaaatactagatgcttgaaattgctaaattagccacttaggagactgtgtggatttggagacacctagaaagtcttcttggtaaagatgagactttgctaatagttattcaaaaaaattgctatagaagtccaacatgtatatatcacatatataatgtagaaaaatgactggaaagaagtagcagaatcccagccaagtgacagcatgtgtaatgattcagagcttgcagccttaaaccagaatgcctagttcttcctattactggctgttggaccacataactaaggttacttaacctctctctacatcagttttcttgtgtaaaaaggagataattatggtacataactcataggcttatgtgggttaaatgaattaatatgtatcaagaatttagaccactgtctgacctaaagagtactcaataaatgttagctatattgggcatatttaaatggtgagattaggggagattatattttcttcatagtcttaaattttccggactttctacagtgaacatgttggactttgatagaaaaaaatatttctaaagtcaggtctttcagtaagcttttaaagatatgtataccacaggtgagtcatactttgatgactaaaaagtcaatttgagcatattttaatggaggttaggcaacattttttgctgacattcaattcaaaattttttattaacctccataaatggaattaaaagttttccacaagttcccaggacccctttgcttcttaagaagttttagcatacattagagtagacagtttgattccctttgtcatttgtaacagtaaggtatagtttaagaattgggtaaacatgcatctcaggggtaatgtaatgtgttacagttgtttccagaaaatattaataaatgtaagtgtttatatcttcttagagtaactttctgctaaattgtagtctctaatcatttgttatactcttg

SEQ ID NO: 107021 - DNA, 1050 bp, Homo sapiens
gaggctttaatgaaaggggccctggtggcacaggagataaagcagacttgaattcagcaccatccgtcgtggtgggggcttccactcatccctccccaggccctgtcaggagacgccaggcgcttggcacccagtgtgggctcagtaaaggttagcaatgatttttgttattgctactaaatgccagtataggtaggcatgctgtaaaatgaacaggataatctaagcggaccttttttttccttttatttcttcccttttacatcatttctattgttttgctgttatttgtatatatgtgtgcatgcattggagatggggaatacagctacggaggttttgaagaggcacagtattgggtttagttttcatatcaaatctcacacattctgaaatctgtgaagaaatgtgtcacatggtgatgcctggcatataatcagctcctcagaaaatgctgtgattaacagtaactccaacagatatttccttctcaaaagaaaagcacatgattttatagcatttttaaatgccagggcatctcatcagctcagtcttttcagtaatttaaaaaaaaaaaaacccagatagtggaaattcagggtagtcaatggaaaaaattcaataaagctgaatatctcggcaccacagagtggtgtcctttgaatgtttgtttatcattcaaatataataacaccaaaaagaaaaaagcatatgaagtgacggatatgttaattagcttgattatggtgatttcacagtgtatacacctactatcatatcaactagcataccttaaattatttttatttgtcaattatacctccataaaactggggggaaaagccactcttttaaaggcttaataggaaaaaaaaaatccaaaaatacgtaacagttcaaaatgcattgttaaaagagcaagtttaaaaatactgtgtataatatggtctcatctgtgtaatataataatggacatgggagtagaataacagtagaaagaaacacaccaacggtgtggggttggataagcacacaaaactttaactagtt

SEQ ID NO: 107022 - DNA, 1114 bp, Homo sapiens
gtctgtatcttctgcttcgtaactcccagcagccagcaaaatattcaatgttttggagctggttacaagaaacttccaaatcctcaaacatcatcagagaaagccacagaccccaagcgcctgtcacatttgggtatgtagtgcttgctctctctctacgtagcacctaaggttagctggtggatatcaaagccccatagaggaaggggtgtgggcgcggggttgttggcctagtcttaatttaggttcagcatatgtctgaagcttcccccgctttaacattttcacagagcccagacttatctcagcaagcactccacaacctcttcgttctgaaacccctgtgtattatgaaggaaatgaaatccatatgtttctgattcatttacatgtagctcatcaaaatgtagttttgtaagagctctttggtgtccaagaagcctttggagcctttttataagacttttaaccctcccccgcttcattcttcttagaaccaggaagttgggacttgccaagagtaaataaaagcaagcttcagagttgactctggctctggcctgacccatctctggtctgagtctgcagtggacttagcttcagcaaaaacagaaatgactgtctttaccctttttctggagccatggaagtaggcactaatcccacttacaccccacgtgacagtgagtttgggctcacagcatctcttggaggcagccacttgactctatgtagttatttccagctgagcctcttctctctgtcctgtgagcagagagctgatagggccagatggccacacctggaccagaacctcgaggaggagctcctttaagcagtgccgctcatctacccgcttgcaggccactgcactgtatctccaagactttccaggccagattcttaccaagggactgcctatgcatcagggacttctatcttttcactgggaccatgacagaggcacccacaactataccaggtttcatggtggtattgttggtgctgctgtcacttaatgatacttttgagtgtttagtttttcttcatcaagaaaggcttataagctttaaagaaaacaactatctactgccatgaagattccagagctttt

SEQ ID NO: 107023 - DNA, 1137 bp, Homo sapiens
ctgtttcagtttattcatcctttccttaccctgatcattggcacttctatttctttataattcacaaacctgatattagaccaggacatctttgggtagacgtcaccatatacaggtgtgccttcattttttagaaaccagcatttaatcaataatagtaagttgctttggggtaactacttgcagttattggcaatgtctgctgctgtgagatttggcttgaagctgcacagggcaggtctgcttacaacagtggttttcaattttgcctttgcagtcaaatcaggtggggggcttttaaataaagactgattcctgggccctgccttagagatttctggtttaattggtctagggtaagaccaggtattgattgtttttaaaaacaaccctccaggtgattataatgtgcagccaggattgagaaccagtgccttagagtgtccattctcaaacttgaacgtgaagcagaatgacctaaagggcctgttaaaacgcaggccactgggccacaccccagaatttctggttcattaggtctggggggttgaggggtggcggcgagactttgcatttctaaccagttcccggatgattcagctgttgctagttctgggaacccactttgaaaaccactggcctgcggagatctttccagtagctttgtaagattttataacaagaaaaaagacaggatttcctgtgcttttaagtaaaacaactgcttaaggcacaaatattaaaatattatgcttcccggttcataggcaagttggaccataccctctgtttgctaaggcagcatctgcactaacaggcagccagggcccaggatctgaaaggacatggattagaggcaggtgagaagttggttttttaaataaaaaatgctacaaggatctatagaattgttactaaggttagcaaattacctatggattgtacagctctactgagatacgtagcttaagatgtgaataattccctgggcagcatgaaatatggcacagaagtacgaaggtgactcagacaaacatggtacttgatcccctaaagagggcagtttaacagtagaatgtactgcctgtgatgagacatatccatttcttatttaaattcacgccctacatttctctt

SEQ ID NO: 107024 - DNA, 1054 bp, Homo sapiens
tctctcaacaatcctgtgagatattcttatataccttcttattctctttttatatttgagtaaaatgaggcgcagagaaattttgtgacttggccaatgtcacacctcgtaagctgcatactggatttgaatccaggtggaacctcatgggtatatataagattgtaaaaatacacgttccccttcaccaggcctttcttctgacctaagtggtggccattctccacatcagcccttggccctctattctccatctcaggctgcatataaccttcactcagcagctctgtgctggtcatgcccagatatccaggcctcatgggcctctactttgtacctccagctgccagtgagatagttgtatacagttgtcagtttcttccttccagccccattctttctcattcttgtttccatgagtccttatgcccgttgtggctctggccagcatgaacttcctggtcatgtgtgtgccatgcgtattccagcatctcctgtcaccctgtccatgccttcctcacctatccagatgccgccactactttgccagagctgaagtagggataaggtactccctgtcaccttggcctactcctccagcctgtattgacatttcttcctgcgtgttctgaagtcacaccacggaattcttaaggatatacactgtgacattagagggcttgagttcaagtactgggtctgggctactttgctttgctgccctttagtttccttgtctctgaaatggggataatagttctttttttttttttttagatggagtcttactctgtcacacccaggctggagtgcaatggtgccatctcggctcactgcaacctctgcctcccgggttcaagcgattctcctgcctcagcctcccgagtagctgggattacaggcatgtgccaccacgcccggctaattttttgtattttttagtagagatggggtttcaccatgttggtcaggctggtctcgaactcctgacctcaggtgatccacccgcctcggcctcccaaagtgctgggattacaggtgtgagccaccacac

SEQ ID NO: 107025 - DNA, 1026 bp, Homo sapiens
agattcaggcattgcatctcggcatgacagtctccagagacaccagcaagacaccgttttcttgtctttataggtgtgaagagagctttccaagaagctctagaacaggctgccccttgttagtggtttgttggacagaatgaaacaaaccactaatcctattatgggccataaattaccatgaatggcttggaccaattgggatttatgcactttctctgagggcaaataaaatatgggtcacaccatcaaaggaaaggcagcaaagagatgagtaggcaataagtagtcattgccataccagattcatcctactggaacccccctttatggatacattttcttactctcaaataatgagcattttcaaaatcaggacaaaggagtggttcttttgttgcagagttccttacataaattcatattttccttctaaattttctaagagaattttatggataaagactttccttcagtattttctcttatgagttgaatgttgtgctcacagttcatgtaaatattttgagaaaatgttataattccattttaatctaaagacttgtgagcctgcctgtttatcgctgaggttttctgcaatcctcgtactagaggaagtgtcattttgtgtaaaccaggaaaagaaattggttcaagtaagtctaattgcaaagttgctgaatgaagatatccctttctctctcttacaacaaaaatttaaaatataatttaaaattgtcaaacaatgatcatgtcacatctggaaatttcaggtttttactcccttgccttttttcctaattacctgaatgctctggatattcaggctttcagctgtttgacttttctggaggtaagaaaaggtatccagtttatttcacttttctcagatgtgactcatgtctttgacataaaaatccttatcgcacaggataagcctcaggaattggtttgaagaatgaagacaaacctggtttttatgagaatagggaattttttttttattggaagcatagttttctgtgt

SEQ ID NO: 107026 - DNA, 1057 bp, Homo sapiens
taaagggcagaacaacaatttcagcaaggctctatcatttcagttatccttccctgctacagtgcaaatctctcttaaagactgtaggtctggcttccgtgaatcaaatagaaacagttacagcataagcctgggccactgtgttgccttgggatatgcatatcacctgttttaatcccaggatttgactttcctcctagtgctgtggctgattatttaatttttagataatcatgtagcaaatatcatgtattagaaggtagggctataaaaagagtatgccacaaacagagtttggttgttggccagcaagtcccaagctgcctctgctgccatgtgctaccatatcaagcgagttgcccgggaatcccctgctgacatcggtctgtctcacatgcgtgatatttggaaggtagttttggtgtgtatttgtgttgatcattatagtaatgacatgcatttaccacagttttgtaggagagcgactctcagctgtggtttagagacatagccctttggatctccaggtatctcaaaggctgtaaaacttctcaagtcaaaactagttttaattttactgcttgagagatgcagtatgaaacatatgacagcaatgagtgtctatttctgtagcaactcaagccacctgcttttttaggggaagatttataataaaggcacataactatagggcttttaaccttgatttaaaaagaaaaaaaaagactttcctgttcattatcatatctagctctggggagatagacaggttagtgatgatctgcaccattttacagatgagatccctgaggtggcttgtggctttggtccaagaagccatttatttttgattgctggcttcacatggctcctcccttggctggctccttcttatccctaatcccctatctttgttgcttgtctgttacctatcaaaagaagccatgcctgatttctctattggaggttaaactgcttttcccacctctggtttcccttcaactccttatttatttcattatcgcattagccactagttttatttcttgggttttca

SEQ ID NO: 107027 - DNA, 1291 bp, Homo sapiens
gcttgcttttctttaaaagaaaggtaccaaatgaaatgatttttaagacctttttttgcactgaatcaacattttgttgtcacaaacctgattagatttctaaaaagtatcatactgtcccttgctcaagttaagtacaaaattgcctaggaaattttttctaaacccaatgccatgttccattctttaccctgccgtttcccagcccgaggattggagtgagtggaaagtatgttcctgttttttcaaaacggtgctcgggacacatttgtgaccacaccagcttccatctcactgccacttctgctcttccggttctgagcagccgtcttagaggtcaactcttggagcagtctgttgatgaggtgagagccgcctgctcaggggagataaaggtagaggtctccaggctcttctctgggggcaggactctcaccccggcagctgcggctttgattgaaaaggtatgtggccctctggagctgacttcaaccaaatggcattggtctttgaaaaatgtactttagcacagcccctgtggaacgtgtttacttaaggattttacccttgctttagaagtgagaatgtgactacagctggactgcccctcactgaaggcatttgctgcgaatgtgtcttctgctaatatgtttaaggatctataatgaaaacagagtcattctgaaataaaaggacattgacataaaaagcagtaatggttgacgctatctgtttttgaagataagggttttgtcacaaaggcacgatttatggtgggaatactgaatagcgggagtgtggcaggtgataaatcactgttctcaccactggatatggagaaaaaagggatacaaagaccttttaaaaataggaaaaataaaagcactccagggcatgtaattttatggaaaacatggtagagaaagtacaataggactgagattgtatgttgttgactgaaatgttttaatctcatttggaggaaaaccatagttaaggtagatttttgtaaaactgaatcgtcaaaaacttagtccatacactgagcagcatataatcatgctttttaatgtagggcttccatggtagctatgatggtgataaaaatcacaatctttctcttctctttatcttgtgcacaagttttcttctgcccacagccaggtagatgagagcaagcaaaagcagatgtatttataggatgttaagggcaagaataaaactaataccttaagagactttttaggaacctcttggaaggcatgagtccagggaggggttacagagtctg

SEQ ID NO: 107028 - DNA, 1653 bp, Homo sapiens
ttaatcctgacaactgttacttctctgtgatgttagaataaagggtatttgcccttttaatgtcaggccttcttgcctcctgcaaaccactcatgtccagaggatgtactaagaagctagctgcatgcttttccaggcagctagaagtttgcatatatggcaaggcaaacttggccagcttatcttgaatgggatagaaacacccttctatatttgctgtgaattttttttaaagtggtacaatatgggttaatgtttagagctgactatggtaaggaccgtatatgtatatgtatatgtatatgtatatgtatatgtataggtgtatgtgtatgtatatgtatatgtatatgtatatgtgtgtatgtatttgtgtgtgtggctatttttaaagcctgctaaagtatttttggtggacttgcatagattgggaaaaatgaaaaccatctctgacgctcaccttttacaactgaggtattaccatagaacgggcgttggcaaacttttcctgtaaagagccagatggtaaatgttttcagctttgggggtcatgcagtctttgttgcagctactcaactctgccattgtagtgtgaaagcagttacaggcaatatgtgactggatgagcatggctttgttccaataaaactttatttaataaaacaggtggtgggacaaatatgacctggtgagtgacgtgtgttaacctctgctagaaagttctactgcttaaatatagctctggctttgtggctagatttcatcttagaggacactttgcccctcactttgcctcctcgtcttcccagatgccacattgcagattgtcacttgctacagtctgtaacaagaacatatgattctgggtgctttatatatactctgtctttccctggcaactgaaggccctggagatcttgcctagctgttgatctgctctggggtcctaccttaatatgttctggggtcttgtcttgccagagagggtcactgtaggacctcagagaggcccttgggacaggtaagacagatcagcatttcaacagatgacccctggtttccagtcaactatcaacaaccaacctctgtatcttattagaggctctgagataagccttaattccggcacactgtgggacacaaaagagcctaaaacctcccttttgctaatgagttgtgtgttattttctcactttatctcagttctccagcctaactgctcccggagccatcttttcaaaattccaacaattttttccaagtttcccattaaatcattgaaatccaaatgatacatatgcatagttttcccaaatgcaggagggaatctgcatttttttattgaaaaagggagggggcactcttgcaaaataaagctactccctctgcctcatccctcttggcttgatgtaattatttctctgagtatctgatttgttgctgtctctggacagtgctgctccttttttgtactgctgtcccactgcttgcagtgactcaggtgtgcttggaacaaggacgcaaccaactgtggttgaattatatgcaccctgacagccggaatgtacagtgtgatttatgggagttgttcacacagagatccccagatagcctggttttctgacatacatgtgaagttttaaggcccagggt

SEQ ID NO: 107029 - DNA, 1033 bp, Homo sapiens
tttaaaattgtattttccacaataagcagatatttctttataatcagaaatcttaaataaaatagaaatgaaatcttaaaatataaataactaaatcatgcgttcacacccacacacagacatacccacacaaattccaaggctggttattgaaagatgtgtcttccaaaagtagagtcatgtttattcaaagacaaacataacatagttgagtgtgtatgttcacagcatggggagtgtttagtgtgttttaaaatatgaggaaaaataaaaaacatcataagcaaaccatcagttctctttgagagaaagctgctctcacacacaggtgattctttccatgaaaactccaaaaggaatgttgcttatgcttttgcataggtctgttcttcttatgtaggagtacatctgaactttagaaatttacatttgagtaaacctcaaactccaaaatgtatccctcctccccaaaaagggacattttactgaaataaaatctgttgctggttgcttctggtatgttatgtcaaagttgttaaccggatacagcaaaggcagctgcattgtatttcagaattagtttgaggtagattttattgttataaagcaagacgcaattgaagccacactctgggaaaatagcagtaacacaaaacatagtaatttaggcagaattactcagccacagatgtccagagaggtataggaaaaggtccatatgcactttttgtaggcaaacaagtcaaggttaaataaaagccctattttgagtcttaggctggatgtcaagaaattgcctcacaggtgaaacaggtccagccacagaagaggctctgttgttacttgagtcactaaaccatttggatggaggccagtgcagccttctcctctttatgtcaagttcccatctgtaggaaatagtgcctatagtgcctggtgacatcacaggatcactttgagtcagtggtgagtaaggcataatgcaaagagtaatgggaaacactctacacttgagagaattcagaagagcagg

SEQ ID NO: 107030 - DNA, 1055 bp, Homo sapiens
gaggaagtcagtccttctgatatatcacagggcagtggaaagagtcccccttcatcggagaaaaatcagagtgagggatagtcagtgaagcctgtttagcattttgcatcgatcatcaaacctaaacaagtgtttctcagacttgagtcagtcatacaccacctgctcagtctttgctatatatgtgccacctgttttgctaaatgctcaacattattcttaaagcaacattcttttaactttattttaaaaagaaactgtgtgtcatgactgtaaatggaaagtcattgtcatgtgttgtaaatagaagataagagtaaaaataaacactgaacatgtagaggtagtcaatttaagctagacagctgaaaactctggtctttgagccttgctttctctttgtctaagagcaaaactaattagtgggagtagaagtcaggacagtggtgggaaacaggactgaggagggcttttgagggtgctggtcccattctgctcccgatctgggcagtagttcaggagcatgttcacctgtgtaaatacaccaagatgtacacttaggatgagttcactttctttatgttacatttggataaactttatttttaaaagtggtgttacctgtttacaatagtaaagatgtggaaccaacccaaatgcccatcaacgatagcctggacaaagaaaatgtggtacataaacaccatggaatactatgcagccataaaaaggaatgagatcatgtcctttgcagggacgtggatgaagctggaagccatcatcctcagcaaactaacacaggaacagaaaaccaaatactgcacgttctcactcatgagtaggagttgaatattgagaacacatggacacagagaggaacagcacacaccagggcctgttgaggggtggagggtgaggggagggaacttagaggacaggtcaacaggtgccgcaaaccaccatggcacacatatacctattaaacaacctgcatgttctgcacatgtatccctgtttggtttcgtttttagaagaaataaatttttttaaaaaac

SEQ ID NO: 107031 - DNA, 1046 bp, Homo sapiens
agcatgatctgtataattgttgtgacttgttaaaaaatcttcatgttgtgtgagttgttaggataagagaggataacaggggaagagaaaccattagtagacatatgttcacttgttgggtgtgcactgagttctgcctaatatgagataggtcaggatacccagagataaactccctggctctagggagtttacatgtgagacctatgtttataggaaaataacaccaagttaattagaagggcagccagtatatgcagaggttaagagctaaggactctggaatcagatcaacttttgaattctagttctatcatttgcgagcttcatgatcttggggaaacttcttatctctgagcattgctttcttctgtaaaatgtggataaagttgccataataaagaaaatattctttgtgtgtctgaatactgcaattttggccccggaataaatgctcaccaggtggttagctatgctgtgttgtttcctgtgggtctttagaggctgggctggaggaggtttccagcaagccaacactttgatgacggctatatgacacagtttcataaacctgaaattacagttgtgagtagaccattttaatttgttttttatttctttttgatattagtgagcctttgtatctgcattaagagctgccacttcctaaggccatataaatcagaataattgatcaatcaggaataattcttaatttacatcttagtgtgaacaacatggtaattcattgcatatgtgctgacataagtgttccaaaaataaagtcaaacaattgtgtgttcaatatcagctatttttaaagtgccaaaaacattaagatttctgtttttataatgactcatgagtaatattgggattttcttaaaattaggaacagttcatctttctttagcaaaaatgtcccttaaaattgaaatagtttagtttctttttagggtaactttttatgtcttgatatgaatgtaatacaccattgtagaaaaattgaaaaatacaataagacataaagatgaatatagaaaccc

SEQ ID NO: 107032 - DNA, 1238 bp, Homo sapiens
tgaaaaatcacataagatcaatattaccctcaaaattctcttagggatgtgacacgtggagaacataccatctcttcgtaagtccagccagctggttttgcacagcattggatcacctcactgtttctcagttgactgtcatatggagtttttggattgttctgtgaatacctcatttgacaaaatgctcacactgagaaaacaccgagaaactgaggcctactaagaaaccagcaaattcactttgaggcatgtgctgttcaatatattatttctctcttcatcttttttttttttttttggtcatggcttgcctataagttaaacactcctctgatgcaactccactgaaattctttctcaaagacttgtagaggccatccacatctatatttcttgccagtcttcaagccatatggcttggagaaccaagctcatttttgtgttacaggaggcttgcctttggtgataaatgagtctgtgtagtgattgcgtgggttaaacgctgttctgctttgagctagcaatcttgattccctggatccaatgaaagtgggagacttaagccctctattcccaataaccattatttcgtacaatcttctgtaaatatgcattcatcttgcaagtgttatgatttgaagacccgaggatatgattacagaagctgtggaacctcaaaggcttttgtgtaaaccggtcattctctttttttgtttatttttggtttagttggactgtcattgctaacaaggtttgttacagggtcagctagaaaggattagcaatgctttccctcccagagccaggctacttggtggaacaaagtgagatttcactgcttgtgattattaggtgagaagatactgttctgagacccactaaagttgcaaaatggaatgtgaattaagctggagtatttatttaaaaataaagtaatagaagactcccctttaaaaaatgtttcatttcgacataatttcagacttgtagacatggatttctgtacaccgttaacccagattccccaaatattaacatctactacatttactttattcttttcttcctctactctttatcactaaattcatcagtgtgaactttttaggaataagacattctcatatgtaacagtatggtaatctaaactaggaaattcatgttggtacaaaactgttatctaatcttcagaatttattctgatcttgctaatggtccctatgatgccctttata

SEQ ID NO: 107033 - DNA, 1087 bp, Homo sapiens
tgttgtctgtatttaccacattttgtccattcattcacccagtgatggacacttgggttgctttaaccttttggttgtcttgaataatgctgctgtggatgtgggtgtacaatgtgtgtatgtttaaactgccaaaaactctgttgtgtttatatgtaaaacagagctaggtctatgctcaggtaattataaaaagcttgttattttatcttcatgactgtctggtgggatatgtgatagttgtgctggaggcagaaccattcttcattgcaggagattcttcgtgtcatctctggcacatacccctattgttgtgatggtgaaaaatgcccctgcagattgctgaaactcccactggggagtgacagggacatcagggacaatcactgaggtagaggtttgacttattccaaaaccttgagataggaattgagttgctcagggacagagatgtcaacatccctttcttccagctagactgcctacatgatgtcccctatttgggttccctacatgagtgctcccaaggcctggtaagaaagcctgagctggcctgtcctggggctgtggctgggaatctggggcccccttagatgaagtgcccttccagcccacatggctgcagggcccatgctgtcccctggaatcctgtgtgtccatctgccctgggcttgttgggcagactttggtcatacctattccatctcacatttggtactaggattcagcaagttctgacttactcagtattggcttctgatttttttgtgtcttccctgcactcctcttacctgtgagctgtcctggtcctttttacaacttccgaccccacctttgattgcatatacttattgcagttagaaaactaaatttaatttctccctgatgtctttaatattcattcgaaactgtaaatatctcagtgccttttgtttttctgcctctgaacctactgtctgaactatattttaaagacaatgcaaggttcctatactttaatatcaccagatttcttaaaggaactatgctcatattctttcaaatagtttgagaactttggaaaaattttcccagtgcccaaagtgtg

SEQ ID NO: 107034 - DNA, 2715 bp, Homo sapiens
gaggcaaggacataagagtcagactagcataatcacatttgtatgcaaaaaggaacaaatgcatatttaggaatatgatgtgttaaaatgttttcaaaaggatgcataaagtcaaatagctaccataggcgggggaagaaggacaatgggttggagatggcagggatgcatcattttatgtcctttggtgtggtttgaaatattttactgtgtgtgtattttagtttaaaacagaaattaggagaaacaaataccttttaccctattgccactcttgacacagcaagagtcaattactgttttaagagtgcaagctttactttcatgctcaacttaatgcctagcattcatgcatgtttttttttttaacccaaaggataaccacgatggatcatccagtgaaggaatctttgtatccaagatagttgacagtgggcctgcagccaaggaaggaggcctgcaaattcatgacaggattattgaggtatgtgaatactggccagtgtctttgaataggctgaatgccatcccatcttcgtctagctcaaagcaagatgtttgactggggagggaggcctaaagtggtagatggttgagcgggagtctcacttttcccattgtgtgggaccagattgagtgttgattgccttggtgttaaatttttgttaaatgtagaaaagccagattatgagtggaatgttcacaatttggcttttttcatgtggacctcaatctgtttcgtatgcatcagttacagtttcgcgcgaaaaccgttgaagagttggatgttagaaccagatgaacgaaccctgttgtacaaattgtgcaccctgttcatattgattaccagggtacaattgtgtcagctttggagtcattctaatgtcctcagagctcacacagcacacacttatttctacaaatgcattgttctctctgttagtttgtcgtctttgcctgttgttagttgtacaacctgattgcccagggatttgcaggcagaggttgatattagggttcacatatcatcacttactccattttcagttcgtcattcatcatttcaaacttttatacagcaggtttgtagactcatgtaggggaagtggatctctcagccccaccagacaacactttgtaacagggttgcagtgttctaggatgctctgagtcactaaaagggagagaatgatttgttgccttctcatatgggctcttgttgcaaagtttgatataaatgagtaattttttactggtgttttgaccattttcatagctctttggatggatacacatatgggctaaattgattggctttcctattaggcaaaaagtaaatttgagaatccacgatgatatgccagaccccacaagaaattcacccatgggccacagccgtaatatagtgcaaatagaagaaaccagaaaaacagcaccgataccagtgggtgtttgttttccacatgcatttttatcatgtctgtatttcctgagtattttcatggcctatttcaaaatttaggactgagtgggagctaggaccacgagctaagccataagtgaagttcacatcactcactggaatgtggccacaggcttctcctggggaaaggagcctcagcaagacagagaacaaagtcttgcatttccagtctcatctggacacattctgcaacgtgcagtatgcttcaggataatttgtaatcctcaggaaaatacacagttaaatctcacagggaaagcaaactgaactagttagggtgtaaggctccctcctcggagggagtgtgatgtgctaacttacatgctaaaatgatacttgattttgttttaaggacattattaatattgttgcatcccctttgaatgtttgaagggttcttaaacttggagctttttttgctgcatggtttagagtcagtctttgtacttcccaggtcaggagactggattttccctaacaggaatttgcttgggcaagagtgctttcttaagagctcaaatgcgttacttactgtcttttttgagagtgaatacattttctgagactattgttcaaaaagataagtacagcttccgttgccaagggtttggtggaacagccagtttctctaagtaatggaatttcattgctcttgtgttttgcaaatgagaaatctacagctgggcaggattttctcttggcaaaggatgatctgtatttgaaatgttgagtacggtttctggtaagtcacattcctattttggacagtatgtaaaatattaatcatgtagtgttgagatggaaagaaggatgaccacaatagagaaacgatatatgtataattgcaattgacaacactgtgccttttgcagtcaaattctaatctcttttgacatgatacagtgattcccatgactgaaaatatgttctctggtttacctcatctgcgtctgagtttattaccaggaggcataaatgtgattattttgagagagagagagagagagagagagagagtgtgtgtgtgtgtgtgtgtgtgtgtgtgtgtgtttcattactaagaagagtcaaagtctctagttttccaccagatgtcttctttttcaggggaatgggcaaaccaccaccagatcttcaccgtaagacccttaattcttgcaaaggggtattattaaatccagagatactaattgagtcttttctttgctgcagagttcctctgctcttaatgg

SEQ ID NO: 107035 - DNA, 1133 bp, Homo sapiens
ataaaaagttacgtacaaaagggagtattttaaataatgaaattaaaatatgactatgaagaaaatgtgaagtatgttctcctgccattccaatgcattgtgttacacgcattcacctgtgaagacccctgagctagaagaaagcggttggacgctggggttttgcaggggtggggattggcgctcatacaaggcctggagcaggaacagagttgggaactgggggagctgcaagtaagcagagtgtggaaagagttgagggatgggcagggaagtggccagaaagaggcctggtgaagaaaacaagggcttgaccccaaagggcctaagtcttgagtctgggatttaaattacctagggcgggagtggccaacacatggcttcagttgaagggaatgacacaaagagatttatgattaaattccctttgcttttagcccattccacagtttcaaaaagaaacaaacaatggcttattataagaaacaacaacttaattatgtgtttgcagttgttaaaatgatgaacattatctgtcttatcaaacatacatataaaaaagaacattttaaatggtgagactaaattgtaaatatgaaggtagatggggacagggataattcccactttattgagccccagggatgtcatcacatggttgtatttcttgcattcgctctgtggaattcttaaaaaactatagaaccgcgtgaggttggtatatttttattttttccttttaccagttgtctgagatcccaggctgcatgtcatcatgtgctgttctgatttagtccttgctgccaggggtcctccgtactctccagccttcggagggactgagggagcaaactgcactcaaatatctagacatttggctccaggaagcagcagggtcagacttgagcccgtggttcagaacatgagcccatgttctacaacttaccatcaagaacatgttttgccatttagcacagatgagttggctgttccttgtttacattcataattattcctccaccctttgttaccagttttgagaaacaactttaataaattaagattcacttcacaattaggtgtttcacaagctatagcaaacaaaagaacccaaaccaagaagacctattccc

SEQ ID NO: 107036 - DNA, 1056 bp, Homo sapiens
tgctacacttgagtgagttaaagagttctgctcccagcctcagtttcccatcctgacttaccccctgattcttagagcaaaagcactccagagcaaacatcttttttgcttttctttctgggaaaggaacaattctggacataactttccttggattgattgaaaaacttgagatacatcctcgataccttttgttctttaacctcccatccggtctgtctttgaatcctgcggattttacctcctaaatacattttgaatctattcacagctctccagctcactcaaatgaccaccgtggtccaaaccagagtttctgaatcagcactgccaacattttggaatggataattcttgggtgtgggtgtgttgttggtggtggtggtagtggtgatgggggtgggaggctgacctgtgcattgtaggatgtttagcaacatcccgggcatctacctacctacctactagaggctagtagcgctttccaagtagtatcaacagtatttgtggacattgccaaacgtcccttgaggggcaaaattggcctttgtctcagacactcttgcctggaccataactctttcctctacaaatcttcttgctcctcttcaattccttctttacctagcatcaggaattaatctcttataaatgtgtatcttttatcactctccctcaagcctcctatgctgtcccatttctcttggttggctataaggtccaacatgctctggatcctaccggcttccacctgcctggattcttctccccttcatcctcttctttcagcttctcatgtctctgagagtcgatgcatgtgcccctgagctcctctctgcctccaggcctttgcacttgctcttctgtctacctggaacaatcttaccaagtactctgcactaaataacctgcaaaatttccacttctctcctcttgcccacagcctttctgtctgcacttaggatttgcttatcactagacaatggttctttctattctcatctcagctgaagcatcactacctctaggaagccaggcctctcggacctcgcagac

SEQ ID NO: 107037 - DNA, 1021 bp, Homo sapiens
gatccgttcgggaaggggctcgaagagaacccttgggagaaagcagtagcctcagctccaaactcagcgagcttttctcggctggcgttttgtctcctatagcgtagactgtaagagaacagaaaggagtttcccgagaagattcaggctggcgtcctgggctggcccgtcccttctggcgagcctcagtgtcctcccacgcgcttctgccttccagcctcctccctttttcggggggctggcgggaggcatccaaggcacgatgtatgtgcgctcgcgctcgcgcaaatacggccggaggagtcctgttcctcgggcattttccgaggaagtctggatcaattaggctcagtccggggagagccagcgagcgcgcgggcggcgtagccggcctgtctgggccgcctcgtggggagggagggggcgcccggccgcccggcggcgaccccggggcctggccgccaccatgggcttcgagctggaccgcttcgacggcgacgtggacccggacctgaagtgcgcgctgtgccacaaggtcctggaggacccgctgaccacgccgtgcggccacgtcttctgcgccggctgcgtgctgccctgggtggtgcaggagggcagctgcccggcgcgctgccgcggtcgcctgtcggccaaagagctcaaccacgtcctgccgctcaagcgccttatcctcaagctggacatcaagtgcgcgtacgcgacgcgcggctgcggccgggtggtcaagctgcagcagctgccggagcacctcgagcgctgcgacttcgcgcccgcgcgctgtcgccacgcgggttgcggccaggtgctgctgcggcgcgacgtggaggcgcacatgcgcgacgcctgcgacgcgcggccagtgggccgctgccaggagggctgcgggctacccttgacgcacggcgagcagcgcgcgggcggccactgctgcgcgcgagcgctgcgggcgcacaacggcgcgctccaggcccgcctgggcgcgctgcacaaggcgctcaag

SEQ ID NO: 107038 - DNA, 1006 bp, Homo sapiens
aacaaaacaaaacaaaaacactggtaccagcagatgggttgaagtggtaccaggactgaaagcaagatccctcattagcagcaatccacctgtctgagcaaaacagtattacagcctgaactaaagaaatgacagtgggaatgaagtgaagccttgaggagtttgagaaaatgttatatcaacaagacctgttgattagaggcatgatttgaagagaagacaggagtcgaggataaatcctagatttccaggttaggattcagggagcatggcagacccattcagagtgacagggaaccttatagaaatggcagaaatgagggcaaataggataagttcagtttgggattggttgagtttgaagtacctactgaaaaaccaactggatatatccgtgcatacaaaggttgactgaatctggaacttaggagaaagactcaggctatagaaacagagatttatgtgtcatgagcttggagatggtagctgagccattgtagtggatacaactttctaggaagggtagatgtctttaaatggtagaggctgtacagcttacctctgaaactctcgtacatacaagttatcagtagagagaactgtgttacagcctcatttaatgatttagtgattgatttattaaataaatgccaagtcacctggtgctcaactattctaaacgtcataattactggcattcagtattgagtaaaggtttttctttttcttattttggctttttttgtttgtttgttttatattggtattatacagtccaatattgggtaaagttattgtgctttttttctccctgcagcaagaaacattttggaataaacaaaaatgtactgcctttttcagtattccatagtatttcaccaggtgtcaatgtttttgtgctatttcattcattcattcacttaaatccacctatttccaaaagagacaaatcaaaactgtatgttttgtctcttttaaggaaactaacattgaaaaagacccttga

SEQ ID NO: 107039 - DNA, 1055 bp, Homo sapiens
ccacactgtcttccacaatggttgtactatttacactcccaccaacagtgtaaaagcattccattctctccacaacctcactagcatctattgttttttgactttttaatagctaatggatgctggggttaatatctgggtgattgcatgatctgtgcagcaaaccaccatggcacatgtttacccatgtaacaaacctgcacatcctgtacatgtaccctgagcttaaaataaaagtgggaaattgaaaaacaaaataaaaattatgaatttctgtgcatttttgttccaatgttttatttcaacttcagaaagggcattataaaagagacaagagtctatgctgtggatcaggttaggtaaagaggaagaggaggcttagataagaagcaagtaatttatatttagtttccatttttacgatcagaaaaatagcatctctcttatacatttgttcaatttttttcttcattgacttttactatattcttaccggaataaagtcacgaatctttagccttttgaaatattttgttcttacttttcatgtgcactctgcatgacactttttacaggtcagtaatgtcatactaccttattatcttgctgaatattttatgcataggcacttctttctatatttgcttttacaactttgctggtcttccgttgactcccaaatactagctttctggtgatgctaataccttttgcaagtctgttatacctgtttcagtttttataaaagtacaccgaaatttctgatgcacttttaaatagtgtaattaacatacaaaattttgaaattaggaaatcatgaatataattataaaaattatgatttaagtatattattgccctcttatttaatgtatacatagtatttactaataaaaactactatagcctcagattatttctcaaatccaattatatgtcttactctgccatccagtcacttcagagtgaataattgctttgtaataaataaattaccttattaggaagatggattaagtagatatctgcatgattccaagtattttccttatgaa

SEQ ID NO: 107040 - DNA, 1759 bp, Homo sapiens
aagggaaaaaagagtgattttgagggaacacatagcctgcctcagctacgtcagatttctctcctatatgggtttgttgatgcctgctgaggtgtgacttctggcaaaaggttttcccacattccttacattcataaggtttttctcctgtgtgtgttctctgatgtatactgaggcctgacttctgggagaaagttttcctacattcattacatctaaagggtttttcccctgtgtgagttctgtgatgtacaaagagttttgacttctgggagaaggttttcctacattctttacattcaaatggcttctcacctgtgtgagttctctgatgtatggtgagaactgtcttatcgtaaaaagttttcctacattcatcacattcatagggtttctctcctgagtgagtcccctgatgcgtactgaggtttgacttgtgacaaaaggttttcccacactcattacattcataaggtttttctccggtatgggttctatgatgtacagtgaggactgacttctgacaaggtttttccacatttgctacattcatagggtttctcccccgtgtgaataccttgatgcttctgaagatttgccttctgatgaaaggattttccacattcattacattcatagggcttttccccggtgtgagttctctgatgtataataaggtatgatttctgacaaaaagtttttccacattcattacatccatacggtttttccccgtgtgagttctctggtgtatggtgaggaatgacttgcgatgaaaggtttttccacattcattacatacgtaaggtttctctcctgtgtgagttccctgatgggtgctgagatttgacttctgacgaaaggtttttccacattcattacattcatagggtctttcccctgtgtgagttctcttgtgtatcccaaggtttaacttattgataaaggttttctcacattcattacattcatagggttttttgccagcatgagttctctgatgtatagttaggaatgacttacagtgaaaggattttccacattcattacattcatagggtttttcccctgtgtgagttctgtgatgtactgtaaggtatgacttgtggctatatgtttttccacattcgttacatgcgtatggtttttccccagcatgagttctctgatggacagtgaggaatgacttacagcgaaaggttttcccacattcattgcattcgtagggtttttcccctgtgtgagtccattgatggatagtgaggaatgacttacggtgaaacgttttcccacattcattgcattcatagggtttttcccctgtgtgagttctctgatgtaacctgaggtttgacttattgataaagggttttccacactcattacattcatacggtttttcccctgtgtgtgttctctgatggacagtaagccttgacttatggctaaatgcttcttcacaatggtcacatgcatagggcttttcccctgtgtgagttctatgatgtattgtgaggtatgacttctggctaaaggtttttccacattcactacactgatagggcttttcccctgagtgagttctgtgatgtaaagtgagaagtgacttacagtgaaaagtttttccacattcaatacatttgtagggtttatcccctgtgtgagttctctcatgtaaagtgaggaatgacttacggcgaaaggttttaccacattcattgcatccatagggcttttcccctgtgtgaattctctgatg

SEQ ID NO: 107041 - DNA, 1452 bp, Homo sapiens
agaagcatttagccataagtcaaggcttactgtccatcagagaacacacacaggggaaaaaccgtatgaatgtaatgagtgtggaaaaccctttatcaataagtcaaacctcaggttacatcagagaactcacacaggggaaaaaccctatgaatgcaatgaatgtgggaaaacgtttcaccgtaagtcattcctcactatccatcaatggactcacacaggggaaaaaccctacgaatgcaatgaatgtgggaaaacctttcgctgtaagtcattcctcactgtccatcagagaactcatgctggggaaaaaccatacgcatgtaacgaatgtggaaaaacatatagccacaagtcataccttacagtacatcacagaactcacacaggggaaaaaccctatgaatgtaatgaatgtggaaaatcctttcactgtaagtcattcctaactatacatcagagaactcatgctggcaaaaaaccctatgaatgtaatgaatgtgagaaaacctttatcaataagttaaaccttgggatacacaagagaactcacacaggggaaagaccctatgaatgtaatgaatgtggaaaaacctttcgtcagaagtcaaatctcagcacccatcagggaactcacacaggagagaaaccttacgtatgtaatgaatgtggaaaaacctttcatcgcaagtcattcctcaccatacaccagagaactcacacggggaaaaaccgtatggatgtaatgaatgtggaaaaactttttgtcagaaatcataccttattatacatcagagaactcacaccggggaaaagccctatgaatgtaatgaatgtggaaaatcctttcatcagaaggcaaatcttcagaagcatcaaggtattcacacgggggagaaaccctatgaatgtagcaaatgtggaaaaaccttgtcagaagtcagtcctcactgtacatcatagaacccataccggagaaaaaccttatgaatgtaatgagtgtgggaaaaccttttgtcacaagtcaaacctcagtacgcatcaggggactcactcaggagagaaaccctatgaatgtgatgaatgtaggaaaactttttacgataagacagttctcaccatacatcagagaactcacacaggtgagaagccatttgaatgtaaagaatgtaggaaaaccttctcccagaagtcaaaactctttgtacatcacagaactcacacaggggaaaaaccctttagatgtaatgaatgtaggaaaactttctcccagaagtcaggcctcagtatacatcagagaacacacacaggagaaaaaccttatgaatgtaaggaatgtgggaaaaccttttgccagaagtcacacctcagcaggcatcaacaaacccatataggagagaaatctgacgtagctgaggcaggctatgtgttccctcaaaatcactctttttt

SEQ ID NO: 107042 - DNA, 1285 bp, Homo sapiens
tgcttccatgcttaggagacagaaaaatggccatctcctatacctaccagttgctgacccaggaaaaactggctatcttcaaagaagaataaagaaaaaatagcagctattaaaacagccactattgttatatgaataaataaaaaaaaagagagaaaacatatgacaataatgagcacttattaaaacctatgagtaggaagtagatgcatattattaccaaataattctttgtgaaataaaaaagaacaggaaaacttcaaaatgcaaagaaaaactcaattgaacattagaaaatatactgatttattacattatgtcagtaggaacagaaaccatatgcatataaaaccaatacccatatttatttttgtcaaatcttactccactgagataggaagtaattttttttacctttacacaagcattctgtaagacatgctcatgtgtggttcatggataccttttttctcatttcagctgtccagatcattgatgaccttattgaaaggagccatgaaagtcatgatagatttttctggcaaattgtaatcaccaacagcaacacatcaactcaggagagagttgaattaggaaaaacatttaatttgaactcaaaccatgttttaaatctgattataaataatggaaacagttcaggaatgaagcctgggcagtttaatgattgccagaacatgcttttccctattaagcctggggagacacagtctggagagaaacctcatgtctgtgatataaccaggagatcccacagacatcatgaacatcttactcagcatcacaagattcaaactctgctgcagacttttcaatgtaatgaacaagggaaaaccttcaacacggaggcaatgttctttatacataagagggttcatatagtacagacctttggtaaatataatgaatatgagaaagcctgtaataactcagctgttattgtccaagtgataactcaggtaggacagccaacttgctgtagaaagtctgacttcactaaacatcagcagacacacacaggagagaaaccctatgaatgtgttgaatgtgagaaaccctccattagcaaatcagaccttatgctacagtgcaagatgcctactgaggaaaaaccttatgcctgtaactggtgtgaaaaattgttcagctataagtccagcctcattatccatcagagaattcacacaggggaaaagccctatggatgcaatgaatgtggtaaaacctttcgccgtaagtcattcctcactttacatgagagaactca

SEQ ID NO: 107043 - DNA, 1043 bp, Homo sapiens
catagtattatgaaaacctacatgatatgtatatttttatttatatgtttttggtatataggtaactaggtggctcagagccattattgaatatcgttttctgcacttcatctgcaatgccaatatcaggtttctgtgtatgtttcatcatcatcttatgggactattgtgatatacatgtttcatcattgactgaaatgttattatgcagctcatgactgtatacaggaggatgtgcataagttatatgcaaatatgagaatagtttatataagagagttatccaatctgtggattttgatatctgggggtatcttggaatcagtccccatggatactgaggaagtaatataatgtaaaaacgataggtgcataagaatttttgaaattgggtcaaatatttaaatgcagaatcactgcataatcagttccttaaatattgcatttagctttcatcactgtccaggatcattcatctaggcatggtgctgtccagagttccattaaagtggtgtgtgttctctttgcctttgtgagtagacttctgatactttctcatagtcagagaattcatggttcatgtggaagagccaaacacctgatttttcagtaaagtggaacctcatggtgcaaaataaacaaaacttattttctccttctcttatcttagtctgcattgaacttgtgtctcaatgagttcacctaaacattattcccagtatgtgtttatacttatatattcataaccagatcatgagctcctttgaggagtagaattttattcttttttttttttttttttgagaggtaggctctctgttggtcaggctggagtgcagtggtgtgatcataactcactgcactgtcaaactcctggactcaagcaatccttcagcctcagcttccagagtagccaggactacaggcatgcagcattatgcctatatttttttattatttttgtagagacagggtcttgcattttgtttatacttttatccctagcaataagggtggttctagatctataaggtgaactttgt

SEQ ID NO: 107044 - DNA, 1133 bp, Homo sapiens
aaaaaatctcgtcaacagatttttcctgctccctaggatgtgttgagttgcttctttttctcagataccacatatgaatattaacaaaagaacagtatgcacaagagaaatgctttttttgtaaactcaacggaacgaatgttaacagttttaggaatctgttacgttaagggagggggatgtccatatgcgtgtgagtatttttaggtaagtaaattgccttccaaaggagccacatctgcagctttggttttcgttttctcactactcacactgataatgacagggtcattgaggagatggtcgcaggaaatcctatgaaacagacactgccttttgtgaaaatagggaaaaaaatgcatcttcatttttttttttttttttttttttttttttggctaagatgatgaaagggtagactcccattactggagtctgtttaaccaattgacaccatttttcttcgtagttactttatgtaaggataaggaatttgctgagggttattaaaacactggggaaaacaggaggggaagtttgcatattgaatattattcatgaattaaaagcaacattattttttggagtttttgtttctttatattgggaaaaactataaacttttttcatctcattcagttttaaaatgaggaaacttattgtgataaaacagcaagcacattatagaaatatttcacaacatgtccagtgtgccagtcatccatttattgcctttcaggctcaaatccattcttgtttgtcctgtttaatgacactgaagctggacctgtaaacacatctcctttgccagctggcagattgttacactttgttggtagagggtatggcgggggtcagtgtaagaggaaggtattcttttacacgttctggtgtgatttataattattactcctagggcatgactgccattggagaggagacactgagtcatactcaccttacagcaagtttaccagcactccctgagaagttgagaagcttcctaataagtttcatgagctcctaagctggaaatttcccagcaggttttattgggaccagcaggtgacttcatgcttggtagcactgtgctgcatcatctcagcaaactatactatcccgaggccacagct

SEQ ID NO: 107045 - DNA, 1050 bp, Homo sapiens
cctaaaaggatatcagctttttaaacttttctgctgcaatttagctcctcttgctacaagaagatcagggtaacctaaatcttcttttattttcacgagacatgagagttgtgtccagcaaaatcataacttttgtacctggtcgtttttagaacaggacttataaaacattaacatatagacaaatcacctggggatcttgtaaaaatgcagaattgaattctgcaattctggtgagcgaccccagattctgcatttctattaagccaccaggtgatatccattctactctgagtagcaacaaggtcctagaagacactgagaagggatagtccatcaaatcttgaaagtactaccaaagttttgatgtaaaaatcatgcaaatctaaataactcaagaagaagataatataatgcagcaggaattattattatgtcttcttctataagtaggtaaagaaaactgagctcaggaaaatgtcaccagccacacagaccagtgccctatattcctgtcaacagatagtaattctttaaatttctcattaatactcataaaatatttactataccaacaatgtaattgatgcactaatattctattttgagtcatatgatccctctcaacccttcttctggaagcagagtttgaacagcatcagatacatatatttaattatttattttcatatgatttatgatattacatttagcaaataaatatatttgttataatatatttatattaataatctaatataaattatataacaaaacatcattagggacaaaattgtgagccaatgctgtgattgatggcatttaaaaataaacacaattataaggtacttctataaagctcaagtggaaatgggataaagactccctcaccttttgctttgtagattattaacaaacaacatttgtttttgttattttaaaatcagtgaaaaggttgaaatagtggcatgagtatcagatttgaaaatgagaaggcttgtaataaaataactacttgtgtgatcaaaactgccatgagcctctgcttct

SEQ ID NO: 107046 - DNA, 1032 bp, Homo sapiens
tcctcacttatgattttaacatacctggtggagtaagtggaaatgtaccagccatctccacccatatgtaaacagagagctttaatagttaatacagaagcacatatacttcctgaactgtcagctgtcaaaaataccatgaataaataagggggtaggtattattcatgaaaaagagaagcttggcttagaaatcttgtagtaataaagccttaatccctgccaatcatcctatcttaagaggaaggaacttcatttaatgcaaatccagtgataacagttttcacccaaactaaaagcaacatggaagatcctcctgtaaggctctactgattccctgtaccgagaaagaattgtatacttccattcaacacagataatatttcaactttaatttacattttatgcaaaaatagtatactctttcttacaaagttggtagaagcaattattctatgactttaagcaactcagttttatacatttactactgatggttatgttttatgcacggtgacatgattatctgttgtctgagagattaaaaattttcagctttagtatgggacctcatcatttatttccttctctcctacaaactataaatggcatagaatataatgaaaaatataatatttggagagcaatcttagcatcaaagtcagaaatggaaagaaacttaaggattattttaatagccctcaaaatagagacgatattgatttatgcatctcttttccgtttaatatcctcttcctgatataagaattgactatgcctaaaccggacactttttaataatgcttttcctttttcttttcttgctccctccctcctttcccctgcctttactctctcacatcttcactctctccctccttccttctctttccctttctccccctttttaaaatctccttcaatgtagtttacagtctctaaattctttctttagctttagatattcacaggacaatacagaactcttgatgtggattaagattttgtcactcataaaaggtggaatgttcc

SEQ ID NO: 107047 - DNA, 1038 bp, Homo sapiens
tttctgtcatttgtaaccaaaaatttctaactaacagacatttttatatttgactttttaggagtttgggctattctactttcagttttcgtaaaaccttattagtccaatgttaatggctgaggacactggaaaactagctcaaggtcacaaagctagtaattgtcagagctgtgaatcaaatcaaagccttgtttatttgtttttttcctcctaatgtctcatacacagattaaacacctgaggggtactgagactggcttggtgaccagaaataactctcattggccctgcctcagagtctgaaatccttagcattctccacttctttctgttaaaggcagctgtttaaatgcaaattatatctgggaaggtgtcacattaatagctactaccagctattaactcctaaacacaaatcaatgtgcttgttcggtagactagacaggactctaaaagaatctatagtttgaaggaaatctttgaacagagaatgaggaagatgggaaaggttgtgagcataaggatgctgtcacgatgggggccttggacaagtgacagaccataagtgctgggaggtgagcagaccatgacacatgccggtaggacaggggaagcaatctgcaagggctgttaggagtgataaaagcaaagactgcctgctttacatttttgcatacaaccatttcaaattctggcatccattttggtcatgtttcagtctttatgataaaattcaggaaattaccctcccccttgagtgtgtagtatgttttaaatatgaaggattaatccaagactgccaaacctaattcacataaggttctagcatgagctcacatttgatgatcattaacatctttcacctattcttcaaattctttaatgaataaatgtatcttttttccttagaatacaggacaattggacctttcttcttcagtgtcatatacatatataatgtaaactatgatgctaaaaagattaaatcatgtgacgaacattaccatgttgctttgttgtcagaaacataactaa

SEQ ID NO: 107048 - DNA, 2308 bp, Homo sapiens
aaagctcaatgtatttcgattttgaggtttagaatgagaaagactttcctcctgcaaacagagaagttgtttttcaggtcttagtttattttaaaatagaagtagccttttgggggaacagaatggccttactgttaactccagtatttaaaaccaacaaaagcagagttgtaatgttgacttggggctgaggggattagataactcaacacattccttcccgcttctcagagccctgtgtcccaccacgcaacaccggggcactgtgcagaacccagtttggtacttgttgaatttgctgtgaagaccaattaaggttgatgaatgaattagttgacatgagccctttccaacatagtccattgaataaatgaaaagacacattaaattataataataataaatgcatataaataaatataacacaatcctcttaagatttattttcaaatgtgacaataacgtatctcttacaggaaactgaaagctgaagacaaccaagaggcttatgagatctaatgtgaaaatcatcactcaagatgcctcctgtcagatgacacatgacgccagataaaatgttcagtgcaatcagagtgtacaaattgtcgtttttattcctcttattgggatatcattttaaaaactttattgggtttttattgttgttgtttgatccctaaccctacaaagagccttcctattcccctcgctgttggagcaaaccattataccttacttccagcaagcaaagtgctttgacttcttgcttcagtcatcagccagcaagagggaacaaaactgttcttttgcattttgccgctgagatatggcattgcactgcttatatgccaagctaatttatagcaagatattgatcaaatatagaaagttgatattcaacctcacaagggctctcaaagtataatctttctatagccaactgctaatgcaaattaaaacatatttcattttaacatgatttcaaaatcagtttttcatactaccctttgctggaagaaactaaaaatatagcaaatgcagaaccacaaacaattcgaatggggtagaaacattgtaaatatttactctttgcaaaccctggtggtattttattttggcttcatttcaatcattgaagtatattcttattggaaatgtacttttggataagtagggctaagccagttggatctctggttgtctagtcattgtcataagtaaacctagtaaaaccttgttctatttttcaatcatcaaaaagtaattataaatacgtattacaaacaagtggatgtttttaatgaccaattgagtaagaacatccctgtcttaactggcctaaatttcttctggtagtgtcagttcaactttcagaagtgccacttaaggaagtttgatttttgtttttgtaatgcactgtttttaatctctctctctttttttttttttttttggttttaaaagcacaatcactaaactttatttgtaaaccattgtaactattaaccttttttgtcttattgaaaaaaaaaatgttgagaagcgtttttaacctgttttgttaatgctctatgtttgtatttggaatatttgaataatgacagatggtgaagtaacatgcatactttattgtgggccatgaaccaaatggttcttacttttcctggacttaaagaaaaaaagaggtttaagtttgttgtggccaatgtcgaaacctacaagatttccttaaaatctctaatagaggcattacttgctttcaattgacaaatgatgccctctgactagtagatttctatgatccttttttgtcattttatgaatatcattgattttataattggtgctatttgaagaaaaaaatgtacatttattcatagatagataagtatcaggtctgaccccagtggaaaacaaagccaaacaaaactgaaccacaaaaaaaaaggctggtgttcaccaaaaccaaacttgttcatttagataatttgaaaaagttccatagaaaaggcgtgcagtactaagggaacaatccatgtgattaatgttttcattatgttcatgtaagaagccccttatttttagccataattttgcatactgaaaatccaataatcagaaaagtaattttgtcacattatttattaaaaatgttctcaaatacatctttctttcttgtgttgatttcttttttcattgtgtgctgatcaaatttattccatttaatcacaaagtcgttctgtcttaacatttcacccctgtattatcagatgagtgaaaattctcaattagttgtatgaataaccag

SEQ ID NO: 107049 - DNA, 1014 bp, Homo sapiens
aattggaagccaagtctgactccaggtttggtttacctcttttaatgatattggtctgtagtgagtttgagatggacaagagcttatgagtggaatcaatccaaatccctgactactaacaggaaaacaacaaggcttatacttttcattttcaacacactatgctacattattcattatgcttatagagtgtcctcatttataccttaaatcactgatgcttccttattcagaattacagatagacaggagtgatacaatatacagtgaaagtgtatgatggtactcacctgcatttattatatttcattacacagaggatattctaccttattgtagacctacttttccaacatcaaataatcccagagatcccagttcctcaagctcaatgtcatcaagaggatcaggaagcagacaaagagaacaagcaaatgtaggtcgaagaaatattgcagaaatgcaggtacttggaggatatgaaagaggagaagataataatgaagaattagaggtatctataatttttccccaagtttaccaatgttagactgtggttgttttatgtagttaggaaccttcatcagtgtacagaaatgttactgttttattgcaaacttttcagtactctaatgtctatgatggcagaaactgaagttctgagaatttgagaattttcttgaaatgtgtcccaaagttttaaatgttaatggcagtttatttgtttagctagggtttatcttcatttgcagattttcagataagaaacatatatggcaaacacattgttaagaagtaagagctgttgatctagagctattataattcatagcattgtagcaggctataaaaacccagtaagatgacagagttatatgatgtgagtgaggaagttgccatagtcagcaccagggtaatgtggctggtttggctaactgtccttcacctttacacttctgaaagtgtatgcctagtctgtgacactgacctccccagttggaggaaacttcttac

SEQ ID NO: 107050 - DNA, 1525 bp, Homo sapiens
taaaactgagctgtcagaatattatctgattttgaagggttattacagtggctttttgcatgtttgcctctgtgaagggacaaacactaggtataaatcccccaactctaccagcaattttacatttatgggaccaccagaatggcatttttcaagttttatggctgttttatcaaattttattatctagaagagagtgcttctcactgaaaaactgaccaaacatcaagcctggatgtaaacacatctaaattgaatacataagggagaaaatctggcctaaagccttgtgtagatctttctaccacatatttatacttgttcaaaggggaatctggcattgagtgatgctttttaaaaatgttttaaataatgtaagcatgccaagttaaagaatattgtatcacagttataaattacactatgcttgaaaattgtctgtatttattgtcccacgttccgtagtacttgtttcagtgttaataattaaatataattctaactaatccctgaataataactattaaattgaatgatgatgcctccaagttatgttttaaattaatttcagaaataccaaagacatatattgaaatatttatgaagccaaaagttaatctgaaatgtttatttggatttctaattgctcattccgcaaaagtgattatgcaaaattatgatagtgtatactgcaatgtaaaagccaataattattttctctaagtcacaaaaatagataaaatggagaaatgactaaagctattacagcattcactttctttcaatattttggtaactatccttcaagttatgtttactgtactaacaagtctttatgctgaatgcttactgtttggtaaagaaacacaaaataacaatgctgtgtcttattatatacatatcccatcatgcatattgattaaagtcatataatgcagattcttgttaatgcactaaataaaagaaatgcagacacgctggatggcagtggttatgacgtagagacaaaagccattttttcggaaattattttcccaaagtactacactgcatttttggaaaaaatattcatagaccaactcatgaagaagctcaatggcagacacaattggtacaatttattaaaaaagagaagggagaggaagaaaaaatttaaagagctaccgattgttaaaatgtgaattgaacatatttgtaagacatgaaggattttgtggggttttttttctttttagtgggcaaaatgtatggattatgatggatgagtttgattattgtcaatacatttatgtgaactattgttcagaatatggtttgtcagtattgattttgtagcatctttactttgtaaattttgttcagattatgacattcctttgtagagtctttaaaaactatataaagaaggataaagagtggccatgtctgaacggataaagagtaatttgcgatgatccttctcagttaatccttgtattagtttgctagggccgccataacaaagtaccatagaccaggtggcttc

SEQ ID NO: 107051 - DNA, 1033 bp, Homo sapiens
ttcagctgaagaaatagtgatctactataatttcagagaaaaaaaaatgggttgtattggactgaacaggttgacctccattatatctttctctgcaaagattgttaagagtaatttttcttggctgggcacagtggctcacgcctgtaatcccagcactttgggaggctgaggcggatggatcacttgaagtcagcagttcgagaccagcctaaccaacatggtgaaaccccatctctactaaaaatacaaaaattaactgggcatggtgatgagcacctgtaatcccagctactcaggaggctgagccaaaagaattgcttgaacctgggaggtggaggttgcgttgagctgagattgtgccattgcactccagcctgggcaacaagagcgaaactccatctcaaaaaaaaaaaaaaaagagtaatttttctctaaatgtagcagctcatcttcaggtcctctgtaataccatctttgagtcttttagagaacatattggagggacaaaatataccaaatacatttgggctgtactaaattaagccatgttaagtgaatttttttattgcatgacttctaagaccctataacatgctaatgtcaattacaatcccttagagaaaaatagtttatgcagtaattcacaaaccttgtgaggtaaaacctttttcaataatatctccttaatgtgactgagaacgttcagatttgaaaaacaatttaaaggtgacatttcattactatccaaatagtttatttgaataacctgaagtaagtctacacatccttatcatttattttagctatgaccaagaaatgccatgtcccgtgccaccagcaaggatgtatttgcaacaagatgaattagaagaggaggaagatgaacgaggccccactccccctgttcggggagcagcttcttctccagctgccgtgtcctatagccatcagtccactgccactctgactccctccccacaggaagaactccagcccatgttacaggattgtccagaggagactggccaca

SEQ ID NO: 107052 - DNA, 1061 bp, Homo sapiens
caggtcttgaaatttttgaaagataatcgtgtgaatttataccacaacgatgggatcctgaaggctatttgttcttagatattatcaccttatgctgagaactctgtagaaatgtaaactttactggattgtttctcccaaagacttaacaagtataataatccacatgatagcaattaggaagctagtgtacctctttctcactccagaatctgtagaactggacatggtaccaccaaatgaaacaaaacagctgcttctttaacataaccaaagggggaaaactcctttaaggtggagaattaacgaataaatcgtaaaatatacctgaaaatacagttttttctgtgactgctgtaaagacatcattccttcattctccacacacagagaagtgtattactatgcccagaaacaaagcctctgtgcttcaggtttctaataatctttttataaaatgcatttttaagtaaaattcttatataaaaatattgacagggaaatctcattatccacaatatttatgtgttttaaaattcttgtgaacagtgagttagcaaatgttgaaccattcattgggcctaggagaaatacagggctaggttccttctaacctctagccacaacatatttgtccactgaccaatacataaccttgttttatgtatgtgtttttaaagaggcttatttaatatatattgttcatttattaacatggaacccaataagccatgcctcagcaaagctgatttcgtagatatatttctttaaggcacattacagccttctagggcgtggaaacactaacaagcccttcagcacttcttttgagggccattttaagcagggaaatcactaatataaagcttaaaacatttcgacaaacatggcactaaataaaccatgaaaaggacgcttgtttaccgtgtgagaactgacacaagaaagcaaagtgtatccttgttttacctcagctgggaacatgcacatcaggcgctcaaatttttggcctctttgtgagtctgtgggaatatgaccatgaaaatgccacagataccaat

SEQ ID NO: 107053 - DNA, 1471 bp, Homo sapiens
agctaatttttatatttttagtagagatagggttttaccatgttggccaggctggtcaaatgtatttatgttgataagaatgtatgtgattacaatttcttttaccttttttgcttgtttgttgttttttgagatagaatctcgctcttcacctaggctggagtgcagtggcattaacacagctcactgcaacctccacctcctgggctcaactaatcctctcacctcagcctcccaagtagctgagatcacaggcacgcaccaccatgcctggctaatttaaaaaattttttttgtagagatgcaggtcttgctatgttgctcaggctggtctcaaattcctgggctcaggcagccctcctgcctcagcctcccaaagtgttgggattacaggggtgagctactgtgcctggcatataatttttaattgtaattaaataatctttaatcatatttaatcatttttgagattttgggagtaacacagatcaaaaggtaaataaattcatagttataatgaaccaaattctttaatagcaaaaataataataatctacaacagtaataacaaaaaaatttaaataaaaattaactgaaatttaaaatcagattttatggtatagtagcaaatcctgaggacacgatatatatatatatgtacatattaagtgtgtgtgtatatatatacacacatatatgtatgtatatacacctatatgtaagtatatatatacacatatacatatatgtatgtgtgtatacacacatacatatatgtatataagtgtatatatatacacacatacacacatatatatacacacacacacactgcaggtgtgcatgcatacatttattttctattgtttgttttttgagtcagatgtatgtgtgagtaaattatcttgctaaaatttcatgccaaaacataatagtaaaaaatcagatgtacagtctgcaagatttaaaggaataaaaattaccaaagatttcttaccaaacaacccctcccccccccaaaaaaaaacccaatattgccaatataggaaatattaaaattattgtatggaatctctatgatgatagaagtaaaataacctgtggaattacggaaaggcgagagagaagttggatttaagtaaagatgctatgcactataaagaacaaatcatagagcagtctgcatgtctgcccttaaagcgaatcctgagtgtccactggacgtggatgtgacgtatccatgtgaccaagtctctgtcctctagaggcccatattctgaatgtctagacagatagatactcatgtaatcataagtacaagaaaaactgggttgagacctataggagagaaaaaatggcgatacccatttaataggtagagctgtgttgtccaatatggtagccattggcaacagatggctatttacattgaatttaataaaatatagtttaaaactcagtccctcttttg

SEQ ID NO: 107054 - DNA, 1040 bp, Homo sapiens
ctatgtgctagaataagaaccatggaaggtgaaatatcagatttcttgcttcccaggtaaataagaaacataattattgcattttaacatagaaaataaaaccaccaagaaaatctttgcagagtctgtaatgccagtctgtttattgtgaatgggacgtcacctcttttgctgaatggaggtaagtatgaagtcggtgctggaaaaggaaatgaagaatcccactcttcaactccagtttgagtccctggctctgttggtccaaggctcccattaataatcgctgatgtacttggcattcccaatgcacagtaaaagaggaatagcatcttctgccaaaaaataacaaaatgaacactaatattctttttagtggacatctctgttttatcagatttaattcatcagctttcctttgcttatgttgggatttatgacattttacattgtcaccatcagaaaatgttgacaagcttacagaactatgctctgaaacattgatgaggatctgtgtaaaatgtcacagagccccaaactcattaagtatgaaacatggttttggagaaaaatacgccagtacatttaatttgaagaatctattgtctgagtaaagaggcttgtttcattttttaatgaagttgtaaggagtcacaattttttaatgggtcaaaatgaagaagtgccaactatctgaactagggtatttttttaaaccactaaaagactcaaaaatatgttcatattccatgtttgatttttaaccattatgactaaaggcagagtagaacattgcaaatgatacgagattttaggtctgatgcataactcttcccgtgtacagttatggctatgtaaatggaggcacatcccagaaccttatattacagttgcctgtgtgtagaataaaagggataataatgtcattcagcatagttcatcagatgatttgtgagcataacaagatgaggaatttattggaattttaaatagaaaatattactctctattcatataacatttgctttaatatttttttttta

SEQ ID NO: 107055 - DNA, 1036 bp, Homo sapiens
agcaaagtgtataaaaattcctgcccttccagaccttacattatagtggcggaaatgcgagatgaataataaacatttttttaaaaagtcagctgtacaatatcagcagttgataaatgctacggaaaaaataaaataggatgaggacaataaggatgctttacgaaggggcctcattcctagccacttacggatgtgtgtgtcattgtgtgtgtatgtgtgtctgtgtctatgtttcgtgatctagtgagatcagagagggaataatgaaccaaactcctacactgacttctcttgtgtctgccccttaagcactggtttccctcatgtgtttcagactttctgagtcctcactggacctcctacctcacatagttaatgacaccaaagccaaaaccttccagccatcctcttggacctcctgtatccattactgcattttgttgatgctgtctcttactcctttcactctcatattgtttcatttcaagccctacttctcctttgcctaatctatgacaaaagctctcaggagtcctacctttatctataataccttcattagcattatttcctgctaattccctttgctcactggagacagaacgatcttttgaaatgcatattgatcatgtttctgagctccagaaaatcccattatcaataggacctatcatgtttagaatatcagatccaaactcggcataatatgcaaagtccacagctctaggtctctgcagacttacttcacacctcaaaatgtgccagaccctacaatccactgtgtcaccccacctgccatttgccaagattgcattctcttatgtgtccttactacactgtgcatgtattacataggtctggactgtctccccacccagcgacccttctcagtttactgaattccacctactatgccctccattaactctctaatgtggaattacctcaatgaagtgcgtaacataaggtgatgcggttatcttttgtttatgtcagaggtcagtgaattatggctcttgggccaaatccagcc

SEQ ID NO: 107056 - DNA, 1048 bp, Homo sapiens
gggtataaattggggacacagcactgaggtttttgcttttcttctttctagtatgctcagagataaagtggcttggtaagaagtgacaattgtagaggacgctatagcgtttcggtttgcaaaccccaaatgctccgattctacagtaaatttcttggagatgttcaaatgtgaaatagaaaatataattctggcagtgttttgatacatgataagtaatcaatattctagtttgtttctactaaagattattttaaagaaactttaatcttagagggaataacatatatttccttgcttttttttttttttaaccagagcagcgtttactttaatttaacatgaagagattggaaataagtcaatctcctccctctatgaaatgacatggaaattgctctgccgttatccaaccccccaggaatgggagaagataggaaaagtgggggaggaatggctgctacttttgaggtctgcggttcaatttcaggcattattgattagattaagatttataactgcagagagagtgaaggttttcagaagggtgttattgttctattgtttagcttctactgtggtattaaaagaatgtccagcctacttctaggaagcttctaaaagtaaactcaaagaaattaaaatttaaaactccagttttttctgtccattcacaagtttttatgatgataaaaaatgtcagttatgtgataagatgtcaggcatttccactcagtgaaatagttaaattttatggttctcttttattcagttcatctttttctttcctttcctttacttgtgttgtgtttgtttgtttgttgtttcttcttcccctttccttgcctttccttcttttccttctttctctcttttttttctctcaatgttaagtacataagtgcacctagtagttcactttaataagcatttactttcagatttctagataaggttccagcaagactctgataatacttatttaagaatccatcatcctgtgtttggagatgattaatagtggaggattcttgtttgtacgaaagcc

SEQ ID NO: 107057 - DNA, 1039 bp, Homo sapiens
cactattattatttacaattttaaagatgacccaaatatgccaagattttcacatacttttgctacttatccttaaactctgaagactgctgatatttttgtgttttttattctcaaaggaaattgttaacagtgtcagacagatgatcctccatgccccttagataccttcatcaattctgggcctcagatctgggctgtagattaggttagatggttgtaagtcccagttttcagagacaccccagtttatgtcattagtccaacaagatcaattctagtaccccttcttgctctcaaaattgtactgacttaaatggcagattatacaaattatagggcccatccttcagtcgaatgcaacagctttgctttgctgcaaagcaaatttaaagaggatttccaatttaaaaaagtctcctaccctaccatcaccaactttttcccacgaattttctacataagtgaacatttcttacatgtgttggccagattgtttctctgaccaattatatgacaaagtcagaatttttcatgttagctagaacttgaatgtccctatgcatagaccaaaacagtatgggacagcagtctaaaatatttgtgttgtccgtcacaaggggacttagcaagagtcaacacaaatgcatcactaatactataaaaataaatctccttgccgcctgcctgtggctcagcagcaatctcttcatgtacatgcatttgctttagcattatcatccttaaatatgtttttttcagatatgtgtcctctctagggatgaagcagtatgtcaatattcccgcctgtgaaatggaaaatgagggcttggaggttactgaaaagagaactggtgctcattatgtatacaaagtagaagaatgtcaggcacatgctaccatataaaacctttgactgaaaataattgtagacaaggggttttgggtgtctttgtgtggtggagtggggaaggggtagggtgtttggggtagaagatgtttggatttgaatgaggaaaagagtgactaattaacatat

SEQ ID NO: 107058 - DNA, 1954 bp, Homo sapiens
cttagaaatatttccaagtagtattaagtaggcttttaaaatcagaaaatcatcaaacattttagcttctcatccccttgacccagggatgtcctacatgcaatgtcagagctgccatcaggcctcacatttctgcatgaagcatagaagttaatgccaccgaaatttttatcaaaagatagtggaattttttcagtattctacttatttgaatgttttagctgaagattcttttggattttctatgagcacactcatgttgtccacaaataatgatttttattttttcctttctaattcttacacatttcttgtgtaagaatgtgggatgaagccagacagaattttgtgcattttataacgtttaatttttattattttctgatgaaccaatacaataatatgaataattacattttacttgtctttttaataggtagatcaacagtctcagtatatacaaggatataaaattctctatcggccatctggagccaaccacggagaatcagactggttagtttttgaagtgaggacgccagccaaaaacagtgtggtaatccctgatctcagaaagggagtcaactatgaaattaaggctcgccctttttttaatgaatttcaaggagcagatagtgaaatcaagtttgccaaaaccctggaagaaggcaagtatgatgaagcgtttgatttccatgcattgcagtatatttgttagaattttattagcttaatttaaattgttataatgttaatagtggcattaattactaactttcttgatattgaacatacattttgctaacagtatttgtttatttagaaaactagaaaagcaaaatgctataatagttgacttgcttcaatagtggcctacctcaaatgtgtaaatgtgaacattatattacttaatggcatatagaaatttaattattcagaactaaaattcacatttaaaaatgaaattgttttccgtttggtttattttccattcagcattttctatttgtttattttgatccatgatttgaataatgtgttgatttgcccaggacttcgtgggattagcattttcttcctaaatctcatctcttttaaaacacctcagttctagacaaatcactatagctgaccaccctattcctagaaattaaacaatatttacataaaggtaaaagattacattaactaacaacaggatttttcccaacatgtctttgtcactttggctgtataagtaattatcatgaatgattaatattcattttcatacttttgaacatttcgggggagaacatgagactagagttacacggtagaagaaataggaattgtcctgggatgtttggtggaaacaaggtatttaactttggttatggaaaattcaccgtggcagtgaattagcattgagtgaggaacaacttaggtagtttgggactattcagacttggatgagatacatctttaaaacatatgcagctgggcacagtggctcacgcctgtaaccccagcactttaggaggctgaggcgggcggatcacctgaagtcacgagttcgagaccagcctggccaaggcggtgaaaccccatctctattaaaaatacaaaaattagtggggcatggtggtgggtgcctgtaatcccagctactcagggggctgaggcaggagaatcgcttgaacccgggagggggaggttgcagtgagccgagatcatgtcacagcactacagcctagatgacagagcgagcctccgtctcaaaaaaaaaaaaaaaaaaaagcatatattgatatagtattaatacatctattattgggtttgatattaattacctgctttcagtgttctctagcacattctaataacctaccttttaaaacaatttaatagcacccagtgccccaccccaaggtgtaactgtatccaagaatgatggaaacggaactgcaattct

SEQ ID NO: 107059 - DNA, 1050 bp, Homo sapiens
cccagtggtgaagcaacatggagtgcttacattgaagttcaaggtaaagtaaatggtgtgtttcccttaaagtgaagcttaaaatgcagttgtttacttactgggatattgatgaagtaaatgtcctcttccctgagtaggtgtatgaatatgttatctgcatttatccgcttatctgtgtatgtgtaaacatcttttattttggcctttttcctgctttttagaatttggagttccagttcagcctccaagacctactgacccaaatttaatccctagtgccccatcaaaacctgaagtgacagatgtcagcagaaatacagtcacattatcgtggcaaccaaatttgaattcaggagcaactccaacatcttatattatagaagccttcaggtagagtgaaggagatgcttcctagttgttcttttttgattctccattaaatacgcatgttctaacctgtgtgtctatccttagccatgcatctggtagcagctggcagaccgtagcagagaatgtgaaaacagaaacatctgccattaaaggactcaaacctaatgcaatttaccttttccttgtgagggcagctaatgcatatggaattagtgatccaagccaaatatcagatccagtgaaaacacaaggtaaatattgatttacttaaacctgtgacacctacttatccttagatgttataattgcactgacaaatcacttgtgctacatgctagaattgtacatttacagtgtgttgttcaagttgcccaagttgcttaattaatttttaatatacaaacacaatgtctacaaactttattattttctggactaagcataccaacataagatggattaacaaagagaactgtttctcataaaattacaaatatatcaagacaaaaatattacgtgaggagatggaaagtagaatgatggttaccagaggctgggaagggtagtagggtggctgtggggagggtggggatggttaacgggtacaaaaaaaagaatagttagatctaatgaataagatctagtattagatagcaa

SEQ ID NO: 107060 - DNA, 1040 bp, Homo sapiens
gtgaaacaatatagcttactgtagactttattgccagtaggggataaacttttaaaaacttgcattcaaaaacacctctggaggaaagaaggcctactttgtaaatctgtggtttccataaatagagttcactatgtttaactttctgtcagcgtatgagatctttgtgtgagatccataggattttttggagctcgtatgatagctaggcataaaataagtaatgagagaaaaaactgggtccttcagttctgaatttcctttctttgatgtagacttcatttaaatcatttgttggaacagcttccttaagttgctgatttgagaaaatctggcaatataatagtgcattgtttctgaccattaacgtggttatttgagtcaaagccaaaactaatagtgtcaagggacctttttgcagagtcagcttaggtttagtataatccaagatcttggttgagaactgtgagttcatcaacattttgatgaaacacatattatgagacccccccaaggctttatttgacaattttaagaaccttgatatgtgtgtgctgcttttgccagactctgacaagacatagcaaactggatctttagggaatgattcttaatgacatatggcaataatccacagatgcccactaaagtcactagtgctacagtaagcagtgcttcaggggttggaggattttatatatatatatgtgtgtgtgtgtaaaatggtggtaaatatatatattaaatttatatatattgggtagatatatgtatatacacacatattcaatgtaatatatatttaccactgcttgtatgtatggatactcttaatactaatctcaagagtcttattcaaaatgctacccttaagggatttgttgtggaggtttgtgtgtctttcttctccttctcctcctcatcctcctcctcctcttcctcttgtttattttgtagttaaaataaggattaaaaaattttcaactgaggactaggggggctgatggggaaagagatttgttatggtaaaaagaaaacca

SEQ ID NO: 107061 - DNA, 1022 bp, Homo sapiens
gaactccaagtaaggctaaaactaagaaaagaaaacctcttcacatttacagaaagcataaatataagaggtgtcaaatccaagttcaaaagccctccagaaggagtgaaaatagccaggatgaatacaagacatgaaaaggtgtgtctatctccaggcaattgtgataaggaggttgactgtctattacgttagtcagtgaaatgtgtttcactttgtgttttaaagtactttaccttggtagcctgatgcttttataactaacagctattctactgtgtatacagtagacattgaaatcaaaatagagtttcttcctgcaattttaaattcagttacaaaattcatttagccttaagttttccgtatggaaatcttgctctctaagcctggatttcaaaggaaattggcactaatgatcaaatccagaaactacttgaatttagaagttctcatttcaactgcgttgtgttttctataaatgtttaaaagatctttatatagttgaggatatattattcaatattaaaataaaatatgcctattaacatcactgttaaaacatctttaacatgctggaataataaacacagtatgttaaagaaagtaacatgattcccaactgcaaaagataaataagaaaaaaacattcaaaggaaacctgagaagatatgccttttttcgtcttttgagactgaacgtagaaaaacaccagttactacaaaggaaactaatcagaattgaagccatttggtagcaggaaataattacagttaaaaaaattcagtagtgtaattgtattgttaaaaaactttccgtgttttgtgtatagctcatttttaaaaggcagtgttggagtcactacgagctcaaacataatctttctctccctcacatctcatacaatgagtatttaattttgatcattgatgttaaggcaataaagcccagtaatgcaggtagaagctgtgggaataaattaccttacataagggtggccatttgattttcacccccagcac

SEQ ID NO: 107062 - DNA, 1034 bp, Homo sapiens
ataaaacatttaaagtctggcaaatggtaagaatttaattaatggtcactatctttttgttttagtgtgagcacaggagcttgaggaaataagtaaataaatgccaactttaccccaaaatgttcttttagaaagtagtttaatatgttagtccacataattataaaaacaagcttttcttctgccagctgacttagaggaataccatgttttactctttgttttaagttatcagaaaagaatgtagcatgtgctttgaagcattgtgtgtataataatgagatctttcaagtagaaagtcacttaactgtgctttcttttgttatgtcattagatatgaaatccgagatgatcataccttgaaaattaggaaggtgacagctggtgacatgggttcatacacttgtgttgcagaaaatatggtgggcaaagctgaagcatctgctactctgactgttcaaggtaggcattgggaaaggctttgttttggtggttttagcatacaaaatatagtgctgataattgaagaaaatattatgtatagggctatgttacatatagactttaagtattgctctaaataatgtatttcaaacatatttaaagaacacatattgttttgcctatgggagctctgtaagtgttacaggaaattgaattaaatgttgaaaattatgttcaaaattgaattaaatgttcaagatagttcaaaaactatcttggtcaagtagaggcgaagaatgtgctttaaactccaggtcttcaaacatagagcccttctaatcttttaattaaatgacagctattgctgtcttggaggaaactttgtctttggaggaaaacaagtctttcattacttcaagatcatccactttcaggggcctgtacaatttgtaacagaaaaagaagattctattactcttcagaatgtaggatttattgagcagggactttgcaattgttttgtgcgcacagagtgcctgcatcataacaaacactcaataaatatcagttgattgaacgaattgcagttg

SEQ ID NO: 107063 - DNA, 1049 bp, Homo sapiens
attaagccaagtgtaatatataattggagctatagtaatagggtgtatactacaaattccttaggcctttatagctgtctttgaattttggtttacctcagctattgtttcctcccattcatcttgaaattggaattttttcatgtctgtgaatctcctggcagtgccctcattactcttgttaactaaatccccctccttctccatttgtatagattctttcaacatataatagcattgggctgtaatatataatgttaattggtggcccacgtgtgcataagcaagttgatttaaaactctacattcccaagtatttaagatttgtaacagtaaattagtactgtattatactgaagctgtagaaataaatctaagctgttgcaaattatttatatgttattatcctttgactcacaatttttctatgtatttgaatatgtcttaaaattgtccttaaagccttacattttatagtagataaaaaacattgaacacttactcactcttaaaacaaagagaatgttaaattatgtgtttgtttcctcttattttggtatatcttttatgtatcattgtacaattctttcagcaatgaacttgtctcctaaatatccagagacttcaaggttagattctgaggcataagaagaggctcggcgtgctatccaaagttatagaactaataaagaaacatctagctacacctcagctcacttaacttccatttcagatattggatttttcatcttcctcttttcctgtaataattttgtttccttaggatttttggaaatgcttatgcgagtgttccaaaatcagcgcatgaaaggttacaaaagttcttaggaagattttgataagatgatactcaaattgttctggacctcaagaactcaagttttttaaactcaagtttattaagcagtaattaagataataaggatgtgagctgtgcatttattttcatttgtacaactcgtatagccaaagacacatatcttttttttttaattatactttaagttttagggtgcatgtgcacaacc

SEQ ID NO: 107064 - DNA, 1035 bp, Homo sapiens
gtgatcacaaagctttaaaagcctattgcattagaaacaggcttttgtttaagtcacctttaagagcatcatattgtatgggaacatttcaaaagcagttgagcttaatctgtataatactggctggaaataatgtaaatttgtctctttgagtggatagagtacaatttactaaggaatccatgatttcttattccttagcctattcacatgcatggtgtcactcttctctcacctcgatatatgacatcactgtattgttccatgcatcatgtatataaaagatcatgccacatttccccatctttattagggaagcttataaatattctgattaacctttaaacattcatgataataagcacatgtttgcatgggaagagaagaggcattcttcttcatagaaatgtatgtgggatatttaccttacaacattagtcctacagacaacacatgcaaatatgaaatgtaaacatacacattgttttttttctgctgacagttacatggactaatggccattaggttggatgtccagattggttaggcttaaatatggggtgtgctggaagggggaacttcaatgtaatatgcttaaggaggtccatggatagcacctatttgttcttccagccattcagtttggggatctatacgttttaaaaatattgtgaatttgtagtttatggcgtgagaagcaaagaaaatataagctgttgttctctatctcaaagaaagccctctatagaagctttactttggatctatgtagaatgagcttcagtgtacttaccaaatgatctggagcaagttttgatactctcagagccttaattttctaatccaaaatataggaaaatacaccttgtgagaatgttttcgacgttaaaaataatgcatgtaacaatgctatgtatatagctggtgttggtatatcacagttctcattaattaaaacaataccagtaatacagattgttgcttaaatacattggcacatttattaaattgaccacagattcactgatgcatttt

SEQ ID NO: 107065 - DNA, 1065 bp, Homo sapiens
atttttttggggttcatcttacataaagtgtcaatgcatattatgtattctatttattttccaaaataaattttctatttgggatttaaatatggtaagtcaacacaactttattgtaccagtcattggattgaataaatgacttaaaaataatttttcctgtctatcttaatttttatatttaataattgaaacactggggattagtagaacaaagcataggcttgggcattataagaccacattataatttcaggtttcaacacctattaaatgcctgatcttatggaagacatttgatctctatacatttcattgtttccatctgtgaaatgaattgtctaatcatacctagattagttcagtgtgtcgttgagggaattcagcgagaaaatgcatgttaaatgtcattgtaaatggtgacacacttaatacctattagtaatggtgttctctttattattgttgttagtatacctatttgaactctgaatatatttagtcatctaaatcttgatggaaaaggaaaatccaaaactactcatgccataacaattccaattttcttcaagaagcaagaagatgatataaatgtatgtgaacgaagatccagctttctatctcctctgcctgtacttctatctatatctgattcaccactgtgagaattttcagttgccacagaatcactaggggtattttgggtgaacattatgagtaagtaaagtgtttagactaacactgaaattaagaaactgattcaagttctatgtgtacctttattgggcaatgctatcatcaactggttattccacaggagaattctgtcctaatgccctaaaggtacccaccatgtgtaatgaatcaacttctttcccatgcatcgagaacagttctagttacgtattatccttaggggaattgagaaattatgtgattcagatgcaaagtactggttaagaaaggctggtttctcttctcaaggaacatcctgaaactttccacacacttgcaattttatttaaataattacacatacacttatcatgtttggaccctgaaact

SEQ ID NO: 107066 - DNA, 1012 bp, Homo sapiens
ggatttaacaacttggtaagcagtcataaatgaccttgacaagagccgtttcaggggaggggtgggggttcagacctcactgaacagttcaagacagactggaaagatcaaaactagacacagagcatagacgactctttttaatgtcatgttccatacactagataaaaaataatggtgattgtagtcttgcgttttgaaagatctcagttaattttaaaggttatattttgtgtgtatgcttgtgtatgtgttaattttttgtgacattcaccatttaaaatcactataataaatttgatttttaaaaattcttggaactccctgatgtatcatatagtgaactagatgacattttattgcttatgccaaaatatgtaatttattatagaatcttcatttacttttgctgtctaaggggatgctgtcctctaattaaagagcaccagttcccccacgccatcagtagcttctagtcaatgtaagaaccacctacaacaaggaatcaaacagtttaaagttgtaaaaacctatgactatgaaatgatgccaagatgttaatatataaataacttttaaatcatttacatgctgccaaaatgatgatccatgatggtgttccatatgctaggaagttgtaacatctgaaacttttactatttctaagaccatctgtgtgttttgtataaattatgactgtggaactgataaaacactggaggtaaaaagcacatttatacatttgggaaaaggaatacattaaaaatcagcagtttgggttcaaaatcactgatcttatgtagatcataattgtttttgttttattttcttcctttaggcaaaactgaaattgaataattaaaacaaaaacttagaacataaacagaatacatgacattatttccagttttttttttaatagtgaaaataaattcttaaaacatgttggttattagtcattgtacgtgattcttctttcctaagctttgtattcaaatgagtgttttcatct

SEQ ID NO: 107067 - DNA, 1636 bp, Homo sapiens
aaatggagtcttgctctgtcaccaggctggagtgcagtggcacgatctcggctcactgaaacctctgcctcctgggttcaagcgattctcctgcctcagcctcctaagtagctgggattacaggcatgcaccaccacacccagctaatttttgtatttttagtagagatgaggtttcaccgtgttggccaggatggtctcgatcttctgacctcatgatatgcctgccttgacctcccaaaatgctgggattacaggcatgagccaccacgcccggccaacaaaattcttagccctggagatgcaacttgatcaaaactcagtgagtgttctgctggagcttacattttatgagtgcgtatacagacaaaaccaaaataaataagtgtaatatacagtaaattaaactataataaatcctataaaaatagagaaagagtatacagacaaaaaccaaaataaataagtgtaacatacagtaagttaaactctagtaagtcctattaaaaatagtgaagaggtagatgaattcattagggttcaggtgggattgaaattttaaataggctgattagagagaatgcctcacataaaaacctcaaaaaattgatggaatcaactatacaagtgtctggaaaaagggtattctaggcagataaaatattaaatagaaaaaccctaaggtggggtatacctaacgcattcactagagagtaaaaaatcagtgttggttgaacagaatgagtaaagatttataggagatacaatcagggggtagcctttttaaaaaggctatgaatttaataattgtccaactgcgtaggctcttacaggtgttgtagatagtttggcttttcttctaagtaaggtgggaagcctctgctctcttgagaacacactgaaacgtggcaatggtagaggcagggagaaccactaagagctctcagggtaatctgggtaagagacaaatggtggtttgaaccaggctgttaggatgggaaggtagtgaggagtggctagattctgaatatactacaaagcaatagccaacagaatttgctaacagactggatgtgtttgtgagcaaaagggaaaagtcaaggacctcctaattaattggcctgctcaactgaaatggtatagatgccattaactgagatgccatagattataggggaagatttgggatgggaagtatcaggagcttagttttagacatggtaattttgaaatgcttattggatatccaagtataattgtcaaataggcagttggatacatgagtcagaaattcagaattgaggttaaggttggagaaaaaattacatcgtggtaggcatacaagtactcattactatgcagttctcccgtccttctggcggatgaaacactctacttcccagcttttttgctgtccggcagacctgtttgactttttcagcttcatgggttgtgagtgacaattaaagaaattaaatactagtggtttaaatactccagtactctctttaccactctgcaaccaaggaagctacttgtcttatttaggtagtgcaactgcaacgtggaagacaccctgagagcctgagcccctgagttatgtgtagaactttctaccccacacctgtcgtctcaag

SEQ ID NO: 107068 - DNA, 1031 bp, Homo sapiens
caaatttatcacctatttgaatatatacaaaagttttatgataatcagagattatattaatgacttataactaagttcagtagaagtacttggttcaactttcagaacatagaatataaaaagattgttaaaaatagtcaaaaagccagaagttgcaactgttttttgtggagaagtaaaaccttatacattagtttattttttttaatgtttataaaaagcgttgctgttccaagtggggcctgttaaaggagaaaagtaatccaaagcctgccagcattgcagagaaactgaaacatctttgtatttttttttttaagtttcttgaagttgctaatggttttatagttttttaaacaagttgcagggcattttcaaaagctggtcaggtaacctagtgctaagaaccgtttattcctcattataagcataggtcttaacatctccagagaaagcatttggccctcttccacctaggagactgagtttctgcctttttgattcctgttagactattgattatataagattgtactttaatctactgggccttagataatttaataactcaataataattaaatttgatttggattgtttttctttaaacgttacaatttaaaaaagaacatatcaaagatctatgttgggtgaagaaaaaaaaagaaaacacatatgggaggctgaggcaggaggattgcttgaggctaggagttcaagactaacccacgcaacaaagttagacccccctctctacaaaaaataaaaatttggctgggcacagtagcacacacctccagtcccagctacttgggaggctgaggttggaggatggcttgagcccaggagtttgatgttgccgtgagccatgataacaccactccactacagcatgggtgacagagcaagaccctgactcaaaacagcaacaacaaaagcatataacacataaacatgtcacctcaaatttatgaaatgtacccaaaattctgttcaaataggttaattcatgtttattgatgaggttctat

SEQ ID NO: 107069 - DNA, 1037 bp, Homo sapiens
gagtttaggaataaaataagtgcttgtctcttgtgtcacatcatgtggtatggtgcttatttcatcttcctcttcttccatacttaattacctttttcaacatgtctatgatcccctccaatcctggaacattttataattagtggttgtggttttttgttcactggtcatgatgttttgaaatgccttttttttgtttcttttgtttctaagcaaagagaaataatatcattttaaatattgaaatgattaaacagcatagtttgattagtaaagacaataaattaagtaatccttaatatgttatttcaattataaaaattaaatgtaactgatttttccttatatcttgctcatcgtcttttattttgggggaagttaaagaggaaattgctatgcatgaatcaagtaaagtttctctatagttctgacctggagaacaaaagaaaaaactaacttaagaaatgcatgattaagaagtgcctctacatcgtctgtttagtgaaattattatattaaattatatgtatcctcggttattatatgttcacatacatttcccttttgtaacactgaatgtaaaacaaacaaaaaacagataaaataacaactggaaatataaatgaaattaggagcaacaatgtgtttttaattttattatttcctaacttttagtatttaggtcaagggggaaatctatgttttgtcatttttaaaagctaataaaaaatcctttttatgactcaactttttgctcattaagaccatgggattactccatgatgtctgtaagcacagatcttcatctctattaaatcataggtcattgtcaattaaaaatacttatgcatttaaagtgtgccttttatttacttacctaaagatatctgtctttaggtaaatttagtcatgaatacctatttagacctagaacattttatcattttttccagaaaaatgtaatcttgcattattattgttaaattcccatttaaaaacaactgtgaatttcatttgcatagattgttaatgaaact

SEQ ID NO: 107070 - DNA, 1056 bp, Homo sapiens
gtttaactagctttgtcctctattaaagtgcacgataaaatgagactggatccctttgccttgctcatatatttatcttacagtacacagcattttgaatgaccactttattagtatgctagcctgttagatattagtgctcaccataataatctaaaaatatactttattttgtttccctctttgtgggcagtgtatctcctactctttcgcttagtaaaagcactatcttcatgaagtgtctttttttcaagttttaaagataatattgttttactttaatgtaatttcttaatcaactgaggttgctatatatgttgaattaaaatattttattgaaggcaagtttatatttaataataaattttatgtttctatatttttttaaaaaatatttaaaataatcatttcatccttttatgaagcttgacttacaaatgaatgaatctttgaagattaggatgttctgtcttgtaaatataatcaaaactttagggtggacccagttccaaataaaagagtcacctgccttccctgcaagacttagattaaacaacaatattcagtcatgatctgcatatagaaacttcgagagaaggcctaaaattatcatatgaaaattgatggtgacgtgctcctcttaactttgcaataccttactttttaaaaattcagcaacaacaataaaaccaaaggtctaaaatatacatttgaaaaaaaagtctaaaatgtgtattgattcattgatgagttgctacgatttgaatcaaaatcacgactataacttcctcatgtatgaaatcttttacttaaaaaaatcacacaaaccattatattatttttgtaccattttcttcttaagagagctgtcaatttttaaagctgtcatgatgacagaatgaaccatctattttatcggtagaggccttatgtctctgtgacaggtagcaattatgatgacattgtcttcaacctaaattcatgagcctgagaataaaattcctgagcttgaaattttcaaaactgaaagtaaactaacagatatagtatcaaatt

SEQ ID NO: 107071 - DNA, 1055 bp, Homo sapiens
ctggagctgaatgtctttactgatacaaatattaaaagcaatgaaccagggagatggttaatggtacaaaaaattgttagtaagcatgagtaagacctagtatttgatagcaccacagggtgatggtattgaataataattcaattgtacgttcaaaaataactaagagagtataactggattgtttgtaacacaaaggataaatgcttgaagtgatgaatatctcatgtactctaatgtaattattatacattgtatgcctgtatcaaaatatataatatactccataaatatatatatatgtacctactatgtatccacaaaaattaaaaaataaaaaataatgaaagcaatggaccaaaagttctaagctgcacaggaaaagctgtaagtctaggagataaatgataaaagcaaaggtggggtggagtgaggtctaagacctggatgtgttggtaacttttggtgtcctgacaccaggtataagaagaacaagaaagttagaaaacaaagctgtcagacatctgagagagacctgagagattatgttttaggactccaacagtccccagtattggtcaaggttcatggtatgtggacaatagaagacaaagctgcaatagaggagattaaatttattataaaagatcttttaaaaaagctgtaagtttgcatgcctcgtctgtatagatgttaagctagcccaagatgttggtccaatttgggaggtcatgcggaggatgtttgagactgaattatccaaattctgattcaacaaaggtggtggctgaaaatgatgaaatggcatagccagttgtatatatgaatggcttgagctctaaagaggggacagttttttctcaaaagtatagattaatgaactaaaagtccctgtgagatcaagaagaaaatgttagcactccttctagcactggaaaactgaagcagtgagagtcgccccgtgttctctcaagttaaccagattttacataagacaaaaggtatgaagagtgtgaaagagattgaaggtaaagagtagatcattcataatttcc

SEQ ID NO: 107072 - DNA, 1120 bp, Homo sapiens
cagaattatctaagtagttgtaaatatggtttactgacgtttatgtataagtaattaaatgtaagctttaaggagagatttataattctacattttttagtgactttctcatgtggtttgtatcattaagaaacaaaagaaggagggaaattaaattagtcacaagaaacctcagggaaatatatttcacaatattttaaagtgtaaatacttggaaagaaaaaagttcataaattctaaatatctcttaatttcatagaaactttcccacagaaaaccctagtagtgcactagtgagaaagtattaattgggcagacagaccttcaagtgatagagaaaggataggaccaacaccgattctttccaagcatttgaagatcaaatgaatcataatgaatcctgtaaaagttccaacagtcaatagttacttggaaaggggcatttaataaacaggcacaaacaggaagccatataaaggaacaagcagaaggaactcttgtgaccaagggagattctttaaactgaaccttcaaggagcttttacaagcccaagaagtgctgagcttaaaagagaaatgcctgaagcagatgaacccaaccaatagacactggaactcttaatagatgtacagcagttgtgctgcaagccaatggaacttgtccagaggaaaagttgtttgccaagccctaagtggattttttttttctttccttttgctttttttttttttttttttttgcctttgctccagtgagttgactcaaggaacagaaacccaatttcccacccagttgccaaattcctgaccattcattaatgaaaataagaagtctgcccaataactttatttttttccctctacactattttttcagagtaaaaagaagtgggggatgatggatgattgagaggtgcagtgagtttaataaaagactcttttgccagaaaggggaataaaaggaagccactttgaaataatagtatttgaaacatccccactggccaaaagcaactgttgtggttttccctaattatgttgtatacacagaagatgttttagtggaacaaagaagaaacctaacctaaaacgcttgagaaatgagggtagcttaactcca

SEQ ID NO: 107073 - DNA, 1050 bp, Homo sapiens
atagttcctactgtgaatgagcttgggcgtgactgacaggtgcaatgtattatgctctagcagaagttaggactataatgcgaacacatacaaatgagatttgcctcaccttatattgatgaggcagtgataaggaagtaaatgccttgggaagaaacgagatagagagaacttatagatgaaaaaaggattgaatttgagacacatataacaaataggagttagctacttaagattctggcatgtcggacacagtatactagttccaaattagtggctagaggaatagcgactagtttagggaactgagattgattcagtgggcctggaatatagagtgttatgggaggtcaagagatggagaggagaggtgagtaggagaggggccagatcataaaggtgctcatcaaacgaaaacatggattctattttcagggcaattgagagatattgtaggatttagctgtttccacaggcctgggagagcagttacaatgtcaaaagatcacagtagatatgtatagtgaaagagtcttacaaggttactatgctttgttagttggctcctataacatggaaatacttccaagtagcaaacgtttttcaattaaagagtgaattacagaaaattccattagggctttaaaactttcttgcctctaattacactagaatgtgcagactttttgaacttgaaccaactttagttgaatttgttaatgatacttttttacatttgttttagaaacaaaattgaaatccaaatcattttggcactttagccagcagactcacagggtaataggctttagggtttccatttgaatcccattaaggatttctgggtaatcttgaaagatactaataagctgtatagaccgagaacagtccttaaaaatgaatacttagtatttccagtgagagagcataatttcatgtaaagcaaactgcccagttacagagggtaactggttaggagtgaacacatttggcctcactggaaacaatcaactggcactttgatttcttcccagttttgtcctttttctt

SEQ ID NO: 107074 - DNA, 1062 bp, Homo sapiens
gctaaaatgaatgtcactagacttaggccaatactataaacaggcagtataaagcagtcattgagaattgactctagagtcagaatgcctgcgttgaggtctctgatccaccaactatgtaagctagagaatgaaagcacagatgtgcatgacatattttttttctgtaatgtgaatgacaaaaatatattttggttaaacagaacgattctgagaattctaagtgattgctgattaactggaagtaaggatattaatgtttcaatataaaataaactaatttaagttaagaaaatgtaaaaattcttttttggtccagttgaataaagacacgacagtttttagatctttatacatgtatttatcccttgtaaaatccaacaaaaccaagaaatgattttcaaattgactaatattttacaaacatgagctttaagttcagacaagatgtgaatttcaagctttatgactttgacaactttctgtattcattttgttatcaaagtggtgtgtgtgtgtgtgtgtgtgcatgtaaaacttctataataaatgagtaatatgtggaatacaaattattttcttccttattatttgaatattggctaaattgtgtttgtttttccaaagattagatcatatggcaattgacagatctgtatgtgttttttagttttgttaatgaatcacttaaaatgtcgatatctggaatagttcatagtttatattttttctaagatctaaagaaaattttatatggaaactcttctgtaaatttttataattctacaaagatggtaaaaatgcttttagaagttcaagtacaagatagttaatatttcattcttgtcagtttttaaattctaccatgtaaataattgcagtcatgtgattatgtgattaaataatagttaagttcaggattttagcttattttagcatagttagatatcatgcttagaactaaaattatagttcaattgtattatatttatcatacactattcaagtgaatattaatttagtatcgttttagtggcagtcactattctaggtgctggggtg

SEQ ID NO: 107075 - DNA, 1008 bp, Homo sapiens
tttcagtatttttgtgtctcagggaataggaaggcccaaggagaggaaagagataagggcaaatggtcagctggtagaacagtctgaacctgaacaaacatttattaagtttgccatcttacatggttgtgattcgtcacatcccaaaacaattacaatagttacatcaaagaacactgatcacagatcaccgtaacaatataatactgatgaaaatgtagaaatattgcaaaaattaccaaaatgtggcacagagacatgaagtaaagccatgctcttgggaaaatggccctgacagacttgctgctgtatgattgccataaatgttcaattagtaaaaagtgcaatatctgcaaagtgaagcactataaaatgaggtatgactgtatgtatatattttctaatgttaaaccaaccgtgaattggtagaatatagcaattcgacatgattccttatatttttatgaatacggcttgaattcagtttgccaaaatattgcttaggaattttttacatcatcgtttatgagcgggctggcctgcaatttacttttatcttacaggtcttgtctagctttgatttcaaagctatattttttttaacacaagatgaggtagaaattatttcatccttttttattatctagaactatgtcatcaataaggtagactctggccacatgaggctcttgggcccttgaaatggggctagtgtggattgacatgtgctataaaatgcactagatttcaaagacttcattttttaaaagtataaaatatctgattaacaatttttattattgattacatattgaatattttgatacattgagttaaataaaatatataaaattaatttcaactttttagttttatgtgattactagaaaaattttaaattgcatatgtggctcacattatatcaatattgggcaatgtggacatagataataaataatttctttcctcagaatcaaagaaagaacattgttattaaaggtacctttt

SEQ ID NO: 107076 - DNA, 1139 bp, Homo sapiens
gtgagacgagatcgcaccactgtactccagcctgggtgacagagtaagactctgtctcaaaaaaaaaaaaaaaaaaaaaatcagtatcataaaatgcacatataagcacttatctctacagtaatagaatttgaagtttcaccatgtatattttttccactttcagattaaaagattgaattttgctttatataatttgtacacaaaaggagaaatgaactaactggcttgaattattttcttagtaggccaggtagatgaagtttcttggtaattagaaacattttaaatcaagaaagatcacaacacagtttagattatatgtttgtgtatgtgtgtcagagagggaatttttttttttaacattcttgaaagggtgctagaacaaatctcatagcttccaaatcagaaagaaattgtgatggcacattgccactgaacttctggtgtgaatgatataagagtcagtctgcccagcagttatttgtagcagttttaatatagttacagactagtatgtgaggcttctcggactagctgaggttattggcatgagaaaccaagcatagatctagccacagctgaatggaataattccagagtggagaacacagagtctggtgtagactggagctatcaacaatgaatgatttgattaaataaaatctcaattaataccatacatctttaatcatttaaacagtagctactttggtctcttactaatctgagtttgattaccattttttatacatttaacaagcatttgttctacctacgttaacattagtacaaatttggctttgaatccaggccttgacatttcctagctgtctttgggtaagttacttaatgtctccaagagtcagtttctgtggctgtaaatgtagataatagtatccatctgataggattatttggaaccataaaatgactaaatataaaataattaattgctagtcatgtcctacatagatacatacaaaaaattaaaaccatcaaaaacaacagtgcaaaatataagtatgaagagttttcttagagtgagcaaattgttctctgtcttaaagaaatttgcgtataatcaaacagataacacgtttatagacccaacctgaaagacgtagagaaattgccaa

SEQ ID NO: 107077 - DNA, 1055 bp, Homo sapiens
ttagagaaataggatagtaaattaagtttcgagtactctattatgttacagatatttgcttgtccaatgagaaatccttaaaatatggccttttctgtatttatagattgtctttcattaacaataaggcacaaaggcatcgcagaaacgatgggaaaatgtgatgaagagcatcccaagagctgaaaatgcattggcaaaaaaaaaaaaaaaaatcattttaaatcattataattatgttttaaaagttttcctttaacacaaaaggctgaatcttcactattgaagacatgtcaaaagtagcttgattaaagacagcagcatttcagttttgccattagaataaaaagactgaattgttagtgaaaagcaatgaagtacagaactctggaatttgtggtgaaaggaaattgaaaaagaacagaacatttggattcatgtttcatgaaataatttgtgtgacagaataggaaggcagtctgagggaaaattgacataattttttcctaggactgggaaaggccagataaatatgtcactgttaacaaatgcactattgtgcatgaataaagtatattctactcaatttgtaaatgttaattttcaatcattggaaaatatttgcatgcttttcaaagtataaacaaaactctcctccttttgttccttttccattttctgtggctagacattaagttggaccagaatgaggaaggcagaaataatttttaactcatagaaatgttgctttttcagaggaaaccatgtattcttatatgtactgtgaaatatataatatgtggtatacctatggtactttcaaagtatctataatctgcttttttcagtttagagagtgtgtgtagaattcatccaccagattgtaggatcagaaaagctcattctctagtcccttggatgtgccgggactgtgtctttgtatcttcaatatttgtctttctcagagtgcctaatatagattttgtgttcagcaggtgcttatagaatattggcttgattcaaggcagctggcacaagcaacaggaccaggcaca

SEQ ID NO: 107078 - DNA, 1052 bp, Homo sapiens
tggtcaatttcaactcttacattgatttcagtagggttgttggtgaaggcagtattttatgcaaccatctctcgccttgtacactaagcaaatgcttatgcctctctgactgatctctaacatcaggtttttccaccgaagttgaactgtcctgaaaagaatctcctttcctcaaaaactattaattttagtcccaaatcatggcatattatggcctcaaaatgaagcaaattacagagctaaaaccatttttgagaaagacgattctgtaatggttcaataaacaaaaagttcatttaagcaataatgtgccagtacacactaattattctgtagaatataatgtgcgttctatatttattgcaggattacatgagactaaaggagtaatgcttacaaactagctagtcttttctgaatctattactgaagcagagttcctttatgtcagatgatgtgcttctggaaaatttaatttggctcaaacaacttccttaatgaattacagctgacttaagatttatcagggaaagtaaaatatgctatagctctgtggccatactacaaacagggatatgagtatgctgattcagagatttttggatatctgagatggtaggcattatgttttgaatgtagaatgttttcttccagtagtaaccacagcaaagtaatctttgtgaatacttcaagtctttcaaaatcttagcaggagtcatcattccttttatttaatgaaaatccttgggatatgacagatttaattaaggcattgagattgaacagtatcagcacattttatatgacatgattgtcccagagagaatatcacttttgcacttgataaccaaatcagatttacatgaagctgcagtttcttgaatttgaaacagagctgacatataggtaatgtatgttgtcaggtagggattctgttaaacgtcttatgccaagagtgacacctactatgggtgcatgtacccagtctttctcttcataatgataggatttaagggacagatcaaacatcaacagtagaaaatgtattttgc

SEQ ID NO: 107079 - DNA, 1021 bp, Homo sapiens
ggactgaagttcccttaggaagagaacattctgcctccagactgtcttcagatatgagccgccacattagcacattagctcttctctgcgtctccagcccactggcctatcctgcagatttcagagcttcgaacccccacaacagcatgatccatttgtttaaaatgaatctctctacagatagacagatagatacacacacatgaacacaagcacacacacacaacacattctttttctctggaaaaccctgagcagtatacactagaaaaacatgattccacaaataaagattgtggaatattagaaagaccactggcatgcacctgctatatgaacttggattagcctctttaactttagaagctcagatttattatttattaatttcagagattgaactacatttgtaagtttttagcttttttattcttagaaacaaagtattatggtgtagtgaagtagactatcccttatgttttcaaatgaaaaacagatttacatataacaagacaagaacttccattccaagaaggctaaaatatatagtttaatcatactttgctgtttaaacatagtatttagcagtatttccccacaatttcacataagttcttttattcttttcctacccaattgaaacacatggattgagtattctatattcaattgaaattaaaattaactttctacatgtctattttagatttataattatatttgaggactatgtttataactactagtcagcatttagtttcctatttcctctttgttttatataatataaataaaatttaagtacgtataagtatgtatatgcaaaatcatatgttaaaacaactatagaaacattgttgtccagtaaagatggcagctaccaaatttgaaacatcaactgtcaggttgtgttaccagaaagttacttcagctgaggtcccaatgtttcaattcacaatacaaaaacaactggagggtgtcaatacctaatgtataaatgtgtaggttgtataagaaacaa

SEQ ID NO: 107080 - DNA, 1258 bp, Homo sapiens
caagatccttagcatgcgatgtgaggccctccgttatcgtgctcctgccagatcaatggcctcctctctagtcatcctatactttctagcttattgtatattaaaactaaactgttaatggtttgctgaatacagcaccttgtttctctgctctgtgcttctacttgggttgtgctctataccaagagtgcctcctctcacctttgtatttccttttggacttttcactgttatcctcaagaagtacctctaaggtgttcttcctacctagcctagttttttctaccaacctagttcacctagtttcctgcctaacctcgttagatatcactcttcgctgcttcaagaatactaaagcaacactcctgatattaacctactactcagttttgtgtggcaaaacagagatcacatcctatttgtctttgtgtctctggctgttagcacaaagttagcacttaattcatgctctacaatgttagttgaataggtgagtgacagagtttgttatcctcaagcatcactgtttgttagtgagaggcagatgtcaagtagctcatgacgttacccctcttctgagtaaaggaaaaggagtaagatacaccaaggtctctgtggcccagtaatttaggctgagatctgctttaaaggcggaggcatatacacctgcataaatatctatgtttacacaaagagcaaaagatgaatcaaggaaaatattttgagtttagaaaggaaagagactgtggagaaaggttgagaaaagaaccagcaatttaagatgtgtgtaacattgaattatcatctatgagttactgaatggagaaaatgaatctctttcaaatgaatagaaagatggatgaggatctttgggtgactcttttttgttttgaaaatttaaaacagcttcacaggtagaaaaaaataataaaattaacccccatgtgtgcattactaagtgttaacagttacaatatttaccaaagttgtttcatttatcatttcctcatacctgatatggtttggctgtgtcctaacctgaatctcatattgaattgtagctcccataattcccatgttttgtgggagggacccagtgggagataattgaatcatggggacgggtctttcctgtgctgttcttgtgatagtgaatacatttcacaaaatctgatggttttataaaggggagttccctgtacaccctctcttgcctgtcaccacataagatgtgactttgctcatcctttgctttcca

SEQ ID NO: 107081 - DNA, 1036 bp, Homo sapiens
ttattaaaggtgtagttgtggactcaagttggactctacactttttaatttcatgtcattatataagcaaaagtttacattgtagaaaaatacttatgtctataatcagtatggaagaaagaaatttctgtaccaactgtttagtgcaacacgattgtagtattatggaaatataatcctttaagtaaaaatttttagacctgctttaaaaaaatgaagtcaagaatttggctacttcagttgaaaaccaggtcaacccctcaggtcagcttggttagacagtgcctagtaactcaaggccggataaagaagattgtcagtagatttagcaatatttgtcttttaaacttggtttatatttttcaaagaaattagcttgtctccatgttaataatagttctgatcattatatagcatatgcaccctgatgatgaaatgaatacatatttgtggttttgatgttaatatggaagtgctggagatgtatttctaataatcaaatatgaaaagctcactttattgctgtcttttcctacatctagttgcctgctctaatatttgtatttacttcctctgacccccgcaccatcaagttattctttccttctgtccattcaaactctcacttcctgttaactttcttctagtaaatacacctaagccgttcccaccaaaataacttcctcaagaacaaaatttattcccagattctctttctccctgtgccccttctttctctcctctttattaggactttttgaaagtttagtatatcctacttattttagatattagccttccattatctataaaaactgctttaatcttgtttcggtcaacaccacttcattgtatctcttcctaattcattcactgttgtccttctctttgtagtacataagcgataattttccatttcctaccttactggatctccgtactttattttgaactttcataatattactttgtcagattctgtgagattttattctcttaaataagcttcccatccccttctctctgcttatcccag

SEQ ID NO: 107082 - DNA, 1025 bp, Homo sapiens
cttatatattcccatggattttcagctgataagttgtcacataagtgctcatatcatcaaaaaatgatagttttgccatttattcttttcctacttaattgcatgggtatctcatttagaataacaaaaaataattttgacagcattttttctcttagaatttaataattctacccactgttaaacattgttagctattgatttactagatagaaatacctattttaaatcattttaagcaactatttttgctactatcagtaatgctgtactaagcagaatatatattaaacaaaagtccccattgtttggtagtatcataggagaggtttcttaggcagattcatgactgttgagaaattttaaatcatgcatttgtctattaactcaataaaaccaccaataccttttctttatttaaattttgtgcttacgttaggaatggttatatccaacattgaaaacaatatgtagcaacttagaatgattaaatgatttttaattgtgaagaaatttgatgaaccaacacttaatgttttaattatcgtatgtcatttattaattgatttaaaagtcaattcatccgtaattatgattttatatccattttatattgtttttatttcacactttttacaatataattacaatgtgtttaggtttaggcctgaagatgtgatgagcagatgaatattttctttaataaatggacagaaagttgtatggatgtgataatgacctctttttgtgttgctctgtgtcttacagcaggtgttttctgtgcttcccctttcttttagtatgaaaaatgattttagaagttatgagatttgagcactgtaaattaaaattgctgtaatgtttctgttttcattcttacaccaaaaagaaacattgtttacaacccaattttaaggaagtaggaatgaaaattttagaagactatgatgtttttctttattatcatacaggtcagttgaccaccttatacaaattaatacaaagtaaatggttgttgttctgtg

SEQ ID NO: 107083 - DNA, 1094 bp, Homo sapiens
tcttttttatcctaatatttgtttaattaatttactatgatgctccattaatgttatcaatggagcatcatagtaaattaatgaaaaaaatttcatagtaatgaaaaaaaatattcttttttcatagtaatgaaaaaaagaatattcagtacaaacccaaaaaagtttctggactagggaaggccacctatcatcactatacatcattacatcatacattattatacatcattacattatacatcattatacggatacatcattatatgtaatgatacatatgatggtagtagtaataatttttaaaaaaataacttaggatcaggtgatcaaatattctagcgatcaaacttttgtcttgaatgttggacaactgtgatgcaatgcaatgaatcttagctttttactctttggtatcatctggagaattcagcatctcagatcaatatgccttgggcaagaattctcaactaagggtgagaaaatgatagacctaaaaaatgatctctctggacatctggaatgaaggtttattgtttgcttatcaaacaaggtaatagttaaaaatagttgaaaacatgacactagcccagagtaaacaatgtttaacatctagatttagtcaaggagtgccaggtttaatctaagagtgccagaaatgtccatgttggggagtgtgggatgaggaataaggttgagagtccccttctctttttggccatatctttttgagcaaagacatgtctaagtggaagaactgaaaatagtgataggctgcaaaagtttgaatgattgtcccccaaggctaatgttggactttgatcccattgttggaggtagggcgggggtgcttccctcatgagtaaattgatgaactttctcaggggtaagtgagttctcgctcagctgggtcctttgagaactggttgttaaaaagaacctggcacgtccccaatctctctcttgcttcccctcctaccatgtgatctcttgcacatgacactccactttgcttttcaccatgagtgggagcagcctgaggccgtcaccagatgcccagtcttcaacttttccagacatgagtattgtgagcc

SEQ ID NO: 107084 - DNA, 1136 bp, Homo sapiens
gttttacctacactcaaatggaagcaggattcactaattattgaaccatgaggccatcctaacgtccatattattcacagaatgtatactttcttgaaaatatatgtaaaaatttgcatttaaaatattttcagtgttagattttgactttaaacttgtattttgttatatttatgtttatattgaggatcaagtgtattttcaggtgaggtaaaagagcagggagaacaatgttacccaagcacacggtatccctgaaccctctaaatgatttgccctttgctcataaatcttttgccatggtcaacacaaagcctagtattgatttaccagcgaaccatcttgtcatctctgggctcaggtcctttgaccttttgtttgttcctgtaaaattacggcatatcacaaacttcttttctaataggtcctttaaactttgaaaggccaagagactctgcgggaatatattaaacagttggataatccagaaaaaggaggttaaaaaaataattgcagacaggtaaaggtcagaaaaatctttattgagtccaaaaacacaaacaattctcttagaagcaaatgacagagaaggagaaggcctccgtttagtttagttctaactaaattcactttgagtttcttagaaaggcaaatatgtatttccttcatagtagcttagtagggtacaaagcaaattttaaaatgtggctgcttctaagcaatgtaaagggaacacaaaaatagcaatttaaacaactgtaatccatataaatggaatgatcacaatttatttctcaaaatacctgtattggcataaagtgatttagtggagttaatacagtcttcttggtgctatttgtcacacacatataggcaggtaaaccctacaattgctgatttacagataaggcaaagataagttcagtagcctgcaccttaatgaaataaatgtggggaattaggatttccacttttgttcagcttatttcatattctttgacttaattgattgagagcttaatttattatataggtccaccacgtgataattcctctgctacatatatattttattgcctgcaaagagattcttctcgaactttgatttctaggattatttttgctacagttctatg

SEQ ID NO: 107085 - DNA, 1771 bp, Homo sapiens
ttggaaaaccacagaaaggttctttaaaagtacaccacttatatactttaaatgaatgtttccattttaaggtaataacagcataatgtcaggagtcaacagatgatatttaactacacttggacatagtgtagacatgtctatatagaccaattataaaaaagaaaagaaacaccagaatcttgtgttggtatcctcaaaatgatctgatagtggtggaatgtctgaatcaaatattatattttcaaatattctatttataaagtgatattttcaataggcttaaatgcttttttctgatacaaaataaaatgtgaaaagatgccatcgtgaaaaataaagatgatattgattatctttactggtgagaaggcttgaactcacagggaaatgtctaagagtggactttggtttacttggggtttggggaggatttgcatccattttaattgcaattaaattatcagtaaaataaaaacatggctgctgatttataagactgtaagtcatttgagtaaaatttgacatttacctccaagaatacctctggacaagaagaacagcctttgttttttatatttgtcttggcttcatgaaggaaattaccactggaacttcacttgtactgactatgtggtgacttaactaaaactccatgttgcagttttgtttgtaattacaaaaaagattacacattagattttacatttatatctttcttaccatctccctagtgtttagtggcgagaagcctcatcctagggcaattggcagaggaaaaaaaaaatctttggggctaatttctatgtgtacttgaaatgttatataaaaataaaccaggtttcaatgtttcagagtctccaagggccacctttacaaaccagcgaagtagggaacactaccagagtacaggaagaataatttattagtctgaagaattctgaacacattgtttttaaaaatgatttactgcatggatttcaaagcttttcttcataatcacgtgtattaccttatctgaaaaggcagtttattgcacttttccagagcaactgcttgtgctactgggggattaaaacaggtagacatgctaccactttcccctccgggggttccccagacatgatgggcattaggcttagcttctagtgacctattcttgaacctgtgccattcaaagacagcatttgcttgtgtattatttagaggggccttttaaaaaattctgtatgctttatgaaaatattttctataatttattcaatttctttccagtaaatatttttcttttcattaggaaatatatgtgtgtctgtataaacacacacgtagatatcacacactaaagtgtatacatataaaatacaagagaaatatactgtaagctacaaatatgagccacatgtgtaattttaaatcatagcaacaataaaaggaaaaggaaaaaggtacaatcactttaaagaatatcatttaacccagtataatgtgagcactttaaggtgtaaacaatttaaaaatgttaatgagatctacacttttttcatattaaatctctaaaatctgtgcacattttatacttacacacatctgaattcatgagagatctacacttttttcatattaaatctctaaaacctgtgcacattttatacttacacacatctgaattcatgatattcacagtagttagtggctacttattaggcagcaaaaggataggatacatgcacactcaaagacttattttgtaataagtcttaaggtagaa

SEQ ID NO: 107086 - DNA, 1819 bp, Homo sapiens
acatttcccccctggctgctccttcctgcacttagttgtaaaaatctgaaagttggtagggaaaaatacaagtatgggctatataaaataggagagagtttcagtggatgtcataggctcatagagttctaaatggatcagatattgataatatttgtctctaaattgcctgtggcctgtaccactcactaggtgtgagacacagggcacgttagtgaactcatttttcctgtttcctcatcagaacaatagagacttagagagaccattctatgggtttactgaaagaattaaatgagatatgccatacagaacattgcctggttcagagtaagtactcaataatgactttccgtaatcactgttgttgtttttctagatattaaactgctatagaagtagtcagttatttcttctgaaaactggatcttattagggcagcattagcttaagcttcattaaataatgtcttcagaattcagagctggtccttgatatttctaagctgctatttctcaactaattggagtagagaaagtatggaggggaatttagggaaatggtgtatcagagttaccaaaatgacatgatgctctggaaattctgatataaacattcctcacccaagtactaccctctgctaattgctgagaggtttatatcatatctctgaagtatcttcagggtagaaaaaaactaaggaccatatttataaatgattaacttttaacatatttaaatttaccaaggctttccttgttgttgacttttcatggattaatcaatcctatggtactctaatacactcagatcctcacatccttgacagtacttctgcttttaatttgttgtagtatttttctattgctgccttcacaaattgccacaaatttagcagtttgaaacaacacaaacttaatatcttacaatttatgtaggtcagaagtctgagcgggttcagctgggtgttttgcttagggtctgataagactggaaagaaggtgttgatagggctgcgttccttattcaaggctatagaaaagaattcacttccaaattcattcaacttgttggcagttcaattcctagtggttatcagaatgagtttcctattttttttctctctcctgtcattcagaggctggtcttttctccctaaagattgcctttatgccttctcttgctttccaggtggcttcactccagccaaggtggttgagtctgtcacacttagagcctctctgacttctccttttcctccatcttggggtctaatgcaagcagagaaaattctctgcttttaagagctcctgtgattagatggggcccatctagataatctagcccactcttcctatcttaagttcggtaaccttaactacatctacaaagttcctttttttcatgcaagctagcatattcacgtgttctagggattaaggcatagacatctttggagagctggtctgtccattacccttaggttgttgtaaatctaaatattctaaatataagccataggcaggcagcctttccctgttcccttttctcacttgtttgagcagcttgtattaaatatcataggatgcttaagaaacttacagtctatttggggaataaaatctatatatttctagatataagggatttcagagctataaacaaggtggctgaggacacaaaggaaattgcagttatttctaatgggaagaaaagaagatcaaagaaagaaatctctcttgaataggtagcttttgaagtatgtcctgaaggatgtgtaagggaaaggtatttgttgtcttatgaacaacataacatg

SEQ ID NO: 107087 - DNA, 2056 bp, Homo sapiens
aaacaaattgagtttgaatccaaatttagacaagttgcttgatttccaaagtccttgtttcctcagctgtaaaactgaaatgaaagtaactatattagtcatagtattgctgtatatattcagtgagacaattgaagtgtaaactttccagcataaagttatggcccaaataaaagtcacgtgaaaagaaacagatgaacacagaaaatgaatattcattaactcttcaacttttcttcccaggaaagcattttttaaaaatttcctaacctcgctcaggaatatacatgatagtaagtattagttgttgaagaagtattcctttatcatttaattttatattgagccctttatatgattcaaatattagaaatttttgtaggaatattttccaaaattggcttcgtattttttatttactcataggtaagaagaggtttacttggtcgcaagcacatgacaagtaattaaacacgttcatacactatcactctggaaaaaaaaattggaattcatgtttttgatgttgtttcagctggggtttcaattcatagacagaattctgtggagaatccagaagtgagatctaacagtttagccagctcatctattttcttttcgaaggaagagataggacaaaattggatatctccagagggaggtccaagtacagtggcacaatgcatccccttttgactgacggaactacctgagttcccttggagagacaaaggaggaaagaaaagtaggaagtagagagaggctgactgatttagagacttaaacataaccctttaatatatagaggtgagttttcaatattcccccaagactgtttttgggagggaaaagaatttaaagtaaataaaatagaatatgggattcttaatatttattccacaaagggaaagaaaggaaagaacattatcaggtaagtcttgtttaatccaggcattttttccttttcttaactgtaaatgatgtactatttttcctgaggtaagaaatataaacagattacaatttgtaaatcttacaaagacctattcttttgaaacacccttactacttcatattataagtatttcttcacttaagatttctgaagtgagaaacattgttttgggaattaccagtatcatgggaatttctgtaactcttatactcaagctattgaattaaataaaaccttggaaggacaaatgccttgatttgtccagggagcttactgataacgtgagtgttacaacctgaaaactcatctgcttttaaatacctaggcactgccccacttcctccctgacactttgtatttaattttgaatttttaactaaacagaatttcttcttcattgtgcttgtttgatacaatgttagggttgcaaaggcagttaatgattgttaggaaaagaaactaatccttctcactgtcaaacatcaaacagaaggtcatcaaccttgtaacaataaaaaaaattcttttgttctttcccagtccgttaggattccagaatagattcagattgcagcaggggaagttgaaacaagagcagagctggaaagtccagacaagattatcaaaccagacaattgtgccttcccccaaactcagcgtagctgggagtcacttccctatcaaagcacgcaggcagttctgggaaggttgtctgtgttcccccaggagtggccctacttactgtaacatcagtcaggtttggtggaggatgggttgaggagaaatggagggggatggtcagaacaagtagtcacagaaaagagtatttgttagaagtcagaaaattccccaggctagagtatatgtaatcacaagtctcagaaaacagtgatatgctaggcaacttatgctcacatcttataaaatagttgcaataaaataaggcccagagagacctagactcaacctaaagtctcatattgtcgataacatagcaagtgacagaaaagctcttgtgtttaaaatagatgggtcatgaatttaaagcaaagacagatggttttctttcatttttattgtgtgttttaatatagttgagca

SEQ ID NO: 107088 - DNA, 2133 bp, Homo sapiens
ccagtatacacgatttaaaatttgagttattttggtagagaaatgagactttctcatgtcttcaaccctgcgtgtaatatcattgtgttataaatatctgcatccagtttttagttatatgctttattaatatttattaagtccaacttagcataaatcaaaaaatttgttacacataccatttagtttagtttaaaatgttttaggcagaagtatagtagaacacagtgaattaaggaaagagcagacaactgcaggagcaagacagtgaacaagttcaaagagcagcaacaacaaatacagtgactaatttttccccacgttgaaaggataatattgacacaaaatatccaagtatgcactttaaaattttggtttttgtaattgcactattttatttatttatttgtttattgtcatctgctaactatatagggaagtaggtactttttacctagactgtaaaaggtgatattcaacttttggtctacagaatctcctatgagtttcctattgcattgtttgtggtttttgaaaataaatgagagttttagatagataagttgcttcacatactctatttagcttaagtatgatactgttaacttttttatgattgagacagtaacttgtctattttattttggctggttatttccaaggtagttaaaaatacaggtgcccattatgcagtttttttttttttttttttttttttgagatggggtttcactcttttgcccaggctggagtgaagtggtgtgatctcggctcactgcaatctctgtcccccagttcaagcgattctcctgcctcagcctcacaagtagctggaattacaggcacccaccaccatgcccgactaatttttgtatttctagtagagacggggtttgccatgttggccaggctggtctcaaactcctgacctcaggagatccacccgtctcagcctcctaaagtgctaggattacaggcgtgagccactgcgcctggctgcagtattttaaaattacacatctcacagctttttagtatcttgcaaggtctgtggcatttagacattggagttttgctgaggtttgggtttgaactggaaggtgggtttgggagtaaattgttttcattgtgacagcctggattactcagcattagagtattgttgggttcttggtattttaaacaagagcattcctaaagtactatcatttttaattgagaacgatggccctcaagcaaaagaaatccttagtgaaaattgataaggtgatgggaggatatgcataggaaacgtcatccagcaggttcaagaggctgtcggaagccagatgcctgcacaaatatatgctatagtcccaatttggaaatcctaaataaaatgcatttttagttgaagtaggtgtaaaactttcaatgtggcacaaaattcaagaagtgtgagacaattttatactaatgttaccttttctcagctcttatttttctcagctccaatagcacatattggaggctcctccatgaatatgttacttttaattgttgaataatatttcattgtatgaatgaaaagcaggaaggcttaccttgtattcaaagacactttttaactctgtttacagggatactttaggaatggtctgagagatactaaaattaaaaatctagttagaagtgtgcaataatgctcacattactttaaactattttaaaagttagacctgtgctattttttaaaatataccagacttatttttcttaagtatttcttaagatatctgaatatctgtttgattttttttctttttgaaattcagcctaagccaatgtactatttttttttcattcaattagatttattttagggatgtttttattcttgttgttatttcatatcagagaattgttctaatgaatagaacagtgttcactgactttcttttgttattccattgtccttccattctctttcacatggaaatgttagttttacatcagaatttcttgttctcaatagatgtattcttggaggtcttaaaatgctccacaataatttcttttctatgttctttttcatttattatactttaaaatgtggatattatatgtatgtcccaaattaccaagtctagtatt

SEQ ID NO: 107089 - DNA, 1162 bp, Homo sapiens
aaaaatctgttgaaactaaacacaacgacttgtctcagtgcttctgccgtagagaagaagatgagagaaaagattgggaatggcccagcacagtggcttatgcttgtaatctcggcactttgggagtctgaggcaggaggatcatttgaggtcaggagttcaagaccggcctggccaacatggtgaaaccccatctctactaaaaatacaaaaattagcctggtgtggtggcgtatgcctgtaatcccagctacttgggaggctgaggcaggatcattgcttgaacctgggaggcggagattgcagtgagccaagatcacaccactgcactccagcctgggcaatagagtgagactcaggctcagaaaaaaaaaaaaaaaagattaggaagaacagaggtgttatcccgaaggtaaaggagctaagaaatattttccccaagtagttggtaaaaataagtaaacgaattaaatatataaatgacagggacacattagagggatacctggaggcaaaggagaaagatggagagataggaattgaggatggatatactgacattgagtagcagaaattggaaaatgtggaaagaggataacatgtatgatccccgaggtgacagaaagatgcagtggagaagaaatacttagcagatatttcattcagcatgatggccttatgctcaaaatgtcagctcaaaacagcttgttgtattttgaagtaggaaagggtgtgatctcgaagatgagaacggaaacataagggatggcagtacacagtggcgttgtgaaagtgcaggaggttcacatggtctttgtaaggcagatgaatacataatccaacttctatcgttttagaaaaaaattacttactactttctagttttgtagtggcctcatttcactatcaatttcttgacgccttttacaattacaatccaggaaattgaacagaaaatttagcattcatactagactctattggccattcttgttccaccttctccaaatgtagccctgtatctctactatttttaaatatataaaactgttcctaaatttgtaatatttagaattttggaactttaaaataaaaaataagaaaaggtatccaaaatctacttttttttacatactattagctttttaaaaaaatggagaaa

SEQ ID NO: 107090 - DNA, 1399 bp, Homo sapiens
taatgtgtcctaatagtttcactcttgaaattgcagcatctatgaaggtaagatcatgttctttgaaacctgctctctgtattgcctttaagagagtgtatctttctacagaaggcatcatcttgtctaaaagagaactgtagtattgtactttttagaggacccattgtttacattctgtttatattcagtatgacatacaaaaacatccaaccaaaggtgaacagttagtttttcaaatgactcatatatcttaaatcaatcttaatgtaatagctagctattttacagctactagagggaatttttataagacttacacagtttttagtatttttggaggttggatcaccatgacctgaaacagagccaggactcatttctcatcatgcagtataccactgcaaacttgatctaagcttatatatctctttgaagtcaagacaaaaaagcaacccagagggttttatgaaatgtaaagaactactgttttaaggtagagaaaggacttctataatcgtttgtttgctgacgatattcattttaaggttgaaatggttacttaattttaactaagtttctaaaaatagtgtgtatatgtgtgtctgtgtgtatttcgagcaagaaaatgaatttctgaaatctggcttgttttaagaatacaaacattagatattttaagtctctaaccacagaagactagcagtagctttgttgtagtagctcaatagtttaaactccaccttcccgtgatcagcctaaatattgaaaacactcatacctataacaattccaactttgtaaatcaatggctaaccagtagtaaatggtttacattagaactccttttactttaatatcaggattgggatattgtgattaatcaaatacaaggttatctagagaaatactttttcagtagttgactttgtcggaaacttttaattgatcaaaactgcattctcgaaaggatgaactgataacaggaatgaattcctctgtcctcaaattcccttggatgtgaggcagtgttctaagaaatacaatgtctgttgtttaattggaagttgtatgcatttgtgcaatgcagtttccttatgatcttttcactcgtgagacaagaggattaagagcattaaactcacaaatgctttctggaaaggttttttttctttttttttgagggtgtgttcttgtgaaaacctggggagatgctgagtatcatacttggtgatgcaatatgaaacagaaaccacaactgctgaagcaggattcagtgatatggcttaaaactttatttaggatttgacttagaagggaggtttgagctgattttattcagatctcaagcaaccaggttagcctaacatatctatgttacaccacttaactgtgggat

SEQ ID NO: 107091 - DNA, 1085 bp, Homo sapiens
tgatgtgtttatggttcccagactatctgcacactggaatcatctgtggggtgtgggtggaggatggtgcttcgaaaaatactgatgcttgtgttccttccccagagcctgtgaactaattgagtggaggtgtggcctgagctttgaaattctgaaaaggtcccaggtgattgtattgctcagccaagtttttgaatcactggtctagactgtgaaggtacagaataaggagggtgagatactgttcactgtcaggacaccaaattgtttccttacagaaacatagctatagagagatggcaaagcctaatgtgtgtggaattgtgtgtgcatgcatgcacattcatacacagctgatatgagtaaatcatacagttttgttgcattttctcacctcttgctatcctgcctccgttgattgtgaactaagaattatttctgtgtaggcagatgtgttcattgttaggattagtggtgtatgcagcagatactttagagcccaaggaattcctctttcttgtcccaccctacccccaccttttttacctatatgaacacaagatgaacaaatacaagaaactggctagaaaagcattttcaaagcgctgatgaaattatcacatttatcaatattttaaaatttagacacatggcaatatttattaggcacttcttaaaataactcttcttttttttttttttttttttttgtgagcaacaaggctgtttattttacttgggtgcaggcgggctgagtccgaaaagagagtcagcaaagggtagtgggattatcgttagttcttataggtttggggatagtcggtggagttaggagcaatgttttgtgggcagggggtggatctcacaaagtacattctcaagggtggggagagttacaaataatcttcttaagggtgggggagattacaaagtacattgatcagttagggtggggcagaagcaaattacaatggtggaatgtcatcagttaaggctattttcacgtcttttgtggatcttcagttgcttcaggccatctggatgtataggtgcaggtcactggggatatgatggcttagcttgtt

SEQ ID NO: 107092 - DNA, 2415 bp, Homo sapiens
gcatgatttgcatactaaaaacacctctgctttaccacatactaaaaatataagcatatattttcttacatttatttatttagagctttctataaaattctagatatttatttcataaatcctagaagatattttacccctacaatagctttaaaagtaatcaaagatgccaaaatgtcaagtggtcatggatttgtgacactaagtgatgcctgagttccattgctttctaggctggtatttatcaaggactccagaggttgagatggatgtggtctgtaagaaaataaaatgtaatatgctggaaagaaaataaaattttgaaataaacgtaatttcctggaaagaactttataggatacttatatttcatcagaccaatcttcccctccctaccccaggagtaaatgacagaaagaaaacaatggaaaaagtagccactctaatggaaagatgggcaatcacaaaagttattagtatagacatttgatggggtctaatctacctatggaatactgtgttctgtcaagaaaagagagctaatgtgtcttctaaatatcaaaagacaggagccaatttatgcctgtcaggcctcacttttcacagatttaaatcgctcctgttagggagagacacattactcccactgcagtcaaatttccctcttgattttagtcaaaaataattttaaaagctttctgacaatttaaaagagcattttaaaataaatggcattattttagaaatccctactggataccaggaattacctataattagtgataagttttaatattgtacattgctcctcttttatatttactatattttaaagtaaaatgtctttaaggcatactcccatccgttattaaatcattttctttgtacatgtttaagagttatataaaacttttgctgtctctaatctaagtgaactttattatttttgttgcctgaatgaaaattcctgatgatatttcgtgggtcaattagcttcctaatatttgcaggtgtggcatctgctgtgttcttgattgtcatggcataataaaattgtgggctggaagacatgaatgtgatatttccctacgcattatatttcttacacaagcaatatatcctagttacttcaagtcagcatgacatcgtgtgcaaaattgcatactgcattaggccagatgagacattgccatacattgctcatgtggatgcaaattgccacttatctggaaaagattctcacaataaatgaacaagcaatttctctctctgtactgaggctgttcgtgtcttggtggatgggtaatgagaaagagacagatgagatgaataaaggtgttgcatttcattttctattttatcttcttttttgtaacttctgtcaaattaatactgtaaaattatctgtttccaatttccattctttccatccaagaacatgacatttattttgcagaaaaaagtaacatttaaatttatattggaaattggttaacatattctgggactcaatatatatatatttttttgttttaaagataatattaaaaataaatttggaaatattttcagtattcaaaaatcatagctgaacatctgcacagttgagcattagcgcatatacactcattaagcaagtatgtaggcagagattaaaggaatggaatgtttttcatcattgaaactgctgtgtttatgtagctaaatctaagaccaattaattttaaaacatcaatgtatttgttaacataaatattttttgtaaatttggcagccagcatttttattaagaacatcatgcaagttcttccattagagctgcagtataagaactgaaaaagattatattcttaggtctgtcaaaatattctgaaatgttcaatgtaatatttttaagacccatgaatctattctcctattctttggggaattaaatatttagccacaattttctattttacatgatatgcatataaagacattgaggaatatagaaattatgaaataattcagaatttattaagaattcccctggcaaaccaaattaaatattattttaacatctagttgttaatatgttactattgattctatcttagaaaagtgcagttatgtgtaactgaactttttgttttcttgtggttgaaccctgaattaccatgtcttctggtttcagtgtttttcctgggaaacagatcgtatttcttactgccaaagcccagaaataatagcctcacaggtccatccacagccccaaaggcttttctgactagtacccagagagcaactgcagtgcttcagactatttgtggacaagaaatcctaaaacatcagacgctgtggaaagcaatttcatttcattaatacggttcctaattatctgcatttattttattgtctaagttccaaatgcta

SEQ ID NO: 107093 - DNA, 1039 bp, Homo sapiens
aggaagaagtatgccaggcagttcaattaataattaatgataaaggtgtaatctctcaaaatttaatatttctggtgtttctatattattcctgcagcatctttatgttttaattacttttaaatatggtagaagcaacttaggaaattatttagaaataagaccccataataaatatgactttattattggtgttatagtaagttacccaccaacagaaaagaatagaattgggtttatttgtaaacaaatttgattccatgatattggtatagtaaggaatcatttcattagtttaacaattgagaaaatgaactgttgaataaataaagataaccacacttgaagtagaatttcttctcttaatttctatgtttcattattttgctgaattccaatatcagcaaatgtatacatatatacctatacatatatatacacacatatatacatatacatatatgcatatatatacatatacatatatatatacatatatacatatgtatacgtatacatatacatacacacagacaaacccagaggacttgagttctcttggatgattcttgccattttttcgttcactccaacctttactgagagcatggaattctgagctacttttgcggcttatttatccagccccaattcctaatggacataaatgcaactggagtagagaatgacatattgacgtttgggaatttttctcccctagttacatctttgccagggatagtcttaatagccagaagaaagaaatggaatttgatcccagtgtaagaaactgtctgatgtagtacctgtcatgaataattacaatggattaatgctatggtgtataaaactttgtaaaatggattatatgttccttttagtattgctattagttatatgagcacctatgaatttcttctaagtgaacttcaacctactgaatggattcacaccctttgggtatgatacagacagacacacatacaaataagtgtggtatatgattgagaatgaattgttgaaaaactgaatatatgtg

SEQ ID NO: 107094 - DNA, 1050 bp, Homo sapiens
tacaggtgcagacatgtttacttaactgggcaaacatggagagaagctgcatcataaaggccaagtcagtggctgtcaggatggttttaattaacagtaaggcaccattggtcccattttgtgtgcacttcaaaatgttagttgtccattgaggtggctcacagatgaggcactacttgagcctagttgaaatgcagctgtgacatatgctttttaaagaagacaggagagaggagtttggggcacacgattccgtgtgaattagaagctgttttatgagagatggaggacagctggtctgttcataataaatgttagagaaagtctaatatggcaggaaaaatcgtaggattctgaaataagaatgttgttagcaatagcaatatatataaaacaaaaatgaaaaacaacaaaaaagtattcacatttataacattcttagacttttattagagttatgttgttttgtatgctctaccatcatacctcaccttgacagtcatgctgttagctgcagaagacaatctgtcatagtggtttaaacactggctttaaagtcagacgtacttagatccaaatcctgcccccgccacttaatgattgttttaatgttagcaagttacttcactgaggcttcatctcttcatcaaaaaatgagtaatcgtacttcctttaaagatttattgtgaatattaaagcacatttaagtatgaaatatagcaccttgtttatagtgagtgcttaattatattattatatgtgaatgtgtatatatacacattttttccaggtatagtcatctatcagtttgtttagtatttgatatcaacagtagagtttttgtgtgtgtgtgtttgtcttgctctgtcatccaaactgtagtacaatggcactatcacagctcactgcagcctccatctccctagctaaagccaccctcccaccttagcctcctgagtagctgggactataggtgcatactaccacgtctggctaatttagggtccctctatgttgcaaaggctaatcttgaactcctgagctcaagtg

SEQ ID NO: 107095 - DNA, 3095 bp, Homo sapiens
ggctggaaagttagtcaaagaactgatataatggtaaatatacattttatttttcaaataaaggtaacatttttcagctgtcgtaacaaaaaatcatatcaaaaaatctgtgcttctttacatatactatttctgttgagtgcattcaacaatataattgttttgtttaagtgaggaggagaaaattggacgttcaagagggcagtaaccagcagaaacacttcttgtgactcatacacaattctacatttttattcttcaaactaaagataacattctttttgttaaacatctgatgtttactcacagattatgtatgtgatcatttgaaaattaatgttttttaaaaagggtaacctaggttttaatttattgtgacatacagcctgaactttctacggctttgaaaataaactcacagttttctatttgcacatggatgcttcactatttagctaaaattgatgatattatcacaaatactatagcttgtgcaaggtttcaagaacaaggaaggaagtttaataaaacagaggctgagactcagctttaacaccctgtctcccatgctaatctcctgtttacaataatccattacgaatatttaatggtaggcagcatgcagaccagaattaaaggacatatgggtacagttatcctggttaaaatggccaacgtgccttgtattgtgtatggaagataacaggacaggtggtaatctgtcttcacggagtggagacagctggtattttctgtaagccgaagccatctttttcaatgtagtctcacctcgcagctgatatgttgcttattagtataatttaaaacatatattgatgttaaaaaccatgctctctttctgtccagtataaaaatgcagctcgtggcacagcataaacagatgaaaaatatgtatgtatattccagtatttgtaattaaaatcattctgcttaatttaactgttttttaactgtaaaatcaatattatctttaggctcatctataaagtattttttctttaagctgtgtaagggaactttcttccctgtgttgcatattctccagacttacgaagttattgggggaattattagttcattaccatcaaaatatttttgttaaatttcattttaaaaaatatttcttctctcttgtttaaactacagtatgtttcatttcttatactaaagaaagactcactggacatgtattggaatcaaaatagcggactatctcagcctttccttgggaagtggtgtttaatagttttgcctgctttgcgttatagaatataaagaagaaatgaaatgttgttagattctgtgtatattgaaaactgtagttctgtgtagtttacaggccattttagattccaattaccccctttgaaaactggaaaaaatttgacaagtccttcaattgcaatgaccatatcaattgatttagtgcttctcaaaattccccaaaggcaagttcaggttaaaggtcgggttactagtgcatgacaccttactcagtaggatcaggatcagcagtttccaacagcacaacggacattatttccatttctcctgtccaagtattgcacagacaatttcacgaatacagttcatatctataaaagaggtaggactagtcacaaagtaactctgaatgaaagagtttgggggttcagcacgtacatgaaatccatgtttgcaagaattagatgctctgctttttaaaacttaaccactcaaattcattttaataaatttcatggcctgaattctccatacattacttccataaaagcatttaggtaactatgctctacaaaagtgaatttaaaaactacagatgtgaatatcacaattatttgccatagattggattttggagcttctcaaagtatggatgcaattatctattatttcctttaggttctttcatgtctgtggttccatgttttctcattgtaaacttctgttacttacacattattggaacagttggcattatttagtgctgtgacaaactcaatgatctctttgacttaattttctcctcaggttataattaccccaaaccctgttttcttgaagtctagaacagcagcccttaaactttagtgcgtttcagaatcatctagatgttttcttaaaacctagattgctaggcctcactcccagatcttctgatttagcagatgtgggatgggacctgttaatttgtatttctaacaagttcccaagtattgcccatgtagctggttcagagaacacacactgagaacctctactctagaaaatatactttaacattgctttttgcatatgtcattacgcctttcaaaactgtgatctttaatgcaatggagagaatgttgtacccaaagtaatatgtaaaatatttgccgagcatttgagcaaatcattgtaaaaacatttgcttagttgacttgagagggtcatttatgtagaccacggtcatatcccgtcatttgccgtttctctctttttctcatttctctccatcctaatcctctttatccactttggagttttctacaagattgccctaatatttgattctggttaactgttacgaattacctgatgacatttcatattatcattgatcccttctaggagttgaatcagatttggtattagtaggattagaaacagtaaaacattcccacgttttctcctgtttccacaaatttgccagtcctcgggtgagcctaagtatgatttgaagtaattttgtatggaacagtaaaaaagttacagaaactaaacaaaaacaaacacaaaactttctggacgtttgcctctgttatgtatataaaagatgaatttataaagtggcttgaaatgtgaatttaacagcagctttattttataggaacacgcaggatccttaagaaacatataatgctaagtattttatatattgaagattattcattttcagctgcaaaattattatccatcatttgttcttgcattcaaaataaagaaatcctttatccttaagtaatataatgttaagattcaggaatattttaatacccatattcatcttcttaatgtctttatgaaatgtgtct

SEQ ID NO: 107096 - DNA, 1002 bp, Homo sapiens
atatagcctttatgatttttgaagagatttgaataatgtaatatgaaattattgttgcaaattgtgaagcacaacatatgtctctggcatattatatagtcagtgatttatacaaaatgaaacttaaaagtgaagaaataacggcccatacattaaaatgttttagccatatgggagattccattttcttactgccatttgtttcttttgaattggttttcccttgccctcagataagatgaaaatcacacccttgtcctcatactttgattactgaatcttagtgctcaatgaatgaattgttctcactacaaaactcaaggcctggggccgtgaagttttcttggtctctagcctagggaaatacgaccctctctagaagtacttcccatgtgcacacataaaagggctctgtctttaaccattataatagctttctgctttcctttaagaaaagttttgtaaatcaagaaagcttttgtaatgtgtttctttaatctctacttgcttctctttattctttttatttcaaagtttaatcagaaactctaacatttcacaagttgaaaaaaaataaaatgtttcagtaatacacgtaacaccgtaagacaatatattaatacatctgcaaacatcagtctattattttcctttgtgaggactggaatttattactatttacaaaggagagattatatttgaaattatttttctctttctagttaatccaaaatgaatcaatggaattttaaatattttttttactcttttttaaataaatgatttctcattgctctagattattaatcttttggattaatttatattggcttgacattttaaaaattgaaaactaagcaaaagaggcactggtaaatctcttgttacgtcccttgctcagttgactgcgatacataatgtaaatataaaagggccacaattttgggtttgatttctatttagctgggttagccctactgtcaccaaaacagaattcactat

SEQ ID NO: 107097 - DNA, 1022 bp, Homo sapiens
agccaccgcgactggcccagaataaagaattttttaggctgggcacagcggctctcgcacttgcactttgggaggccaaggcaggaggatgacttgaactcaggagttccagactaacctgggcagcatagtgagacctcatctctataaacattttttaaaaattagccaggcatgatgacgcacacctagtcctagctactcgggtggctgacgtgggaagatttaagctgcagggagctgtgatcatcccactgcagtccagcctgggtgacagagcaaaaccctgcctcaaaaaaaacagaaagaaatgaaggaaggaaggaattttaaatgcatatcttcagtaaattttactaaattttatgttaataattaaactttatgtctcagtaagtattatacaagatatttataaaaattggtataaataatatacataaagtggtaagaggaaaagctaatcattcttaaaatgtgtggaaatgctggaaatatgttatatcagataaaaatctatgttaatctgctctatttattatgatttcatttggaagtaaaaatggaggattatgaagttaatttgaaagtagaaattgaatataaatatctttaaacttttgtcagaagcggttaaaattaaatcggaaacacctggtggtaatttttctttttatctcttcaaattttgaaatattttcagaattaggaaactctttttgaacattcttgatgtttcttactattaggtgccttcataatcttaggtaagtctgaatctaaaccactgtcagtttcatatatttgagcattgtgtttccaggatcccagagtacaaaggctaaatttgactttgtcataatagatgatagtgtttcattactttatcatgccacatgcggaataagagtgccctggtaggacctgtattttctatatcgtttctgtcttctcagtttgccactgtttttgttttttaatttgtatcttaattttaatcaaacacctaataatgcaaaaag

SEQ ID NO: 107098 - DNA, 1056 bp, Homo sapiens
tacataagcagaaaaaagtattcattaacattatagctaaatgtatagtgtaaaagtttacctcaatgtttactttaataacctaacatgtaccgcttgaaactcaattaaaaggcatgacaacatagaaccttgaaaataatttggaatttagatttttaaaatattaaattaaaaaaataatagatttaaaaacaattgctactttatttttaaattatcaaaattattaatttaagtattttaaaatataaatatttccatgtaaatgtaaaacaatttacagatattaaatatttaagactctaaatatttaattatttttggaacactctgcttttgtttaaagtgagacacaaaattcagaaactagaatgtcacagcctttgccattgcagcttgcttcctttgactgagatgtgctgatagtaaccattttctaagctataatgattaatgctacttaggggaggtaggaaaaaagttaatttaactggagtcgttcagttttaaagggattttattgaacacagaaagtatacacaaacacacacacacactgaagaaatattttaatatgcctgttacagatgcagttacagctcttttttgtttttcagtgtttttagaatgtcagatccaaatattttttattttttaaaaataaagttgaaacatatgatttattcatgaaatttcagagggggaaaatatgaacaaaggaatccctctccctctaaccttgccctgaaatgctacaatgactgtgataattagctccatgttattatagattatttttcttataaataatttatatttcagtttgctttagttctttaaaaaggcaaagcatgaaattgattagatataattgtacgtttgattaatatttaatttgaaattattttgcagcttcaagtttagatgtaactgtcacattttagaatactaagtgtatattagatagcttggtataaatgtcttcctaattattcacttttttattattcaaaagcaccatttctcatagctatacatcatgttttataatgt

SEQ ID NO: 107099 - DNA, 1562 bp, Homo sapiens
tggcatcactgtgctccagcctgggcaatagagcgagactccatctctaaataaataaataaataaataaataaataaataaataaatgatactggaaaagaaataatttctgtgttgacagtgcctgaatttcctgaggttgcttgagacactttacatatgcaaaacaggacctagcaacctttactttctctttttctgtctggtaggggataaaatacacacaatgacaggactgtctttataaatgaataaaatggaaaggtgcatctggttatctggggcctaatttttaattcagtatatctgatgtttaagtctaatctcagtctcttagtctctaaagtgaaaattgtaacttcagtcgcattttaaattgtgttgtatttaacccagggtttaaattgaagttttaatagtgcaaatgacattttacatttgtcaggagaaataaaagtttatgatcaagttatttagtatgcctgaatgagaacattttaaatcttatccagtaaattatggagcaaattcagaataaaagctaaaaagttaaagagaaaatgggcaaagacaccacctccacgaaagtatttatatatctcaatctctccccctccccgactctgtacatatttaccaggtaatactgtcctgtatgtagatttagtcacattaagttactcttttatcagattttcatctcagtcaggcaccagaaaaatggattaagagccagcatttaatgtagaaggacctttagaacattttaattatgtaattcagcacttgtcatagcttatgagagtgttctcaaatggaagtgtagtacaggttgcaatctcgttgactcttgcttaaaggcattcttggaaaatatgatttagaatattttcctttgggaccacccctgggaagaaaccagtaaagagtcaataactgatgaaagaggaacaatatttatatgaccagtggatcgagaatctgtggatatttgcttttctctctgcttgtcacttttgcttaaatcacgcaaagtagccctaaaattctgtgtttggactctaacattggtagacaataaggtcaatttcttaacatttttctttttcttttcttcttttctttttaaaaagtaattaacacttaggtcactgcattgtctcccattaaatgagttctttctggaccatgttggtaataattcttaaagcctccctcagagttctaatcaatacatttcttatgaactgttctagaaggcgttttgttctgttttagtttaatgggttttcttaaccctatccaatgactcctttctgtagtggacattgtggatactctttttagttacagacaattaattctgtcattaagtcaaaacaaattttgttttcaacaaatttaataaatgatttatttagtacagctctgtgatcttgctgaaattatttagtctctgtgtgtttcagttctcttacctgtaaaatggggatatgaattatgcttacctaatagaggtttgggaaggattaatagttggtgtatctatagtgctcagaac

SEQ ID NO: 107100 - DNA, 1030 bp, Homo sapiens
tatggaaagctatttactgttcaataatatttactcttttcttaggtggccaaaaaaggcattaggtatgttggaatacatagtcagctatgtcataaagactaaatggaaaagtttgactctctagattggatgctacaaaacagctgctgtcaatataactgtgttcagtattactggatacactatcctggaacagattcaatctggtaatcttggggttaagggtgacgtattttattaccagtctcatgaactactccttttattttcttgaaaagtagctgatattcatacatgctgaaaagtgctaagatgagtatttcaacactagttgatacttagatataaagcctcttgagacgtccagaatatcaattcagtatttggttatttatgggaaattcttggcagtgtctccttgtatcaacagtactgtctttaaaaactaataaaatgagaaggtgcatctggttatctctgaagccttatcatcagatcactctttttaatcctcctaatttgcttattatttaaatgctagaaatctttctcatattcatagactaacttgagaatcatttgtatttaaaggttttggttcacaagtttaatttaaaccttagtataattaattttaattaataccgtagagtttaactgaagctctcagtacttaccagtttaaactttttttttatttttgagacaggatcttactgtgtcaccaaggatggtgtgcagtggcacagtcaccctcactgtagactcaacttcctgggctcaagcgatcctcctaactcagacttctgagtagctgggactaaagtgtgtgcctctacaccaggctatttgttttgttttgtttttactttttgtggagacaggatctctctgtattgcccaggctggtctcaaactcctggtctcaaatgatctcccttccttggcctcccgaagtgctgtgattataggcataagccactgtacctggacaatttaaaccttttaaaatctatacttgctgtac

SEQ ID NO: 107101 - DNA, 1140 bp, Homo sapiens
ggcaatgtgtaagcgagagaagtttctgagtggagactcaaaaggattcaagaattggaaggtgtagtcaaggcggacaccagaaagattgttagtaaatagggtaggaaggctaggccaatgttatgcagtgtttaaatagtaatggttaagccaatgctttaaaaataagcgattaactgttttcaagtgatatacgaagatattttgtgaattcttctgcaggctcccgtcttcgtcaggaagattttccacctcgcattgttgaacacccttcagacctgattgtctcaaaaggagaacctgcaactttgaactgcaaagctgaaggccgccccacacccactattgaatggtacaaagggggagagagagtggagacagacaaagatgaccctcgctcacaccgaatgttgctgccgagtggatctttatttttcttacgtatagtacatggacggaaaagtagacctgatgaaggagtctatgtctgtgtagcaaggaattaccttggagaggctgtgagccacaatgcatcgctggaagtagccagtaagtaaactgggcgctctgtgtttggcagagggagtggcagagtggcgtcatttgtttgatcatggcaatgaaaagtcgaatttgtatctcaggccttacctgaggataaactctagctttgtatgtgaatacaatctactatttcggttttctgtatttctcatcctaacttgttattcaagctaaattggtatttacacacagttggttaacaatttgacttttgattgggagtgattttctgttggaaagttttattaaaattgttccatcccctcctttgttacctttaaagatattgaatagggaaccatgtgctgcctatagttcagctacttgagacactgaggcaagagaattgcttgagcccaggggttctgggctgtactgcaccatgtccattgggtgtccaaactaagtttggtgtcagtacggtgacctcctgagaatggggaaccaccaggttggcctaaggaggagtgaacaggatcaggtcagaaatggagcagatcaaaactcccatgctgatcagtagtgggatcatgccggtgaatagccaaaaaatacacacacacacacacacac

SEQ ID NO: 107102 - DNA, 1052 bp, Homo sapiens
taattggagtagttacaaattagatacaaataagcctcatgtagggcttacagtctattaaaggttgaatgtatacgtattagttataactttgaaaaataacatattttcctgtcttgtcatagaatacatgattgttaaacttcctctccttctgcttagttaggtctttcttgtcagcacttcattcttttttgtcatttattcaacacatggtttactgagtactgtaatgtgcacagcactctgccaagcataagggaaataccatgagcaaaaccagacccacagatcttacagaagggtgggaaaaacggacaaatagcatccgacaaatagatttatatattgtaattctgatcattcttaccaagggtagctgtatagtgctatttcggtttataaaaccaacatttaacttgtaaagattagagagagcagagatttgaaatagagtaggtgtattctactgtaagattacttcaagcccaggccctgtggcaggcataaatcatgttgcaggaggatgcgcaaggtacttgtggagctaagagaagtcaggctgaagacagcagagaaaagcatggaacaggaagtgtctagacaggtggatcagggaatgaacaggctaactcttgtaggtctagttaaagacttacgttaagagcagtaagtttattttaagagccactgaagtagaggacaacccacattatatttgcatttcagagccttcatctggctacactgaagtgaaactatttcacaggctttcctacatcctggtggaaagagacggtagttggacttgtgatggtagctggttatatagatgaggctaagcagagtaatttgagaacttttcaggaggaatttggaaagaactaggggacagaaagagaggaagactggtttctaatttgccttattcattgaccttgaaacactagatgagggcatgatttgggactctttcagtaaggcctttggctgttgaatttgagaaatctttgataaatttacatatttactgtatataagcagaaataaga

SEQ ID NO: 107103 - DNA, 1901 bp, Homo sapiens
catatctctggggacatagccatacgatattagattctttaggaatattacaaaaacaccaggcattcactcctggaatttccttttggtctattttggtaaccattttagatgataaattctaccaatggcactcagttaattattagggttattctaaattttgactggagaagttttcctctaaatagtgtttgcttaggtagaagtttataatcaagagacattagaataaaataaagtagctgagcgaaatggcattatgtagtaatcatgtagttattataatccattccattttccttgtattcatgtactatgtataattttgggtgaaagtacttagctttttttgtagagtgtggactgtttttatgcttcttatttcaacagtaagcatgagtatttggaaatgtgtgtaacttaatagaggatatttaaatctactctgcacagtgagtaattaatgggtgctgccttcttattttttaacaaatgtcttcttgtaggatgaaattctgacaggaaaattacaggattagtgcccatgataggatttatgttaataattggaggcagttctgctcctttaaaggtaaatggagcttaaataaaagtgttaagcagcaaggctcttttaagaatataggtttgaacctatatataaatatatagatttttatatattatatatataattacatccctgtccccaccttggacagatgtcgccaaattctctattaattgtctattaatatttatggtgtatctgtcagctactcactgaatttgttcctcttctgcttttaacagttttataagaatttttgtgctgcaagatacattaatatgatatttgatggagacagatactttaatcattttaggttttctaattttatacagcagagtatgaaaacggttggatcaaaacaaaactactaataaaataaatactgttttttctgtctgttaagaaacagacctgaaacacaaataaacaaaaccataaggtaaatattaatgtcatgatagaaaaaaatcatatatatgaataaagaataaaattatatatataattcttttaatacatatgtttatgcttacctcaacagaatagtaacacgagcagtctcttaaatggttactttctgtgtttgtgtaaaagtgacctctcagagggggaagcagtttacatccaactaggagtttggtttcctcatcataaatcttgtgtgactttgatatatttccttgaaatacttagcacttacgtgtatatctttttccagctgtggttgtgtaaatatttagatatttcagtcactcatgtttatattttatcttccaactgggcagttgttgaaggaatcctgccctgcgctttccctgatgctggtcttgcctgaagtgagttctcaagattctaccaggattcttgcagagggcagttgacagtgtcagagagagtatcatcctagttcctttgtaaaagcctcacgtcatcagtctgtgtggtgttgttgttttttttaaccccctcttctttgtaactattaggtttactatgcagaatgtggttgaaacctggaagttggttctgccaattgggatagaaattttgtatcttattacataaaatatgtacaaattcacataactagaatgatggttatcagatgttttataggaatgtggaatttatgaatgaagagagaaagctttttatgaataatgagtcgaatattatatatatgtactgtatgtaaatatataatattataaataattgtgacagagtgaaggtagacaccacttttagggtggaagactgcaatcactgatatctgggacttggaggctttcatccgtactcttatgagatttatatatgctct

SEQ ID NO: 107104 - DNA, 1059 bp, Homo sapiens
atgttaaaaagctggctaagaggtatataagtgcatatgcattgattaagtgcacacagtgtcacttgccatttgtattaactttgaaactttaataactagaagaaaagagagagagagagacaggtaccacttactgtttttgtttttttgaaggtttttttttttttttggcattcttgtatcaccagcatctagtgcagacctggtgcagcatggacatttagtacatatatttcgagtgaataaatgaatgcaaaagagttaacaaaggttcaattttattttctccatattttcccaaaaaatatttgttggttttcagaacttctaaaataaaagattttattatgaaaataacaccagaagatcgtggattatttagaaacgacacacacttatagagaaggaaacaaaaactacacatttttcaacagcctctaagaaataatgttaagattcttttcagacctttcttctgtgtctcttctttttctgtctctctttttctcagtctgtcttttaagctagaattgtacaactttcacctctgttaattcttgtatttataccacatgtgatactgtgttcacgtttcaggtttcagtgtcctcagaattaaatttaaggagagcttccagccatgaatgggccaagagccttgtatagccaattgcttacaggaaggctgtgtcttcaagactcccttcccttgtggatttctgcttcccataagcagaattaaggctattccttattttatcttcagctcagaggtacactgactgcctccaagaatgatgcttgtctataccactaggtataaatgcctatggcatcacttaacattttcttcttccattattattgattattcattcaacaaatgtttattgagtacctgccacatgctaggtgctgtttcaggcaatggggatgtggaaatatttcagttatggttaattatttattaattaaacacagatatttcaacaaaactggtttttatggcttttttccttcaaaattaagaattacaccactctcaagatagtttaa

SEQ ID NO: 107105 - DNA, 1025 bp, Homo sapiens
tcaggaaaaaaaaagaaaaaaaaaaaggttttattctttttttcctcactgaatgctgccatggaattataacctatgctgatagtaattgctagtgacccaagcatgttagaatatacattaactctttcattccatgattgtaattaaggactgatccagggcaccaaatggtgaggtggtggcttgaaatgcttttctagagccctttcgttttaagatagcctatcattcccttttggctcaaagcaaatgtatcatctgggttctcattttcttggaccttcccgtgaactctgcctctgattacacccttcttcaagctcctgatggctctggagaagatgagatgccataagcttgttctttccttttcaaaacttttttctcatgtcttttcttgtgcatgatcattaacttcatgttatctccttaaggctttgtcttgggctctgctgcccctccttcttttcattgttggggttttcatcatccacataacttgaatcttaactctgtatagctgatatttgactaggcagaatttccatgatactttagcaacatgtatttcccaggctttgtttgaatttcgagccttgttactgtctgcaaatcttatcttgactgctctgtataaataaaaattaataataaacaaaactaaattaaaatacattaaatctgtctaaaacagttgtcctgggatatttggtaactttggctgttacaactctgccaccaggatctcgtgagtagaggccaaggatgccgctaaatagcctgtaatgtacattacatcccttcgtaatgaagaatgatgtggcccgaaatgtcagtagtgccaagtctgagaaaccctgctaccaaataaaattacagttgaccctagaacaacactggggccaggggtgctgacccctcgtgcagtctaaaatcctggtataacttttgactccttgaaaatgtaattactaatagcctactgttgactggaagccttaccaataacataaacagtgaat

SEQ ID NO: 107106 - DNA, 1057 bp, Homo sapiens
acagtgtcatgctctaataagtctaagaactgatttgactgggttcaactacatatataagtgtattacacccttgcctccacttaaataaagaagtgagtaaatgcaggcttttaggcctttgtattcctgcctaaatttgactcaaattcaaggaatttacaactatgagggggaaaataaggtctccttacaatgcagtttacttaggatttgagtatgcttgttaagtaggatttttaaagaaacgttttgaaagtatgcatgtatgtatgcgtgtgcttgtgcttgtgcatgcacccttgagcatcttattgttaaaattaatctttttatcatatccatccacccacacatgtctgattccagaacatgtcagattcacaagtgtgaactaattttacattatttggcttgaatgcagtcctcttgtgttcagagttgatttcctttgatgatttaaaattgagttagattctataaatggtgggattatgagaggagaattgagaaagtctggctcagtgttgtgaaatacttagagaaaatattgttcagcttttctgccactccatggccaactagatatatgtattcgcatctcctacgaaaatcttggcgtgttcttttgtccttactgctgcttcagcttctggtaaatagaagaatctgatccacctcagagctttccttgaacaagggttttgttgctctggaaaacactaggtgtacacagacatgcttgaatttcatgaatgtcttctagtgtgaaacaatgtgtgataatattgtgtttctagactctttttttacttgtcttggtcttgattttaaatgcctttaagacaaagttgacacaggccacaactccaagggtatttgtattctgtttaaacagtggctttgggattgtgtagcttttactagcaagccacagcacaccttgactcacactgttttaaacagtaagtaaatgtattatgtcatacaagtaataattcaagtgacacaaactgctcacaaatgtcatcaagcactgcatatttcctgccattgc

SEQ ID NO: 107107 - DNA, 1064 bp, Homo sapiens
ttagtttcagtatttgaagagagttattttgttctttttaaacttgttattcttcaggcacaagatgcccttttttttaaatttttcttatttgatacagattcatttcccttggttatgttgtttttgttgttattgttttcaatatatctaattagccagtgtttttctaaagtgtaatgtcaagtttgaggagtctaccttcctgtttatttaaaaatgtaaataacttttaattttcttctaaccttccaacaaatcttgcattttataaatattcccttggtatcctgggatgtcctacttttctggatcaggagatttaaaatgtattaagaagctagataactggtcttttcatctttatttcccactgaaccatctgaagtctggtctaaagtcacagtctcacaataaaacttatgagagtctgtttttttttttttttttttccgatattttgtaagggttgaaaactgaaatgcctatacaaggtctgtataagaaaggaagtgcttgtattagggccaaggagtggctggctgaatcttgctccagggaaatacagcctcaatgtagacatactttcagatggactttcagatggacttttcaagaggaagcataattctgcgtttttaaatacaatttcctaaccaataaatatgggtagttgagtgtgaattaataataataataagcgcttgcaccaaatatgatatatagtcatcattttgtggctgcagtattacaccactcatcctatggccaactggcctatctgttgctgcctatttctactttaaatacatcagtatctccttactttttgttatcttctgtgttttaccttttcatttttctggtgtttgcccctcttctttgtatggttactagttaaatgtttacataatggcttacttaaccaaaagcttctcctttattggtagctatttacattttacaaattgtatttgttgagccaggcaaagtgatcagttttactgtttatgtttattcttttgtcctaaagctaacaaacaaagacaacaaaaccacgagcc

SEQ ID NO: 107108 - DNA, 1044 bp, Homo sapiens
agctgtccatggcttagagccggaaaataatattctgtttattttgtttaattaattcatattattttgaggggaaagtggatagaaggtaagcaattgtagaaaatgttctagggtcacaagatgagactaaatagtctatctgggcttaatgcttgtcacctagtttgacacttaaatgaagcgttaaaagcaccatcaaaggatacaagcaaatgtcaacagagcagtgtggttctgtgttaagtgggaatatagtctttttgtgtcaagtgattgctttgtatgcagcatataggaaatagtcggttttggttcctaataatacagtattttggggatctatttttcaaatcatgttagtctttcagttaagtagagcaaggtttactagaaaacatttttaagctacttctggcaataacagctcacagttaaaacactttctcaagatgctcttggttagatttcagaaagtatcaagttcaaagtatgtctaaattcaactcatgtgtacaggacctgagagctggggacagcttgtccacagtcagccatgaaaggagcgtggagtcctcaaagctctcctctaagattatttgcagtgttctgcttgaaacacagttcgtatgcccagtttgtatagaaagtaaaagagcaaaaaaaattgttatgtatgactagtaagttcttgaaaagccatttcaggtatatgttatctcttgatttaacttacaatttcaatgagcataacaagatagtattcatatgacataaaagtctttggatcatgttaggtatggtcataatttatgcaacattatgaaaacatatatataatatattatgaaaaacatatatatttatatataaatatatataaaacattatgaaaaaaatatatataaaacaccaacttgctaagttcattcctgggttttggtagaaggctagattttagcttctctgcactaacgtgattgaagcccttttatgttattagcaatttcaggtagagtaggaaaagaacatgaagccaaagaa

SEQ ID NO: 107109 - DNA, 1012 bp, Homo sapiens
tctgtatggtaacgcttttgcttaaaggagaccagtaaagtgaaagaaggaaataattaaaagatgagatggagttccaactctaggtgcaataagaaacttcatgaaaatggctacttttactgtgaagctaggactatcactttactaaacactcaccattatcttatttaatgctcataaaaatcctatgacatatatgctgttatttctaagatattactgtgccctgattttactgttgtagaaactatatcatagagaagttagggaatgtggttcagcagggatttgaaccaagctggctctaaaactctcaactactgtgcattttcctagtcgaaagagagaaatgaagaatttaaataaaaaagattatggttcaatcactttttattttaaaacttgtctcagaaaaaatccacttaaatgaaactgtggtttgaacacttgagaatttggaaggaaggcattattcttcctgtcattaagaaaatggtctctaatttttagatcaccaggcaagacagtcagttctttacatcatctaaccagttcacattgagccttgattatatctgcattttctggcatgcttaaaagaggagactgaatgtgattcaaaacattgtctgctggtgatgcagatgcacgtggctttcgagttgtattttggaaaatgaatggcattgttcttcttgcacactggaggaaagattttgctctgctctgaatcccaaggcaagtaattggtactcctcactgaagagcctgtggagagacaatcatttcccctgtggttgctcttaggctctgggttgagtatgggctggtgatcatttagtagatgagccttctgcttgactgctgttcacagataactcacttcatggttactgatcatggaagggttgagccttaatacctggttgatcagctggttggaaactgcttatgcatagccaataaagttgccatcctgtggagatcaaaaggctacctccattcttta

SEQ ID NO: 107110 - DNA, 1031 bp, Homo sapiens
taaggtatcactgaaagttggtcgtgtcaacttggaagttctgtcttcacttggagaattatttgggaagtactgtcctattagatttaataatttgagtagtagatatctgaggattgcaatttgaatagatatgagacaattataatgttagagctacactgatttctagcttttagaaatctaaaatttctagtttttctgtttctaatttaattttccatttaagccattgatgatttttgtaaacctaagtttttcctataggtgtgcctatctgctttgccacttttcaggacaaaagcttctttctaaagtgctccctcatacataacctgaagctttttattcctctgatcactttcgctcatgctgtgaatctgaacttgggaggccaaactattgagctagtagggtgatttcatgacagtgttcagttataaagcaacactatcgatttgaataatacttcacagaactcaagtgactagaaacctgggtgtgttgaagacacctggtcagagaatgaatgaagttcttgaaagattgtgtttcatgtcttgccccaagcctaagatcacagtctatcacttgttaatggagtgtatttaagagaaatgtggtgagcttaaataaatcaaagtgtactgaggggataacttaccttcaacaagatttaacctgtaaaagcatctattggttgtcagttctttttttcttttttcttttcttccttttttaactgcctgccaacttaacaaagtccaacagttttcttcaaacagattataaactccattttggtatgttgatggcatgcttagtactaagtcttgtgcttaagagtgttcacttctcatagccttttatctattaacttgatgctacaaaaaataacctttcattcaatgaaactgagatttataaaaagtggttattccttcagaaattcatttttcaggtagattcctttaattacttggtctatctgccttttctatggacagacagacttctggtgagtttgcggg

SEQ ID NO: 107111 - DNA, 1288 bp, Homo sapiens
cgatgttgggcgccgcgcggggctgggggcgcccagaagacgtgcgagtgtccgcggtcctgctgctgtctccagtaccctccgcatcccccaagtgatgggaacaagggcccgcccaggcagccgctgtcgccgcaccgccccctcgctcgctctctgcgcgcggagtcacccagtcacactcccggcaccccgagcccttcctccggagctgctgcttctactttggctgctatcgccgccgccgcgggtggcccgctgctgactgggctcgccgggagacggagaagcactttttggccctccctcagcagctctcacaccccaactttgccgccgccgccgcgcctgccctcgcagcggcgctcggccgcacattgtgggggcgcacgccgggaggctccgcaagaccgtggaggcaggaaacggcactactgcgcttctgcctcggctctttgttgttcgctttggatggttcttgaaagtgtctgagcctcctcggaaatcctggggccggagaagacaaaccttggaattcttcctctgcaaaagtctctgagatactgacaagcgtccggaaaggtcgacgagtaattgccctgaaaactcttggctaattgacccacgttgcttatattaagcctttgtgtgtggtgtgtggcttcatacatttggggaccctatttccactccctcctcttggcatgagactgtatacaggatccacccgaggacaatgattgcggagcccgctcacttttacctgtttggattaatatgtctctgttcaggtaaccccgcgtcttctttcttcacccttgatcctccctgttcgccccctctccactttgcacgatcaaacccagaagtgtattttggttacccctccctcctaaggccggaggggctcgattcctgctagacttttaggcgaaaatgttcctagttcgcatttggggttgtctctttttccccactccccaaaacctcccctccacccctgaacctcctcaagactctttgcagatctcggccttttgccaagttcagggcacgcccagattactctgggcaaacgcacgtctaagcactagggtgggaggaggcagcggctggcagtgagctagggcccccaggatgagccgaagtgagtatcagccgccggctgcttccctggggagggaaatgtgcgccctgggagcttgtggcccgcaggcttgccaggattcctgagcctagtcctctctagcccctcctcttccgagcacaaggggttattagtagttgt

SEQ ID NO: 107112 - DNA, 1017 bp, Homo sapiens
gtttttttctagctctgtacaaaaaagtgtgccaatctctattattatgtgcacctttgagggttattgagggaattacatgaaataattcatgcaaagcactcagtacaaggcctgccatttatttagtaagcattcaatatatatttgtaagtattagaatttttacacattcattttttactgtcaaacaatcaggtcaaattgactgtcataaatatgcactgttatgtgcgtttccatgtatctttagaggtaaagcacccaagcttgagaagtatttgtttaagtagccatattttggtgacacttggccatttctgcattaataacatgcctggatgttggaacttctattttggccactagtttatccttaattcggatattataaattatatatatgtaaaagtttttggttatattagagcaatatgggtagattgttaaattaatcattgcagaaccctttgaaagtctaggcagcaatgtgcaaatgcaaaatttataactggagcaaacaaaaagaagctgatgattccttaaggatattgatgtttttttggtttcttccttttgttgtcatcaccagagatttatattacatttggggaaattttcaatatttaatcataagcatttttattccaatgtaggccatacattcaccaatatgagcttactctcactagaggctggccatatttttttttgatttaaaaaaaattgaggcatatgtttgcatgaatgcccatgtgtgttaaaacttctaataaacaatacggaaagatgatcagtgaagaatttaatgattttacttcttatggtgttaaacatgttatgaaaggtctctaaagagaaattgtaagctgtggggggaaaggaagaaaagaagaggaaaatctattatttgaacatttcagttaaataatttcttacttaagttttcctcatgaaaataccacttttgtaggtttccaaaaagtatcataatcattgcttatgtgcctttatttt

SEQ ID NO: 107113 - DNA, 1060 bp, Homo sapiens
gcatggtggctcatgcctgtaatcccagcactttgggaggctgaggcaggtgaatcacttgaggtcaggagtttgacaccagcctggccaccatgtcaaaaccccatctctactgaaaatacaaaaattagttgggcatggtggcacgtgcctgtaatcccagctacttgggaggctgaggtgggaggatcgcttgagctagggaggaggaggttgcagtgagccaggatcacactgctgcactccagcctgcaagacagaataaaactctgtctcaaaaccaaccaaccaaacgaacaaaaaaaccgaaatcccaaaaataaaataggaaaagttaacatactttgtgaatttgttcacttactgtaagtgatacattttaatgtttttcaagtgagttttccaccaattttatttttgaccagttgtatcacacttacctagagcagaattttttttcttcaatggttcaacttattaaaattatttaagacatgctaagtaacaagtaatttaaactgagtatacaagattaagtcagctggtaaactgtaaactgcaaaacttactggggtgggcagggcgcggtggctaactcctataatcccagcactttgggaggtcgaggtgggcggatcacctgaggtcaggagtttgagaccagcctgaccaacgtggagaaatctcgtctctacaaaaatacaaaattagctgggtgtggtggtgcatgcctgtaatcccaactattagggaggctgaggcaggagaatcacttgaacccaggaggcggaggttgcggtgagccaagattgtgccatttcactccagcctgggcaacaagagcaaaactccatctcaaaaaacaaaacaaaacaaaacaaacaaaacaaacttattggagtgatattaagaatggtcaaggaccaatgctttggaggtaaaatcttgggtttatatttcagcttcacacacagactagctgtgtgaccttgagcaagattgcttaacctcttcagttttctcatctgtgcaataggaataatgctacttctcccggtgt

SEQ ID NO: 107114 - DNA, 1023 bp, Homo sapiens
tgatttactctcttaaaatagttctagtgcccaacaattattatacttaagcttcctgagggcaagctctgagcctcacatagctatgcaattttcttatcctcattttagtagatgcataaacagtcatgttggattgaataatatatatgtcctaattacttgtgatgggattaaatgatctcttcttttcataatatgaaagcactcatactttgtcaagtcacataagagttaattttgacattttgtaagctatattggtttatgaaagttatcctaaagtatcacataaatagttcttaatatacatctttaagtgaattcaatctgatcagtcatttttaacatttttcctaccatttttttcttttccttgattaaaaaccccagatactttacattagattagatcataaactaatttcataaaaaatgaaggacacaatttaaatttactgatttaacctaaaatatttaaaaggacacgttcattgccaacattttatttgaaaatgtcaagcatttttggagtgcaattctgttgtatcaagaaaggcatcttctgcaaattccttgtgtaaagaggtgggtgaggattaacctagagctgtggcagctgaagccccctgctgtgtgatgatgcaaatggcatctcaggcctaatgtgctctgcagaggccacaaactcacaggaaagcagtcatgtggcatgagagtgaaatgggaagtctttttcatagcttgtagtggacataaaacatcctttagctttttataaccagaaatgatccagagtatttgtaatcacatgaggttatgacaaagcaaaagagagaacatatattttgtttagagatgaataaaatcctactaaaactatcaacattttcatccaatgaatggtgaacatttaattttcttccaaactatcgggaacataggtcagtttaatgaagatgaatagcaaaattaaaataggatttccatgctattttttacgtgtgttggacttaataactg

SEQ ID NO: 107115 - DNA, 1045 bp, Homo sapiens
gcatttttttgaaagctccattccgtaatctcttaataaaaatggcaaaaagaaggggaaaggaatgtgagtcagccagccaaacacacagagaaaggcctggcaaagctgcctaaattagcatatgctaggctgagtatttccctctgttgttacataatccctttctaatacgaaatcagttctcatacttaaccctttcaggaggtttggaattctcccactgttatatttttattttgcttcatttattttctcatgaattgtgtaaatcatctattcaagggcttttatgtcaagttctttttttccctctccagcccttctgtatacaaatgttccattctgtgtccaacttcaggattcaagaatcaacttttctatagcttccactgagaggatctaattagcattttagtctccctttactcatgtgcagctttctttagaaaatgtattagttctacgaggttcccctaaggattcataatactctagtttgttacatgttctgtgatattcaatgtgccttaattatgcacgtgtcctcatttcaaagccttttcagggatcatgtgggatagaacaggggtctggctgtaagttcactgtcatgtattaatgtgtaggtggtattcagagaaggatgtttctgaaggcaattatatatctatgactccaatatagcaagcagttactcacattctgcacttactagttatcctgccaaggcagaattaaattcaccattgtgatacataatacagtatctgttatttctaaataacagatactgctctaggattgaaataaaataatgagtgaaaatgtgtatcccctaccctgaatagggattgttcctttcactttcccaaacaaaaagaagaatcagaaattgttcctaagtcaatactctattccttaactagcccattaacacatcttgctatggtgggatcttgaagttttgctggtttttatgtgaggctgtagatatttaagcagtattaattgcctgcaatctttatggactgccaaatatcag

SEQ ID NO: 107116 - DNA, 1102 bp, Homo sapiens
agatacaacagcataagagtacatgttttaataaaacaaatatgcttgatgggtatggacagactggggagattaatatttcttatcatttaatgatggactaactataaggtaaaagtaaattcgatcaggcattagggatattttctcccaggaaattctcatcacctagccataccatgatggagtatagaggtggattggtaatagaggaatgaagtggaacacaagcagcagacatggtcaaattgtggttcgtgtggaagtggtagtgagattggtctggtgcaggtcttttattttgtagtgagggttctttatgctgtaaagggaggagctatcaatggactaattaaaactttgattttggaagtgccttacagcagtaagacatgatggtaggaagcaagagacctaagttctcaggcaagccgtgtcacggtctcactggccttgagcaagttacttctcttgtagcttagttttttcagctgtagactgagtggttggaaccacattcattctttggtgatgtattgtagaaggaacttatggatgattgcaaactgcagagatggcatttttctttttcctttccacctaaagatgttttataacatagtataacattaactgcatgctcttaaaatagcatttcctaaaatttaactttttatatccatctatgcattgtttagtgcttaaggattttacatatgtaaacagattttttattgtgatatatgtgcctctgtaaatttcagagcttttctttctctgtcaatgaagtttataaattaattttgtagccattggcctgagtttgagccatacatacttttctcacaaaatcacatccatagatcaattctataaattaggaaattgattcctttgtcatttttattattaggaagtggactggataaggtttttcaattttgagtttgatttcatatttctgtgcatttcatgtacattaaaaattttctgtggtcattttattcttcatagcctttggttttctgaagcataacttattcattcgttgattcatttatcaacaaatacctatttgaaggcagtgttgtaaaatgctgga

SEQ ID NO: 107117 - DNA, 1163 bp, Homo sapiens
catgatctcatttcaaccctatttaaatcttatttcagaggaagcattgtgtaaatggaaagtacaaaagatagggcatcgagaattaaagttctgattgtggctgtgccattggctccccccatcacccggggaaacagctcatctctctagaggtcagttactcagagggtgttaggcttggatcatctccaaggtcccttttcaacttgaagactgactccaattcagcagctaaaattaaataaatggatatgctttgcaaaggttagaatatgattatgtctttgtcattagatgaaaaagttttaatctgacaaaagtgttatataatgatgaaatttatcactagtggtgtttgtaaacttctactgatgcacaattctttcatgtgctttaaaaataggtttgctgcttgtaaaatggaggaaacgtgtatatttattaatgtgtatatttatatattggcatacttactgatatctaagtatataaatcaataaatcttattgttacatgattccatttgtttaaaaaatgtgtgtgcctgtgtacatacttcattgcatttctgactttttacattattctctataaatagaggataactagagttattgagtaactagaagaggtatctttgaagaaatactcaattttgtaaaacacttcttctaagaaaaatcttaaattattaaaaactgtcggccttaagggggagagaaatagatgattccaggaataaacttcaataaatgaagatgattttacactaagtattataaactgttttttttatatccatagagactaaaaaaaaaaggtgttcttcaactactctaagagtcctttagatttttattaagaaataatttccaggcaggactcctaggctataaaattaaacgtggtgaaatgctttttttgatgtctaaaaggatagattaatttttccatctttcttggaataattaaaagtgtgctgtcttcaagataaagtaagagaactgaaggacttcaaatcacgagatagaaaacgtcatgaaaccagtttgcacatgtaactaatccaaaatttcacttttattaaatagaatttgtgttaagaaagccaaatacctattatttcctttgtaagtatgtcattcaataaaggttttatt

SEQ ID NO: 107118 - DNA, 1034 bp, Homo sapiens
gcaacctccccgtccctggttcaagcgattctcctgcaccagcctcccatgtagctgggactacaggcgtccgccaccatgcccagctaattttttttgtatttttagtagagatggggtttcaccatgttagccatgatggtctcaatctcctgaccacgtgatctgcccgcttcagcctcccaaagtcctgggattacaggcctgagccactgcgcccggccaagaatatatatttttaaatgttgtaactttagttaaacaggctatttatggaaccccatttaaaatggtgtatttatattttcatatatcctatttgaatattaaaggctggatatttcattttgcaatgtatcatttttgtactctcactaaaagaccatttaaaatagatataaagtttttttcatctgtttcttatttttgcatgaaatattttggacatcacatcttttaatctgtaagtgttatgctaaaaataaatcccaataaaatcagtttgttttcttctcctggagatttcttgtctatatctgtttttttttttcattgaaaatacagattttattattcccgtgtagtagtttggaatttgactattatgcctagaattccaaagccaatttttaataaaataaattttattataaataccacagataccttttaagagagtgctgatgaaataatacctgcatattgcagggaaagcttttttctgttcaaagttcttagaggtgtcagaaatcattgtctacctccctttatttctgcctggagccaagcggggaattaggaaacgaagagaagtgctctatacacaatggccttcagtgaatattattgatgactagacacctgctaggatgtaaaggcatttaatccatattattttcccttttaacttgtcaactcagacatggcagccagaagaattttctgtcaaacatcagcttttgcattgcattacgatttttatttttcattcttggaatttcaatacacaacacaagtggggctttaaataatat

SEQ ID NO: 107119 - DNA, 1044 bp, Homo sapiens
aatattaagtaccttaaaacattaatatctctgagacctttgaactattttctctttaaacataatttattttatgtaaaattaaaaaaataaacatgtattcttaatcccactccttcttcagcgaagacactcagatttcgaataattaaatgccttcaaatatgtgattaatagttgcagagaaacttaattgaatcaaaactgttaaatattttgctggtactctagccaagaaaatctgggggtgtcttctgtgattaacaggcttttgttaggtaaacccatatttaaaaatttttattctacattatgatgttatattatgttaggaccacattttttttcttaacatgatttgctcaatctgatatttacatttagtagcaacatcatttcttaatatttttggtgaaattttgtcccaattactgtcgatatcaattgtttctggccatgttctttgctcccttttcctctgtttatgctatatggttattttgttttttccccagaaatatttctccttctttacttttgtggtgtcttactgttatgccccttggtgttttccaaggttgcatctcttgctgtgcactgtcacatgcatttctctttgtgagcgacagcaaaaagaattttctacatccttagttttgttaaagtcagtgttatgaagatcagaattggagtctgtttcactttattacccatcacaatcagaagcaaaaatactgtaaaggcatacagattcattcaaaggaagcattgactgacaaattctcagatgtctttcaactatggattacttagaaaacaacttgctagagtaaataattattatttttttgtctttcctttttattattttcagcctaggctttctaacaactagctggtgaatatggtaaagttgaaagtgtcattatcatttgttaatctgggtagctcttttaccatctccacagacaaacatgtagagtcattgagcagaatttacaagaaatgccttttacctggctttccttttctttctttttttct

SEQ ID NO: 107120 - DNA, 1017 bp, Homo sapiens
tgcttgaaatagttgtgttctctccattttgtcatgtctatttttctatgtgcttaagaatatttttactatcagaacagatcatttattatttatgttaagataagtttgggatttgcttctcaagtcgtgttatacacacaaagtgacatttccagaagttttcatatcaaaaataagaaacaaacttatctttcttagatattgtgggggctaaatttaaagataccaaacatatatatttgctttccccagccatagcatttttaaacttcagtgattgaaaaatacagaactggagtgctctattgacacaaggagtgaaacatgtttttgctttctgatgtaaaagccacaaatatctcgcaagttatcagccatcaaaggaaaaatgtaaataacaataactgtcatggagagcccaacactggcctgtgcctttcctcattttactttcagatatattctttgaggtaagtaatactagttttccagttttatagacagaaaagggaagcttagggaatttaaactcagttgcccaagattatgtagccaattaatgtaggagtcagaattcaaaatccaagttgatctgattctagagcttattcccttaaccattatcctatgttgtatatgttataatcataagttataaaaagttctgctcgagcataaatatggttacagcatatatgcaagtatttcacattattctctgttcaaaaataaatggatattatatctttatccacgtaacaaaacatataaatgaaattataaaattatttatgagatgttactatgatatcgatttacagtcagagggaaaggcagtaattatagtttttctttttttttttactgtttacttatatgtagtcgtcactgaaaatacgttaattaatttatccattaaaaaactaaattcttgaagtaaagcagctgtgtaaaggaagcaagttctgaatttgtgtgtacataaataactgtttgattcagaagggaaatttg

SEQ ID NO: 107121 - DNA, 1107 bp, Homo sapiens
ctggtcatctatatgccaaatacagtttgtcatgagtaatccatttagggtacaaataaataagtggctatatttgaaatgaaaatcactttctagaaggtttggtagtcccagttactggttttttttttttatcttgagttgcataaattggaaaggatgacctggaaacaaggtcacaaagataacattggcatgaaagacaattcaaggaaatttgtgggcagaggaccacattgccattttggtgaagcagcttttctttcttcaatgctgttattgcaaaagcacagacagagaaagtcatgtggggacgctcagaatcaaaagagacaaatttaccactaaagacacatgcagaatgtactaaaattatgggtcttatttttaagaaaaaaatgtaaaagaaacaatctaccacagtataataattttgaatttaaatatatacatttaatctactgtgcattttctcttcagtagtatatctatcaattctgtatgcattgcaatgaaatatttacctgtctctccctttaatcatcggagaagtctgcattcttatattaagaattgtgctagagtaggttttgtcacattgacaatgtggaatatcatcttttgacttttaggaatagttttttttcaaatgacttcatttttcacatactatacgagcattcctgcatgacttaccttgaaaaagagaataaaatgaactaaatatacatgctttgacatcagtggccttccttcctgccaatttaatgaaagactctacaataaacttttcatggcaattgtgagaaaataacatttctttttcttaataaatcttgtttttctcttgcatgctgagagattttcagtaatattctctctatatatctttttttagttatcattgtttgcatagaggaaaagagagaataaggaaaaattctacttaaaaaaattacagataaaaaaacatagctgatgttttgctttcgtttttaattaagccaaatcaaaagctatgtctccattcttctgtgctatcatttttgctttttgagatgataaagtcacgttgtttttacaaaaatatgaaattaactagttgtg

SEQ ID NO: 107122 - DNA, 1053 bp, Homo sapiens
caatgtcttttatattacaaaaaccatataattacatttttcagacatgaaaaatgaattagtgctgcattatatgtggtgacaaattttcttgtttgttctaatttcactgaatagctacagtaagcttctttggcacagtttagaatagctcatttggctctcaatgcaaaactttggttaatatgaagagaccagtactgtactaaagaaacaaatcacatttttaagattctagaagacaaataccagtatcaaagattttccagtggaatatcaaatatgattcaaaattgctaatgataggcaaagtatttgccaaactagtaaaaaattatttaacttatataatgaaggctaaaatgttcagagctaaagcaaaagtttgaagttactataagatcaaaagtagttagctatgtcataaaactgtcaaaaatagtaatgggaactttggatgaataagaatataatacactgtcaccaagaggtgatcatgctatctctactttgttctccttgtcctatccctgcagttggggactgtattttaaaattatattgataaactggagagcacatacaggacaagtgaccaagaatttgaaggaaataaaacatgacaaattaattgaaagaactgggagtgttaagttagaagacaacatttatgatgaccacaaccatagtttttgaacacttaaggctctgtggtgaaaaatggatgagtgactcccataaaagagaataatttttggcaaatgagccatagagatattgtataaagaagaatgttctagaaattaaacttgttcctcaagcaaaaaggcccattctacaaatagtgaatacccagttcttggaggggattaagtagagtttggaatcggagaattgtttttagaaaaaatgattcagatgctggcttaaactagatgaacttaaatgtccctccttacactgaagttctctgactatgtaaaactttgtataaatatgtctttaccatctggaatggctgccaccctcatgtttaattagtacaaccaatca

SEQ ID NO: 107123 - DNA, 1051 bp, Homo sapiens
taattgaatttcttattttaacagaacagattcctgtagtcctcatgattgcaaagaaccttctgtgatatttcttctgttaaaagagcaaagtaatttcaaaatgctttatttaattatcacactaatcatctaccttaagaagtgtatccttaaaatttgttgtcatcagtatttaccgagagcctattatatgtaaggcagatataataaaggttctttgaattaaaaacagtgtcataagagtgcaaggacttaaaacaagaagaaaggaagagaaattttaaagcttatctaattggaggatcagaaaaagtttcatgggggatgagaggagatggtatttaaaataggtgtgagcgatgggaattatttgaattggcagagacagaagactttctctgagtacagggagcagctggagaaaatggaaaggaggaaaaatataaggcttatagtaaatgaagacttcaatgaactgagaaataattctggaaatatgattgggggatctatgacatggctttgttaaggcttagacattttgtatttaattccataggtgacaagggataattaagggctttgagtaggtgagccatggaattacctattaggaaggctagtcttatgaattatatggcatggattaaagagggaaagcatggcttcagtagagcagttatgaggttattaaaattgtttgaaacaaagttggtactagtcgaaaaggagaaatgcgatctttgttcctatgtcatgtttggaaatccttgaatgcttttggttagaatccagctagaagagctcttgtaaccatttttggccagcaaatgtacagacatagactttaacttggtgaaggacgtgcaagtactctggatgataaatgagacttgctaggaaacactacttaaaaacatgaaacaattgcttctctttttgatgcttgaagtacttgagtaaatagcctcaagtctatatggatcttgagaaatatttattaaatatttgagaggctttgctgctgtgaaaaatgattatgactacc

SEQ ID NO: 107124 - DNA, 1001 bp, Homo sapiens
ttacttttaatttaggacaggtatcatcctggcttctgtatacctttaaggattgatttaggtgatacatgtctcaaggggctcccctatctctgacacatatttgattttagagtttcattcaacaatgatgcattggtcataattgcccttgattttttagacaatttccaataaatgtgatcaaatacaatctacgtttgccccaaacaatacagtttctgatagctgcttgtgactatttaaatttaaatttaattaaataaaattaaatggaattcaaatttagtccctcagtcacactagccccatttcaagtcctcaagaaacgcatgtggctaatgattacggtggtatagtagagatagagaacatttccattattgcagaaagtttattgaatggtgcttatatatgtttttattgagaaataatgcaactgacttttagattaaaaatccatccaagttctccacaactctattaaacagaaaagctgaaactagcttccagatctttggcatcaagtaagacgctttttaagagttcagctgcgcccaggaacatgggccatttataatgcctaattttctatttaatggttttccttccttgaccttgcaatcaatataggagaaaagttttgctgtattcatttatatgaagaagaaaattattaggataccagaagttgtatttaattttttgtttgaaaatgtatacatgtatctagattctttgatgtgaacttaatatttaatgatgatccttaaaatatcagtatagcttaacatttctaacaatcctagaagtgagagataatagaatattttgacagtatgagtttaatttgtgttgtaaaggtcttagaagggtctgaaagcctcatgacaagtcagaaggtggaaggcattgtcaagatatctcatttacagatcacaaatatatactgtaccattgaactcatcttccaactttcttgtgaatcagatttggggtta

SEQ ID NO: 107125 - DNA, 1024 bp, Homo sapiens
gtatatcataactacacagaaatccttttagcatcttagaaaattctagaaactaggattatggctctgtaactaaatgaaacagtaagtcatttaaagatgttaattaaatgacctttaaaacactaaaaatcatctggaactgacactgccagctccacttctaacatatggttattgacattatcaaaaaaggatgggatcacctttgaaatttataaaactattagtcctgtccaccagagggcataaattttccacaggaaaaggacggaatataaaggtggaaaaatcaacggttgtaataactcacctttcttttgactggacatacgtttaactttgttttttaagacataataatttagaattgatttgcataggcataccaatagtttaatttcatggtgacccccaactctgatttcctgcagaatttattgcttctttcactccttggcagttcacatatattactatttattatcatgcaccttctttttatatgctctttcttcctaattatactgtccttcaaggacatagtcttttacttatgactctctatttccatagtaaaacacaataccttgtccaatgtaggtgataaattattatttgtcaatgaagatattaatggttttgaagtaatacaaattattgtagctattgaaaagtaaaattaccatagcaattgacagtttacagaacatttttacatccattatttattttagtctccaaacaccctattctctatttatatatgtcttaattttttctccaggtttgtggtagtaaataaattactgataaaaaatgaattttttataaatgacttttctaataggaaatatgtttttagtcctgaaagcaagacatttaatgaattttccttttaaataagacatcatgagattatttagtttccttcttaccacagtagcttagctatatttggaattcaaaatttaaaataatttatttttaactggaagggaaaaaaatccacattactcttctc

SEQ ID NO: 107126 - DNA, 1038 bp, Homo sapiens
acataggtgcagcattaaaaaataaatggggggttgatgtaacagggagaaaaagtcatatgaatacagaatgaagcagtacaacctagacctagcaggagatctggaaaaggaggaaagattatcagagaaaggcaatattcaagataatggcagatgcagtaacagaattggacaaacagaaaaaatatatgaatcctaagtttgaagaggcacacttcgtcctaaacagaataagtaaaaacaaattctgaacctagagccatcttagtaaaattgccaaaaaccaaacagaaaaaaaattaatagcaaccaaatataaaagatagattacctacaaagaaacaaggtccaaactaatagtacatttcttatcattaaaggacaaaagataacatagtaccttcagaatctttagggattcacttcacatatgaatatttttaaaaagttaaaaattgaaataaagaaaatacacttgctttattagaattttaaaactgtgacttagatcactcagaaaatgctattaataatgaaatgatattgagttggatagaccattgtagaatgatgcagagtgctaatttagcaagtaaggtcattgactgtaagtttccattaaaatatccaatattacgttccttttctaataatgtgatatgatttaatattttatttcattcaccctgatgaataatgtaatttacttattaatgtgacaacgttcgggctcttaacttgagattacaggattaaattgtgaatttttcagatagcttggtttataagacagagaagtttaaaggagcaacttcatatgctttgttttgctttttagcagctttaagattaaaggcaaatcaaaaggtaaaaaagaaaaattagactaagaacatgatataaggtcagattttgtattagaagttctgataataaatcaatgctaactgtcatttatttagcacctaattttttaacctcttgaattcatttaatcatttatttttatgttaatcaaagtcacaatgaaatacc

SEQ ID NO: 107127 - DNA, 1029 bp, Homo sapiens
cacagtagaaaggaacatagtattaaaaggaaggcaatctctaaaaggtgaatcatattgcatgcttgtacattgcttttgtgatgaatctcttcagtatacaaatggaaattctttttgcaatacttcagacaattcaaagaaaatcatatcattttacttatagaaaattgagcttgattatatagtgttattgtagaccaaataatttaggatagatgcagggttgaatttcttaaaaggtaacctggctttcagttgttttctggtacaagaatacccaagtaaaagtcacttgaacaataatatttctggttagctcagtggcccatgttctctgagattctccccatctttctcttacaggggcaagatggctgcagaagctccaggaatcttgtcctctcatgacattgtccaaaaccaaaaaaagggaaaacattttcttcacatttctctctccttttgacaggaagcaaaatgtccttagatgtactcagcacaatttccccaggtgtgggtatttaggccaggctctacccgaataagagactagaaatgggagtgtgtggaatttctagcctctatcctgggtgataggctctgccagtagtgagaagggaaagaaaggggactacgctgtgtcaaacagctactgataaatggtgtgtagcagagatgcttaaaaagaaaaaagttacattcttattaatatcaaattagtgtgaccctaaccagatgctgaaataaactatatttaagactattagattcaataaaactacactacttttgatttatgattttccttctcttactatgttataattgcaaatagttaattgtatatcatttattttattgctgattcattttcagtttattcctattgtattgccattcatggcttgccttttgaagcgagactaaaaagcatgtttgttggaactctgcatgtgtttttgattgtggatgccattcacacatagtgtgaattaagatgctcttgtatttttccattctttgatg

SEQ ID NO: 107128 - DNA, 1050 bp, Homo sapiens
tattaatggttttgcttactgtttcatgcttattgtctaggatagtagctgccacatagaagattctccaaaaagaataaaaatgtttgactgaatgactgctaacacactgataggttatccctttgcaatttcctttttcactcaatattatgttttttatattgttcatgttcattgttcatgttcagatttttcagatgctacacaatacttgtctgtgactatttaacagtttatttaatcactctgatgttcatttatgttgcttaatttttttaactcctacaaacaatatccaataaactttaaataagaatagcaaattaagttcaacgtcattacactgacaccatgtttaagatgtggcagaatgtttgatgttcgatttgaggattttggattccttggaataaagggaattaattcattttcatcattatcaccaataatgccatatcataaaagtttaaaagaatttattagtttagagactccccgctttttaacaaaaattaaatccagaggagatataatttctatttcttaggggagtacatattttctaggtttttatcttccatggtaataggacattgacatatctaaagctgcatatgagttcaaaacagaagggagaagtttctgagtgtcttctatgagcagctattgctctaggcattgaggatgtggccgtgaacaaaaacatctgttcatatgttcattcattcaataacactatattataccttttttttaggcaagtgaggtcttgaatgctaaaaatttaaaggcaaatatcagacttttcgttgatctaatttaagactttattcaaatttactaaatgctttgcctctgcttatttatgccagctttacaatttagagaagtggcacttttcgataattaaaaacagaaaataagcaagaaagaataaaactatttggtaaggagatgaaaataggaaaaatctaaagttaattttagaaaagtgcctcagagaataggtaaaaaatagaggtccagcaaagttaaagaactttccat

SEQ ID NO: 107129 - DNA, 1095 bp, Homo sapiens
aaagaataacttggaggttgactaataagaaagttggcataaactttcaatcaaatgaagagtttgcctagaggagactaattctctttctagcccatccaaatttgataaatggaaccagaggttatatacaactacaaggaaaaaaatgcatttaaccatgccacctatgagtgccagtgacttattttacttgtttttaattattcattcatggcaatttaaaaagtcatattttaagtgggatttgtttttcctgaagggcatttgaaggaacaatatctgggaaggtactagagaaattacaaagcccgagctctttcttataatgccacctatccctgtaagctaaacaaacaaacaaacaaacaaacaaacagttctatatataatagtttcaacacagaacttaacaagtctctttttttgtttgtttaaatctggctttacttgatttaattcctttttagaaagaaatttagggcaaaataaagtgtatattaggatttaaatttatgccacaatttaaaaataaaaccagaggttatatacaatttaaattgggctaaaaattaaaaatttgaggatttaacttgatatagctctcaggatctaaataaagtttaaattatcattaagacactgctaggagaagattaagattatgaaagtaacagttattgatactgctggacttcaaaggcaaagttcatttcttccattaactgcttccagagatgtcatgtaaaaaagttagtgtattagagaagttttttagctttataaagaggttttttcaaatttctcccatttttctctccacccacataaaatagtatgttcagtgaaatgccactttctatctttaattgttcgtatcatatatgcgaactttttagacatgaacatgacatgttcagctaggcagagttctcatagataattttcaaatattttccttggctgtaatttatgtattcatttatatcctatccgtcttttgagcttcagatctatatactcttttgtactctcatcactccgcactttgctgtttcttacctagactctcttttacacaatatgcacattttt

SEQ ID NO: 107130 - DNA, 1027 bp, Homo sapiens
agtatggtatgatcataagtcatttgtatttgccctccacgtgaaaaatgctcatctttaccaagaggctgttatcacaaatctcacattaggctttttccctttcctttatcagtctttaaactgagtttcatgggttccataggaaaaatactcagaatgtgataataagggcttaattgaaaaaagaaaagatctattatcaaatgaatttatttacattgcctaccatatacctcttagagatcacagttccctatagcatataaaatgttttatatattcttcagtaaaaaagcattttaaattgtgtttagcaggagattgtttcactctgcttttctgatgaacacattttttgagggtgtacttattaacttctcatttagctttgtcacttctgcataatagaagccatagttttcaacttttgtgaatgactttcaccttacattaagctgcgtgtaacctaggttaacaagggtagttggggccagagataacacctagaatagtacaatgaataagggagggtcacaggatgtggaggactgatttcagctatctcagagtattatactgggcccctttgtgtataaggaaggagagagttaaatgtggaaatatttgtgatcgtgtacaacatattaccaggcattcacgtgtgaatgcaagaatatgtctcctcttatcttcctcagattttttagtgataacattaagtaaattctgacatagtagtcctcttttagtggtcataatcattccgggcattttagtgaaatgttgtcattcttacttcctgttgttgccaataatttacctaatgtaagacatacaatcttgtacattccagccaagtttaaattaatttttcaagtgaagatttgttaataagggctttttactgaaatttaaacttgactttcataatttccacttcatccactttatttaaatgtaccaaaaacaaaagtagtcatgctttgtggtgtgacttctttataaacacaagctgctcatggca

SEQ ID NO: 107131 - DNA, 1016 bp, Homo sapiens
aatatatggccttttcttatgtgctgatccatttgcctaaagcttacttcccagggctagcccccactcagtctgtcagcttccacttatcactctctaagctgggtcggggctctctgtgcttcctgttgggagaatacctaccgtgtcaccttgcacatgtctgtttttacttatctatccttctgcagattgtgactaaaaatgatgtccatttggtcatccctgacgcctatgtttgatacatagtaggtcgtgtataaatgtgttattacgattgagtaggaaattgaactgatgaagagttaggggatcgttttctttcttattcgtctctaagtgctattctttgatatttccctctccccaaaatacttcctcaaacccatgacttctacttgaatttcctccactcatcatttccataggatcttcaccaaattcgagatgttgaggttcacagttacaattgcgccctcttgtggcactttatgaagaggcccagccattggccatttaggccacctggcttcaaagcctagtcccattcttgccatcttaagccttaggcttcttctctactgggattttctcatcatgggaataataacaataactaccccataggcctggaatgaaactcctatgagattatccatgaaaagcccctggaaaaatgttgggcatttgatactgtcattaaatattgaccatttttattctcggtctagagactcccagatctccacagaaaataaataaataaataaataaataaataaataaataaataaataaaatgaggttggaatacactcttcttaatggaaaatgagtgttagtgagtataagtaattgtaatcttacttccattgttaccttcggcattaaaatgtttcatttaaatgaaaattgtatttgcatttagaagttggtaaaaatgatcatgtccaacttatacaaacctcatttatggcataagatttctttaccagtgaagtgggtagatatgacct

SEQ ID NO: 107132 - DNA, 1035 bp, Homo sapiens
gaaaaattactgggtattctggagtgatttatctatttctactcacattcattttccagcatgcgtttttttcaaagtaaaaaaaaaaaaaaggtatgatcaaggatcaggttttgcagacataaagatgacagagaaagctcatttcgtcactagaataatacatttcatatctttagcattatctccttatatgtaattcgcattgaagttgataataaatggaatatgtgctcagtgaaaaatgtttggaaatactgaaaagcagaaataagaaaatgacaattaactataaacgtattacacagaaaaacaatacaaaatacatttttgtaatttttttactctagatatccctccctgcctttccccaccaaatgtatgcacacgcatatctatatgctagatatccctccctgccattcctcagaacatatatatgcacacacatgtctatacctgtatgtttttcttatgcattctgactctgcagcttacatgatttgtgacttttggcaagtaacttaatttttctgtgctttagctttttaatctttacaatatggatagtattaatagccatgttatagaattgtaaagattaagtgaggtgataaatataaagttttagaaacatgtctgaaataatgtatattattattagaattatatttttaaacattttaaattaacaaatctttctcatttttaattgaaagattaacccactactagtattttgtaatattttcactaagccataatgaaatcttttcccctcatgataatggtggtaaacggaacatctaaaaaatatgttccatgcaaaatgcatcttcacacagacttattttgccattttagtttgatttttgaagacatgagttcagcacatctgccaaatccttttataagatgctacattcctgtttttattttagtttattttatttatgaaaagttcttttcttctccactccacccccagacagtcattcctctctgtcctaaaccataacactgctgtacattgca

SEQ ID NO: 107133 - DNA, 1030 bp, Homo sapiens
gaaaaatttgttgctgttgtgcctaatggcaagcagtgtggtggttggatatggtctgtactgcccaagcgaactctccacattgatactttaacctctttgtgagttagctttaactttataactattaacccatttattgtttcatcttactccagagtcattttaccgagggaaaaattgtcataactatgtagtggtgaagagacataaatgtgcatttaagaaaaacaacaacttgtagtctttaaaatccctttagatgactttatttttgttaaaatttctgcagggtcttcgaagaaaaacataaatatttctgagaaatctggatatttttaggaagtgattgtgcattttgagaaaaataccaattagattacattgtgaccttcaatcaggaaatcttggttctgatgatttgatatttagtctcgatgttttgaattttatatattattcccaagaaagaatgtaacaccaggaaaatttcactgaaggagcaaacaccaagtgaatacagaatgtggcagaagtgcttatgagcaaaatacttagttaaaaaaaaaaaaaaagcagagctggacgcagtggctcatgcctgtaatcccagcactttgggaggctgaggcgggtaaatcacctgaggtcaggagtttgagagcagcctggccaacatagtgaaaccccgtctctacgaaaaatacaaaaaattagctgggcatcgtggcaggcacctgtaatcccagcttctagggaggctgaggcaggagaatcacttgaacctgggaggcggaggttgcagtgagccaagatcacaccattgcactccagcctgggcaacaagagcaaaagtccatctcaaaaaataaaaattaaaaaaagcaataaattgatttacagtcaacagaacacagacattagaaagtagttgaggcaccagagtctatggagaatgaaattaagatgggatgaaaggcagcatttgaatccattgctgtttaaatgctgtatttctgttttcctcatg

SEQ ID NO: 107134 - DNA, 1034 bp, Homo sapiens
tggttttctaattgtgcatggggatttttaacaatcacactttgggcttcatataaaatggagtatatttactctgtcctcttccagggtaacagctggatgaatctgcatgcatgctttcacttgaaaaaattaagtgcccttggagggagaacttcagttataagttttgtaaggtgttttttcaaactctctctggactctgctacgttggttgagtcataaaattgttctgcaattcggtttgtcagagaaaaaagccctggaaaaacataacttcaactcttctttttacaagtgagaaaatggatttttatagggctgaaatgcctagctaaagatttcaaagctggtgacaaaattaggatcaccagatccccctttctccggtgtagcatctttgtacaatgacatgaaatttcctaaagctttttaaatttttttaatgttttgctattgcacaataggcttatttttgtctttaggtccccaatcaattttttttctaatgaagattaatatgcaatagattctttggcgttggagtgcgagattctttccaagtccttggtagtgtacttttttaagtttaggcattccaaaggccgttagcaagcatttggattatgctaatgacttatgctatccatgttgcacccttgttgatgaaacagtatatccagttagcaaatgaatatttatttatctaaaataaaatacaggaagtggtattagcagttaagtgtctcatctattattgctattccaacataagtttagattcattaagagaaaagaatacagttataaccaaagtagtttcaattcacagacaacttatttgaggcagaggatctatttttcttgcaactgtaagtaaggacttaagtagatttataaaaatttatacaggacttctttgagaaagaacagcccctataacttcacactacacaaattaacttcactgtagagacttcgagacttaaagtgccccacagcttcatgctccctataacttcccagccagaaaa

SEQ ID NO: 107135 - DNA, 1759 bp, Homo sapiens
ccatatttgtaaggggcttcagagtcttcagcagaaatgaaaatatatctgcaagagtttctaatttagagattaaatatctaaaataatatcatttactaaccaaagtagtattccaatatccagggcttagaagagtctggatccacactttgccacccactgtgaactttagtgcaagttagaggtaatttgaagaacactacagagagaagaggaacaaagcttcttggcttttgcctcattgggatgatatttgtatatgctagttgtctagagttcaaaaactgtgaggttttgactaagttgggataaatcccctttcaatgtattagttgtgatgccacatttctgatgttaaaaggaaataaaacggaatacccttcagaaacattttttctgtattccagaataaaatacactattctcatggtggtacctgcagaattcagatctttcccaggatgctatgtgttcctttagtgctccttattctggatatttaaaaaactcaaattttactttctacttaacccctacattcttgacataccaaagaaaaataattgaacatgggattgaggaacacagtatactcttctgagcattttcttagaaaaacattctccctacttttagaatagatatttctgtaggaaaaatgtgttccctctgtatttctgcatccccagcatgacaacaaagacagacatttcctttctggctaccatttcctatcttcaggtccattggcctgtgaggcttttcttccaggacacattgcctctcattctctcatttatctaagatgaaaaatgtgctttgacagttttctgaactgcagttttattgatgatgttactaaagcctttgccgttgaggaccaaacaagactcaaaagtctactgacatgtgcccatctcaaaaccatcttttagctcttgaaaaccagtggcatttttatgtttataaattggttcacatgaattcctcagggcttgagtgacttttgagagttactagtaggagaaaaaaattatttttgctaccgcatatgctactgtagggcttggcttgactccccaatttctcttcagtattttgcctcttccaagtcctgctgtttttcagtttaaacctggttcttaagttagttggctctcttgacgatgtctaggtagaataaagctgttggcatgatccccctttgttctttttgttttctatagttgccttttgttttctttttaccgtgtattagaactgattagttaagctgataatatttgtccctgagtgtcagatataccattcccaaaacctgagaagcaaatttggtttgcatatcaaattctaattactttgtacccactctcactgtcattttccttctgcatttgagtaaatcttgttcctagaaccggaactttctggatagtgacctttaatatttctttttaatgccttagcttttgagtttgtcatatttttgcagtttttttttctcttcatcaagtcaagatgaaacatccttacgtagccaggacttcttttcactttactgttcattggcaagctccatcatgcctagttagctgaattgacgctcactctgggcttttcttatatccatagcacaatcaggatttgtccagtgctgttaccagtgtcacagtgcccactattcccactgacactagctgttacagagcttgcaggtaaagtctaaagtagaagctacctcttccctggagatctt

SEQ ID NO: 107136 - DNA, 1045 bp, Homo sapiens
atggactattttatttaatgtaattatctatattactagttttagatctatcactttgccctttattgctctgtcccaccaactctttgcttgtatgttttttccttttctcttaccttcttttggatagtcttttttttttttttaattttcttctgggctctacatgtgcactgttttgtagacttgctttgtattcatggatggagatactagttctgtcctttccatgtaaacatgtagactaaattgccttcttagatttctcttttgctctatgactttataatagcttcttcccctcttcatgatcggggacaaagggtctgttatgtgtattagatctgttcttctgaaataaattattgacgactaccctttaataattttattttcttttgtttgtttcttctcttaggaattagaaattaagaaaatggccaagattggtaataaggaagcttgcaaagttttagccaaacaacttgtgcatctacggaaacagaagacgagaacttttgctgtaagttcaaaagttacttctatgtctacacaaacaaaagtgatgaattcccaaatgaagatggctggagcaatgtctactacagcaaaagtaagtgagagcttttatattcatagatttttaattttatcaacgatatttaaatatcaatattgaaagcagatttaaaagcacctcctggtgtatatgtgatacaaaatgtgtgtaatttttagtaaaatgagttataatactagataatccaggtaattacttctagattctttattgatatgttttaatacaaaatttcttgtttgaggacaatccgttttctttcttcttttcttttttttttgagatggagtcttgctctgtcacacaggctggagtgcagtggcaagattttggctccctgcatcctccgcctcctggattcaagtgattctcctgcctcagcctcctgagtagctgggattacaggcatgcacctccacacctggctaatttttgtatttttagtagagacgaggtttcacatgc

SEQ ID NO: 107137 - DNA, 1023 bp, Homo sapiens
atatcgttaattctgtatctgttgcttgtcttttgtaagtgattatgtgttatgaccataggtggttacagctgccaaattatttttaaatggtcaaaaagaagagtgctatttaaacatctgtcttaaacaaaaactgtcataacttttcttttttctttttccattaggagaacattctagttggtaaatttcaaaatgtgcttgacacctgccttaaatagcacagacctattgtgcacatctttaaattatttcagctggcagaaaagaattacatttaaaactgaaatcaaggcctcaatacaaagattatcctggctcttttctatctctgtgggcctaattgaaatatgtactcttattttagacacgcctctgttaaaacagaccaggttttcctggtctcagacctatgatgacttgtccctttgatgtcactactgtgaattgaatataattagtaaaaatagacgatgaataaataacactttatagtaagaaaacaatatattttggccatctaaaaatgagaattataattatatgaattataatttaaactgtttaattttgtttaatgtgtatattgaatcttccaaattgaagccattattctcaattaagtactacaactatgacaatgcttgacctacatttctaaaataaaaattcacattttttgataaataaactacagttttaccagaaattactatctaaatgtgtattagcagtattttttaaggtgaaattgccttggtatctaatgaatgtgtagacagggagataaaatgaaggattgccagactagttagaatagaatttaggattaggttagttttgaaaaatgatgttgtaatatatgggttctaacacatcctaccataaaaactggaggagatatgtgtaacctggttaatttgggatggtggacattttgggctaatactgacaaaatacatcttaggactagtatacatgtgacacggattgctaggaggaatgaaaaactaaactgta

SEQ ID NO: 107138 - DNA, 1057 bp, Homo sapiens
tctcacgcctgtgatcccagcactttgggaggccgaggcgggcggatcacgaggtcaggagatcgagaccatcccggctaaaacggtgaaaccccgtctctactaaaactacaaaaaatagccgggcgtagtggcgggcgcctgtagtcctagctacttgggaggctgaggcaggagaatggcgtgaacccgggaggcggagcttgcagtgagccgagatcccgccactgcactccagcctgggcgacagagcgagactccgtctcaaaaaaaaaaaaaaaaaaaaaaaaaatatcccagccctcagtgagcatgcattctagttaagagtcattgttatcttatagtgaccctgggggttgggtgtgattagggggaggtctttgttttttctaggcaactcctttaagtattcatcagacttgttgccagtaaatagttaatcactggttcatctggattctcgttttgtataggaagagcaataaaagttcaaaatttgcagattttttaaaaggtctgcctatcctttgaaagtctggtagtctatataatccataaaatatcaatttcagaatctattaggtgatggagctgaccaatttaaatgcctgtaaagtaagaacctgccacagacattttactgaaaagacaggaacttcattgaatatttgatatcaagatagtcactagtgtatctattcacacattaatgattatcataattcagtcttctgggttagtatgtatattagatgatatattctccaaacttttttttgagacgaagtctcgctctctcgcccaggctggagtgcaatggcgcgatctcggctcactgcaagttctgcctcccgggttcacgccattctcctgcctcagcctcccaagtagctgggactacaggcgcccgccaccacgcccggctaattttttgtatttttagtagagacggggtttcaccgtgttagccaggatggtctcgatctcctgacctcgtgatccgcccgcctcggcctcccaaagtgctgggattacaggcgtgagccaccgcgcc

SEQ ID NO: 107139 - DNA, 3971 bp, Homo sapiens
ctttgtatgtgactcccctggatcgagtcactgagtttggaggtgagctgcatgaagatggaggaaaactcttctgcacttcttgcaatgtggttctgaatcatgttcgcaagtctgccattagtgaccacctcaagtcaaagactcataccaagaggaaggcagaatttgaagagcagaatgtgagaaagaagcagaggcccctaactgcatctcttcagtgcaacagtactgcgcaaacagagaaagtcagtgttatccaggactttgtgaaaatgtgcctggaagccaacatcccacttgagaaggctgatcacccagcagtccgtgctttcctatctcgccatgtgaagaatggaggctccatacctaagtcagaccagctacggagggcatatcttcctgatggatatgagaatgagaatcaactcctcaactcacaagattgttgactaggaggttaccaccattgtgatcaagataaatgtggagtattaaagttatgtgttgattgtgtggttcatttttgtatttatttcatttaaaatcatgtgacgcagaatagttttgcaatgtgtatatagttgcaggcaaaaaaaaaaccacctcactgcaaaacttattgttaattttagtcaccaatggtataaagcaaaacctaggtttagagtgtgctaggatacctgaaacctgatggttatctttaaaattaatggtttttctcctgaaatgtttgtgcatggaagaactgccctgcttttttaccctgttgccatgtatgattattccttgtgagattacttaattacttggattgaagactagcctattgaagctgctgccaggcaacaccacttaacagtaacttaaaggaattattttctttagaggatcctcttcaaaaaggaagggagatagtggaaaactgttcttatatcttcagatccctagcagaaatgactgtttatttcaaactatgttttacttgtatatgatgtagtcaccttaactatctttcaattccatacttcccccgcccccattttaaaggcttattgttgtattttgtagcagcttcaagtgaccaaaagactaaaatctttcaacgtcaatgccaaaagccaaggggaattttgcagtgacaggattttagtctcttactatgaatactaatttcgaaccatagctttcattttaagcatcatcttgaatttctaaacttttttctatgtcttggtgttaaaagatttcaagattggcatttttacttaaacagacattttatggttgagttttctctttattatagagaattagtaatttttttttggctgacagatcagataaaattactttctattcattaatttttctctacaactttatgagtttatttaggtgaatagtctagactagaaacaagtttactttatctgctttgcctctggtggtacaaggtttttaacatggatggtaaacaattgtctagaaattctggcaggttttttgtattggagatctggcagtatcctgcataactttgggtgaggaaattgttctcttaaagatcagccatgttcaggaaatgatctctgtttgaacctcactatcctgtaaggttatccaagtagcttagcccagctaagttctatcagagacccaaattatattttttaaaaatttaacagctggaaacttggactagagctttaataaaaaatcttaaattctttgaaattcaagttaaaaatacttatatatttctattacaaagcagtgacaaatgatgccctgtgtgacttggagttatctttgacttttaccacaaatcttcatttataaaagaaaaagccaaagtgaaaaaaagttagattgtgtatttttcagtaacagctttccatgtcttaagatttttttacagacttaagtttctaattcaggttgtcaaactggccatttgacttcagagatttgttttcattaaaaaataagcctgccgccaaaataaatcacttatcaaaatgtgaactgttttcctcatgttcagttatgttaaagtagtatgataaatgcatgcctagagtagtgctctcgttgatgaagcacatgtatgaggagaccagcagcaaaacataaccatatgtgttttgcgtttacttcctctagaaaagaatttgcaggcaaccatgtttaatttgaactatctaagatggtagattttagaagctaggaataattgagttttatagcactattttcagaatacgaaaagatacacaatcattctgttttttgaaattccatgtgattcaaactgctccctattatttgggtattaatttgcactaatagcaaaatgtaatggcagatcagctttgagagtggtcctaagcagtaaactggatgatgttgcattagaaaaacatcaataattcatatttaagttttagtagttactactgatttgataatcacttaaattttatatatcttaatgtattttttcagactcctaattaattcccacattcactgtaactaggggcatagtccattctgttaggattatatcctctccttagaaatgttttccatcctgttgtggggatttggtattaatgtttcttcattgattatggaacttttgttccctgaagctagttaactgtgtctaaagttaaataaatacagcagaatgattgttttagcctgctcgaactgatacaaatccctgaaaccatgattggcatatgttagataacaaatgaggatgtctaagaggcatatgctgctttggaggtgtagtgaacgtgtgtacagaagttttcaatcttaactatatagtgttagtgtgatgctatactattggaaaaatagcagcttttttctattttataagttgtatgcataaacataagatttgtaatgtttcatttataaactgccttcttcaacacatgttaatagtgttttctcaaagtattgatagtatgtcttccagaatttcacaatatgcttacagtaaatatttcctagcttgttgaaatgttcaattctttgttggctttcttcttgattctgtgggggtgtataacaagcctgaaggacattgtaatcatttcttacaaggtgaaaattaagaaagattgtgtatgagagcctatatagttgttttatccattatcatctttgattaagactttaaaaaaatgctatttccagttaatgcatttggccctattgaattttcagggaccagaaaacattaaaaagttctgcatcttataatggtaaccaattaagcttgagattgttctgaaagtatcaattgctttaaaactgttgtaagtacagttggcaagatctccaagctgaaacttccacgttaaaacttttgcctgtaagaatttgcacatgaatgttaatggaaaacacaaaacttaagatggcccaaaacaaaagccacaaacagttcatcatttggtgcttagtctttgtaagggctctctgtggtttgacttaccccagctaccgttaaatgaggacaaatcaccttaaaacatgttcatttgattcataacaaggaaaattgggtctatgattttttgccaatcttagcctaaaagaaattgctttagcttctggtcagcactgattaaaatgtgaatagtgaagtggctatcctaaactggtttatctccacccacactatcatagatttcttaggtaaatacaattcttatctagtggtattctacttgtattcagaatactgtattaaaattttactatttcatttttgtattctgtgcttattttttttgctcacgcatgtatgcttagtataaatgtgtcacttctaaagttttgtctctgacttttagaaataaatttcagaaaaattgtttcaaaagattttgaaagcacattttgttttgtgagtcaatgacaaatatatttcctgattacaa

SEQ ID NO: 107140 - DNA, 1216 bp, Homo sapiens
aggcgcctgccgccgcctcccttgagactgccgccaagtcggctgtcgagttcccgggcccacagctggcacctgggactcggccttgcccagctagcggggtcgggacggctgggcgccggcgtgctgggcttggcgccggaggagagagcccagacgccgggaacgtcccgggccccgcctctcccccgcccccgcccgaacccccgggcctggggagctggaggaggtgccaagcgggcggaccaccgaggaggacctgggaggggaagtgttagggtaaacgttgggatcgggtttgtagttacctataaagtgattttagaaacacctgcgtggtggcagttgttgacgttcttgttcatcttttcagtcaccctccttccgtcccccattttttccttccatttgtttttcgtgttttacagtaaaggcatgacttcctggcaccacagggaaaatcgggtgcaagcccagaaactatttccccaccaccacttgttgaaaaactgatttgaaggcatctccggggttgaacaaacggaaagtgccaggatttgatgcgtctctggtttcgctctggagaccattccctgctaagtatcaagacgaaaaaaactggaaactaatccggtaaacatttaaacttgaaaacttatgatgagttttcttttgatctagcaaacgatatgctttttctcttttgttggctaattcctgcactttttaatttcttcatttgttgaaaatgttttcttctattgaaaacacttttgttcttcgggtatgtaaactcgagcatcctctactgggtggaaatttgcctctgcagtaacacaaacagacttcttgaaattacgaaaacattggaaagtataggcctttcacattagcacaaatgattgagcattttatgctataaagaattacatgcttattgtttttgaaatccaaatatttaaagatacaagactttttacatagaaagtaagacttaacgcattacggggcacaaatatttaatatctaccacaactaggttagaaccattaaccatatttggtatagttacctcatatttaccacaactaggttatatttggtatatttaccacaactaggttagaaccattaatcataattggtactgatttgtgagggagtgtaaaacacataccatttacttaaagtataaacgtgtaatggtaagtactag

SEQ ID NO: 107141 - DNA, 1861 bp, Homo sapiens
gaggaggaggttagcctaggcatctacggcggcggcggcggcgcaggggctggtacgcgctgggcggcgagagcctcatggcggaggaagagagcgaccaagaggccgaacgcctcggagaagagcttgtggccattgtggagtccccgctgggccctgtggggcttagagctgcgggcgacggcagaggcggcgctggcagcggcaactgcggcggcggcgtcggaatcagcagtcgggattactgccgacgcttctgtcaggtgaggcgtccgttggccgccccgacttgtcacccgggtcctgggcctctctgcgtctcctggtcttctcgtccatgaatctggtctatgtccagtgcccgctcctccccaacaaggagggtgaggctgaagctccctcctccacttatccggcttggggtggggggcggggagcaaggcgagggtgacccacgggcttagggttgctgagaaagtgagtttgtcggggatggaggggctggaaagaaggaaggtcggctgtccggaaagctctgtcctgacatgccttccctaccccaaacagaccttcctgcccgagagtcccgcctttcttatgtttcctaccctggtctttctcacctcatttggcacctctggtaacattttctgccttcccctctccgccgattgccccccgtgttctcccctttttttccgggatgggagacatgccatctttcctgtcactgccactgttccccctcttctagggtctcctgtcatcccctcacaagatcccgctgggccggttctccagttggcgtagacgctgacccacggtgatttagttacttttttcggacagagagtgcgttaaggcaatgtgattgtctttttttttaacctccttcggttgacacacgcactcttttctaattaactgctcataatgaaagtaattttccttaaactcttgctccggttaacatcaccaacccccctcatccttcaatatataatgtattttatttagcctgtaaaatacagtgtctgaacggtgacattaaattatttactcagtcgaccgtcacaggggtttgatgttgttcaaagtgtttgtaatcaaatataacaaatatacccctacttttttaggggtaaagtttgtgtactctgcattctcatctacctgcatttgtaatttaaacggtttgttcccattcacaacaatctttttttgcaagctattttggggaaaaaaattaactgctccttttccatcccatcccttttaaaatgcgtccattaatttgggtgtatagggttcagattctggctccaccatctcctggcagaaattattaccttggacaagttactctgtgtctcagtttccccttctgtcaaagaggagtaatagttaaataaatatgtgaagggtttgaatcaggtagctattaatttcgttctgataacaagtaggaaataaagttaatgagaaatggacatcatgtttgctgacatttctttcaatgcttgtaagggattttttcaatgcttgtaaggaatttctttcaatgcttgtaagggaaagcttgtaagaattcccttacaagcattgaaagaaaaaggatggagttgacatttttcaggtaagtttttaatgctttaatttaaattgccttttgatttaatgttttcccccagtgtcataaagaagttggtttgaagagtatgtcagtttctttggcattgctatttaatgactttcttgaaaatgtatttttattttgataattggcattcacttttattttgataattggcattcactgaatttagaggttcagtgtcttgttttcagagcacttgttttg

SEQ ID NO: 107142 - DNA, 1053 bp, Homo sapiens
agcagggggattatttaatctaattcctagtcgaagatttctttttaaaaatttggttttctgacactgaggctaatattaagtataataatttgtttttattagtgaatgacttaatcgtgagtaatgcaatggatattgtgcagttggggtatgtgacagttaactaagtacatgaattatacagacaggctagtggtgtttcaaagaaaggctctggtttatcttcctctttttagagggaaatatgaatcaaaatttcttggcagttagttgtgtgggcaaagggagagaggaaggaacacttcttttccagaggggtttttgtgtcttttaccataaggaaaagtaaaacagaagatacagtgttaataatattggactggccctatcacatcctcccttggctcttgttagctgactcaataaatgcttaaataaaactggctcttaactgatacttaatttgctttgaggatgaaaggtaggggaaagtaacttttatggaaggcctactaactcttaagcttcagacagcaagtagcatagttgaaattgaggcatgaacaagttaaggtgtcttagtttccattatgtagacatgctgggatttgaactcagtcttcagtttctgctgaaaagcagtaagtaaatcctcaattatagaggggagttttttgttgttgttgcaagtgatgtgaaaggaaaaagaagttactggaaataacttggtattatggatgaaaagtttagaaagtactctttcattatgacacagtagtaagaaatacttcaagaagcagactgttattgtctgacttgttaagtgctgtaaacacttttctaattcctgaaagttttaataattcaatttgtcaccaaatacactgaattttttgtcataaattgattgtaaactaaggaagttaagatactttcttcttagttcagtgccagaatgaatataatgagtaataaaaaaggatttctggaaccactttgatatgttgattgaaatataatttaaaattatttcatactacagtggggtta

SEQ ID NO: 107143 - DNA, 1092 bp, Homo sapiens
tggctgtacccttactttgggactcttagtgggtaccttttatgcgtaatgccgatataaatggcagtaaagtttttaatgatcctcaaatagtttttaagtaacgactgtgggccaggcactgtaataggtgccttaagagatggtattcacagaaaagagagtttgtcccatggtattataaaatacattctaatgtctcttaatttagagaaattaaaatttgtctcaggaagaaacaatccttatttcttggtcttgatataggatttacataatacttattatagctctatgaatagttttctagggtataatacatttttactaattcttgctattaattgggattatttttaatttatctttaatttttattaatgtacttagttttaagaagtcatataaggcctaagtatcaggaattgcattttggtgctaatggagacctgacttaagtggttcaaacaaggtgggcatttattatgtaaaaaaatcttgaatagatagtgtagggatggtacagtggccatactatcatttgctctttcttactagtcatccttgtcttagcatcccgagtttgtgtcatgatccagggtagttgcttgagtcccaactatcacgtctgacttcccagtggcaggagctggttgtctctgtggtgtaaaccaaaacaacttgtcctaaatcctacttaatgacccactttcatcttgtgagttatccccatctgaaaagaatgttaggaaatttttctagatttttgtttctttgatcaacacatgcctatgattctgtcagtatggaagaaaacaagaatggatattattgaataacgagcttcttcttttttttttttttgccacagcttataacaaaaaatagcagtcatgccctgtcctcttcctttcctacttcttattctccagaggctatcactggcaactctttcagttttgatatttacctctatatttataagtaattttttccctagttgttttagatggaatcagttggcctagtacaggaaggagatagggactatcttactgtctcactattgatctcactattgagcatgttcac

SEQ ID NO: 107144 - DNA, 1001 bp, Homo sapiens
tgaatgcagagtgaccattagtatgtacctttgttcatcagtgcttatttgtctcggtgaaggtgtgaaaaatgagttacattcattcaggattaggtgtagactatgataaatcagttaattaactttgagacagaaagggacaggttcattttcgggctccacttgtggcaaaacatagcacagagaagtgaagggagaagaaaagtggttgtatcagtacatattaatagacaggtgcacaaaattgttctgtgtactgtgaaaataagtgtgcatatataatgtcataacaaaacatgtacaggttgttaatatgtatttctacaactagagtttattgacatcaaccagtatgttttggttactctaaagttgaaatattataaatactcttcccagtgatttgatgtgtgtatgttaatgtttttaatatctggaagctattattggaatgctttatatatgtatatgctgtatatatgtatataactcattttgaatgctttccatgaatcagggattgtgataagttgtttacctgttttagctcatttaatccactaccctacaagctatgtgccattattctcatttttataggtcaggaaactaagaccagaagagatggcttgaccaagtcctgtacctagtatgtgataatcagactgtaacctagccagtttgacagccaaaagccagcccgtgcacttagcctctgcagtgcaatacaatacattgtattgtatctaggaataagcatttggtatctattgtaccatctatgcatatatatttgatatatactgtagcttactaaagcagttttgattgagtggaagcagtggaatggacactgttaaaaagactcaaggcagcagaaactaaagatgttcataaatgtgaaacagaagaaaaaaatcaaattcaatctagcagaagttccccatcagaagtgattctcaggccaggcgccgtggcttacacctgtaatcccagta

SEQ ID NO: 107145 - DNA, 2322 bp, Homo sapiens
ttccgtaatgttagagaaggaaagtcaaggagttccaagtgcatcaaaaagcattcaatatcaagcaaattttgctcactcttgtatctgacttaagaaaaaaatcttaccagcacaacatcaaacccaagactgacctcttaactttgtttctcttcagcatagctcttcccatttacttccctgagacctaactttgactttctggagcacttttctttatggcacaatgccatactgtatgttgtcgtttgtggtaactattcatctgaaatgcacctgaaatgcttcagatattttaaggtaatctccctgctttttaatttatcaaatctgtacagattttatattacttgtatagtagtctcagtcttcaaggtgtggtttttcagttgcttttattatagactttctgccttttaaaaagcaagcttttgccatattgccatagttggatctccggtctggttcactcttgacatttccatcccatagttaccttctgtccctcagttaggtacttttgtaaccagtcacccttcctttattatgagtaacatctataattttttttccccattttcatctttaagtacagttacttctgatatatatctcctttttcttttttgatatctgtctagtctagcctctaagagtgaacttttattcctaaggaagtccctcttttcttttatcttaatcagtatgccctccttttatttttctttaatttttccactgttaattgtgagtgcatcatctgttttgttttgttttgttttgttttaaacaaatttagttcttgaaaccgagcatacctcatcctagagttggtgtttgttcatctgttattttaatttgatcttcatgtacttcttgtgcgtatattttggggttcccttgtccatgcaccaattttaatatttatgacggaagcatttaatatattactctcagctctgattttggaatcaaatgaaaaattggcagggatctaaattcatctaaagcctttaaaatgacctgctattcataagaggaaagttggatctttaggcagatacctaagctgccacatggaggactctgacctgcctcaaaggtggtgcaagtagctaactcaagagggatatgagaaccagaccaatacattaaccttggccaggagctgagagactcttattagtattgttgattttacttccctggagtaaaagaattttagggaaggaggaaaatcatcctctcactggtattttttgagatagagtaagttcttattttataaacaggaatgtagaggaaaagagaaaatgtttgccccaaacttaccatgtccagaatttgggaagaagataaaaatataagaatcagaataggggaggaggattgtgaatgaatttttgttgtttagccttctcaactcatctctgtttcactcaccaatataggcagtgtgctttccatttctttgccctggcttatgttggtagttacaaaaaagagaaaaagttgcagacttaaattgtttttttttttttttttgagacggagtctcgctctgttgcccaggctggagtacagtggcgcgatctcggctcactgcaagctccgccgccgggttcactccactctcctgcctcagcctcccgaggaggtgggactacagacgcctgccaccacgcccggctaattttttgtgatttttttagtagagacggggtttccctgtgtatggggaatcattgttcttcatttaatttatgaaatatacccatgaaaaacttgcatttgtgggaatgtcagaaaaattatactgcttctgagatagggaaaccttttcaaaataacacataggaaagataaatgaaacatgctgtaatacttactatttttatgtaaactgacagaatgcaatttaacagaatattttaaaaactgaagaagtcacaactgattttaaatattaatgtcaaatatcttggttcaaagagttatttactgtgtgtttaatggaaatcatttctcaaaaccaaggttgttttttagtgtagaagtaattctgtatactctgtgttgtagcttcactgtatttcatgagtcaccaaagccccttgttttgtatatatgttgaattttaggtgactattatgaatgtaaataaaactacttcataggttgaattcctttgtgaaatgttgtgaaatttctttgtatttaatataaaacatgcttaatatgctaattctggaatccctatattagcaagtataatactctttacatttcaaactattgtgaatatcggactgatttctt

SEQ ID NO: 107146 - DNA, 1055 bp, Homo sapiens
tacaactttgatgataaaaaactaacttttcagatttataggtgacacaaactgggaggaaaagctaatgtattggctaaaaagtcagtgttgaaggtttgggctgaaactaagaatgggaaaagtgagaggattaacgtacagttataccgtaaaaaatcaactataaaaagttattggatctatatgaaaaagagcatttttgctgactcaacctaaagtaacttcaggctacattaatattatcatcgagtcaaaaacagggagatgatagtccaactaattctgactagagttgactgaagtcttatgttccatattgggagctgtgttttgttgaagaggaacatccacattttggagcacaaacagatatgctaatgagaactgaaaattttgtagactatggagaaatagttaaaatggatgaaaggatagcagatatttaatctaggaagagactataataaagatgtatgtgatagctgccttataatatttgatgggacattgcatgttttgtttatataattttaaaacttcaaactggaactgatagatggatgtcacatctatctatttttgtttcataatgaagaattttctaataaagttatctgtaaagttaagtaaattgtcatttgagattgtgaattacccatcagtaacagtattcatgttggttaactctctgggagtgatactgtaatgggtatttttgctctggttggtaggttggactagataatcttcaagattccttttaacagtatgattgtatggaatattaatatttagagatgcttactccattttccattttgaaaagattctgtcttattacatttacagaacctatcaaatacattaatgttgtataaatatcaacttttaaggagtagtgagttgaacagtatgctttactaagcccccagaaataccaggttttaggttgcttgctactgtagattatgttctttgcagatttcacacaagttttaacttagaatgtatttctaaaccattttggtgtttttttttaaaacatgactttt

SEQ ID NO: 107147 - DNA, 1030 bp, Homo sapiens
gtcctactcatattttaatgtacataaagatcacctggggatcttgttaaaatttagattatgaatcagtagttgtgggaggggacctgatagtctgcatttctgataagctccaaggtgatattaatgctgctagtccctgaaccacactttgaataccaaggtattctttgttggatttgagttaacttctctttccccccgctgtatttcaactgtgagtttaccagctttgctgcttacactgtgtcatcctgggcaagtttcataatttctgtaccagtttctttatttgtaaaatggaggcaataactatacttgctgcatagtcactttatgggttaaatgagtaaagtgcttggcataattcctggcaaaatgatcatgtcactgtttttaaggtaggcagtagagcctgtctggtgaagggtatgggttctcaagtcttactacttggatttttatttttacaataataccaaaaccaagctattagatttattattttcttccatgaatttctgatctcctaaaatctgagttgttcaagtagaaatttttaactcttcttacctataatttttcctctccgttatttctagaagaaacttcattcttagagccaaatgttccatttactggcttccgaaagttttcttcttagccttttacttccagtagtttttgtttgcatttctcatatgatgcatctgcctcatcatcatcattatatctagcagttttcgagattcccaatgaagtgacaaaaataatgtaaaatgagggaaaataataatgataaatgctggaaattaggatgggaactttatgtcagttgctcagggatgaagccagattgacagatgggccaaacaatacttgattgactgaatgcgatgaaacagggaaatgtgtgagagaggaaaagataatatagagagaaagagagaacttccactggtatccagtcatgtccccctctatcccctgcttgtaacaacaagggctggaggaaatagcaggtggtagg

SEQ ID NO: 107148 - DNA, 1060 bp, Homo sapiens
tgaaaatgtaggactcatgtagaacaaacaggattcccacaaaggaaaaaatcaaatcaggctggcaataaaattctctatagtaacaaatgccagcataaataatgtctggatttttttaagaggaaaaatatgatttaataatatagttgtcaagccctatagtttataagatagagcaacagaaataaatagtctaaatacttggaaacaaactgatgacaggtcttttatcaggacaacaaagtagtatgccaggtgatcaaaataaagaatttacaaatggggtcattacagaataaaagaaataggactgacctgaggaaaaaataaggcatttttattatggttatcatgaagaatccattaatgtctaatgattccagaaaaggaaaatacaaattgtaaaaagcacacacaataatctggaactaggatctcagattatggtattgattggatggagataaggaagatagaatcaaatgtatttttgggcatctatgcggaaataactacagggtggtgacatttgttaagggagcagtgattatataaggggaagtgcagcatagagaaagttgttaagtttcattctagacacactgagttttaaatgtctggaacttaccagtactattgcccaatagatgattaaaaaaaaaaaacaaccaagaacatttactacttttataaattaagagaaacatagatgttttagttgttgttgttgttttaataataagggaaaaaagcaactgtggggtagtaactgaaatgccaactaaaccagtaatctaaaagtcttactaccaaagctctgcaagtggtttaatgagcctgccctgacgttagagaaaagtctatccttatccggtgaagccagtatataagtcgcaaagatcttttttgttcaggctagaagtaggccttaataaagccttctttccctgagacacaacctgttttttatttgcttgtcctttgggtcagtcaggaaagggagttaggaggtggtatgggatatcatgtcccaagcaggaggctcaacgctatctca

SEQ ID NO: 107149 - DNA, 1035 bp, Homo sapiens
atagcaaagacttggaaccaacccaaatgtccaacaatgatagactggattaagaaaatgtggcacatacacaccatggaatactatgcagccataaaaaatgatgagttcatgtcctttgtagggacatggatgaaattggaaatcatcattctcagtaaactatcgcaagaacaaaaaaccaaacactgcatattctcactcataggtgggaattgaacaatgagaacacatggacataggaaggggaacatcacactctggggactgttgtggggtggggggaggggggaggggggagggatagcattgggagatatacctaatgctagatgacgagttagtgggtgtgcgcaccagcatggcacatgtatacatatgtaactaacctgcacaatgtgcacgtgtaccctaaaacttaaagtataataataaattaaaaaaaaaaaaacaataattattggagactaactagcccactttgtagcttaggcagcactgtgacctgttgccttgactgactccagtgttctttctgctaaatcaaattttatatttatttctttgtatgcaaacctgtgctcaaaaaatcttgcatgcaccttaattctgcttcaaggcctgtgttaggatgatgacagttgttagaacagcgacaattaatatgatagccatattaattcattacttattttaaaatgctaatgatagggttgtacttccattagcatggcaactaccaactaattttgaaatatgactatgctgttagttgatggttttaccgtagttatgattggcttcctcttcagataaaactctgctaattaaaagtagcatgtacatttattactttttacttattaaacaaggaataattattcatattttaaatattctttttttcaagtcccaaaaaggatatccttaaatagctcaataaatacataattctacttatttaaaaaaaaatcaaataatgtaacttataggcattcatatatttttataattttgagactgagagtcatctta

SEQ ID NO: 107150 - DNA, 1053 bp, Homo sapiens
ttcaaagattacgtttttataatattaaccatattgaagaccttttacatttttgtcttaatttgctgcagtaacttgcttatgagtgaattggataggtggtgttctgtagctttattctggaatcttcatttcgttcagactccatagtgcttccatttacacagatttccataaaaccctattttgattaaaaagttacttattattgagaatgtatcttctctggcacacctttcccttcctgtctgtttgaaaaaacttttaaccacctaagaagatgtcaacacttaagatagtaatgcaaggccttcctcttacataataatgtagcacaaatgttcaatatggcaggagaagaaattaagtttattatggattaaggtagctagtagaagcttcttggggaaagtgggattgtgtaaagataggatttagatacgttcatggaagttgtaggagaatgacatgagaaatggcataggtaagaaaagacaaggtgaattttgggagatgtggaagagaccaggctgaagaaaagaatacatgatgtgcaataggtgaatgagtaggcaggtaagtccagaagtccttaaatttgagattaaagtggtaagactttcatcctatgataaactgctgacggatccagaccaattatgtagaatggccagaacactgatccatagcttcacagacacatgttgtaggtgccttctctaaaatggcaaccagttcagggaaaagaatcttccttttggggtaaaatattaagaaatgtattctgaaagaagtgagggagttgtattttcgctctacctttggccaagacacaaagttgaatggaagtaattaaggggattatatttagcacagtgtaatgtgggtatcaataatagtagactgatgacttaataaaggattaagttgatatagaggcacaatttattatttaagtaaatattctagaaaaatacaatatgtatggctgggtacggtggctcatacctgtaatcccagcactttgggaaaccgaggtgggcagatcacctg

SEQ ID NO: 107151 - DNA, 1173 bp, Homo sapiens
gtgattcaactttttcattaattcagattacatctctataattaatgtgaactaacatggttttaatgtgacagattaggattcagccttttaatcttaaagaaaatattgagcagtaagaagataaagtatgtaatcttagactaaaaagacatagacccatgttacttggaacatattttaacatattaatgaactgaaagaagaaaaaaaatttttttttaaattttgtttctgttatttactttttagactaagaaatcaacaaatatttcttgagcactgttttggtgtcactcttcttttcctttttccaaccatataactgaatattttcacaaataaactcctactaaggaaaatgctatttaagtagttaaatctaattagaaaccatattttagtggtaaagtttcaaagaacaaagtttgagagaatcttttcttgagagtaatagagtctgttttctttttaatatagtgaacaaatatttaagttctgaaaatccactgttctttgaactacgtgccagatacctaattgcttgtgaacgcatacccgaagcaatggctcttattaaatcttgtataaatcacccagaaatcagtaaagacttatacttccatcaagcactcttcacatgtctgtttatgtcacctgtagaagatcagctattccgggaggtattgtttgagactatttttgcctattaccattttaaccctaccaaaaaaaaaccaaaaaaaaaaagtagcccactgttgttgttaaattccttttacagtaatgccaaagatttaaggattacattatctggatgtgttttcttttggcaccataacttaaggtcatgttgaattagtcaaaatctgatattaacaaatgatgaaatcaataaaatatactcattaataagtattattcacattgcacttttgatgtgatggagaagaggtcaaataaaagtcaacaagctcacagcttgccaggagtaaaaaaaaaaaaaaaaaaaaaaaacccaagaagcattatgatcttgccttgaaaataaagtactagaggtaaaatgctcatgtttattttgtttcttaaggtgaaggaattaatcttttcctaatatggatcgtatgtacctataggttgtggacattaatgagattaaaagtagtcatt

SEQ ID NO: 107152 - DNA, 3103 bp, Homo sapiens
ttaaaatacacataattttgacccttctctcaaagaatatgagatttgtacctacaataataaatgggggtctagaagaaatcttaatcaccataagtttatgaatcaccataagtccattttgtattatggatagtgggcttgtcaaatgtgaaaattaaataaattagaagctaaaatgctatctattccagattattttcaagtttaagaaaaagagaaaggtatatatttaaaagagttaaacaaggctactaaatatggaaaattggacattggaatactatgtttattcagctttcattttaagagttgtgttttttaaagatagactagtataaccatttttttggaaaaaaagtatttagcactaatatttttctttttacaggttgaagaagaaggcttgcaaatttgtgttgaaatatgtggttgtgctctacaactcgaccttcatgatgatcccaaaactaaatgtctaatttataaaacaattgcacattttttgccaaatgatttggagatcctcaggatttgtgcactctcaatattttttctggagcgctccttagaagcgtatcgtactgttgaagagctttacaaacgtccagatgaagaatataatgaaggcacaagtagtgttcaaaatcgtgttcgttttgaattgcttccaattttgaaaaagggattgttttttgaccctgaattttggaacttcgtaatgattaagaaaaactgtgtagcattattgagtgataaatcagcagttagatttctaaatgaaagcacactggaaaataatgcaggtaatctaaaaaggacggaggaacagcaaggtttggatgaagggtttgactctcttacagatcagagcactggagagactgatcctgatgatgtatctggagtgcagcctaaaggtcatattaatacgaagaaaaatcttacagctctcagtacttccaaagtagatcacaatgtcccaaggcatcgttgtatgttatgtaacaaggaatttttaggtggtcacattgtaaggcatgcccaggctcatcagaaaaaaggcagttttgcatgtgtaatatgtggtaggaaatttagaaacagaggacttatgcagaagcatttgaagaatcatgttaagaagatacagaggcagcaaattgctgcagctcaacaggatgatcaggaagtcactgctttggaagaaataaattgttctagttcttccatttcatttgaaaatgggaattctgatagtaaggatttggaagtggagacacttactgcttctagtgaaggaaacaaagaagtcatccctgagcatgtggctgaattcattgaaattcccataagtgtaccagaagatgttattgaaaatgttattgaaaatggcagtcctaataattctttaaataatgttttcaagcctttaactgaatgtggggatgattatgaggaggaagaggatgaagaaggtgattatgaagaagatgattatgacctgaatcaagaaacttcagtaattcataaaatcaatggaactgtgtgccatccaaaagacatatatgccacagatcaagaaggaaactttaagtgtcctgctcttggttgtgtccggatatttaaaagaattgggtttctaaataaacatgcaatgaccgtacatccaaccgatttaaatgtgcgacaaacagtaatgaagtggagcaaaggaaaatgcaaattttgtcaaaggcaatttgaagattctcaacattttatagaccaccttaatagacatagctatccaaatgtgtatttttgtttgcattttaattgcaacgagtcgtttaagctgccgttccagcttgcccagcacacaaaaagtcacaggatatttcaggctcagtgtagttttccagaatgccatgagctttttgaagatcttcctctgctgtatgaacatgaagctcaacactatttaagtaaaacaccagagtcatctgcacaaccaagtgaaacaattctttgggatgttcagacagactcaaatcctaatcaggaaaaagactcatctagtaatgagaaacaaactattagtctgccagtttctactagcaaatcaaggaaagagtctacagaaccaaagacatgtatagaaagtatggaaaagaaaacagacagtttagttcagaatggaaacgaacgttctgatgacactgtttcaaatataagcttgatagaccaaaagatgcctgacatagagccaaattctgaaaataattgtagtagtagtgatatagtcaatggacacagtgaaatagagcaaacacctttagtttcatcagatcctgctttgaaaattgatacaaacagaatcaggacagaaaatggttccattttgcccagtgttgtaccacaagaacacaacaccttgccagtatctcaggcaccttccaaaccaaatctgacaagtgaacatacttcatatggcttaattttaacaaaaccatacgtcagaccattgcctcccagttaccttgatgaacggtatcttagtatgccaaaacgcagaaaatttctgactgatagagtagatgcctgttctgatcaagataacgtgtataaaaaatcagtgaaaagattaagatgtggcaaatgcctgaccacctactgtaatgcagaagcacttgaggctcatcttgcacaaaagaaatgtcagacactctttggatttgattcagatgatgaaagtaagtcttctgtcttcttagtagaggtatctgtagaaagagaaaatggcataaataaaactattatagatctttgagatttaaaaaattgatatttgtgtagcacaggtagtgaagcattactccatacattatttcctttaatacatacaaccactatgaggtgatactaatattcctgttttatagatcaagcaactgaaattcacaagtaatttgcatagggctttgcctatgaacttgtgcaaggcagaacctgaacacaggtttttcatattctttgattatacttcttcactgtatcaaaggttattcttcattccaagtttcatataataaaagttgtaattttgatgggaattattttt

SEQ ID NO: 107153 - DNA, 1050 bp, Homo sapiens
ttaacccattattaaaaagtgtgtgtggggaggggggctggtttacaatattaaaccatttaaagtattttattctacaaatggggtttgttttcttgtcatgcataatcagattatgtcccctcccttctggttaaacatggtttaaggaaccgctgctgtttggtttgtgattgatttagaaacttatacattaacttaccacagtgctatcaattaaagattgtaacaggtttccagatgattaattaggtcaaagttcaatgaatggcacgccagcattgaaaattaaaaaacaaaacaaaaaaaaccacagtgctttgctaataagctcttgatagaacctcccactaaccacttttgtggtacaaattagttaacatttaaagggcagcagtgtcaataaaatagaaaaaaaccgatcagtactctggggagagatgaaaggaatctaagactttacaggctttgtagttgaaggaaaacactgaattgcaaattattcaatgtgaataatggtaaaagcacactgggatacttctgtttgtgtatatgttgggacattgcttgatgattcatagtaaggtcctttagacattaatgtgagttatctaagtacagtcctattaaaataactggctcaaaaaatcagctaagaatcaggttgagaaatcattcattttattctattaggagaggtaattccaaaataagccatactattcctgtttttttaattcattagtgatgactctggtctgaacagtaatttttatatgtaaaaggaagtatttacacaaaacatttgcacaagaacacagtaagagatacattcaagcattgttttccttagtgatgttattttcctaagaagattttaacttaataaagtgttaaaacaataaatatttttaaaaataccctctcagatgttttccatttgtccattattgaaaggaagatgcttaaagacttccttttactaatagtgtgtaaatctaaaacagggattaaaataacaaaaaggcagtgtttcaaaacagatctcct

SEQ ID NO: 107154 - DNA, 1098 bp, Homo sapiens
ttccattttcattacttttactgttcatgccaagatgtttcaaatatattccatttgtaatctgtctttaacttgaggtttatttctacttttgtgttgctaaaattatttctgcaagactgagatcaaactggtttatatataactaaatcaaggaatgttttataaaattctatttgaccacactgtcttaacctcggtttatatacttctcaaatagctattgaaagaatgtgttcattttattacatctgtcttttaaaacataaacctacatcattttgcttttatagggtgcataaacttccaacagttctaatttgagcgcttcagaagaaaaggaagcttgcttcttattcctcagattcttctttttttctgttttgaggatgtattcatcctacatggaccaagtttcaaatctttgtttttaaataaaaatttccttcaaaaaattaaatgttaaatttctgctgtgtgtcagtaaggtgaagaaaatagcaaatctgaatttttgctgctcagatattatggaggaggtaaaaaggggaatctccgtggacaaggacactggtactttgggctttagccatattcatttttttgaaaccaccaattatataatacttaaataatttatatcattgaacttgtgattcttttcaaatcacactgaaggttcagccgtactcctttcatgtttggtttaatactgttgtatggatgaaaaacctaaaagggatgatagtgtttattttttaatttatttggtactgtaaaacaccttttcagaatgagtaaatgctgcatatgcattttggagttgttaatatgtgaaagatattacagattcagcaagaaaggaaatttgtgcttccttgttgaatgttaaattattttactttgcattttataagagtacaaattaaaactgagccattgaactgcaataaatcaacaatagtgtctcatttcaagaaattttttgtactgtacatagatttgttcaataaaacgtccttgttggtaatcaagtgttcaattttatgtagtatattgctttcaaaaggaattagacatataaggtatatattaaat

SEQ ID NO: 107155 - DNA, 1039 bp, Homo sapiens
cgtacttcattggtaccacatacagtgattacattataaaaggcctctagatcactttgttcaaatttaacagatggtttcggtaatgttccaggagcaagggaactctctcccataattttcaggttgataaatttgattttccaagtattctccacaaaagggcagcggatgagtccaaaaatttgttcaaaaatgcccaaacaagtgtttcctcgatggacagtcccagcaactccaaccataaccagcccatgaggagaagatgcacatttcagtccatgtgaatctaggttggggctgagaaaaagaaattcttcttttactagtgacagcaaacgaaggctcacgatttctgctccatggtagtccataacattttgttctgatgtgttgtaataaaacctaagcttcacatcatgccagaagtgctgtggtccccattcatcttgaggtggtcctagaaaaggattctgagaattaagaagtccaaagaaccaatgacagaattcttctcctaggcgacgaaaatcaactttttcagcttttttatcttctttcacctgctgattgaaacaaataaaataaatacaaaataacactaaggtttaactttcatatctatttttctatctagcctattaagtttgaatgaacccattacaccagagagaaatgaaccatatgtgaacttgctgaacccattatgcatagtaaaaatcttttttcaagaggagaaaaatcattttagaaatttccagcttaaattgctgaaaattcagctaagagagtaaggtttagtaaggccaatttaaaaatcagtatgaacttggcgggcgtggtggctcacgcctgtaatcccagcactttgggaggaggaggcaggcggatggtgaggtcaggagtttgagaccagcctggccaatatagtgaaaccccgtctctactaaaaatacaaaaattagccgggcatggtggcgtgtacctgtattcccagctactcaggaggctgaggcaggagaatcacttgaacttggga

SEQ ID NO: 107156 - DNA, 1018 bp, Homo sapiens
tggaaatttctaaaatgatttttctcctcttgaaaaaagatttttactatgcataatgggttcagcaagttcacatatggttcatttctctctggtgtaatgggttcattcaaacttaataggctagatagaaaaatagatatgaaagttaaaccttagtgttattttgtatttattttatttgtttcaatcagcaggtgaaagaagataaaaaagctgaaaaagttgattttcgtcgcctaggagaagaattctgtcattggttctttggacttcttaattctcagaatccttttctaggaccacctcaagatgaatggggaccacagcacttctggcatgatgtgaagcttaggttttattacaacacatcagaacaaaatgttatggactaccatggagcagaaatcgtgagccttcgtttgctgtcactagtaaaagaagaatttctttttctcagccccaacctagattcacatggactgaaatgtgcatcttctcctcatgggctggttatggttggagttgctgggactgtccatcgaggaaacacttgtttgggcatttttgaacaaatttttggactcatccgctgcccttttgtggagaatacttggaaaatcaaatttatcaacctgaaaattatgggagagagttcccttgctcctggaacattaccgaaaccatctgttaaatttgaacaaagtgatctagaggccttttataatgtaatcactgtatgtggtaccaatgaagtacgacataatgtaaagcaggcttcggatagtggaactggggaccaagtttgaggtagtggaaatgagacattgctgaacaaaagagaactgggtttacctgaccctctaaagcgctaagtactgtcagcctgaaaaaaatcttctatacagaaactcttccaaatactatatcagtaatgtctgaatgatttcagatgtgaaaattgacatattttagttgaaatacctttctggactacagacttacatatcatgtgaat

SEQ ID NO: 107157 - DNA, 1028 bp, Homo sapiens
ttccaaatatgggtctggggtggaaatgaattccccttttaggaaagtagtttcaatcaacgcttcttcaatcttcagacatatttttagtaaattgtttagttgtgaaaataatgttgaaattttgttcaaatttttttttctcacataatggtaaaaatgtttatttttatcaaaagggaagtttaaaagactaatgtaatttatagtgcatgctgggtcagtggtttggatatcaacaggtgatacatttatatactttgttgagacctaagtcacaactgtaagttcagtgacttgatggctgctagggttgtattagttttctgttgctgtgtaaaaaattaccacaaacttagcagcttaaaacaaaacccattttttatttcatagatccctaagtgataaatacggcatggtgtgactgggttcacaaggctgaatgaaaggtatcagctagttgtgttttcataaaaaatgggcatatcctcatattttcgattactggcagaatttaatccctggctgttgtcagagagaggtacccatttcccagctgggcatcagtgggccactgctcctctctcctgaaggccatctgtagttttcttaaggggctccctctgttctcagagtagccatggaatgtcatgaagtccttctcatgcttcagccctctctgacttcatcttttgccatgagctggagaaaactctccgcttttcagggctcatgtcatcgatcagattaggcccacctagatattctccctatcttaaggtaaacataatcacgggaataatactatatgcacaagctctgggagttggaggagatatctttagtgagaggattttagaaattttgtctaccatacctgtgtgatatcagcaactggacagtgtggttgtggttcacaacatgacctaggaaaaaaagcgaaaatggaattgttcttcttattgggattgtgggtaccatcatatctcattttaagttgacttagataaaaaaacaaattgctgcta

SEQ ID NO: 107158 - DNA, 1049 bp, Homo sapiens
ggctcattggattaaaaagatttaatctcattgcttttcctttctaagggaggaagaacagattggtttctgttttcttctctgaatgctaggaagaaattcccacataataggaataaataatatacatttttaacctaaaaaaaaaccatgaaagctctctgataaacttgaaatgccataaatgaatgctcattggtagcaagtcttataatttggcctgctgaattattttagaatgtgtggacaatttttctggcattttgtgactcagttgtttttaaattgcattaaaactcaggcaacgttgacagattttattttggatcatacattattttgtggttacttttgccatctggtcttttttttctttttcctttttcaaaagctttttattctttggctaatcttaatagcttctcagtttaaaaataactgttatcagatagtatgcacttatggcttgaccaatgaaaccatctctccaggagggatgttttgtttgtgggagcacagcgttgctgaactaatccccatggtacaaacacactatccaaggcaacacattgcagtgtattttaaatgaatagatacattccaaaatagaatgagggctttggggaattgcccacatttaaccaaataaccagctgtgcaaaatgctaaaacacaattgatctactacggtatttgaaaatcatgtaaggtcatttagttcaatactcagatggctacccagcaggtctagaagctttgcaggcccagcagtaactgatattagtcattactggagatgatcaaaaaggccgactgggcctttttgaatccagctaccattctgttcatgtattcctccccacaattccccagatcctgtaaatttcctccttaaattttggctaaggagaaggtttttggtacattttttttccctggttcatttgacttcttactcctagataggaataacaaaactaaacagacatacaatggagcaatggggtttgtatcaaagggaaaataagaattttaggcaaaagtatttt

SEQ ID NO: 107159 - DNA, 1302 bp, Homo sapiens
aaaaatacagaaatctgcttttattccaacaataataaaagagatatattgatcatgacatttaaaagagattcccaagtagctataatttggagttaagaaaatgatttaacaatgcttaaactgttgcttaagtttaaagagaaaatagtatgttatttgtataataaaaatagaatatcacaagaatatgcttgtttctactctccctcaaatgtgtttaagtttaaatggaactaattgtgtttatgaaatctgaggaactcatgacatgctgaattcaatgaagtacagtaacatgtatatcggcgtcacttaacatgtatttatggaatagaatttcactattaacttttcctttaggattagaatttggttggaaacaggaagtctgaatgacttctctcactgtaaacaaacaagatgctaaaagtcttggactaatattctaatattttccttttacagatgttccattcagtgccacaccagtgaatgccttttataatggctgcatggaagtgaatattaatggtgtacagttggatctggatgaagccatttctaaacataatgatattagagctcactcatgtccatcagtttggaaaaagacaaagaattcttaaggcatcttttctctgcttataataccttttccttgtgtgtaattatacttatgtttcaataacagctgaagggttttatttacaatgtgcagtctttgattattttgtggtcctttcctgggatttttaaaaggtcctttgtcaaggaaaaaaattctgttgtgatataaatcacagtaaagaaattcttacttctcttgctatctaagaatagtgaaaaataacaattttaaatttgaatttttttcctacaaatgacagtttcaatttttgtttgtaaaactaaattttaattttatcatcatgaactagtgtctaaatacctatgtttttttcagaaagcaaggaagtaaactcaaacaaaagtgcgtgtaattaaatactattaatcataggcagatactattttgtttatgtttttgtttttttcctgatgaaggcagaagagatggtggtctattaaatatgaattgaatggagggtcctaatgccttatttcaaaacaattcctcagggggaacagctttggcttcatctttctcttgtgtggcttcacatttaaaccagtatctttattgaattagaaaacaagtgggacatattttcctgagagcagcacaggaatcttcttcttggcagctgcagtctgtcaggatgagatatcagattaggt

SEQ ID NO: 107160 - DNA, 1197 bp, Homo sapiens
ttttctttctcagggcctcttcatttattttatcccaagtctgtaggattgcttgtgtggcacaaagaaacctgttagtcctgctggcatatgcttactaaagcattttaaatttcccaagtcttttctcaacaaagagtgattcaactccttcccttttcatatgtaaacttggaaattaggaaggctcataaacagaaagatataagacactcctataggttccggttgttttacggaattttcagaaaccagtatacatttatattttagctaaactttgagtttgtaaaactaatgtgtattttaaattttagtcataattattataaattagtcttataataattagtgatttttcccttaaatttagaggctctatcatacattttctttccttattgaaatttagtttttgactttcaaaaactcaaaagtcactcttaagcagcattactcttactccttgcttatattgaatctttgctctgctcttcaggatattctgttatctgttgaaaatactgtaatatatcggatacaggccctaagtctatgttccgatcaacaatctcatctggaatttagagtcaacagaaacaatctggagttgtcgacaccacttaaaatagaaaccatctcccatgaagaccttcaaagacaacttgccgtcttggacaaagcaatgaaagcaaaagtggccacatacctgggtggccttccaggtatctgcttactttttcttcagttttaaaaagtatattttaatcaaaccgataatattttaaatatataattatagtaaaaaagcatcagaagggaacataaaatccagtattcattattctttttctaggggctagtaccgacattttattggcatatttttgttttgttttgtttagtttaaaaatgttgaactaaggctgatcaagttttgcttcatttggctatcccagccagaaaggatatgttattttatttcatcatcacaatagtcttataagttcaatatttgttctaatttacccaatatttattcatctattattcagttcatcttatcatttatccagctttttttttttttttttttttttttgagatggagtctggctctgtcgcccaggctggagtgcagtggcacgatctcggctcactgcaagctccgcctcctgggttcacgccattctcctg

SEQ ID NO: 107161 - DNA, 1143 bp, Homo sapiens
gcttgcagtgagccgagattgcgccactgcagtccgcagtctggcctgggcgacagagcgagactccgtctcaaaaaaaaaaaaaaaaaaagaacttatttacactattgattccatgtgcgtattatcagacaattgcaaaataaggccacttaaatttttcctaagatagaatggctcacttaattgttaattttctagcagcctggaattgaaagatatataactggatgtttaagcttaacagaatagtattttttttaactttaaaatatggtatgcttttaatttttgatcgtgctgccaccctaaatgcctttttatcacatttatcataatttgacattccaaatgagttgtaacaaattaataattacattaaaatgattactttacagaagtattttattggaataataacataagttttagatcccagtatttcaaatgacatgtagtaatacttggttatttggtaatttttctttttaattgtaggtgtctgtggaagaattagaacatagtattagcattaaaatagctaaagaagctgtgatggatataaataaacctggacccctttttaagccggaaaatggattgctggaaaccaaagtatactttgcaggattccctcggaaagtggaaagtgaactcattaaaccggtaatgatccaagcttgtatcattcatcatggatgagttccttttgtctgtaatagatttgaatatgtgtgtttctgagaatcaatagaagttgttttgttaagcatactaagtgtgacaacttgaaatgatcatggaaaaataacattagtaacccttgaaattatattaatgaaataaaaaaatgacgtagtggttttgtgcccatttaaatccccagcataaatcatgaagtggatttctaaaattctcaagttaacacttgagaatgttaacactaatgttaacattagtaatgtaatgttcagtgttaacatcatgataatccatactcagttgttaaacatataaattcatatatttaagtccaaaattacaccattttgtaaaagccagtcaaaggactttctcaagtctatttttaggacttaaatgcaagagctaaagaatagcacataaggtgaaatttattgttaa

SEQ ID NO: 107162 - DNA, 1050 bp, Homo sapiens
ctccaggagagatatagtatgcctgatacttatacctgtgtattaatttcagcatttggaaggtgctatcaaaatatatgtcaaagaaagatgacaaattaccaaagcatctgttccctggggaaaagattccaagaataagcaagaaaatataataacttaattttaaacgtacatggaaccagagataatacatgagcagtctaattctgcccttctcttttattaattccagaaaaagaaataaataattgactctttgtctgtgttactgtttgtcagtacaagaaaaaaagaataatgcattgagctttctgtatttcttactcttaaggatctctctttgtccattgtttagattttcagcagaatttgatttccggacatatgattcagaaggcgtgatactgtacgcagaatctatcgatcactcagcgtggctcctgattgcacttcgtggtggaaagattgaagttcagcttaagaatgaacatacatccaaaatcacaactggaggtgatgttattaataatggtctatggaatatggtacgtttgcagatttcatcaatatcttcccactttgatgcagtctgtataaaatcataatttatttttatagtgataccaaaccaaaatggatttggagttatctgatgctatatgaggtatattctacatactgtaaatccctgaagcatcctgagaaataatattctcacttaatatattagaatcattgtttttagttatttgcttgaactactctgtctttaactttttaccttttttagttgctgtttggtgaacagtggtgttagggactattaggaggcctaacatttttttttttttttgagacagagttttgctcttgttgcccaggctggagtgcagtggcgtgatctcagctcactgcaacctccacctcccaggttcaagtgattctcctgttttggcctctcgagtagctgggattacaggcatgcgccaccatgcccggctaattttgtgtttttagtagagacggggtttctccgtgttggtccag

SEQ ID NO: 107163 - DNA, 1075 bp, Homo sapiens
taaaggggtcttttcttcccttcccttccctaactttcctttcctttacttccccatcatgctctcccttcctctttcccttctcatttcttttttctttttttcaaagcaatgaattgtgaggtaatctcaatgaaattcaaatgatcagaaatgacagttaagttgagattctcaatcttttttttcttcaaattcaaaatgagaaatttggtagaattgttatactttacttaatcactgaaagttataaattaatttttgtttcaaatatgtaaataaaaactatacttgtaactcgtttaaatttccatgttcagtattatgtttaaatgtagtttgatgtcatagtatttctttccctaaggttcgattatcattgattatatcatactacaatcataatattcctctgcctataagattgaacatttaggggatattaaagtttgtgtgcgtgtgttttttttacctcagatatagatgaatgctctgagaacatgtgtgctcagctttgtgtcaattaccctggaggttacacttgctattgtgatgggaagaaaggattcaaacttgcccaagatcagaagagttgtgaggtaaacattttacaatgcttaacttctcacctgttttctaaaatgagagatcctagatacttattttcacatagctaagtcaggaaaatacagacgttctgcaataattgctgtagctttaagcaggttatgagtcatgattatttactaattatggtcatgtaagtcataaacattggggataattagtggctgggtttaaaaaaaagagggtagagtcacagtttagagagtacttatctgtagtctgtacatttataaaatacaacttgtatgtttacttaagaaatcaagaaaagctgagtttaatagccctcattgtgaaaaaaaatctctcatagaaacttcagtgaaaacattttccagtgtctacttttctggattccactctgactagtttgatcatgccttaggcgttatagggtttataaagtgctcataaaatttcagagggtacaagtgcagttttaatgtac

SEQ ID NO: 107164 - DNA, 1428 bp, Homo sapiens
aatagtagtgtactaattagatgtttgttcatttccaaagaaacaagatagaagagatgagccttcccatgtacaaaaaatacttgtgataatatggagtgaatctgttttcaagacctccatttattttcgcaccacaacctggcagataagaaaatttctaaagctttctccttcttaacataactagaaaggaacatggcaaacatcaatcaaatttccctctgcatttgtagaaagaaatcatatttagtgagctaacatatgatgatagatttaatgttttttggtccaaaggccaatctgttatctcattacatatattaaacaagatccaggaaacacaaatcaagggttctttggtagtgtctgctggtatgggaaaaatgttttttaatatagtgattttatttatagatgtggatgaatgctctttgaagccaagcatttgtggcacagctgtgtgcaagaacatcccaggagattttgaatgtgaatgccccgaaggctacagatataatctcaaatcaaagtcttgtgaaggtaggatgatggtggtatcattactgatggtggagagggtgggtgtgaaccctgaactgatatttaaaagcattggctttgtttgacatcaacagtcatattttcttatccctaatatagcttgttcaattgggtaatcattggcttccttccttccagagcaagagtatgtaaggcatatggtctttaagtttggtgttaggcacgccagttggccctttgagctacctatgaattggagacctccatgtgtggtaaaaacaagataaacatattttcacatcatttatatcatattcaaagataaagagaatttcactttggaaggaaaaacagtagatagaaaagaaagacacaagcttaaaaatcatcttattgagacaatgagcatggttaaaactttagtttttattccaagcttttcagtgatttttctgtgcatatataaataaatcatttattctaaaataaaaaatgacacagttctattatctcatgataaagaaatgataacaatactctagaaatttaagaaatactgatcggtaatgtcagagcctgtgggtttggggcaaccccttaaaggtgctgttacttcatgtgactgcagtggcgctgccctgtgtgcatcaggaagcttcaacatattatagttgtttgtttgtaggtttgtttattatgatatacagattatctcataccttcctttcgattttttaaaattttaaaacagatttactgccatggctggaactaatcaacactaatttttctattgtatctgtatatatatatgtatgtatgtatattcacacacatgtataatgtaccttttaaaaaatagatttaggggctacaagtacagttttaatgtactcttttaac

SEQ ID NO: 107165 - DNA, 1186 bp, Homo sapiens
gaagcatgatctatcatatggaaagagagatgccaaagaacttccaagatgctccatcttggaagcagtcccctgccccagccatcctggttgactccattggcagcagagacaaacaacccaaccaaactctgcaaatatttgacccgcaaatcatgagaaaaatacaatgattacttaagctactaattttgggggtggtttgttccttggcaaaagctaagtaaaacaccatcttttttatagtaagctggtgactgtctgaacaatgaagtaatacatatggtgtctttagtgcctcttaagaaatatatttttggcactaagtaactcctagttacgttaaagtcacaaagtatttcatctttacaattccagctgttatttcttagtttcctagcaatatctaccaggttgctatatctgatttcacagggttgtagtgaagaatgaagggaatgaagtaaacctgatttgtaatatagaagcattatacaaatattactgtattaatctcagggcaacatgagaagaattggaagtagcctatagcaagtagaaacacgaactgattctattgacttaattacatatactttataaatcagactctggtcagtagatttgagggcaacatcttgtttctgctgtggaattaaaaacatagacttatatgacaataaatttctatgctaaatcaaggtttttttcacttctgactttaaggttcttctccagagagaagaagctgtcacagacttattttttatgtttctgtatctgttgccatcttgcttgtagatttttaatttttcagaaaggtagatggaaacatttagtgttgcattttgaagactgaatcttgtgaatctacaggagcataaatgtcctacctcttgggacagttcctaccatgaattcagatcaagtatgtgtgtctactctaagaagattatgtttgtttttattttcagtttgtcttcgctcttttcaaactgggttattcactgctgcacgtcagtcaactaatgcttatcctgacctaagaagctgtgtcaatggtaagcacttctaccatcaattgaaaaaacaaaacaaaaactctgtaggtaaagtacacccatggtaatataaactaacgtttaaaaattgagaaatgatcctttgatgggttgtatgcccagca

SEQ ID NO: 107166 - DNA, 1640 bp, Homo sapiens
aactatattttctaacttcagagcttttaaatcaccaaatatgtcaacgtacataaataacttaatgtgtcaaaatttcttcagatgtattcttgtttaatcaacccatcatgtgaaacaaaaatatactttttattatgattttttttaatttaaatttcatattttggtctttatttgtatataggcatgtgtggtgaattccactgttaaaaacaatttttaaaaatgtcctgcctaagttacactttttttgttatttgatgtgtatattctataggccaatggctctaatttgaaaagcaaaacaaaacagtcctttctctggtaaatctaacagtagttttactaactacaacagctcatacaggaaggtccctgtagtgagataaggtcaccaaagaaattaaaaaattgtaacccatatatttggggcaatatttagacttcgttttcaggggctgataaagcacttcaattggcctacatattccatgtactatcttgaaaacatgcgatttggaaataagtactctgggtttcattatagtttttaaattgtgttcttctcttttgtaagaagtggaataaataactaccatttccataggcctagtatcacctaatagagtgagtgtttctagtaaagagagagaaacttcctgggaagaatggtgaactctgagcctaaatataaacattagaaatcattttttgatgtgagctggcaaaaaataaaataaggaaaaaacctgaaaaataaaaaaaagaaattatttttagtttctaagataagttggtgaattacctcagaatgctgactccctcccttcaaatcttctctaaagaaacaataagattccaagcactaataataacaaaataaaatgacaaaaagaagtttaagaaatgcctgggtaggcgaaaagctggcctgacctgctggtatgtgtggtgggggattgggttctaactgacaaggcagtagtgacaaaacagatttgataatttaaaaaatgacatgaactttccaattgagaaaacaaacacaaaaaatacaatagagcaaaccccaagtaacaagaagttttaaaataacaaaaacagagatagaaataagtggaatagaaaaacaaaagtgagcattaacaaaagcacattctcattctttgaaaaggttagtaagtgagactgacatctggcaggaataatcaaggaaaaacaaaaaagagaaagaggaaatgccaatacatagagtacaagatagaaagggaaaatattctaaactcaacacagattaaaaatattatcataaaatattacaaacagctatattaaatacacttggaaacctaaataaaatggatgtgttcctagaaaaacataaaatatctgtaatttcacaggaagcaatagagaacttagttatacaaacgagtattaaacaagttaaaaccgcagccaaagccctcttcttcctatttctcccgaaacccagatccagatggttttacaaatgaactcttccaaattttaagaaattgttaatgtttcccttattaagatattgtccttaaaaaatgagcttattctaagaggcttatgtaatcttgactccaaaatcaaataaagacatttag

SEQ ID NO: 107167 - DNA, 1021 bp, Homo sapiens
ctagagtgcagtggcatgatcatggttcactgcagccctgacccccccgctcaggcaatcctcccgtctcagcctcctgtgtcgctgagactacaggtgtgcagccccacacctggctaattttggtattttttgtcgagagggcgttttgccatgttgcccagtctgggctcgagcaatctgcccaccttagtctcccaaagtgctaggattacacgtgtgaccacagtgatccctctgccccacccccaccaaacatttgttactgtgttacaattctcatgattacaggtgtgatcattttcgaccctacccaaccactccctgtccacatccctaataccacagtccacatttccagtccccacagtactacttatgcctcaacatctctaatatattcctttgacggtcgcaatatcacctttgaatcccattatctattgtgtaggtttatatgagaggaggaaagaatgaggcctttgactcagttctggatgagcttatgttctgtacttactaagtggtaacattgaatatgtctttgtgtagaaattctggtttctcatgaggtattcttgtgctgttaatggtacacattagatatattatggcttaagaatgcttttgtggactagcctgagaaccttactatcagaaatttttaacatttttctctttttaagaaagcacattctttactccaaattgactgatttacagacaaacttttggtacacaaccaatttataggtaaggtactacatgtacataagatgtataagataaatgtctactttaattcacttcaaagtatgtcactgttagctgggcaccttggctcacacctgtaattccagcactttgggaggccaaggtgggaggatcgcttgagcccaggagtttgaggcctaggcaacatagtgagaccccatctctacaaaaaaataattaacaacaaaaaaccagctgtgcatggtggcatgtacctgtagttccagctacttggggggctgagatg

SEQ ID NO: 107168 - DNA, 1030 bp, Homo sapiens
accatcctagctaacacagtgaaactcatctctactaaaaatacaaaaaaattagctgggcatggtggtgggcacctgtagtcccagctactcaggaggctgaggcaggagaatggcgtgaacccaggaggctgagcttgcagtgagctaagatcgtgccactgcactccagcctgggcgacagagcgagactccatctccaaaaaaaaaaaaaaaaagtgacaaacgcacttctgcttatagttcaaatagttaaaactcaatgaagcacatggaatatttcttcggcactatgtctgttagaaacattttctcttaaggttgaaattaatgtattttcctctaagagaagtataaatacttattgcctatttaacctttggtaatatatattacaaagtgtgtggttgttttaattatctgaataaactttgtgatagagggagggcataatttactatgcctgctaacacaccagctggtagttacttagtattattacactgagttggctattaatgtagcagaacgaaaaaatatggtaacagctgatattgaaattactcctatggtgagaactgttgttacattagaaattaccttgaaaagaagcttgagttttggaaagtgaagtccctgaaacatggtctataactttgctattccagtatggtccgtggaacatcagcatcaggtttacctggggacttaactaaaaatgaaatatatctggccctaccctggatgtactcatccagaatatgcatttaaacaagactttcaggtaatttctatccacatttaaagtttgagacaatctagtttttaatgagatagagaagatagataagtgaacaaatttttgcagaatggccagaggtggcaattagggcaagagaagaggaaatgtcagagaagggagaaagaaagctgagcaccatggcaagagaatgcagcttgtggagaaggtctccagtgagaaattactagatgtgaggtgggtaaagacttttaggaatgggcatttctt

SEQ ID NO: 107169 - DNA, 1150 bp, Homo sapiens
acactagagcccatcccccagctccgaaaagcttcctggaaatgtccttgttatcacttcccctctcgggctgggcgctgggagcgggcggtctcctccgcccccggctgttccgccgaggctcgctgggtcgctggcgccgccgcgcagcacggctcagaccgaggcgcacaggctcgcagctccgcggcgcctagcgctccggtccccgccgcgacgcgccaccgtccctgccggcgcctccgcgcgcttcgaaatgagggtcctgggtgggcgctgcggggcgctgctggcgtgtctcctcctagtgcttcccgtctcagaggcaaactgtgagtaatcaatagcgtctcttctcccttccccagcattgtcgactgaactgcgtgccctggttggtaggattttcttctctagagctgcagcctcctagaaagtttccagtaagtaccgacagacacccagcggatggaaacagccgtggatagagcaggcagtgcaatggtggggcaggatcactatttgcacagttgcgagaatgtattgcctacaggacagatctaagaacctagatgacactaagtatcaatggagggatgagaacacctgcccatttcccttcaaagctgaagttcccagtcagagaactaggatgagcagattctagcttatgagtagggaagaaaaggtaacacactgtgtcttccctttgtccaagcgcctgcccccaacctgcacccgtctcctgaaacctgcctcccttttgcaatttctggactttgagcttggtttgcttgtctcacattaacgaaatgttttaggatgactgagggtttgtatagcagtagatatatgtcactttctaaccctgaaatcaaaaggactgttaaatactgtattctatttctcagatcgtttgtactgaggattttttaacactgcatgccactgatctgaggtggtggcatgaattctttatctttgtgtttcaggttctttatgtccttatgcccggattcaagacaggatattgagttttctctgaaaaatatataaggaataccaaggcaattagtacattttagtggtcagttaatttgttttctaaagttgtaagtgtgtttattgaataaaaacgcctttttgtttg

SEQ ID NO: 107170 - DNA, 1031 bp, Homo sapiens
aacctgaccaaagacgcagatacaccgtagccgagttagcgggacccggctaaagaaaagccccgcgtcgacgtgctgacgttacttcgaggcgcggaaggcgttccccaggcaacgcccgtactgcgctcgcccaatcatcggttgaggtcctgaggtagaggcctctgagtggctgaagagtcctggctacccgcccctgcgcgagactaggaaaagagaaaggggagtactctataagaaggaggcggagctcgaggtagctcgttctcgtaactaggcaaccggagcgtccggagataagctggaggatccgggacaaatctccagcaaggcctatctttatacctacataaaatgtgttgccaatccacggtgctgttcctttcctttctccagtgtccccaactgagattcagagatctcaggtcttgtgcatgggtttttctttttctttctttcttttttcttgttttttgtttgtttgttttttgctcagggatggggaccctctagaattctggccgacttaggcagcatgactacaggaacaatacactggggcaattcttgtaagttaaagacaagggggaaattcgcttgctaaattttctcagtagttcagatgagagtgaagccttaatctctaaaacgtttattactgttacatatgtgaaacggaattgtatgatatttgttgtaggggggattgtgattacaaaagaaaaatgcatttcttgtagaaaatgtgaaaaatactaaaaagaaacaagatgaagaaaatgagatctcacaggagctctcaaagataaccatttggggccgggcgcggtggctcacgcctgtaatcccagcactttgtgaggccgaggcgggcggatcacgaggccaggtgatctagaccatcctggctaacatggtgaaaccccgtctctagtaaaaatacaaaaaaaaaaaaacaaaaaaaaacaaaaacgggtgtggtggcacgcgcctgtagtcccagctacgctggagactgaggcagggga

SEQ ID NO: 107171 - DNA, 1834 bp, Homo sapiens
ttaggactataatttcttagaactacttgaaacttcccagatgtaagccttctctttcctttatatttttgtgttgttctcacttacctaactagagagaatatctactgatgtttaaagatgtatttttgtcgtatagtctcctcttttataaagtcctttttaattcccagctgccccaattactaccttacttagtagaattgatcatgtccacttttttggcctgctcttcctgatacctacttggtcactacttaattacattttgtttgtgtatcttttttcttcaggctgtaaattctctaaaggcattttgcttattttggtgtcacaattgtttaggccatgcgcctaggtcttcttaaaacacctctctcatggctcctacttttctacttatttctgattcttttctgacttctcagccttcttttttttttttttatttccgtgtgaaattgagaaaaagttatctgctagtttcttttcagatgtgtctacctctcctctgactgtgttgccattggctaaatccaaaccctcagtttcttttatctatgatgtcacagtagcttttttctaattcatattctatttatttatttatttatttatttataattttttatagaggtgagtctcactatgttgcccaggatggtcttgaactcctggcctcaagtgatcctcctgccttggcctcccgaagtgttgggatagtaggcatgagccactgagcctggtcatatttttttggttttttagagacagggtatcactttgtcatctaggctggagttcggtggcgtgatcatagctcactgtaatctcaaactcctgggctcaagctatcctcctgcctcagcctcgagagtagctagactagaggtgtgctccacaatgcctagctaatttttttattcacaatagctttttttcccttttttatttttaattttgtgagtacatagtaggtgtatatattacgaggtacatgagatttttgtataggcatgcaaggcataataatttcgtcatgaaaaattgggtatctattccctgaacatctattctttgcgttactctttcagttgtttttaaatgttcgattaaattattattgactatagtctgcctgttgtgctttcaaatactaggttttattcattctttctaaatttttttcacaatagcttcttaatataaaagtaacaccccttcctggaactttacttctttaaatcaaacttctcttcttcatggttgtcagtaattgcattagttggacacaggttcaattgttctcacagagacctaagataacagtggttcaacaagatagatgtttctttctttctcataacagcctaagcaaaagtagtctaggactggtttgtcagctccatcgtgttagtcctcaattctttgttctatttgctttgccatccccagtgttctccctcacctacatggttgaaggtagttcactacaaaatgtgcatttcagctagaaggaagaggtaaagggtaaggggaggccatcctccttttctttaggagctgaaccaaaagctgctgcatcattttagttcacatcatgactagaagcagtggtgttctggacctgcttttcatattggctcatatcaactagtgagagccgattatgcatatctcttcccaactctatgtttaggtacctcacattgttagtttgaaattggccatggtcaaagtatttatactgtggaaattggcagataccatacatgtatcagggttcttctcctccaaatatttaacaacacatcactggctagcctcccctcat

SEQ ID NO: 107172 - DNA, 1050 bp, Homo sapiens
taaatataactttaattcagctaattaaaaaagagtggccttattctttatagcttctctcattctttgattcttctaaactcttctattctctaagtgttcatggttttctttataactccacagatgttttaatagtccctggggatggctatggtattgaaaggttgacatttttattgtttgtaacttggacagtaaatagccttaaaggcaagagtttattcatttattaattcaacagatacttactaagtacctattatatactaggtgtgggtgttatatcaggggaaagaaagattcctatctgcatggagtaaaatttctagtttgatattctggcctgtccccaaaccagtatgcttcaaaataatgtttattgtgtcagtgaatgctaaatatttcacttgggtgctaaaattttagttgaaaaattaacgttgtcaattaaagtctaaagattttctttttttgtgtatcatttgtaacagaataccctgaagatgtagctcctactgttggattttcaaaaattaaccttagacaaggaaagtttgaagtcaccatctttgacttgggaggtggaataagaattcggggaatctggaagaattactatgctgaatcctatggggtaatatttgttgtggattccagtgatgaagagagaatggaagagacaaaagaggctatgtcagaaatgctaagacatcctaggatatcgggaaagcctatattggtgtaagtaatgttagcatcattgtaaatgtagggacgatggcattggccactaaagaaatttacctgttacagactagtgaataagctaaaatagtcacgctttagtatactaaaatgtatgtaattaactgggagttgttaatttactgaggccttgttatagtgctgtctataggggaaaagggctaaggctatagaattcttaaaagtggatctcttcgatattcaaatataaactcattgttttatgtgatagtttactttttatagaattttgcattttgaaatactccattaacaaggttc

SEQ ID NO: 107173 - DNA, 1012 bp, Homo sapiens
tttgcaagtttcttttagtcatattccgtattgtaagtgcccaggagaagttaaataggttatggttatcctaatacagttatcagaaattgaatcaaacatacttttagtatgttaaacatttaaataatagaagaatctgagtcctgttttagaatgctggagacctatagatatggaattacggtctgcctatgtcacataatcagttgatccttagatagagtggtgagtcccctaatttcctctgaaacccctacttattgaatttataaggtctattggcttaagatttctctcctttcagtggagcgttaccacactgtcatcttcattaatgtcatttacttatactgttgactcatctccagatgtccttactgaatgtttccttttgtctcttaatgacattcagcttcatagcagctgtaatttacagtaaagattctcagccaattgattttgtaggtaatttaagtactgggagcctgcagaggtccccatccctgccttccctatcacttcaatctagttaaaaacaaaataacagaaaaaaactctttggcagtgttactacgtagcaagatattgtccatggaccacctgcatcagcatcagcctagaccttcaaaatttttgagggtgagaccagatatactttgggctttttttccatacgtgctctccagatcattctgatttatagcaaaaattgagaactactggtgtaggagaaagtgttaagtcagaaaggccctaagtaggttatttaatctttctaagcttttatgtctgcacttgtaaatagggattataatatgtcatgttatgtgaattccaaataatgcatttaaagcctctcaagcctgtagtacagtgtttcactagtgttctgtaaatgcaatggtggatgtgaatatcattattattgataatatactgtgtccaagtgtagaagaattaggagaacctaatgtttcaaagtatttcatcttacgaattcaagctctat

SEQ ID NO: 107174 - DNA, 1143 bp, Homo sapiens
tgttcctctactaaaagagatatctgaatgaaaagatcccttaaatcctttatttggttctccaaattaacaagttccttgtgtctctgttcaatctctgaaagttgtgctttagtgatattgatttctgtaagtaagctttcattaaaaacttcccattttccttgatgaagcatatcatttacatcttcttcagacatctcttttccagcaacttcaagctgacgtaaaataaatgtcttgcacttctcttgctttgctgctattgtgtcattgtatataaacatgatttgctgaaaatggcggaacattgcagcatgctgagatttaagtatccttgtgaccactgaagatggaccattttcaacctctgactttttaacttctttaactaaatcattcaaacttctgttgatgtattctgcctgaatttttatctcctttgtaatggtagactctctcttaagtagactaaaccttctcattgaagccaccagacttttctgttgctgcccaaatttttgaacattatctgccaaattgttaatactttcctgtagtttttggatttcatgtaggtgtctctcagctacaggctctctttcataaataacagcttgctgtagaaacaccccttgttcctctgtttctgtagttgatacatgactgtctctagagagttcaatttcctttgttctctgctttagttcttgaagtcggtctttcatcttccctttcctcctaagaagcaaaaatttttgtgttgaacaagtagaaatttggtatttttccccagtagcagttgacttcacataactgtctatatcccagcaaaagttctcctagttttctcaaatgaggttaaaaagttagaaaaaaccaatgagtttcctcataaaaaccatttaaatagggaaagaaatataaaataatttgtaagttactttgcatgtgagtgctatttagttgtgtgcaatagctgagaaagcagtgatgcagacacagttggtcaaaaatatttgtcacatgatagtttttttttgtaataaagaatgcttttgactataccttcaacctataggattagtcttcagatgccaaaaatgcccttgttactaaagatactgtttccggttaatttgg

SEQ ID NO: 107175 - DNA, 1447 bp, Homo sapiens
gtttataggaagaattaaaaatgaaaatttctcttgtactaccaaatttcagacccattttttctacctgacttgttactatttgagggcaagaagaaggaaattgctgtatctatcaaaatcatatatatatatatatatatatatatatatatatttattttttttttatttttttttttttttgagaaggagtcttgctcttgtagcccaggctggagtgcagtggcacgatcttggctcactgcaacctccgtctcccgggttcaagcaattctgctgcctgagccccataagtagctgggattacagttgcctgccaccacgcccagctaatttttttgtagaaatggggtttcaccatgtttgccaggctggtctcgaactcctgacctcaggtgatccacctgcctcagcctcccaaagttctgggattacagatgtgaaccaccatgcccggccaatcacatttatatttattctttgttttaacagttctacttcctggaatctgtactcaaaataagaaatgactcctttacacacctactttttatagcactctttgtaaaaacaaaacactggaaacacaaaagtccttcagcgtagaactggctgaataaatgatggaacattcaaaggggagcattttgcaattatagaaaatagtgaagattttattatactgcttcagggtacttcaaaatttactgttcagttaaaacaagcatgctgcagaagaatatatataatatgctaagttttaggaagaaaggaagggtagatataaatattgtatatatacacaaatacataaaccagtcaatagcattgaatattcacagtgcccaaattatggtccttgaaataccattttctccatacgcttgtttatattttcaaaaagaaataatgggaggatgaactaaacacgaatgaaaatggttacctataagggaagggaaggaaaaggcagagagatagcaaatagttcctttctgattgtaccttgtttttatagttctgaatttagaaccatataaatatttttttatttttattttttgagacagggtctcactctgtcacccagcctggagtgcagtggcgcgatctcggctcactgcaacctctgcctcctgggttcaagcgattctcatgcctcagcctcccgagtagctggtattacaggtgcacgccaccacgcctggctcatttttttttttttttttttttagtaaagacagggtttcaccatgttggcaaagctggtcttgaacccctgacaaatgatccacccacattggcctcccagagtgctgagattacaggtgtgagccaccacgtccagccgatataaatattttagaaattaaatcttaaaacaaatacacaaacgatctctaaaatgcaaaagcacctagaaagaaatgaacctaggtatata

SEQ ID NO: 107176 - DNA, 1027 bp, Homo sapiens
tatattcttcaataaaaacttcaattcttttttgtttaaacaacaaatacataagtatatatagatacatatatttatgtatgtttctgggtgatgtatgtctgtacatgatataggtatgtatgtgtgggggttggcagagaaaatcatctcttagtgattatatactgaacagattatatacggaataatacagatgaatagtagtcatctctagattgtggaattactggtaatatttgtttgcttttgttatactttctgttttactgaatgtttgacatttagcatcttttaatgatgtattcatgaaatcatttttaaaatagaagtctcacagtgtccttgaagttacagaatcctgttaaggtatttgatttcctctcccttaaaactatcttagataaaaccatcatagtaaagataatgtattttattttttgttagaatgaaggaaaacttgaaagagagaaaaaaaaccaaaaaatggagaaagacagtgatggctgccacctgaaacataaaatggagcatgagcaaatagagacacaaggccaggttaatcacaatggccaaaaaaataatgaatttggactagtagaaaattataaggaggcattaacacagcagttaaagaatgaagatgagacagaccggccatcattggaatcaggtaataaatctagttatttaaagtaattatcttatgtatatataaataaaacttatacttcatctcattttttatgtttgtttttacaaacgagtacttcaatatttttctgtcttcaaatgccatatttaccatgattttctcaaggtcttttattattcagtttgttcctaacctgtttttccatgacttaaaatgtggtcctttgtaacttataaggatttcagcagaaaattccatttttattttcataaatttgggatacagcatagctctcaagaatccttggaatagccctccccctcctccccctcccccctccctcttcccctctccctcttcccctctctccct

SEQ ID NO: 107177 - DNA, 1052 bp, Homo sapiens
caataactcccacagctcatccttgttctgtactgtctcatatctgggatgtgatttaaaaaaaaaaaagatttcaagaggctttttttttttctgtagactttgtagcagtctggctactcatatcctataatgacttatttttctacttagtgtactcagaaagtcatatactattatttgaccctgagcaaaatgagcaatgaacctcaaatccatttaattagctgtgccttctgcttcatttaccctattgtggggtttttgtggtaatttaagttttgcataaacacacactaaatttgccataggcaaaataaaggtttctcagcttaggaagtagtctgagcatggaagatggtatggggaaataagaacagaatgaaatattttgtgttttaactgcttgtttgcaagacataatgtacttgtagagtctacttccagggaaagtcaagtgctctttttttggcctatttagaaagtaatttattcaatatttttagtttcctgtagtagtgaggaagatttagtatttagttttgctcttttttagtaacctttcttgtctagtcatcctctgagcagccctttaaaattggagtttaccctggttcaattcttgctctatttgttgcctccatgttctcctcaggtaagcccattcatggcatgacttttatcagtatgctgtcatctcaagctgtgaggttcttcctaagatttagtcccatacttctgttttttagcaacttcagttacttggcaaactcaaaagtgtattattatttttccctttcaaacttatgttgcctttgctacctgcatattttatctcaattaagtgtatcaccatcagtctggtttcctcctttcttctctataccttcactacctttgtagtaaaaaatgaaccttatataaaaataggtctggcaactgccctcagctcctgggaggcgatctctaagcccttggaatgtgcttcctgataagtgtgtctttgtttacctgggtgttgaggtcacacctgataatctaacgatgtgatt

SEQ ID NO: 107178 - DNA, 1032 bp, Homo sapiens
agtttttaaaataaagacaggatcataacaatgctggattcagtcctgtcagaggctcatgaggcaaaaggaagagtcaggaatactgatcctgtctcttaaaatcacaggtaagtgaagtgtaaaactaggaccacattcacctgattcgtaatataaaattgtattggtatgtatcatattaatattctcttattttctctttttctatttctagggagatactaacatctccatcatgctggcaatatgctgtcctgcttaaccgattcaattatccttttgaactggaaaaggatttacatttgaagggctatcacacactctctcagggatctttacccaactatcctaaatcagtgaagtgttaccttagcagaactccgggccgaatcccttcagaaagacaccaaattggaaacctgaaaaaatattatctcctaaatgctgcttctcttctcccagtgttggctctggaattaagggatggggagaaggttctggatctctgtgctgctcctggagggaaatcaatagctctgctgcagtgtgcttgtccaggtagtgtgctttcctttcagtatttgacaactttttaatatctgtatgttatagagaattctgaaagtatatatggggagaaacgtaagactgagtttgcaaactcaggaagcctgaaaactgagatgctatggagaagaatggaaatttttgctgaggaagtcagtataaataacatttttttcagcaatttaattctagcaggtgattgggaacaaaacttcaacatttcgcaaatacaaatctgtcagataatatgaatgctgataagcctgataggtattttttattgtttacctttatacttgagagtcttatgtagatatccctgtcatacttttctgcaacaaaaacatatacatttaaaataatttttgatgtcaatagactataaggttccaaggcaattctttccagtagaaatataatgtgaagtatatatatacccttaaatatttaagtagttccatt

SEQ ID NO: 107179 - DNA, 2030 bp, Homo sapiens
aaagcctgtggagtttttaaaaggaataatggttcctgtgggacaggaagcttttaagccaggacagttcctgcgtctgccgcaatgtgagtttcatcttcttgcacctgaattaccacctgtgtttactcttaagcgttagttctttagagtgagagccatgtctgaggtattggttgtataacatatctttaggaatttataattttttataggttttacctctaataaaattaaacttggtggagcaaatgctgagagcttctgagagactgtgtaggcatgactgttgtaaatgttttatgtagtaggtatgtgcatctatatatacatacacatataccttatttctgtttttaaagcataagaaaataataatgtttacctctgagccctatttctgcataattatgatgagttaatttctttctgaaatttatttgctgaaaagtagaaatttaacagttccattgccttcatttgaaactttttaatcctttttatttaggttatcttcattgtaatgaatatgatagtctgagattgaggtggctaaggcagacgttggaatctttcatcccacagcctttgataaatgtaattaaagtgtctgaattggatggcagaaaaatgggagatgcccagcctgaaatgtttgacaaggtacttttattacattgtgacaaactgatggacgcccagtaataccactattatgttgctttgtggttgttattttccatctgttctcagacatagcctgatacagtttctcagtaccctggaaaattttgataaagtgaacatggaagcagttttcatttgatggtcagcatggttcaaaggaagcagtaacattgggattgaggattatagaatgttttatattggcaggtaactcaaagatactcaggaaaagatcggatattatttgggtcagtactgtattgctttaattcagtaacatttcatatcagagtatgacagttgaagaaaaagaggttatttcagtaagctgaagttgaaatattagttcttagaaataagtgctgagaattcagaaatattattaatgtctgattacaatgagtaacttttgtaaaaatttttgctgtggttgtcaaggatatcaaatagcattagtagacctagtaaactttaattctcccatcctaagcccccaaaaacaaacactgaaagtacatggtaagtttttctgaaaagtgttagtgaggaaatgtcataaggaaaaacctactgtggtgtattttcagttaaaaaagaaatgtttttacttatttcctatttgtttaccatgttttagagaacttctctatctacttcgtgcctgagaatagattgtcagtgcatatttgcatcacttgtcttttttttctctaggtgttagtggatgctccgtgttcaaatgatcgaagctggttgttttcttctgactctcagaaggcatcctgtaggataagtcaaaggaggaatttgcctcttctacagatagagctgttaaggtaaggactgttaatacaaaagtgtattttggtgtctgatgtaatttacacaggcataatagaacatgtcaggcccccagtggagggcttgctgtgtaggtgtcaatgattattcctccaaaggctacactcaaaaaattcccaacttcttcccctttatcgctcatactgtaatgctcaccgcccctccctccacccccagtgatgtgtagtattgctgtgcattgtcttttaaagggcataggcaattttactgtagttcaaagttgtttgctcactgggacccaaccctgggggttcatagccctgtttcttttaccagaatctgagcagccccttaggaatagctttgaatcaggatgcatgttttgttattgttctggatgaatcagcccctagcaagttgtagctggttgttagcgcttatctcccctctgagaattttccagaaggacctggccactgaacatttggtttcattaagaacacagccattttgaaacatta

SEQ ID NO: 107180 - DNA, 1173 bp, Homo sapiens
tagggtttctgtggaatcgcttgaggagctgtcttgaaggaatagatagggatgaaccggagacccccttagtctggcacaccaaatctagctagaggcagggtatcttttttccggttaagcatgtagaatttcacttgaagaaagtttcttcttaacacacacacatacacacacacacacacacggtttgaataaacccttttaaatcattaaaatcaactataagcaatctccattcataagcacatttgccatgggacaaaatcaggtcaattctggtggttttcttgaaggcttttcttttttttttttcatttgtatgagttaagaggcaatggttgataggtcaaagaccctaccttgaagttaggcaggcctaatgtgggtttgttgtcactctttgctcacctaagcaacacaaaatgagatccttatgttcaattttagtggagcagttttaatccctactgttccatactcatattaatgaggcaatgaactgttaagaagaggtagtaaatgtgaagtctccaaatggaaaccaataataaatatgttaaaatttgtcatttataatctatttcaaaaatctaatgtcattactctgttgtactagtactttataagaaatattgaatataaatataaagaaatattctttataagaaatattgcttcttcaaggtaaaaacttactgtcagtggaaagaagataattatcagcatttgtttttgtttctgacaaaagaatagccgctgggtatggtatctctgaaaacggcaagcttggtcatgtttctttatcttgaatttacagaagtcttttgataataaacagtgtgatatctagaaatttgattacttaactgtgagcacagtgaaggctaccctcaggcttgtaaaataatacttttaaaactgatgacggcattaggtaactatcaacctagaaatgtctgtgttttagattcttatagtaccctgaaacttaattttaaatctgcatctatttgatagattgtacatgagcttcaacttttcaccttaatgttttctttggtcgtagtgtataatagtggtcggggttttttttgtatttgctttcttgcccagactgctgtttgccagcagaaatagtaaactgatagaaacagggtgaaatgatgagaa

SEQ ID NO: 107181 - DNA, 1047 bp, Homo sapiens
ttttaaatttaattttttgttgttgttgttgttaaacttttttgttaaaaactaagatgcaaacacatactttagcctaggcctgcacagggtcaagatcatcaatatcactgtcttccacctccatgtcttatcccactggaaggtcttcaggggaagtggcatgtgtggaactgtcatctatgataacagtaccttcttctggtaacctcctgtaggatctgtctgaagctgttttacagttaccttttttttttttaagaaggaggacctgcttaaataatgataaaaagtatagtaaatactagatgataggaatttttcagctgcattataatctcatgggaccactgtctgcctgtctttctatcgagagagagagagagatttaaggaactggcttatacagctatgaaggctaagtcccaaatttgctggatgtgctagagcctggagacccagggaagagtcaacatcgcaggtcaagtgcaaaggccatctgctggagaattccatcttgttccagggaggtcagtcttttgttctattcagttcttcaactgactgaagcccacccacattatggagggccatctgctttactcagtctaacaattcagatgttactgtcatctaaaaacaccctcacagacacacccagaataatacttgaccaaatatctgaatatcatggttcagccaagttgaacataaattatctagccatcatactggctttctaacctgtagtgtttgtgaccttgccctctgttacttgtttattaaggcagttcttcacttagattctgctacaacaactccacgtggtaccaaattcagtattagttaagacagtttttcttctaatataacggagagagaaagagactcaaaataatagggacttaaataagaatctgagtaggcttcccagagttgtctaggtaatcagtagatggccagactccagaatcatcagggatccaggcctaatcttcaacctcacaatccagggtggctatcccagttcttgctgtttaatctgca

SEQ ID NO: 107182 - DNA, 2520 bp, Homo sapiens
tgctagcacctgttatttttttactttttaagaatgggcattctccggcgctgcggctctgccgcggcggcagcatgggtggcccccggggcgcgggctgggtggctgcgggcctgctgctcggcgcgggcgcctgctactgcatttacaggctgacccggggtcggcggcggggcgaccgcgagctcgggatacgctcttcgaagtccgcagaagacttaactgatggttcatatgatgatgttctaaatgctgaacaacttcagaaactcctttacctgctggagtcaactgaggatcctgtaattattgaaagagctttgattactttgggtaacaatgcagccttttcagttaaccaagctattattcgtgaattgggtggtattccaattgttgcaaacaaaatcaaccattccaaccagagtattaaagacaaagctttaaatgcactaaataacctgagtgtgaatgttgaaaatcaaatcaagataaagatatacatcagtcaagtatgtgaggatgtcttctctggtcctctgaactctgctgtgcagctggccggactgagattgttgacaaacatgactgttaccaatgaccaccagcacatgcttcacagttacattacagacctgttccaggtgttacttactggaaatggaaacacgaaggtggattcatcattcctttccctttatgacagccacgtagcaaaggagattcttcttcgagtacttacgctatttcagcatataaagaactgcctcaaaatagaaggccatttagctgtgcagcctactttcactgaaggttcattgtttttcctgttacatggagaagaatgtgcccagaaaataagagctttagttgatcaccatgatgcagaggtgaaggaaaaggttgtaacaataatacccaaaatctgattggtcatatttttccaaagagtaatgcagtctggatataaacgtattttctgtcttccttataaggggattctcccagctgctgaatttaaatagtaaatatcacattttgttattaacacagctataacttgccgtggttctcagatttattttggactattttgatgccaagtgagtataagagcttgtactgaaaccatttatttctttctattttgctatttgcaaatgcttgttatcttccctacatgaagtggcagtaacctttttcacatttaagctacccttctaccttttgaagtgatttgcagttactcatctgagacagcatcagtatttgactaaatcattgtttcacaactgaatagtcttgttcttttagtagcaatgaaatcctaagctcttgaggccattcacctgccaacctgaccatactgctttcaaaagtcttttctcatcagtagaatctattttggtcacttctagtcaatgaaaaatgtaaacttttaggagagaatgtttcctaggactcacccactccattcaatgttacatataaaatagtgtgatcaatcacaatgtccatctttagacagttgattaaataaattatctggtctttgaaaagaccgtgctgggcgcggtggctcttgcctgtaatcccagcactttgggaggctgaggtgggcagatcacctgagatcgggagtttgagaccaagcctgaccaatatggagaaaccctgtctctactaagaatacaaaattagctgggcatggtggtgcatgcctgtaatcccagctacttgggaggccgaggcaggagaattgcttgaacccgggaggcagaggttgcagtgagctgagatagcgccattgcactccagcctgggcaacaagagcaaaactctgtctcaaaaaaaaaaaaaaaaaaatgatggagctctgaatgtgcttaagtggaaagatatctatgaaatatggttgttttttaaaacacaaaaattatagaatatgggatcccgtgtgtgtgtgtgtgtgtgtgtttgaatgaaaaatgcttatatattgacagaacacttctagaatgatacccaaactcctggagtgggagtggggaatgccttctatgtacacactgttctactgtttgaattttttactatgagcccaaattgtataatctttttttaataaaggggagaaaaatcacttaaaaaaaaaaagaaaaagaatgggcattctgactgtttagttatcttgaattttttaagagcatgaaaatgaaacaatatcttgatttagaaccaatttttatttagcacaaattatcaatctgtagaaagttttagtagtctatattgaatcataatttttctataataaagataatcactcactaataaatctatttttcaacattgaatgtctttacattagacttatttgcaataaggtagtttaaattttttatttccttgttttattggacacttggtgagaagaaacaaatagcactaaacaattaaattataaatgaataaaggtggtagatcatggaattcaacttccatcttaagaaactgaaa

SEQ ID NO: 107183 - DNA, 1035 bp, Homo sapiens
caacaaatacttgttgagctctgttaagagtaaatctacacagtgaggcctgatatatctgttttggtttggtacacacagtgaagaaattaccacggcaactcttatgttttgcattataagcatagactttatgttgtgcaaacacagcctaagtttaaatttgttataatgtttcaggggaagaaaaaggcaaaaactgtgaccagtgaaagaaagctagacctctacttttttctaagatgttctatataaaatttataaccaataaaattcctcatttgtacgtctgaaagggatgttacaataaattcattatttctaattgttggtctcgttcatgcactatttcgtgtaagaaaatattaaaaaaattaaaatgtttatttgtattccgaagctcactcggaatacaagaaagaacaaagattttggggaaatatgctgcccttggttacgttcaacagtagggtattgtttacaaggcatacagtatcatttccgaattctattatcacggttttctcagcctggtaacaattctaaacttggtagtaacactgtagtatgtaaaatattaatgtttctccttagactatataatatttaaatcaaaaggaaaagattatctagctctcgggagagcagataaggatatataagtaattggttttatttccaagtttttcagtattgttatggctttctccaaagaagcaccttgaatccattcattcttttaatagtggaaatcacagtagtaattgctttattccttgtatctcaagcaaagtgtaaggattaacatgcaggaaggcacacagagagaaaagtagtaattcaaagataccgatgtggaggctagtcccgaaagtgatcccttttaaaatcacacctcctggtattcagaccctaccacattgaaaatgggatacccctgtgtatccataatatgaaagtggaaatgacacaatatgacttgcaaagtcataagaagctttgaagcttctcctttggtctcttggaaggatttca

SEQ ID NO: 107184 - DNA, 2257 bp, Homo sapiens
tttaattagttatcacaataatccttcaaggaaggtattttaacaataagtaaatctcaaaaccttttttgatgttcttctttatgaaatggccttttaagttacattactacgttagccttatactgaaatttaagtatagaccacctcagatttaaagagtaagttgaaaacaaataaacaaataaaaaggatctttcggcagacgccattatcctctgtttctctgctgcaccgacctcgacgccttgcctgtggcccacttgttcactgactataggctactgcagcactggggtgtcagttgttggtcccacccagaacgcttcagttctgctctgcaaggatatataataactgattggtgtgcccatttaataaaagaatatgtaaactgaacagccggaagaaaccttcccgaacactgaaaccaatggtgaatttggtaaacaccctgcagaagatatggaagagtaacaagcatttaaaagatctagaaacactgatgagatggttgaattacgcattctgcttcagaccaagaatgctggggcagtgattggaaaaggaggcaagaatatcaaggctctccgtacagactacaatgccagtgtttcagtcccagacagcagtggccccgagcacatattgagtatcagtgctggtattgacacaattggagaaattctgaagaaaatcatccctaccttggaagagggcctgcagtttccatcacccactgcaaccagccagctgccgctcgaatctgttgctgtggaatgcttaagttaccaacactataaaggaagtgactttgactgcgagttgaggctgttgattcatcagagtctagcaggaggaattattggggtcgaaggtgctaaaatcaaagaacttcgagagaacactcaaaccaccatcaagcttttccaggaatgctgtccttattccactgacaagagttgttcttattggaggaaaacccgatagggttgtagagtgcataaagatcatccttgatcttatatatgagtctcccatcaaaggacgtgcacagccttatgatcccaatttttatgatgaaacctatgattatggtggttttacaattatgtttgatgaccgctgtggacgcccagtgggatttcccatgcggggaagaggtggttttgacagaatgcctcctggtcagggtgggcgtcccatgcctccatctagaagagattatgatgatatgagccctcgtcaaggaccacctccacctcctccaggacaaggtggtgagggtggtagcagagctcggaatcttcctcttcctcctccaccaccacctagagggggagacctcatggcctatgacagaagagggagacctggagactgttaccatggcatggttggtttcagtgctgatgaaacttgggactctgcaatagatacatggagcccatcagaatggcagatggcttatgaaccacagggtggctccagatatgattattcctatgcagggggtcgtggctcatatggtaatcttggtggacttattattactacacaagtaacgattcccaaagatttggctggatctattattggcaaaggtggtctgcagattaaacaaatccgtcatgagtcgggagcttcgatcaaaattgatgagcctttagaaggattggaagattggatcattaccattagagaaacacaggaccagatacagaatgcacagtatttgctgcagaacagtgtgaagcagtgtgcagatgttgaaggagtataatgcaagatatttttttcttttttatagtgtgacgcagtattctggaaagtttttctaagactagtgaagaactacgtcttttttttttttgttatctgcttctgtttaaaaagccaacacgcctctgcttcacaggtgttctgcatttgaggtgtagtgaaatctttgctgttcaccagatgtaatgttttagttccttacaaacagggttgggccagggaagggtgtgcaaaaactaacactgaaattttgaaacagcagcagagtgagtggattttattttttgttattgttggtggtttaaaaaaattccccccatgtaattattgtgaacaccttgctttgtggtcactgtaacacttgggggtgggacagggaggaaaagtaacaatagtccacatgtccctggtatctgttcagagcagtgtgcagaatgtaatgctcttttgtaagaaacgttttatgatttttaaa

SEQ ID NO: 107185 - DNA, 1283 bp, Homo sapiens
ccactctgagccaaacctagccctaaacccgttccaccttactatcaaataaccttaaccaaaccatttacccaaataaagtataggcgatagaaattgtaaaccggcgcaatagatatagtaccgcaagggaaagatgaaaaattataaccaagcataatacagcaaggactaacccctgtaccttttgcataatgaattaactagaaataactttgcaaagagaaccaaagctaaggcccccgaaaccagacgagctacctaagaacagctaaaagagcacacccgtctatgtagcaaaatagtgggaagatttataggtagaggcgacaaacctatcgagcctggtgatagctggttgtccaagatagaatcttagttcaactttaaatttacctacagaaccttctaaatccccttgtaaatttaactgttagtccaaagaggaacagctctttggacactaggaaaaaaccttgtaaagagagtaaaaaatttaatacccatagtaggcctaaaagcagccaccaattaagaaagcgttcaagctcaacacccatcgtctaaaaaatcccaaacatacaactgagctccttacactcaattggaccaatctattaccttatagaagaactaatgttagtataagtaacatgaaaacattctcctccgcataagcctacatcagaccaaaatattaaactgacaattaacagcccaatatctacaatcaaccaacaagccattattaccctcactgttaacccaacacaggcatgcccacaaggaaaggttaaaaaaagtaaaaggaactcggcaaatcttaccccgcctgtttaccaaaaacatcacctctagcattatcagtattagaggcaccgcctgcccggtgacatatgtttaacggccgcggtaccctaaccgtgcaaaggtagcataatcacttgttccttaaatagggacttgtatgaatggctccacgagggttcagctgtctcttactttcaaccagtgaaattgacctacccgtgaagaggcgggcataacatagcaagactatgttactacatacaactaacatgttactgagcaagtttttctcaaaaaagtagaatgctaggattatagaaaaataattaaaataatacatttcacccttaaaaggagctattagcaaactggaaggtatagatatacatgaaaaatatattttatatacacatgtacaagtatcaaataattttattttaaatgtgtgtgtgtatacacacatacaagtacca

SEQ ID NO: 107186 - DNA, 1048 bp, Homo sapiens
tccatgacacttaaatgggtttcagctgagggtctgttcatgttgctctgaatttgtaaggctaagtgaaccccttagcctcaccagaaagcatattcttccggctgcagtttactatacaatttagacctaattagatgaggcattagcagcacctgatgtagaacctccagcatccactgtcctttacatcaaaggctttttggttccaccttcaggattggcatactcaagagacatttcacaatcctaacgcatacttcaagttacttaaccaggcaacatactctgtcaaagaacttctttcaagttaaagtaaaaaaggccttaatgtagaacaaaaatcgctagccagaacgcagggggggccccctgccccgccgcgcacgccgcggagaccccgcgcggctgaggcgtcgccagagccggcctcgaccccgagctgggagccccgcgggccgcgcccgccgccggctccacccacccgggtccgggaggccgaggccatggccgcgacagaggagcggagcctgcacaacttctttgccaatcgggacaagaagaagaaggagcagagcaaccgggcggcgagttccgcgggcgcagcaggcagcgcggcgggagcagtggagctccgcattctagagggcggcggggcgggcgcagggacctggctgggcgaaggcaggaccgcgagtgcggaggctgcgggcccaggggccaccaccaaggctgtgaagaatggaaaggcttggagtaaaaagaggttgattacagaggcctgggggttcaggcaatgcaaataagtgaaaaggaagaagatattgaagagacaagatccaggtgataactgggaagaaggcggaggtggtggtgatacagaaaaatcttcaggtccctggaataaaacagctctggtacaagcacctcttgctccagtaattgttacagaaaccccagaactggcaatgactagtggtgtgtgtgtgtgtaggcctcctggggccaggttaaccacaacaaggaaaacaccacaaggaccaccaga

SEQ ID NO: 107187 - DNA, 1032 bp, Homo sapiens
taaggataaaaaattaatatccaagtgaataatgttagattgagcatagaacttttaaataagtgatgtgacttggcttttttttttaaagctttatcttaccctttaaaaatgttatatttagtgatgagagctttctttaaaatataacaacacaaaatctaaattttactagattctgtatgcttttgtttattgattattttacctttagatgaacataaaattgacagtacatgtatggtttacgatatatccaatttaaaatatttcttcaaatacctatagttacttgtcatcccctatcatgttaaatatttttattgttattttctctttcctaactgtattaaatatttgtttttagtagtattgcagaactttggaattgctggtgttctttaatatttatctttagaaattaggtaaattgctgtttgatagagcctttatttttatatttgagaagcacatagaattagaaattgctgccagaacttggtgtttttaaacagagaaaaatcaatagcagattacccgtgattagctgttgacatttagatttgtacttttagaatgtcaaaaggcagtgaaaactatcaatctagtttctgtattataattatactctatttttaaattaaacattttatggtccttcttcccatatatgtgatatagccttttggaaaaaattaattataataattaaagatattttggtaaaaatgatgacctttaataattatttagtcaaaaattagaggtctactgataacgctaatagattatccctcactttgaatacatctaggtttttttgttataattgcaacaccctattgcaggcatcatttttaaattgtgaaaataaatatttttataaggttagattaatatatttcttctataatctttatacagtatctagcatatagttatttattgctgtcataaaagttattttaattctatgccagattatatatcataagtctttgatgtgttttctctgatagtagattatttact

SEQ ID NO: 107188 - DNA, 1014 bp, Homo sapiens
ccttaacaaatgtggtggaatgaatctcgtcatttctgaatggagatgcatagtaaactttggcaagaaaaattatgcaaaaatattgccaagaatgtcacagtattaaggggaaataagcatcaatgatgattatttttcacattacttgtataaaattcatcttaggttctatttggtttatgtaggaagaaactctgaaatataatctagagataatacttggctactacatgaggtatgcagcacttgacaagtagctttcatctctgtgaattttttcataaacagtattctcttttctccttccttcaaatcacaaaatcacttttcttggcatcatactagtgcatgaataactatctggcaaaattatttagtccattaatatttaacctgaagtttgctaatttattgctaccatggggaaacatatgaagaagcttaaaaaataataacctttttcctaggttggcaccagacagattaactaggttggctaacactggtctttttgtggccttgggcagatattttaatctctttcagtcacagtttcctccttggtaaagtgctgataatccttgaaggttctattttacaaggttgttgtagcaatggaatactgtttgtcaaaacgttttgaaaattgtgaagtgttcaacaattgtattctttcacatactgttttacagcaatgctgacatctgtaaacattgccaatcaagtcatttaatcattcattccacatttactgaacaaacattaattgaattccaaaaactgtgattcatgttggcattaaacagatgagccgttctacctcccttttgagtcaaaaagaagagaacagtaaaaggaagggcagataagccagttgtatccaagtgtcaccattattgtgcctgtgcacacttcagtcctgcagcagcatctgacagtgcaccttattctgtgctgccaacacacatagtcttgtcttgggttattagattgaaatagggcaaaaagggg

SEQ ID NO: 107189 - DNA, 1111 bp, Homo sapiens
attacttttttccctttttgcagtgggatgccatcactgaaatggatgaacataataggcccattcacacataccaggtatgtaatgtaatggaaccaaaccaaaacaactggcttcgtacaaactggatctcccgtgatgcagctcagaaaatttatgtggaaatgaaattcacactaagggattgtaacagcatcccatgggtcttggggacttgcaaagaaacatttaatctgttttatatggaatcagatgagtcccacggaattaaattcaagccaaaccagtatacaaagatcgacacaattgctgctgatgagagttttacccagatggatttgggtgatcgcatcctcaaactcaacactgaaattcgtgaggtggggcctatagaaaggaaaggattttatctggcttttcaagacattggggcgtgcattgccctggtttcagtccgtgttttctacaagaaatgccccttcactgttcgtaacttggccatgtttcctgataccattccaagggttgattcctcctctttggttgaagtacggggttcttgtgtgaagagtgctgaagagcgtgacactcctaaactgtattgtggagctgatggagattggctggttcctcttggaaggtgcatctgcagtacaggatatgaagaaattgagggttcttgccatggtaagaaacaaacatttaaataatttatcttgcatttaaatgattttaaaaaagttttattttttaaattaacaaatagtaattgtgcatattcatgggtgtgtagtaatgttttgatacatataatgtatactgatcagatcaaagtagttaatatatccatcatctcaaacactgatcttttcaaaatgacgatttattaaaagtaaatattatacatttatttcaaataatacatttttgagtggtatacttgataattaattgtgaaagcaattgattcatattaaccataagaaaatttctgtcatttttctcctgggaaaggtgtatgaaattgtgccaaagtgctttcagtaaagtcgttaaacaatatgaattgctgtatccgcctaatttttataaaggaaagcagcatcaacaa

SEQ ID NO: 107190 - DNA, 1044 bp, Homo sapiens
cttttgtgtgtgtgtgtgtgtgtgtgtgtgtgtgtgtgtgtgtgtttttgagatggagtttcactcttgtctcttgtcacccaggctggagtgcagtggtatgatctcgatttactgcaacctctgcctctcaggttcaagtaattgtcctgcctcagccccctgagtagctgagattacaggtgcctgccaccatgcccagctaattttttgtatttttagtagagacagggtttcaccatgttgggaaggctggtctcgaacacctgacctcaggtgatccacccacctcagcctccaaaagtggtgggattacaggcatgagccaccgcgcccggccactttggttatattttctgtgtaataacaaatagtttatattgtcatattcccaactgtctctagatttgaaaagagacaaaaatctatttttaaaaaataaatagcagtaaatataggagagtagtttgtgttagccaaagttctttatgtgaatgtagctgtgaagggtattctgaacttatatctgattttgcttccagaattctggaatttcctagtatgacaaacaagaaggcctttggttcatttggggctaatttaatattattatttaaaatttaagattggggccgggagcagtggctcatgccagtaatcccagcactttgggaggttgaggtggacagatcacttgaggacaggagttcgataccagcctagccaactatagtgaaacactattgtgactaaaaatacagaaaattagccaggcgtggtggtgcatgcctgtaatcccagctgctagggaggcttagacaggaactctgggggtggaggttgcagtgagccgagatcatgccactgcactccagcctgggtgacagagcaagactgtctcaaaaaaatttaaaaataaagtttaaggttagaagctttttggtgaaatattaaatggcacatgtaatggcacgattctgttgtctttggaaacagtctcaataatcgtgtatgtagaataacccaaagacaagaacactgaat

SEQ ID NO: 107191 - DNA, 1730 bp, Homo sapiens
agtaagaaatttaggttggaactgggttataaaggtctctagacaaaatgtttggctctagatttaaggctcagagaatttttgcaaaagcctgttatacagatattgctgaaatatgaaacttggaggaattcctgcctttatctgcttcaagaaatgattgctcaactttgtttcttggctgtatcatgcatgatggacctgtttaaaatgagttctgtgcaatgtttgtaactgtgaagagagatggtaaggtgagaacagtatttatcaagggctgactgtgcacttacttctgggctgggtacttttacttgcaacgtatcatgtaaatctcacactcagtgtgaaatgttggtccacttttacgatctgacaattgaagaaactgagtttgggagagtgctcagtgatggatgctatgggcgttttgaatggaacaattctttgaactggactcttttgtcctttgcaagatgtttggtatccatgattacacacactaattgccagtagcatcctctggtcattgggataactgaaaattcctccacccaggtgggtgggagggagagtgataccactcccagtggagagtgattaccctaaatcgtgagaggaggtgaatgggtgggaccaggctgctaatgagctgtggtgtaggaggtactctgtactgtcagaaatgtcagtagtacttctgatgaccagcatgggagagctattggccttcaggttaaactaccagtgttgacaacagcatcagttatgtgaggaaaggaagctttgttttctaaattgtcatgatgattgcatttttattgatttgaagcactaaaaataattggtaactagttagttggataggagatacctgtgtcacatcagcagttcatgccttcagtagtgaagatgacgagagaattccagaagtctttaggggtgtgtaatttgtgagaatcttgtccccctctgctcctctaggttaattcaaagcaaaagcttactcttggcagcagagtcaaaatatagcctgttgtagggtatcaaaagtccaccttttccaagtgatttccatctcttgggttcaataaggtgtctaccagatggctaatttgggaattctattttttgctgtgaacattccttggaaatggactcaattgtatgctctgaaagtgttaaagttgcaaaggtaccacaaattgacctgcagtaagtttatataatcagaacttctaactttattgacagttataacatttttaagtttttttactcataacagcggaaaatatgtaaaaagggtaatagcaagttttgtaaaataagagaaaatattccctcaagacaaaatattttctatccaaagttctgatgaaatataccaaagtccagatataagaaacgttagttaccaattattaaataaaatgatagcaacaaactgtaggtggttgtaaaattaaggaaaataatctaggctatatgctgaaaagaaggaatcagcatgaagtaaaagttaaggaggtaatacctactttgagtctgttcaatccataagttagagtggctgctttgtgtctcatatggtgcaaagcaatgtggatataaccataaatggatgaccaaatatgccttcatagaattcacacattaatggaggagataaaagtgtacatctctgttcttaatatgaactcattataaaccaaacatgtctttggagt

SEQ ID NO: 107192 - DNA, 1046 bp, Homo sapiens
acatttctgacaataatgcgtatatttatatgttgtaaaaataatttaaaatataattattagaacaacttagtcgtgtcatcacttttcagaatcttgtttgcatgtctaaatgtgtctctacttacatagggttgtattctaatggggagggcagaaaatatatagattaatatataatatgctttgaagtaaaaataaaatggggagggactcaccataatggaagtggtgagtctaggtagggtggatatgaaaggtgtctctattgggtagcatttgagcaaagacccagatgatatccgggagttgggcatgagcaagtctgaggaaagaactttctgggcagaaggaacattcacttagaaggtcctggggcacaatcatgtggcacagatgccagtgtggacagagacacagaattagaggaggagtgggtgttagtaacatggtgttagttcatagtaaggagttgaaatgaaatgatgagtttacttttggaaagtatcactgggcatgtgtttatatgtgtgtgtaaatgtgtttttatatccacacatatattatctgtttatctgtgtctggaagaatttacagaggaggaaggatttcagttgggggggaggtcagccaaggtcagattctggggagctctgtgagggcacagtcttgggtctccagtgcgctgtcttcaggacaatttgttgaatgatatgtgaatgaatgctccattttagaaagcagctaaaatactgttgtgagttcacatcacagcgagggattcagggtattgaatcttgtgggggtgagtcaaacattcagaatctgaaggttatgaggtggacggagaacttggggagaatggaacagtcattcacaacacatgtactgtagacagctcaggcacacctcagacgtactgagattctcactctgcagcctgtgatttaactgtaattatgggtcttattttgggggcgtgagttggggaacaggaaataagtcagcctcaaggtagatacataaattataggagaggactgacc

SEQ ID NO: 107193 - DNA, 1073 bp, Homo sapiens
ataatttaattttaagaaaataatatctcttaagtgacaggttaggagctctcctttatgtaaattatttgaaatttagaaggttaaagtgatccttttttttccattgcttatgaaaaatattttgtctggcacagagtcacacaaaggctaaatggctgtatgttggattcgttttcagccatggtccaaataaagttgcttgaaaaatgaggagcttttatgttacattgaccttcatatttgagctattttgaaagattgattcttaaagttctgttagctaagatgaggctatttagaaatgtaaggtggttttatttgtgcgtacatgtgattttgaattctgctcttcaccccctgccatgaataaaatgtgtgctttctaaaaatattcctaattgaaataccctgggtcccaaagggggttaaattgtgagcaaacaataggaacagattgtggtctctcatgaagcttgaggtgaacatggttctctttccttggtatttattttttaagagactgaaaatatcaccccaagccttttgagtcctttttattttatttattttattttatatttgtactaagcaaacatctgagtattcactgtttttgagtatatgtagctactgtgttctcattttttaatgttttgttttatttttaaatcaactgaaaatgaccttgttcttgttgagtaattttttcccaccagctccactccctacttaatggttttagagaagtatgttgtaggataggaatggctggcatattctttcaagagacttatatgctcctccttaagaaaaaaagactgatgttataattatattgttcccaatgtaacagtgttttctgatgaaggtaagcaggcgcaaatggaaatatggttatagatttttttttttcttttgagacagggtctcactctatcacccaggtggagtacagtggcgtcctgaatagctgggactacaaacacgtaccaccatgcccagcccccttttttttttttgtcaagacaaggttgccatgttgccctgtctggtctcgaactcttaatctt

SEQ ID NO: 107194 - DNA, 2241 bp, Homo sapiens
ctacatgttgatcttgtttactataccaggtgccacagcacccatcacatgctacgggctgcttaaggaggtgacaaaatactgctaattagacctgcaaaaaagttcagacatcactagaatgtaggtaccatgaaagccaggattttggtacatttttcactattgcatctaaatgcccataatagtatcttgttgattatttattgaatgaatcaatactttaaagtttacattgaacctaactgcttttttgtttacctagttttagcctgttcatttggagctgcattccccagaaacattgtttcaaattctctaaattttgagaacccaaatcctagtttcacctttttgtctctccttcagcttttctctcctttcactttactgaggtcagagccatttgttgggccatattgtcttttcacttacagaatttataaggctttagccactctccttgccactttacttggcagagaagatgtccttctctccaatgctaatactttgtctttattataagtattagaaattatattgttctcttcatatcatcacctccttcctttccttctggaacctgtcatctatctctttataccatagtcactccctttccaacaagtatagagctgattcacaaaacagtaagttctgtcctggaacttaaaatggattttgtctttccttccttctagttaaaaatctctgaaaaggtttcccatctacttatgactattcctatttccttgttagctactcactgtttagcacctcaagttttggactgaacacatgaattcttgaactgttatgactgtttctcctgcattcttaaggcttttccatttcttcatttattactctaacaaacatttgagcacctcttattatcaggcatgtttcaaggtggtagagatactgcagtgaataaaatagataaaaatcgttggccttgtggatgctacatcctaaaggaggaaacacatattaaatgttgtaggtgtgtgttgtgtgtgtatttactataatagtaagtacaagaagaaaaataaaacagaaagcggttaggcagttttacagtggaggggtctgctattttagatcatgctgagagaattttcattggtgagatggttttcaagtaaaggtctgaaggaggcgagagagagtgagtcatataggtatctgggggatgaatattgtaagtagagagaagagtaaaggcaaaattcccaaggtgggtgtgtgcctgatgtttctgaagactagtgaggaagatagtcctcatctttcttgagctcacagtggcatttggcattcttgactcctgtctgccttttgaagtgttctttgtttctttggagatctctggtattctatagagactaacctggtctggttttgacctcctctatctctttcactggtttcttcttttcattgtttttgacttgtaatcttttttttccatagggatcttttgttgtttcctctttttttcctgcgcacatcgtatattgccaaactacattcttaaattgtgcctctgtttatcagacatctcaacttttgtatcacaagggaccaaaaatttcacatttgacaactaaatagttcattgccctacctgccacttacccagagccctaattttcacctccctttctattctccatgtccattttttttggcttacctaatcaaattgttgtctaatttagagaactcagttatctgtgaccatattattcctcacccaccacttctaactggtcatcttatcaaactctttatcttctgtgctccagtcttcatcagccatatccctgccatagtaaacatatttcaaacttctgtgtctttgtgcatactatggcttgtgtctagaatactcttaacactcttcgaattaagctcaaatgttatcttctatgcaaagaaggtttctctacatccccactcgttaattatgtcttccattgtgtacatatctcttgtaagccccctacagtgatattaatataatgatgagtatgttcctagcttgtaagctccttgaagacctcagctaaatcttattaatcagtatacataatgctttcctgtattttgttgcgttgggccccaacatagcaaagagagtagatagagaaatgcatttggactaagagtactgcattacaacatattgaacatgagggaaaaacattgaaaattccaaagatacatatg

SEQ ID NO: 107195 - DNA, 1051 bp, Homo sapiens
gccaggttcttccaggttctgaagccagtggccctcacttaactgggttggagctattgagctttgactctggaaacctctctaaggattgcagttccattttatctcaagaccctaatagagtagagttagtgtcttcaaacactaaagcaaatatgagcataatagagaagtctgattctctttccttggaagccaaaactgctaacattgtatcaaaagctgaaattgatggtcagaacaatgttcttgtggagtcacattctggaagaggaaaaactatatccttgtccaaggtatctctttcaaaagtggagcccagaaacatttctcaggataaaatgtcttcttttccattgaaaattacccatgttccagaaaagcctattttgtcagaattaacctttctagaagttgaacagggcaaacgttttcaatcaattaatcataatgagataggagagaaatgttcagatgctggccttaaagagaattgccaagctgagctttctcctgctgcctccaaatatgaagataagccagaaccagaggtagatgccttaggctctcctcctgctcttcttaaaagtaatatatcttggattttaccacctattcatgatgaaaaaatcagtaggcaaatggcgcagaattgtgaagctcacacttgtgtgtttcatcaatctttggatatttgtgggactaaaaagatttctggtcactcagaaatggcggaactcagcttaactaatatttcccctaaattccaagaaactggcagcatgaaagtaaattcaccttttctggattctgattccagtttggaaaaaaattcttctgcatctgaggactcaagcttccttaaagtaccttctgtgctgaaattggaaaagaaatcctcatcttacagaaagaaagagaacatccattttttaaatggtggtattgatagtgtgtcatcttcctctagttaccctgaagaagttagcatgatagtaaattcacataagccccaaaataatttggattctatacaagttaccaaagatct

SEQ ID NO: 107196 - DNA, 1026 bp, Homo sapiens
tttgttagaagataaagctagggaattagtcaatgagattatttatgtagcccaagaaaaattgagaaatgatacttttgaagatactgaggatacttgggattctgaacttcaggctaatacttcaaaaattctgaacagtgatagtgttaagccacatgatgtagttagagagttcttggtttcagaacagccagtaaatcaaagcacacaaattagtgaaaataaagtattaaatgaattcttctccctaagtaacttagctagtggcacagagtcaattaagggaggagaaattgttctctaccaaaaatccctattttctggaaatggatctggactgtctgatagtataaatttgcaggaatcagatacggttttactagctgaagacatgtcacataaacggttagatgatagggtaaaaacacatttatttcgcagtgaggactgtaatgagacaatggaaatagagaatgtggataataacaaaactgagacagaggacagaagaactcttgtattaaatttcaaatggcctccacttgtgaatgatgacatccatgcacctggtacatctaaaagcagtttgtctgatagccttgtatgtatatctgaaaaaaacttgccaggacacagtaaaaacacacctcttgcaatgtcagatgtagggaaagtacacaagaaggataatgaaataaatatagggaaaattgaacttataccttccatgttagaaacagggaaaacaaacaaaaaggatgctgaattgaatattctgaaatatgaggcagtccctcctatgatagaaatgggaagaatacataaaatggatgctgaattgaatgtcacgaaaactgagccaaaagctaatgtttttaaaatgggagaagtataccaaatggatgccgagagctgtattgaaaaaactgagggatcagctgtcattttaggaatggaaaaagcttataagatgaaggatactgaaggggatattggcaaaattgaggtgatacctatgatgcc

SEQ ID NO: 107197 - DNA, 1086 bp, Homo sapiens
tgtttaggctacccaggtcagcattcatgtcttaaatcatatggtgtaatctcgtcttcatataataaaatgggacatgtgtcctgtgttattcagcaacaagaaaattagaagtataatttggaattgttgcactattgttttttatgcaactgtatagtttcgtatagaccacatctataaagagcatacatacataaatatagacatagaaatatattgtggtactatgttcagaaagtatttttatttccaaggtatatgcacttttattttttctttactgttcgcctgtacttaaattagcatatatcattgtttcaaaaaatagggttatatgctaatagtggaagatatcccagcttaaaaaatttaagtagacaaaatggtctgtgacttatatgccttatttcttagaaaattaaatataactcatcattgcatttctctttgtttagctggattttatatgagaaaccacatttccgaggtcagaaatgtgtgctagaagaaggggaaaaggtgttaaatcgtgactggattcttcagaacagaaggcatccacaaagaaactttatattgggttctctcaaacgtgtcttaaaggtaacaactgtagatttttctattttttatttgattttatttatcatatagtaaacctgtgctgtggcctggcgatgtttacaaatcattgctaatttttgtgctgttattaatcttcattaccatattgataatcttttgaatttatgcaaatagagtgaatggcaattaaaaatattaaccagaggtaatgtagtttataaaatgttacatgggccgggcgtggtggctcatgcctgtaatcccagcactttgggaggctgaggtgggcagatgacctaagattgggagttcgagaccatcctggccaacatggtgaaaccctgtctctactaaaaatacaaaaattggccgggcgtggtggtgcaagtctgtaatcccagctactctggaggctgaggcacaagaatcacttgaactcgggacacggaggttgcagtcaatcaggatcacgccactgcactccagcctgggcgacag

SEQ ID NO: 107198 - DNA, 1083 bp, Homo sapiens
tgtgttttactagtgtaattctgtgatggaggattttgtttttttattttggtagccctttttacttacagaaccagactaaagcagtactattatactttaactaactatctatttttatatagttggcttgcctacccagatattaattttaagggacaagctacagttctggaggaagaccatgggctctttgagatttctacagcagaaatgaaatcattacatccgcttcaaatggtaagcaaatttaaaaagaagcattccttttcccaagtacccatgaatccaaaattaaataaccatgatgtttgctcatgcatctcaatctcaagtgaatatgtgtactactgaattggcaaactattgtactgtagtgccttcagtatttacagtatttcttttttgttacaaacatttacttgagtggcagactgttcaattaaacattggctatgtgataaaccatttttggttagtccatgccccttaaaaacatagccactaggacaaactaaaacattttaagaaatatcacaacgtggagtagcacttgaaacaaaaaaaactacagaattggggtttttgtaaggaaagagttgctttttatgctgtacaactttgaggtcacaaagacagtgcatgtgagaaaaagtgttggtagaacttggaaaggttagtgtggttagctcagtgctctaatttaaaaagcccaaataattgtagggaagacctttggattagctggctaagaaatctactctgctgaatgagatttctaagtttactagcaataccacttttctttttgggacactctgaagtgggattaaatcttaattggtcatgtgtactcaaggactaaagctcagtttccttcctcatagtagttgtaatctggaaagtgtatccttaagatttcttgccccatctacattgatgaggaacactataacttggttttggctactatagagttctgtgcttaaagtttaaaatttagcacaatttgaatttgactggtgtgtaatcttcactggttagatttttatgtaacctacatatatcactttcagatattac

SEQ ID NO: 107199 - DNA, 1110 bp, Homo sapiens
tacttgaaatctatagacttttcacttcaagaattggttaaagaatatattcagtttatgtaagggtagcatgttagttatcttaatgccattcataatatactgaaaatatttaaaacatcttttgcgaagatgtgttatagcagcaggtttgtgggaggaacatgagggagtttggatatcctacaaagatctgcaaagtgaccatgaagacacctcaacaggggtcccaaagccttaagttgatcagacctagggagattgctatgtaaaccagaaggtcaatttagtgttttgtaataagtggattctagtgactggaatgctcgaaaattctgtcctgggcactttttccccctctctggaagaacaagggaaactgaattagtcatcaggaggttatttgttgagcataagatttgggtaaaataaggtagataccttgagattagcctgtaggctaatgttcctcctaaaagagagtccttttactctctaggtcccagttgctcacaccctccagattctgtctcatttccctggacagtgctagatacactacctattctgcttctctgattcattctgattctttctgtgattctccccactatcttcgtagttaggaattgatatgccttttttcgtagatttcctaatactgctgcctatgccacaatccagtgtaattctggattcattccaggaaatgtttctgtgtaattaagttgacattatgtaagtatgaggtaatcctttgcttttgcttttgttagttaaaactgcagaattctagggatgttgcctgcagttggtattcccagacatgctatggcttggtgcttaagtgtcacaatggtataatattgagaagtcttaagatttcatcttcatagaagataagtatattttgaaaatgacagtgtgctccaggctaacttctgttggtacaggtgaaggttacattctagaggggcattgacacatagtttgcagtgttgcagtcattttatagtgaatggagctaggagtgtagttcatagttctgcttctaacgaatatgaccttaagcaaatctcttaatttatctgtatctcagttaattcttct

SEQ ID NO: 107200 - DNA, 1032 bp, Homo sapiens
tgtaggagctgaggaactatttatttaatgaaggaatgaatatatcagtggatggatcaatgatattatgcaaagtataatggaaaatataaagatagatgcgatttctgccaatattattaaagcttacatttttgttgggtaaaacatgtccaactcaaagcagtaacataaaatgcaaaacaatgcataattatccaaaagccacaggcagtccctggttcagagaaaggaagtatcaacatgtgtaggagtagtggggaggtttcatggaaggtggaaaacccaagtgaaactgtcaggggtgtgatggcccgtggatatggcattagtacctctctctaatctctttagaacactttcttgcttgattccaacaacagtcctttgaggtaggaattattatccccattttctagttggaataataaggctctgagagaagaataaggctccatctggaaaatggggataatgattcctacctgtgacaataaaagcacatcaagtgtcagaaccaggatttggacccaaatctactatgctttaaaatctgtgttcttaagcaaccacactctactttccatcagcctaagatcagcacttagagagtaccacctatttcaggcactgagctgaatatagcctagtggatctaaatgctgaggctctgatgttctgacctgacacttatttaacccttacttaagtgttaaataaatggtagccaataaaatattaacctaattggtcttctctcaccctcttcacatgcacacatgcacacatgcacacacaccattctcatcccaccactcatgagttctgttggttcaaatcctggctctgccatttgtaagcagtgcagcttggtgagtcacttcatttcttggcaccttaggtttctcactggtgaagcagtgatcacattgcttacatctcattgctgtgacggttgaataagataatgtatatgaacagtctgatatggctctggctcatattactatggtaatacacttattttgaaaa

SEQ ID NO: 107201 - DNA, 1038 bp, Homo sapiens
attattatgtagttagtaaaagctaaactgaattcctatctctactttgctttttctgatggcttttcagtgggcttactccctgttccacatgataggagtggggaataagcaagatgtaaaggtcatgagatcgtctaccacacactctgtgccaggaaagccattaatgtttcagtatccctcaaaagagcatctcaagggacattgtgaataataataataataaaaaattttcaaaataagtgtattaccatagtaatatgagccagagccatatcagactgttcatatacattatcttattcaaccgtcacagcaatgagatgtaagcaatgtgatcactgcttcaccagtgagaaacctaaggtgccaagaaatgaagtgactcaccaagctgcactgcttacaaatggcagagccaggatttgaaccaacagaactcatgagtggtgggatgagaatggtgtgtgtgcatgtgtgcatgtgtgcatgtgaagagggtgagagaagaccaattaggttaatattttattggctaccatttatttaacacttaagtaagggttaaataagtgtcaggtcagaacatcagagcctcagcatttagatccactaggctatattcagctcagtgcctgaaataggtggtactctctaagtgctgatcttaggctgatggaaagtagagtgtggttgcttaagaacacagattttaaagcatagtagatttgggtccaaatcctggttctgacacttgatgtgcttttattgtcacaggtaggaatcattatccccattttccagatggagccttattcttctctcagagccttattattccaactagaaaatggggataataattcctacctcaaaggactgttgttggaatcaagcaagaaagtgttctaaagagattagagagaggtactaatgccatatccacgggccatcacacccctgacagtttcacttgggttttccaccttccatgaaacctccccactactcctacacatgttgatacttcctttc

SEQ ID NO: 107202 - DNA, 1001 bp, Homo sapiens
ggtgaggagtggggtggtaaagaattagggacttgatgagtttcattcaatagtgtgtcccagctgtgctgagggaggtaggggagttattacctacaaggattttctaaaaacttcagaaagacatactgtggagctatgactaaatgccataagttggccctgggaggtcttgaaaaacccagatagctgagggcactagtagctgtgattatttgtttatataagacctttatttcttcaaaagtagagaccatgtatgtttaatgactatacttaggtactcaaaaattgtgtaacaaaggacttcatccccttggcctggaagttttaagatacatacaaaaagttttaaaatattaaacctgggacttgcctctaaggagaatagctaatatttattgaacacgtagtatgtgtaagcagcatgctaaatgcattctgtgccattatgttatttgtcagaataaccacaaaaacctattaagaaagtacaattataccctagttttacaaataaggtgaacacagatgtaaagaagccaggttcctcttaaccaggatgctctcagacctatgttgaaatgcactagttgctcttaggcacagggaataagagacgaattccaaaggtggcagtgtaggacaatgaaagagcagggcacataatggaagcacaacagaagccattatttcagccctatgacttaggcctccagccttaatgtaataaatgacacccaacatgacacccaacatccccacctttggttcttctcattgccatcccaattagaaccctggctgagtaataacaaatggtctcttaagagagcactttcatgctaagaaacataagtgcttaggtaaatgcaataggtcatatggtaagagaaccaatgaacagtctactgtttttgaaacttgatagatcaacgtgaagctaactgaattttggtaattaaaccttcctaaggaaatacacattctcagcacttaag

SEQ ID NO: 107203 - DNA, 1157 bp, Homo sapiens
tgtgggtaggagatggtacagaaataaaccaactgaaatagaggtacttgtttttaataggatgtctacatctgacaacagatgttcaataaagatttggtgaattggaattaaatgttaaatccctgtttgcttaaaacgtattatgttgagcttggttttcttatgaaaacattgcatgatgggctaaagatatccagacaataattacttttaaaagtttttcatttttgaagcatgagaaaaagtagataatccattggtgatacaataaaacacagtttgaatgtttttaaagtagtgttctattcccaatgcattaaacataacggaagggtcatagaaaagaaccctaaattttattttctaagcttcttccaataacagctttcttcttctactgcttctttgtatactttgaaaatgaaaggtttcaacatatttagaatcacagagatggctgattttatctgggccatcaagtaaggaacatcttacaaaagcacattgtccaacttagatctggtgacttataccattggttgtaaaaaatcacttaggtatatccataatatgtgataacctttgtgtttacttaaaaattgaaactggattttcttgttcaaaaaattaagttaattttatataaatgttttagtaatatatggcagtatttttataatcaacacctgtttctaagaagttgcattgttttatcatgccagttgatttgacaggattctagttttcaaaataaaaaacagaccagaaagtggcatactgtatcagtgggattgcttaccttggatttaaagagtcctcggcagtagtaccagatctgagtattctttccactatagggagaaatgcacacagatgttgccctggtgtctgctagacttccagtgactgtcagatattcaccctgggcacggttctttattctgatgtacactgcaggctatgacaggagaaacagccatttagaaataaacttttgaatctggaaatgaatccttccagaggaggaaagctgggagggaaagtgagaggtaactatcttagttatatcagtttcactcttattccctttagtaaatctgcatagattaatatggtaaatccttaggccgtggagcataaagcttaaattgtac

SEQ ID NO: 107204 - DNA, 1046 bp, Homo sapiens
aggcaggtaggaatgaaggatggtagctgcagcccaggccagctgaagtcctaccttaaggaccccaggatacttcttccaacatgagccaggcttgtctactgtgctgcactgctgagctgtgtgacttgcagaatgagtggagtgccatgtgttatgtggtgatccaaagaactgtgatgttgtacagacagctctgtatttcacagtggcagtagcaggcagtgtgaaaatgttggttgagtaaatgaatagtacggccaggagaactgtagatttagcacacatcagattactagttaagagaaactcactgtactggagatcctggcctcggtgtattcgttggcctcctgttcttttattacattttgaaacaggagtgttatttgattagttttgagatgagtggattagagctgagttgagcaaaggttgctttctctgaagcattcatcttaggacagtgacctgctttccaaaaggcagagctcagactgtaccatatttccaaggatctctatttctaggcaaaattctgaaaattttttgcaaacaataggcagcttagaattaacagtgtttataaggaaatgatgagatatcattcttaggggctcaggttgtcccttcccctttggaatgacatggattaatgtctatacccggtggctggcagttttgcagtctactgtggagactgagctgggcagtaagttctgctggcatctgggccaggactcacttctgtgttcctagcaggtggaatccacaactgttgctacaagacgattaagtggcttcctgaggacacttgcagaccggctggagggcaccaaagaactgctttcctcagacatgaagaaggattttattatgcacagactccccccttactctgcgggagatggggcagagctgtcaacaccaggtggagcttgctgttttcttctgggtggtcagaggctaatgcaggatgtttacggtttttctgggtaggctcctttttgaacagatggaaagtatgaagtgctttcgtgttaatg

SEQ ID NO: 107205 - DNA, 1023 bp, Homo sapiens
cacggttcatccccatgctgttaggccaggcgtggtggctcacgcctgtaatcacttttggaggcccaggtgagaggagtgcttaaagccaggagttcaagaccattctgggcaacaaagtgacaccccatctctacaaagaagataaattagctgggagctgtggtgcatgccagcttcccaactacacaggaagctagggcaagaggatcattggagcccaggagtttgagaggctgcagtgagctgtaattgtgacactgcactccagcctggccaggagaatgagactgtctataacaactaaaaaaaaaaaaaaaaaaaaaaaacctgtgttgttcaaggttcacctatatatttgtctattagccccttagagggctaatagtccggaagcactttgtgtgtgagttgtcaggaagctctctgatgctcctgggccttgtgggtctctaggttttcatcctgcagctggagggagagaaacactggcgcctctaccaccccactgtgcccctggcacgagagtacagcgtggaggccgaggaaaggatcggcaggccggtgcatgagtttatgctgaaggtatgtgataaccgttgtgggcacctcattgttagagccattgtggtttcccctattgctaagacaagttcaggctcaaggtttagagttcgtgtgatggtccccgtgggaatatatccctgggtttcagggcagggtgcttctcattgctgtcagccagcacatgtaatttctgaaggagtcttggtggtttgcacttggagaagtgggttaaggaagtattaagttcatttcccaaataacctgttttcatgtacagttcaagtccaacaggaagaaagagaattcagtgaaccactgactcctctagaggaaaaatggaagctctggccttgggcagcttctccacatccaagacgatggtcagcacagggctggaagttgcttaggcagaacatagccagggatcccttagttttttttgttgttgttgctaaa

SEQ ID NO: 107206 - DNA, 1057 bp, Homo sapiens
ttcagcctgggtgacagagcaagaccatgtcttaaaaaagtcttttttcatattgacccagttcttcccagttctttctcacttgatatttttaatacagtggattctttttcactcctgtggtagaagggactcccaagctgtggccattggtttgctcagcaagtatttaaatatgttgtcatgcagtctgtgtgccaggcactgtacattcatatgtttaaaacttcagtctctttagtgccctttgtgatttgtcttttcttaaattctctgaaaggtatggactttggagccatgctgcctgaatttgaatcctggctccatcatttactagttgcatggtctcatgcctcagtttcctcatctgtaaactgaagataatgttagtaccctctttatgaggcagggttattgtgagggttgcataattgatatttgtaaagcacttggagacagtgcctggcacataggaagtgctaatatctacatggcctaattgcccccctcctctcttctcaccagccttggtaaaatcagacttccttctctctcctgggaatatatggcccatcgctaggcccctaagtctgatgtctgctctgaagagttgatagtggagagaaggaacattacccagcctgttatttcttctctgtctgtaccttcttcccgtgttatcatttctgttcccattgctttaaatatccattttgtgtaggcaattcccaagtgtaaatcttcagtccttagtttctgccagaacttcagaccgacttaaagacatctccatgtgggggggggggggggggtcttagcattccaaacttaacattcctaatataaaactcttttttttgtcctgaaaacttgttttttagtaagtttttcccatctcgttacgtggaaaggggaactgattgcccaagtcaaaaacccaagagtattttttttaactccgctcctttacattgagtctgtcggcaagtcctgtctgtgctgcttctagagtgcatcccactcttctacctccctccttgcctttcttaccacccca

SEQ ID NO: 107207 - DNA, 1113 bp, Homo sapiens
cagttattatatactcaattattataataaaggcacatgtgtaaataaatggtattctaataatcattactcatttgcttgggatcatgccaataatttcctcctctagtataagagtggtgcctccagttttcttttttttttttttttagttttttattctttttacctactagtgatttaaaaaggaaaagtgttttgaaaacatgtcttaagagtatgtagaattatgtactcttaagtacaaatatggtaatggtcatatctcatagtcagggagtgtcatagaatccttgacgtgggcaatgttgggaccttttctctggtgtcaaaaatatcagccttttccatttgtgctgtggttggtggagtagaggaacacagagaaaattttattgagactaaaagtacagtgccacacagggacaacacagatcagattccgaagtgtccctttgcagatcagcagcaaccacaggctgcatttgtgaagaagcaaatatccttagaaatccatttaatgagaaaatactgagagtagaattggagcaatttcagacagagcactgctgacacttgtacagttgagtcacccagaatcaggttcatgggcccagaaaacctgaatgacaaccaacagaatccagactagactgacatttcctagttacacctaacaaacgatttcaccacttccagtgtgagtcgaaattgatgttagtaacatcaacatttagttttgcgatggaaattttatgtacatatgtgttaaaataatttatatatttatatatgtagtcttttatatgttctctttccatataagccattctcgattaaaccttattgtctctatagtcctgagttttaaaaaatgttttcaattatggttgagaaaatataaatcctgcctaaatggatccaagctggttgttttaatcgagattcaaagatttaggccgggcgtggtggctcactcctgttatcccagcactttggcaggccgaggtggacggatcacttgaggacaggagtttgagaccagcttcaccaacatggtgaaaccccgtctctactaaaaatacaaaaattagccaggcgtgatggtgtgtg

SEQ ID NO: 107208 - DNA, 1048 bp, Homo sapiens
agttaatgggtgcagctctgaagatgcaaattgttatttcacaagcttgatgcagctgtgtcctggcacagatgggtggaggcttttgtcctcctttcagcactcttctcaaagggaacagtgattcataccttgaaaagtgaggaataaacaaggaaacggatctaaattatttttctactgctcatcaggtgttcttatactccatcgtaataagatacatttttccctggggccaaattacatgccatcatcctgcaaattcatgatgtgaaaatgctcaattgtaaaaagagtaacaattatttgccctatagaagaagttaccatagagtgattacattctcttcagtgccagaatttctattactagcattacgtgtatacaaatatacattatttgacatataaacatttacatactttcagcaaacttctataaaagcaagatccaatttatattactttgtatatttgcaaaggtttagaaatgtgaaatgagaattttctttctgccgtacaccttttaaaatatctgagttactaagtaatgtgtcatctttactggtccagtgttagtgtctcagtatgtgagctttacctcacctgccctgcagcctttcagcccctcccagtcttccgcattttgttcgtttctttccccccttagcttgtattgtcattgtatgttcacaaacatctttggttctcttgctcccataatttcctatgacacctcccttcgcaatccttagccctatcttcatagactgtgctgtccagttttcttaatcttaagatatcaaggatggctgttcagaactactaagttgattctataaaaaagtatgctgtttgacttcaactgctttataattctaagcatctctaattattgatcttttaacaccctgccacacattttccaagtctctacaaatgttagttgttggaaacctttattcttcctgcttaacttccatggaaggagtttatgctctcttttagaagggaatactggagtcaactcttgtagtatctcccagcc

SEQ ID NO: 107209 - DNA, 1184 bp, Homo sapiens
gaccaaagagttataaatctgaaatgttcacgtattaactgccctgtcacattgcctgaaaagctctttactgtgcttttatccagccatgttttgttttgttttctaaattttcccccaaggtctgtgtacactgggctcagtaagttgttatgttgctggaattgaactactccaccagaaactagagctccctgacaatgtatccggtgaatttggatggtccttctgcctggcttgtgtctctgctcccttacagttcatggcttctgctctcttcatctgggctgctcacaccaaccggaaagagtacaccttaatgaaggcatatcgtgtggcatgagcaagaaactgcctgctttacaattgccatttttatttttttaaaataatactgatattttccccacctctcaattgtttttaatttttatttgtggatataccattttattatgaaaatctattttatttatacacattcaccactaaatacacacttaataccactaaaatttatgtggtttactttaagcgatgccatctttcaaataaactaatctaggtctagacagaaagaaatggatagagacttgacacaaatttatgaaagaaaattgggagtaggaatgtgaccgaaaacaagttgtgctaatgtctgttagacttttcagtaaaactaaagtaactgtatctgttcaactaaaaactctatattagtttctttgggaaacctctcatcgtcaaaactttatgttcactttgctgttgtagatagccagtcaaccagcagtattagtgctgttttcaaagatttaagctctataaaattgggaaattatctaagatcattttccctaagcattgacacatagcttcatctgaggtgagatatggcagctgtttgtatctgcactgtgtctgtctacaaaaagtgaaaaatacagtgtttacttgaaattttaactttgtaactgcaagaattccagttcagccgggcgaggattagtattatttttaactctccgtaagattttcagtaccaccaaattgttttggattttttttctttcctcttcacataccagggttattaaaagtgtgctttctttttacattatattacagttacaaggtaaaattcctcaactgctatttatttattccagcccagtactataaag

SEQ ID NO: 107210 - DNA, 1027 bp, Homo sapiens
tccctcttcagaggaaactgggagaagccaatttccactgcttctttttcctgtgcctttttaacactcaaacccagaacacttaatcctctgcagctcgtgcaaaaattcagtctgtaatttaaaatgtgtgcacggtacactgctgaccatgggcatgtctattgtttgtatctgtaatgtgtatgtccatttcagtgttgtctgttttagtatgcaggtgatagactagagaacaagacctctgtctccgtagcatcctgggtatgtgagcattcaataagtacttttatgagaatgagttttgttttaagcttaattaaaaacatgcttgctttctaaaaaaaattcttaatggttatatgtacgaagggatggggaattgggtaaagggtgcatttggaataattcaaaataatctttcttatttgtccgtaaactctaacttatcttctttcttcaacttctaaacagagcagtctgaatgccagaatggataaccgttttgctacagcatttgtaattgcttgtgtgcttagcctcatttccaccatctacatggcagcctccattggcacagacttctggtatgaatatcgaagtccagttcaagaaaattccagtgatttgaataaaagcatctgggatgaattcattagtgatgaggcagatgaaaagacttataatgatgcactttttcgatacaatggcacagtgggattgtggagacggtgtatcaccatacccaaaaacatgcattggtatagcccaccagaaaggacaggtatttctcttattttaacttctgtcttcttcacctggttaataatagacaaaacgacgtaatgattgcccaattacatgtaagcaggtttgttggttctctctctccttaaagaaataaatcgtgtatcttctctttctactgccttctctccccaacttctttgcattaccatggtactcatcaatattggttggatgaggaacttttcttatcttgggaaagccttaatggctttttttt

SEQ ID NO: 107211 - DNA, 1006 bp, Homo sapiens
tttaaatagcttttagtttttgtttgagcatgtttttctatttaaggacccttatgcagagattatcaaaagaactacttttaggatataaactattttacaagtttaacagttaggaaatggcttcttttttgtttgtttgtttgtttgtttgtttgttttttgagatggagtctcactctgtcgcccaggctggagtgcagtggtgcgatctcggctcactgcaagctctgccttccgggttcacgccattctcctgcctcagcctcccgagtagctgggactacaggtgcccaccaccacgcctggctaattttttgtatttttagtggagacggggtttcaccgtgttagccaggatggtctcgatctcctgacctcgtgatccgcctgcctcggcctcccaaagtgctgggattacaggcgtcagccaccgcgtccggcccaggaaatggcttcttaggaaacctgttctagtagtcatagaggggaaaagactcaagaacagattaatagttttatgtgctgcctcacagggtaaactttcatatgtctgatatgacatatgaaataataaaagatatcatctgaacctttttttccaccaacttttccctgtctttcatgctatagaaccatcaaattttatttctgaaagagacctgagagattgtttatagtaccttcctttggtgaataaagaactcactcaagagagcttggatttgcaccatggttggtgtcattgttagtggaagattcctgtcctcctgcctcctacaaaagcagcagtgcttccgaaggcagcagcttattccaagaaatacactatcgatattggactgtttctcttttcactaaagttcttagagtttcacatcctttacagagacttgtgtgaaattgcctgttcgccttgaaaataagaggataagcagccaggcatggtggctcacgcctgtaatcccagcactttgggaggccgaggcaggcagatcacgaggtc

SEQ ID NO: 107212 - DNA, 1340 bp, Homo sapiens
gctaccatttcttgagaatttaatgccaacatttcctctgaccacagaaatgtttctggactactttattgtccttcctcacctttcctctggctttcctgtgatatttttatcagagcatctcagacacttctttttagcctgcaaagccatgcacttggcctgaagccaggccagctactctgagcacaagcctgcccgtcagcccacccagtcagactctcctcactgcagaacactgaagacagagttatgaaagataaattgtttcggcatgcacaaagagaccccaggaaggccctacaagggcaggaaaaaaacccaacttaaaattacatttccttgcaacataaatgaaaaacataaagataatatccatagataactacttttactaactcagagatggccctcagaaatcatctcatgagctgtggttctcatacagtttctgagagttcccaggaccctctatcctacctcagccagatctgtagtttgaaaccatgcagagataaatacatacctgatttttgggaaacacttttggaaaatgaagcagttcataagctgctgttctgataatgaaaggatctaatattcggatttgataaggtttataaatcaggtttaaggctggtttcttccaaaaaccattagtgttctgaaagtaaaaaatatagagaatagaacagtgtggctgtctgttttttaaggaaaaaaagcactaaaggtaatctgaaggcagaacaattttgcctacttactattttgtcacccatcaacaattccaacagccaccttaaatcatgtggcttaaaagcagtgagaatcactgtcgtattagggtcattgtgaataggatctgaaaaaacagattctggataaaaaagtcggaaggttgtccttctcccaacttcttcttcatgtcctaaaacaggaccattattcattctgtggatagtaaaacatacaagatatgtagaccaagtgcagtatctgccattcccatcacagttctcagaggtttcagagttggacaaacatcagccttttatcctgtgctctgaagccacaaagcaatagatcaatctttcacacataatggccaaggagatcattccttttcatgaaatagttggttgatcaaaggcagaaatgttcatttgtatttgaaaattaattgtggagccaatgataattcagtcttacctccaggggaactgaagactaaatttaaaaaagtgggaacacagagccacaggataccagagttgaaagagaacttggaggacaaacccctggagagaaaattacttgctcaaagccacacagtcatg

SEQ ID NO: 107213 - DNA, 1007 bp, Homo sapiens
aagtggaaaaccttcaaaatttaatgaataagtaagtcaggcaaaaaaaaataatgttcaagatttttttttccttcttgagcttgcctagcttagcttcactgtataaagttaaacttcatttctttaaaataatacaaagccatcagagtttagtaattgtattctttctttagttatttacttatctaataagaactttatgtttagcccatttcctttaacttaaaaacaaacactgccttcattgtaccaaattactcttcacaatcatggttcatttaattctgggggttgtcaggagagagcttaattaaaccagtatgaacttagatttccagagccaagtggtttcggcttgccacatcaagccacaatcgtgattttccaccagccatgtttacagtagccaaatatcctcctcaaaatgtcttattgtagtcagaattgttgtggtaaactaaatccttagtaggaagtcatatcccttcaaaaatctaagatgaagtaactataaaaagacgtgtgaaaacacctcagaaaactagcttattttaaaaacaatgcaatcaaaacttattttcctgttatctttacatttcttggttttcataagttaaatatacagtattcacagaaattaagctggtggttatgaatcaccaggcagcaacagacagtatacataattatttgacgagtgcatccaacatattttaaactaaaaattgcagtacaaaaataaaactaacactgttagcatcatcttctgagtctgtagagtcaatcttgagtcaagttgattacgaggtttttttctataatgtccttcaaaaagagctgctctgcagtcacattgtgatacgcgttctaaagaagaaaaatacaattaccatcattctttcccaatctcaaagtattagcagcaccaatggagtactttatatctaaaaaaatccgaataaagaactcgaatgttaagtaacgagttgcatgtacttttaact

SEQ ID NO: 107214 - DNA, 2250 bp, Homo sapiens
tttatttgcaatgggatttttcctaggagagttatgaaaagttgaaggcttctaagggaatactgtaaacatgacccacttatatttatcacagtgaaaggcaaaattattcactcagaagtaatataaattacctctttaaaaagtaaccagaatttgtcctttttggttttatacattcacaaacatatacatttttcttgagtctcaaggtattttatatttttagtcagaaaaaataatttttcatttcagttttccataaactgttacacaaaatataaacctaacgtgtatttttcaggactgcgtgatcgtgcactttgtgtggtaagaggtttgagtagtcctatatgtcacctagggaacagacattatagcttactagcaaatgaatattcatgccttgtttttgatacctcctggcagcttccatgtcaccacttgttcatacctgcccagagctagttttagacatggcaaaatagaaatcatctgtaatttattagctaacaatgtaaaaccatcttttaaagccttcagactgtcaagacgacatgagcagctcaccatatgataaaaatacataaatttgacattccctcttccataaacctttgtttgtagatttaatgttgaacagtacttttccataaagttctagtcacttctgttggcctgagccaccagattatgatgttgccagaattcactcaatttgaataaagatgaacagtatttgttttcttgtttccatgaattatatcagtattctaaaacatcgcttcagaaagagaactgtttatttctgcaggcttcctgtccttttgtggtatggttttttggccttattttcactggcttttccttctccaaactttgaggcgtgatttcattcattgaagaatcaatacatattttgtttcaaaatgtttgaaacaaaagacatagatggtagacttttattaaaacatatatggatgtggaaagcacatatattaatgcagtcatcccttttcaggtgggaagagagcaaaccagttgattttttaattcatccttagtacacagagaatatacttttcctcaagtaatatacctgtttgaagctttaagagagatgtttttggtaactatttcattttcccaaagaagtttgctattcttgtgttaattgtgtatacctgattgttttttcctggaggtttttgttgttgttgtttagttttgggtttttttttttttaagaggggcaagtgttttctgaaatgatgcatattttaagactcgattcatattgccactgtgctatccttgaactaccaataatttttataaaatatctagtttttactacttttatataaactttactttccagatgaagagctgagcctgattcaaatggtttttctgctttatacttctttttagttcattggtttttatagtagaggttttctattttttttttttttttttttactacatttatatgtctgatacatatacggctttggagacaatcaagtaacaactgaaaatgtgaaagtaaccatatctgacaaaattcccttgaatttttatcctttgcttgcaacatttaagactcaaagtcactggtatattggattaagttttttcctgttaatgcaattatagaaatacatcggagacacaacaaatgtggccattacaggtttcataaaattacactgacttggctgttacttgatcttaggaaacagcacagtttaagatattgtgaattctgacttatactttattaaatgctgtaaatctaaatagatcctgttggatgtgatgggtctagtccagtttatttaagttcatgtttcactgtttgcactttgcattgaacaatgggtttattcgctgatgtaaacggttcgagtgaagaattaatgcagtaagtatgacaacacatacacacttgcctctccccatctccagaagaggggagcagagtccgagcttatctaaatatgaatgtggccacaaagctgtggaaggtgacaaagcttaaacacctttgccctggctctgcattgtcacctagagagcaagaggtctatagaaacatcatgtcacatgaaacgattctctgctttttggttctgaacttgaagtccctaaactgcaaaatctaagagttgggtggttattaaaatgcttttaaagtcaactgtggcaccaattctaatgtaatccaacttgtgactgtttttt

SEQ ID NO: 107215 - DNA, 1410 bp, Homo sapiens
tcacagagaaagtagggagtttccttccagtgaaactccctttttgtggagcctacaaacctatctgtatcctctgttcactgcagtgaaaagggggcttccttatgttgcccaaggctgattatatcacctgtgccctggttcccctcgatctacctctcagggacccaatcttactgattatcctctccccctcctgtatcttcagcctctttctctcttttggatacagttgttttaaggaataaagaagatggtgcaggttagactcattgcagtgtccggctctgagcccccagtaaatatcagcaggtgctgctattatcatcttcatggcaagtagggggttgagcgacaaaggaagaaactaatatcccaagtgaccttaggcagatcattttctatatctgggcccagaattccttatctctggagtgaaattaggggattaaatgatccctaaatctctcccagttccagcattatgctggcttctgacctggtcacacacacatttccaattgactttcttaacaccacattgttaccttcccatatatatatatatgaatgttttgccattatgatgtaacgtcatttcaattgctggattattttctcttgtaaggaggataccatgatttattccctctcatttttgggcatttggattatttccaatttttcactcttacgcagaaacagggagaacatctttaaggatgcatctttttttagtttctgagaataaattctaggaatggaattgccaatagatttttgtacatattgcccaaaaatgccaatcagtgagatagcatcagtttatatttccattaaaaaataactgtttcctggtagcctgttcatcaattagttgttgttttaaatatttgccactttgattagcaaaagtagtattttgttgttttaactttttttgtgttggttgtttaacttgtatttctttgattactagtgaagttaacatatttaatggttacttgtattttttaatgtattactagttaatctctgctgatttttctcttaaatgtttggatttggcttgtaatgccctacaatataataattatttaaagtaactcttctcatatgtagaaaatatattttcccaatttttcatttgtctttcaattttattttagtgatttaaaaatttaggaaaatttcacatctctacacagatggaatgaatagtgtaacaagcttttgtgtatctgcaaaagcttctacagttaccaccacatgcccagtcttgacaaataatgtttatggtatttccgtgaggtagaaaaatgttgaaagatgatgtggttaattttccctagtgatttctgcctttggtgttaatatggcttttgtttgtctgtttttgtctttgtaact

SEQ ID NO: 107216 - DNA, 1047 bp, Homo sapiens
aaaactgagaaatcctggcatatttgtgcctttattgcagagtataatatttatccttccaatatatttctctctgagagttaaaattattctgcagaattaaatactttaggaaatattgaagacatttagcattactatttttaattatgatttttaaaaacaaaatgtttaaatttttctaaaccatttttcaaggtcgtcctccaaaacttactcaacctccacctcctcggaacagcaatgacctcaaaaacactacagcccctccaaaaatagccaaaggtatgcctgtttttaatgtgagaatttgatattccttggatttatggtgcaactttccaaaaatatattaaaagcattatcaaataagtttatgttaatcaagttggtacagattaaaaagtaaagagcttttgaaacttttttaaaggtcgtgccccaaaatttacgcaaccactacaacctcgcagtagcaatgaatttcctgcacagacagaacaaacaactgccagtcctgatatcagaaatactaccgtaactccaaatgtaaccaaaggtatgcaaacatggaaatgaacgcctagtacatagtattgttttgttcttaactgaagttttcacgggcatttttaaaccttcagtttattttcttccaactatagtttttaagtatagcaaaaaaaaaaatttattttctttcataggaaaagactgcattgatctaagttgtagtctctgctgccatgtagaattgctctttaaatatttagagaaggccactgtgttgcaggcctcctcttgtgatttattgttccttacagctaaacatgttgactctcaggcttagaaatacaatattttctagaaataactgaaatcatagcaggaaacaaacttgtttcccttgataatatattaatttgatggatagggaacttgatggcaaaaaggggaaaataaaaacagaacttttagtagaaactagtaattgttaaaaaatactcatagttaacatattcataaaaaaaaactttggtctctttt

SEQ ID NO: 107217 - DNA, 1049 bp, Homo sapiens
ttccactaatatagtaagaatgaaaataattgcctttcattttatttcagagtaatatctgaggaaatcacgggagctcactagtatggaagttattgtaactgcaaaacaaactttttaggaaatgaaggatattaacacatctttcgagatttatagtctaatgccaagtgaattagccaagaagaaatagagccacaatacttggaaatagcttgattgagaagttaaacatttacttaatctcatcttagctgattagaaaaaaaatcactttgattttaggcaatatatgcttattaatggtctttagaaactacctagttgatctgacctagagaacaaacagggctctttttagcttattggagtccatacttaagtcggaagacccagagtcaagttgctgccctgtcattgactagctgtgcaatccacttacagattcctgtgccctcctatttcatagggttgtctgaattagttacattaaaatgttttataaataattaagtgctggtccattgtaagatactatcattatttgcttgaagtagttaagggaatgagactcacctaaactcatatttttacctagggattatttttataatgcatttgttgctagttagttacaagcattaaattagtcacaggccaggcgtggtagctcacacctgtaattccagcattttgggggaggtctaggtgtgagtatacttgaggacaggagtttgagaccagcctgaacagcatagcaagacccctttctacaaaaataaaaaatcaccaggtgcagtggctcattcctgtaatctcagcactttgggaggctgaggcaggtggatcccttgaggtcaacatggtaaaaccctgtctctactaaaaatgcaaaaattagccgggcgtgttggtgcacacctgtaatcccagctactcaggaggctgaggcaggagagttgcttgaacttgggaggaagaggttgcagtgagccaagattgcgccactgcacactagcctgggcaacaaagcgagacctcttttctaa

SEQ ID NO: 107218 - DNA, 1143 bp, Homo sapiens
ttcagtaaagtggtcttgagacatctaaaataacggtctcctacagtcattaagagaaatttatgttaaaggagtccattttaaatgatgagatcattaattttccacatgtggagagtataaatttaatttaggggaacttagcaaatggtcggaataattggttgggattggtttaattttgttaaaatatttattttgttttggtactgtaaataataccaataatcatctttaatctgttcattcccaggaagtcatcttacccagtagtcaaaatctattttacgacgttataaacacaagacaccaaaacagaatagttctttacttaattaatgcccacccataatccttcctctctctccaagggaataaggccaaggatttagtaattgttatgacaaaaacgtgcacttggatatggaaatgagccataattagaaatgttcgagctgtgcatttcaagtgtttatactttgatgctgaacaaacttagggaatcagaccatgtgcattaatgaaagcaactcttcattccccaggcattataaccactggatccaccatggtggagcacaattactatgtgtctgcctacagaatcctgtacagtgatgatgggcagaaatggactgtgtacagagagcctggtgtggagcaagataaggtaaaatgattaccaaggtatttttaaaaaacattttttaaatgggtggttgccaagtcacagagctctcctgtataaaagagatgtagaagtttagaatgtcttatactaccctcttgtggttattttaggtagtgttattggccttactctactgactttagaaaattctcagtagttctaggttccttttggtgattgtaacggtgagtacttttctgatttttgtcattgcatttttaattgaattgtttagacactttattaagaaagtctaaaagggaccttgtaatttcttatttttatgaagcttttttcaattcaccagatgatggagagcctttgttcccagatttctactctgtaggcaagaggtaaaaaaagaaaaaagctgaaaaccaacgtgcattaaattataggatattagagatgaaaattcatctgaagatcatctcaccaactttcatcttggg

SEQ ID NO: 107219 - DNA, 1390 bp, Homo sapiens
aagagaaggaagccactgaaatggtgtgttttgttttgttttttttgctttttttttaaccaaagccactttttacatagcctatgaacttggtcttaattagaggcagattagttcttgctcagctgtattggtttctaggcagaaaatgttaaattttagaagttttatttctttagagcaatgctactgcagcttccgtgtgcttaagaaattactgagaggacttgttaaaacagatttttgggcaccaccgccagagattctgtaagtctggatggagttcaagaatttgaatttctactaaatttccagaaggtgctgatgcaccagtcctgtctctggaccagattttaattagcagttattaatagttagagccataaaattaactctctttgtcattattttccttatgtgcaaacagcaaagggtcatttttagttatataataaccaagaaatatttctgtgtgtgggtagctgtattttacagaaaccactttaaagctataaattttacttatctatgcatgttctaaatatatatatatatatatatatatatatatatatataaatacacatatacatatatgtgtgtatatggtatgtgacttcctgaggtgatgtagtaaacagtattgaggggacattgctccaaaaatcaagaaacttaatatcagaaagaaattgtgattaacaaaagttggcaaagtttttagtaccactttgacagtgccattgagatttttgaaaattagagtagtacagtttgggattctgagacacttggagtttcagcaaggtaatcctgtatattaatggaatcagttttttatttttgtttttctagatctaattacttgtttggacactgcatccaattttttggaacctgagttcaggtatgattatatttgtgacttttttttttttttttgcttaaatgttacttttcattcacttcttcattttcattctgtatactcttagggttaatgtatattgtgtgatacatatcattgttccgagacttcaataaattagagcttacttaaagcataaagccatttagttgcatgtttacattttgcttttattgtagcatttagatctgcaaaatgaaagtatcattttaatatgctttgaaagtagaactagttgcttttcaaaatctagcaaaactcctagtaaaagttgaaaaggtatttatcttttttcaaaaaattgaaagagcatggttttggctgttatagaattctgcagtgttgttactcaagtaccatttctactatttctcttctttatgcctttgtctcttgcctagacaacttctaatcgagttcctatttctgtttgctggctgccattcacactgctgccaagtt

SEQ ID NO: 107220 - DNA, 1845 bp, Homo sapiens
ttctctttcttaatggtgtcctgtgaagtacaaaagtttttaatcttgatgaacttccatttatttttatttgttttcttgtgcttttggtgttttatctaagaaatcactgcttaatccagagttgtgatattctcatatatttttttctaaaagttttatagtttcagctcttgagtttagatccactttattttgtatgtagtttgaggtacgggtccaattcatttgtttgtttggtggatatccagttgtctcagcatcatttgtctaaaagataattcttccccccattgaattgtctaggcacccttgctgaaactcagttgactataaatttgagggtttatttctagattttcaattctgttcctttgattatgatgacttatacattgctatcagaaatctctggggcagatggatttttctggagctaggctgtgttcttattagctgggagcattgtagtaatgacaattttctggaaggctgtttacttgggaaaagcttttaagaaagacattttaaagcttcttaattgcctgctttatttgatgttgttttctttgtagagttgtaaaggtcaaagtgtgtacttaaggctttctttatcttcagtcttcttggctctccttgtagctgtccattttgaattcttatttttctccttgagagctctttgaacttccatggaatttgagagcaactttagtgagttgcacatttgcatggcatagttttggagtctcagcactgcatgcacttacaaccaaagccctgttctgatcaaataatccatagttgaccagatttctggcatgtggctggaagataatggggccagctggcagtcttcttgtggtttaagtgccatattggaccacacagtacctttcatcccaggctattaatcttagaaattcaacttctaatcttagaagtcggaaatttttttggtggagcagaaagtggaaaattgattcttgttgatgctgggcaaagattgacaggaataactagagaactggtaattcaatttgcctgctcttctggttggtcaactgggtggtagtgagcccctatttaggcatctatcctattaaattcctaaagcacagatttagcttaactgtcattcaaatgcctgtggtttataactattaatttatacacttgccttgaaaatacccctttcttactggtacaacacagttattaagctctagttcaagacacattttagttgaatagtaaacacaaaatttcttcagaattatggaataaaatgatcgattatcatatgcttgctgtggtaaccattaatttaacaaatatttatatactgttcagtgtgctaggagctatctccatcaagggtatattggctacccttgacacagttctttaatcaagcgtttatatgtaaaatcacttacttttgtgattgccttggggtcttcttccaggttttcttccctgcaggttagtaaataactggacttagccaaacatgctaatgatcagaaacttttattcatccattgattcaataaataagtctcctgtataccatatgctgttattgctactggaaatacaaaggtgaggacaaacagcctcaggctctgtccggggactaggctttatagagtgattttgcttataactctataattacaccaacaagtcaggcttacatattaacataacacattacgtttgacaacacagaatagtcatctgtttattaaaacaaacaaaacttaagtgcctactgtgtgctaaaggaatttgacttgtgaagctgagggacagcttctgtgaggaagtggcagtgaagct

SEQ ID NO: 107221 - DNA, 1182 bp, Homo sapiens
agacaagcctggccaacatgatgaaaacctgtctttactaaaaatataaaaaattagccgggcgtggtggtgggtgcctgtaatcccagctactcagggggctgaggcaggagaatcgtttgtttgtacccgggaggcgaaggttgcagtgagccaagactgcattactgcactccaacctgggcaacaagaatgaaactctatcccaaaataataataataataataataataataaatgctactgacattttattctgaaaagtagatttaaaaacagtggttgtcattggaattgaaaaataaaatgaattttatagatgatctaaatttctgtttttgaatctgttcaacaatgaccagtttctaggaggaactggacatttgtagaatggttctgggtgacgaattttttaagttgtagttataaaacagtgaactcaaaagaaatatatacatttgcattgaaagcttcaagtccttcaagacagcatttattcatatgtaccataattggggtgtgtgtgtgtgtgtgtgtgtgtgtgtgcatgcatgattggaaagtggtgatcctggtattctttttggagaacatgaaattgtcacttaaaacataatactgaatcttactactttagatttcaccaactcgaaattttgtagtgctcagtctataaagtttgcctttattttggacgggagaaatagtaaatagtttaaaatttcatgtgaaataatgtagatattaatatagttcctaatcggaactcataaacacatgttcattcattgtctgccaccccttagaatctgatgacagtgcacttaagacttgtaaacagctgagcctggaaaatattcccatttaacaagattatcattgctatatgatggattatttttagaattaacaccaatagtataaaaaatatttgctgcattttttaaccacatcatttttgcaaatatttgccattttttcattcttacatcagattatatgagtttgcaaatgaaacgtagggctgactagataattcctttctagcagagtccaaatttctgtaaccggttatttttttcctgcatggaatgttttcggctttgaaaatagagtgtgaattccttagattgtttgccttcttaaccgtacagtaattttatagaatctgttttgtttcc

SEQ ID NO: 107222 - DNA, 1063 bp, Homo sapiens
gaaagttttggacatgtataccatggaatactatgcagccatgaaaaagaatgagatgttctttgcagggacatggatggagctggaagcccttatctttagcaaactaattaatgcaggaacagaaaaccaaatactgcatgttttcacatataaataggagctaaattatgaaaacacatggacatatagaggggaacaacacacactggggcttttgggagggtgggaggtgggagaggatcaggaaaaataactaatggataccaggcttaatacctggatgataaaataatctgtaaaacaagcccccatgacgcaagcttacttatggaacaaacctgcacatgtaccccaaacttaaaagtttaaaaacaaaagattatcaaatagaataaaatccaaaatttacctgaatctctaagataaaatgcaagacctgcatgaactctctcacgtgttttagctgctgtgggatgtgttcatttccccctgctatataggggtaccatgatgagaaagtttaataagtgttgctagtacaagaatatatcaaaacaatcatttaaatttttaacagttgattattttgatattcagcattgaattaagttaccatttaaaagtttaaattggcttttacttcatattgtataaatgaggagattctcaagaacctcctagttgtgagaatgctgggcactgggaattataggggaaagcaagcgattcctcctcagctatggtgggcttgagataaacacgatatgtcttattgaaagtttcatatagaaagtgatagaggagagagctgttctgtgtggaggaacctgcctttccttagtttataagcagtagggcaagatgtgaaggctaacaaaatctttcatagtaaatgagaaggaaaattcatttggatgaaataatagaaaagaactagaaacattatgccaaatgaacaattaatattttcgacagaaccaggaaaacttagtcagtgtgatgttatggaaaggactcttggtatccctgcctctgccacgtgctagctggctaacctctg

SEQ ID NO: 107223 - DNA, 1802 bp, Homo sapiens
atcttagatctgtactgaggatatgttattttttatatatctgatagaccaagcttgtccaacctgtggcctgcaggccacatgcggcccaggacagctttgaatgcggcccaacagaaatttataaactttcttaaaacatgagatttttttgtgatttatttatgtttgtttgtttattggttgattgatcgtgcccaaaagctgtcattagtgttaatgcattttatgtgtggcccaagacaattctttttccactgtggcccagggagaccaaaagatgaggcacctctgtgatagacattaaaggatgaaatttaggcacacagttttatatatgcatctgacattcaaggaaaaagctgtggatggaaggttaagcttgtgagttgtcagatcatagttaaagccatgggatcagatatgatcacctaaagagattaactagaaatccaacaaccctcagaagtaaaattgagtaggtccaaaaaaaggcttgagggatgacctgaggctggaatctaaggggtttgagggaagcactttaagaatactactaattaatcatcaattcatttgtgagccacctgcctggatgaaatattttgttaattttttttttagtccctcattattgttttgaaagagtatacatgtctttcacaggaaattaatctctataagttcagtgatgcatgtactgcttttccttttgaatcatttgaatagacattacttgtcatttttttcctccagagcaatatgattggtaatcattaaacattttagtcattattccatactaatttaacagccagcttggtatattattctgcttctgttatctacattgcaaatattattgacttcatgagagtcatcccaaataatctgcttttctttcattcctaggcaaatactgtggtctggggttgcaaatgaaccattcaattgaatcaaaaggcaatgaaatcacattgctgttcatgagtggaatccatgtttctggacgcggatttttggcctcatactctgttatagataaacaaggtaattttcaccttttgcaatggttcctacagtttgtaatttctaacaacaaaaataaaatgctttttttaagtacctgttttctgaaattggaatagagcagaaagactgaacaattaatagcacatatataaatttgacaaataaggtgagttcagtttcaaagttccaaaaataaaagtacataaacgttacttccctttccttagtaaaggaaatactgctgaaatgctgattttttttatttttataagattggaacacgagctataataacttttttttttttttgagacagagttttgctcttgttgcccaggctggagtgcagtggtgtgatctcggctcaccgcaatctccacctcccgggttcaagcaattctcctgtcccagcctcctgagtagctgggattacaggcatgcgccaccatgcccagctaattttgtatttttagtagagatggggtttctacatgttggccaggctggtctcgaactcctgaccccaggtgatccgcctggctcggcctcccaaagtgctgggattacaggtgtgagctactgcacccggcctataataacatttttaaaatttataaattattgaaatgttttatatcaatttaaaacattattattcacagtttaccacttcatagtgctgtgttaaagaccatactaccattattttcaaagaataagatctcacatccccaggagtacctgaggagtgctgagacagcatgaaataa

SEQ ID NO: 107224 - DNA, 1005 bp, Homo sapiens
ttgtgacatatcttcctaaaataatatgtagactttgcttggatcttgattcaagctaaccactgaaagaaattatttttaagattatcagaccgaggtgggcggatcacgaggtcaggtgatcgagaccatcctggctaacatggtgaaaccctgcctctactgaaaatacaaaaaaatgagccgggcgtggtggcgggcgcctgtagtcccagctacttgggaggctgagggaggagaatggcgtgaacccgggagacggagcttgcagtgagccgagatcgagccactgcactccagcctgggtgacagagcaagactccgtctcaaaaaaagaaaaaaagattatcagagaaatttgaagcattgggcattcagtgatggtaaagaatgactgttttagatgtaataatgttaaaattatttttaagttctaatttgttagagacattctcaagttcaaatgtctaggatttatgtttaagtatttcagaaatagggagaaggataggagaaacaagggcacattagtgaagctgagtaatgggcagatgggaattgttacaccctcttctttctacttttgtgtaattttgaaaattcctataaagaaaagtggttatgttaaaataaaacaagagaattatatatttagataatacatagtggcactgttggtagagtggaagagtggcgtggggaagattctgagcacaggtttcaaattgctcgctgaattctagtcaaagctccaggagttacttgttgagagtcctttttctacaaagtgttgaacctgcccagacttcatagtcactttctgtacggtctgaagattaaaagaagtaatactttgcagtgtttggtgtgtaataggtatttaataaatctcagctttcccttatttccattgctttttcctattctcctcatgggtgaatggaaagctgcagaaaggtcaaggggcctgagtgatgatggttcctgttgggcttcagtttgtac

SEQ ID NO: 107225 - DNA, 2456 bp, Homo sapiens
acaatgagaacacacgtacacagggaagggagtatcacacactggggcctgtcagaggctgggaggctggggaagggatagcattaggagaaatacctaatgtagatgatgggttgatgggcacagcaaaccaacatggcacatgtatatctgtgtaacctgcgcattgtgcacatgtaccccagaacttgtataatttttaaaaagttaaaaaaaaaagagcttccattcagcttctcacagatattttggttcatgatttgtaaatagatgaagctgaccacatttctatattttacattcactttttgaacaattaagttgctcttcttttgaagattggatttattataacatgtatatgtatatttaatgactactaatttatatttacttttatttgttcagaattgaaatctccttgaacttataaattatataagtaaccattgattattttgacctaacttgtcttctcttgcctcctgtgaatagatatactaagaacaatgtcaggtcttgtgatttgttaaaggatacaaagttacagctagataggaggaatctaccactgcaggatggctatagttaacaaaattatgtagtttcaggtaacacaagtgataaatgtttgagatgatgcatttgctaattgccctgatctgatcactatacatcatatgtatcagaacatcactgtgaaccccatgagtatgtacaattatttgtccattaaaaaaaataaaatagaaagtatgggtggtataaaatatttgatgtcgtgcatatttttaaatcttcacaaaaaaatcattatagaggaagtaaaatatgtgagaataatttatcattcttttcactttttttaaaggtgatggatgtggacacactgtactaggccctgagagtggaacccttacatccataaactacccacagacctatcccaacagcactgtttgtgaatgggagatccgtgtaaagatgggagagagagttcgcatcaaatttggtgactttgacattgaagattctgattcttgtcactttaattacttgagaatttataatggaattggagtcagcagaactgaaataggtaggacttttttttgtaaatgtacatgtaaatacatcattgtctcaatgatgtatttttttgatattaacattaaataaccatgcagtgtaaggtgctatgtgggaaattattgaatatgtgtaaaaattttgaatttgaatcttttgggaagagaagattcttgtctgtttactttatttacttttctaataagcacatattggtacccttgcccaagatgccactgtactactaagaaggaggaagttaattctctgtttttttttttttgtttttttttttgagacagagtcttgcttttgtagcccaggctggagggcaatggcgcaattttggctcactgcaacctccgcctcctgggttcaagctatcctcctgcctcggcctcccaagtacctgattacaggcgctcgccaccatagccggctaatttttttttgatttttagtagagacggtttcaccatggtggccaggctgttggccaggctggtctcaaactccagcctcaggtgatccacccacctcagcctcccaaagtgctgggattacaggcgtaaaccactgcacccagccaattatctcatttttaaaaatgttttcctttcatagttttatttgcaattgaagaatacaagtataattaatgcttaggagacagtatagcatggtgattaaaaacaagggttttggatccaaacttcctgggattaaagcataactctcatcagcttgctgtgtgactttggccagattacctgacctctccattttttctcttgtaaaaaatacagggaatgaactagtatgtgtaacgtgcttagaaaagtaaacagcacctaagatataatatatgcttagtaaatggtagtggccattgttgttgttcttgattaagagcagtggttctcaattatagctgcatattagagccacctaagtagtaaacaataccataaacccagttaccatcctagaccagttgaatcagaattgattaggtggaacccaggcctcagtatcttaaacgcttcctgggaaaatctcttgcagtcacgtttaaaaacctttgatttaggcatcagtacctttcttaagcaagaaaggtggaaaaatttgtaaggctttttaggtgaactaacattataaaattaggaattctctgtgagtttatttagaaacattttttggttccagtgtgtaaaatatccttcagaactataataggaatccaatatactgttctttaaataccatactatgttcatcctctggcttcctctccatctctagtgaaatccttcatctcttctttacttttttggcctcttatctaccagaggaaaaattcctgc

SEQ ID NO: 107226 - DNA, 1367 bp, Homo sapiens
aaagtcctgtttttcatcagttagtatttcttttgttaacttttgtagaaattatccttcatgttggaaagggcagtaaatgttcgtgtatttattgagaatcaaacatgagcataagacacctaaaaattactcctaacactctgcgtgtactctttgtaaaaatcatttttaaatgacaaccgtaagttgaataatagcctacagggaataccttaagtgtgacaatctgccactacaaagtcgtagattcagctgttaatagaaaatacttgagtttctgaaattcatctacactttcaatcaccttaaaagctgcctttgttttctatttactaaagaacgtgcatttatattttgagttactttgtttattcagtggttattttatgaagattgaaccacctacaggaagaatgttttcatcttttcagtagtaagggcatttcagactagttttataatgttaggaactctgtcttagggtggtagttttttcctctgaggaaaaatgttagtgattgtttaagagttatttatcttacaattcatttattttcacagtagatttttttatatccctatgtttttaatttagctgatatccagcagagatattcaaggtattttcatgccagtttcaggggaaatttgtggttttttttttttatggactgtgtaacatcctacattttatatttgcaaaagaccagtggatatattgcacagaaatccacgtttattacattctgcccttatatatttttgtgttactgagttgctatgcctagttcttgtgtatgaaatgaaagcaagtatagaagatagctaaaatttaatgttgattaaaaactaagctttgtgtgagagatacttgttcagaaagccagatttctagtactgacctttaaaagtagactaaggagcaatactaatatggattcaacaataaaatttctttatcagccaaggatacgatttttaagtattatcataagaatttaggtacaaagttgttccatcattaaagttagctttgagactaatttgaaattactttttcatagattaatgtacagtttccttattcaattaataaacatttatttagcatccaccacttactaaaaactacatgaaattcttattcataggcttttgaaagttttcatcttttctagcaaatattagcactacatttgttcttaaaaataatcaacatagtagaaagttctattacagccctctgtgtccatattgagtttagaactcagcagtgtcacttttaatatagtttttgtgtaagtgctgtactgttccaaaaggtgatttgtaaataactgttttgaaggacaaaatgctgttat

SEQ ID NO: 107227 - DNA, 1337 bp, Homo sapiens
ctccatgctttctcattttaagatctcgcagatatattatgtgaccaaagtgacagttatttagagcaagtatagtcagactcaccagttcaccaaaaaaaaccttgaaaactcactggaaaagtttaaacctttgctctccatttttggcatatttgtgcaagtgtatcctgcatttgctgttaaaggaaataattttggaaatcacaatgttcatattattaaaattcagtaatgcatatataagaatataattaatacaatttatcagtagtgatatggctaaaatctgggggtggctggaaagtcatatggaatcagcatcacaagcacatacttaaacaaaaaacacacttgatttggagtttaattagagtagcctaaaaaagcatgcattctttgttgcaataattcattatcatttaaatacgtttaattttctttctcttttttctagggataagtagtaaaaaaaaaaaaaaaagggggggggttttcctgtaataatatcaaaatttgtatctggcttaacacatctgaccttacactcttcagaggaagtgaacacatgttctatgagtaattccctagataaatgtgcagccaaagaatcattaagatcaaattccagtgtttattcttagctgaaataaaattaaaattcaaaaattaggttaacaggcttctaccctttttgatcagttatagtctggtggagaacatgtcgaggaggaagatgaaaaagagaacctgtcagtgatagtgctgatggagtttggagaaggagaaagttagtgaagttggagttggtgagaatgtatggattggtgctctgaatgttgttttttccaagagtagttttactctttttgtcaattctgccttatgagcaggaataatagtaggtggtgtagcctggtcacagatcattattcttcccagtgtacaaagctactcagaattaatagcagtcacagatgattactgttagctcctttccctcctaatgttaagagctcctgacccagaaaaaatatatatcatttgaggtctgtagactaataaaaagcatttctttatgttaaagaaaaataaaacattccttttactttttttaaaaattggaaagtcggaacataaaactctttagtataactgctgatctttgggggaaaaccagtctcttagtgaatagaacagcattaccctttgggccaaatggaacccagccaagagctaaaccagatcttttttctgagattttctagctttaactctaagtcagcacttaacctcagcactattcacttttaaggttgatcattctttgttctgag

SEQ ID NO: 107228 - DNA, 1060 bp, Homo sapiens
gtagagtatgtgcatggtggagttgaagaggatttatatatagctcacattccttcatgttattcagttttgtagattatcacacatgcagagatgagtttgagcttaaaaagaatgaagctgggggcaatgtctttttaaaaaaatggtcacattgaccctctttggactctgaatgcatgtgcatcttatgcagtattttaaaaattaaataaatgagctatcaagccacaaaaaaccatggaggaaatttaaatacattctactaaatgaaagcagccaatccgaaaaggctaccaactatgtgattccaactgtttgatgctctggaaaaggcaaaactagggagacccgaaaaagatcagtggttaccagggttttgggggaggtagagatgagcaggtggaacatgggatttttagggcagtgaaactactctgtgtgatactatagtggtgggtacatgtcatatatttgtccagacctatagaatgtacaccaggagtgaaccctaatatgaactgtggactcagggtgataacaatgtgtcagtgtaggttcatcaattgtaacaaatgtatcagtttagtcaggaatgttaataatgaaggaggctatgcaagtgtaggggcaagggatatatgacaaatatctgttctttctattcagttttattatgaacctaaaactgctttaaaaagtgaaatatattttaaatactaaatttatgttatatatgttttaccacaatttaaaaactgtagggatggagaaagatataccttgtgaacactaaagaagactggagtcactgtattaatttcagacaaaacttcagaacaaggaaaattaccagggctaaagaggacattaaaaaattaagtgaaattagagtagtatttgaattatctgagatttgtagtgatgcaacttaacaaacctcacaattacaaggttgatatagtacttctggtctaaaaattcacagtaccaaataataaaaactttattgtaaccaaatgaaatcagatacgttagttaacagttgcaacttactctt

SEQ ID NO: 107229 - DNA, 1219 bp, Homo sapiens
tagagaacagaaatccatatctgattaaggtagaaggagaaactattgggaggattgagaggggaaggcaggaatgcagctagacttcaggaaccaaggactcagcttagttcttccctcttgtttcagtctggctttctctttgtggaaggaatcatggctgctggcaatcccgaaggcttacggttttaacacggagaaattctgtattttccctattgtacaaggtccaggaaagggtgagttggccctcacattgacccagtgtgattcagtacccacccttggaccagtcaaataaccagggggcatgaggtcatattaaaactgttgggaaactgcagagcaccttccagagaaggataaggcagggtactagataaacagaggcatcctcttctaggagaaagagtgttacatttataaagagaccactgtattttaaagaagttcttactgaacctttacatttatcttgggagatgggtggtggtatcctcatccgtgaggtagttgcatcctcaccagtatactggttagggtatgtaagcttgtggcagttaagtgtccaggatcttgaaaactggcatgtctagaatttgaatctaagtctgttggactccaaagcctatgtactttctaatgtgttagttgtctaccataacattagtttaggcttatttctcattcaacagcatgtgctaagagccttgtatgttttatttctgtgtgtatgcttataaaggtgagtagaatgcattgcctttctaaccaaattttataggttggtatggtaacctgacataaatatgcataattaagcatattaagtacagaaagatattattatggaaatagggagaaacaccaggagcttcagaaaggtttcacaaagaaaataacattgagtaggtatttgctaggtggataaaaggaggagggacgttattcttggcagagtggaatgttaagtgcagtggcacagaggtgagagcgtggagcatgtggggagtcacctatagttcaggactgtggaacaaagaggttgtgggaaaagtgaagagatgagaccagaaagggaatcaggggccagattatgatagcctttgtatcctggctgaagcatttgaacttcgttgtatcatcagtggaaaacagttaaaggatttctaaataagggacctacatgacccagttagtatttaagaaactctggctg

SEQ ID NO: 107230 - DNA, 2026 bp, Homo sapiens
acatttgtaattatttttcacattgacattaggttaatttagaaatttccattgtcttttctttgtctgataaaacattggggctcttatccagttttgttcagaagcaaataaatcaaagcatccttttctgctatatttctaattaattttacaaaatgaaaattagaagcagcacacaatccacacgtgtgaatgatcagattgaaacagcacatttttgaaacttgtaaatgaaaaattgattctaagattgcaggtaaattataggtagatttctcagtgttagaaacaaaaagaacatattattttccctggggatagttgataattccatttgaacatctgagcctcattttaaagacaaacatgtaaaaatatcttaaaatggtggaattggcataagtaaaataccagtagtagaattaaaatgacaaattaatttccaaaagttaatagatcatgtatgtgggaaagggctagatttacataggagtagaatttaaatttaggactacacttagcaaagtgacactgggaagtgaagctcaggtagtaatgttggacattaattgaatgcatacaagtagacagtttctgcttccacttcttgatatatttggaaggatatggaatgatgacccaacagtagaaggatgaggaaaagcttcataaagatagtgatatttgctaagtgtgattgttgaaatatgaagtgagacaatttggcaatttttctgatgtggctcctggattcggttttctttataacaaccttacggccataggactttgtatttatttttaaatattgtatggataacaatgattattactcaaaactaaaaacgtagatgattatccacatttctgtcttctaatccatcgacttataatttttaactttcctttctattacatattcacatacctgcataatcttttgtagttgtaattttaatagtgtgttcatgtaaaattaacttataggctaatttagcacacataagcatacctacaaaatacagtaaaacaaaaatttcaaaatgcaaaattttatcataagacattcagtatttataaagtaattactgtattgttcagagctgttattgtatttaattgaattcttcattctggagaaaaatctttgagaaagtatttcagttcaaaatgttagtttagaaacaaatatcaggctaatttttcagttcattatttgggttaaattagtacaacctatgaggacagaaaatacagatattcaaataaactagtatctaatgagtgccagtgcagtacccactgaagctgatgagatactcatgatttccaagggctactaaaacatcattcaccagctgaacgtgcaccctgatgggtgtgtaattgaaagaaaaactttgatttgctgcttgaattatgggagaatcccaagatgcacgttccctcaactgctttttaaggagagtggcccagaattccctgcaaggcttttgttgagtagggtgtgtgcaaccttgccttcaaaactgaattgcctgggatcaaagagaaggtattggcactctttatcattctctcattaagaactatcagtatgaaggggtaccaactgtgaactctcaagagagtgtgcatgtacctcagtatagtcctgagacattcagagaagagtaaaacattgttattgtcttcagagaacctacagtctatttgagaaagtaattcaagttggaatatatataataataaccaaggaaggatatcagaaggttatgtaaggcagagagaactcaccactcctggagaagcaggagacgcctactataataataatcaaggaaggttataagaaggttgtataaggcagaaaaagctcacaactcctggagaagtaggagacgcctcactgataaagtggttttagattggtaagctttgaagtttggtaggtttcttgtccacaaggaacagcagatatttgaagagtaagatcataagattataacctggggagtcagga

SEQ ID NO: 107231 - DNA, 2083 bp, Homo sapiens
ttggcaaactgaccccttacatctagacacgtttctatatagagtaactcaaaatttagatgcttagcatttaggttttagttagatcgtcttctaaaattactgaacatcatcatcatttaatatattaaagtgtgaaatccttctttccactgtagagatgtatttccctcctggtaggggggaaaacaggcttatatatggctaacacttagggcttactttgtggctggaacaactggactaagtggtttgggtttattaactccttgaatcttcactacaatcagctgagatagttattgttatcccagttcaaacgtaaggacattgagacacaaagaatataaggtaccttgatgcaggagggcatattactccataggcagagtactctgctttgcttgtttctggatctgatagtgtttgtatcatgttattaaaaaaaatcttggaacagtatagaatcagttacatgtctaccttccaaatgagggattgccttgtttttagaaaaggccagtctaccgggcgcggtggctcacacctgtaatccgagcactttgggaggctgaggcgggcagatcacgaggtcaggagatcgagaccatcctgaccaacatggtgaaaccccgtctctcctaaaatacaaaaaattagccgggcatggtggcacatgcctgtagtcccaggtactcaggaggctgaggcaggggaatcgcttgaacccgggaggcggaggttgcagcgatcgcgccactgcactccagcctggcgacagagcgagactgtctcaaaaaaaaaaaaaaaaaaagaaaaagaaatagccagtctaatcagacaagcaacattacttcattttttaaggtttaatataatttttttttaccagaacattttaacaaatacatttctctttaacagtgtcatcttatgtaaacatcaacataaatagaaatgattctgataattaaaagactttttttttttttagttcttctaaattgcttgggtaaattttgctaaatcatttaatatttaatctctttgtacctcagttttctacatcattaaggtgagcatgcatacctatctcatagcttaatataaatgaaatgatagtatgcaggaattttgcaaagggaaaagcttaaaatagctataaatgattattactaatctcgatcttactaagttgataaattaagagctaattaggtatacatcatctgaaaactcacaattatttgagatttgaattttctcatttttaaaaattaaattttttactcaaaggaccctaaagcagcccgtggtggaattccttttaagccagtcttcccagtctaacagatgttctttagggtctactgatattccctcacataacctgaaaagaagtctgtttaaaacacctttagaatttttaatgggatttgtacatgttgtaatgttcagctacaaggtagagtttttactctataagaagtcttaagactggaaggaaataaactgttgacagttgttgtcttttggtggtaaaattgtgggacatttctttatacttttctaaattttctgtaattcgcatatagtcagaataaaaattaaactgcaaaaaaggtttctttgatagattttttttctttatttgacaactgaaggtagaaatgcatctagtatggagaggtagaaatgtgcttcagtgtcttttttctttctgacatcattttgaaatagcagaatatattaccttcattccaattaatgtcatacatagctattcctcaatagattttctgttcacaatgacctttctttttatttggctccgaataaaatgtatcattagtttgaaaacttaccgacttttcacaacagatgtattttaaccagttctgtttcacttataaatttataaatatattctgtttacctctatttattatgttgatgtttcacatatggcttgtatttgtgtagagttctaagttggatatcaagaagttggtcttcgaaatcttttttattgaagactttttttctgtaaaatgtacctctcaaaaaaattaaattggtgaaa

SEQ ID NO: 107232 - DNA, 1047 bp, Homo sapiens
tcatctcatattgtaggctggtttccaggctgggccaaatgcttcctcagacatgtgcatttggaggaagggcagcttttctctctcaagggtgaaggggaaaagctgggtgatgggtacatcaggtttattcatctattctttctgaatttgaagcaaattttgcaaaagagcatggagttacccttagatcaagtatgctcccccaaaactgatattaattctcaaaaatatattgctgacatacgatgtgcaagctatgaaatgagtactggggagttaactaccagaaccagaagaatcagaaatcagaaacttgttgaatctgaaaaaagcaatggaacctgttcccagaaaatacaaatatgtaccaaattttgcactcaatttcaggaggctcaaaaagcctcctgaagcacaattagagctcccccgggagtctatgaacttcaaggctataaacccaacaaggctataaactgacccacggggcacaataattctaacagtatgcctttcttttcattctaggtccagaaattgccacaagtctctttttgagtctcagagaagcaaggccatcatgtataagccaggttgctttctgatcttaacttgataaatgaaatcagctgctgatatctcttcaacaagccctagcttcattctttctgcttcctatattgcgtactcttctttcagctctccacacactccacagaccttgacatatacagacccatccagttttcaggtcacactgacccttcctttctctttgccttaggctactccttagtttctgcagtttgcatcaaaatattccagattctaaagtgcagatttattaagtgtttactatggagtagggttggtagtaggtattttgcctacattaaattgctaaatgctgacaacaagttcatagggaaaggaatatttatgttgttctaagatgaggaagtcattctacacagacattagttaccaaagggcagaattgggatttgaacccaggccttcctgactctagattataatgctctt

SEQ ID NO: 107233 - DNA, 1005 bp, Homo sapiens
ataacaatttgagaaacggtgacacctttcacatctattctctaatcttgtagtgtggctgtattattcttattcttgctgtacagataggcaagcagagatgctgacagcttaagggacccagtcacaatctcacgccaagaccagaaagataagcagagcttcttgttcctaagtcaagctctcgacttcatccatactgtttatcattctaaaatatcttattcatctctcctacttaaaagccagatttgtatatgagaaattatttgttaaattaatgaactaatatttgaggcttaggaaatcccacagcaccttcaagaaattaagcaaatctactaattctaaaggagagatgtggaaagatgttattgaaccacacaaaaaataactctattctttcctatttcacatcatactgtatttaagcataagaggaaatatcttggccataaattattatatttaaaaactttgccaggcacaggaagaaaaatcctgcatattctctcttaaatgtggaatctaaaacaatcgaactcatagaaacccagaggagaatggtggttaccagaggccttggggtggggcaggagggagagaatggagagatgatgatgaaaggtttaaagcctcagttaggcaggagaaataagttgttttttggatatctattgcatagaatagcgagtatagttaataataatgtattacacacttcaaaatcactgaaagagtaaatttcaaatttctcacgagataaaaataagtatttgaagtgatagatatatttagcttgatttaattattccacattgtattcatgaatcatagtatcactttgtaccccataaataaaatacaactataatttggataacaactccaatattgtttaaaatacacacacacacacacacacacagatagaacaaatgagatgaaaatatatatacatgttaagtggttatctctgagtagtgggcttataggcaaatttga

SEQ ID NO: 107234 - DNA, 1049 bp, Homo sapiens
cagacagaactacaacccgcagacaggcatcttcacctgtgaggtccctggtgtctactactttgcataccacgttcactgcaaggggggcaacgtgtgggttgctctattcaagaacaacgagcccgtgatgtacacgtacgacgagtacaaaaagggcttcctggaccaggcatctgggagtgcagtgctgctgctcaggcccggagaccgggtgttcctccagatgccctcagaacaggctgcaggactgtatgccgggcagtatgtccactcctccttttcaggatatttattgtatcccatgtaaaaacaaaaaaacaaaaaacaaagaaaagaaagagattttatagaagaaaatgacacaccaaaaaatccaaatgaaaaacataattgcttcaaaacacttacacagttggaaagttatatgtaagtgaaaatttggaccattgtgtacaaataaaaactaagatgcatgtttaatactccacacagcagcctgtaattgcgaatgatgggatagagttatgtatcaagtactgacacttggttgtacccactggaatcatattagctgttttatgttatatgcttccacagtaacctgcttattcagatcagtcaaaatatatcagtatgaaagatcatagctaatgaaaggcactcactcatattgtttactttaaaatatttataaatatgccttaaagaaatacaaatgataacaattacataccgtatttacttgcttaatttcctctgtatttgtgtagatactttgacatggaatatatggtggggagacccgtagtgttaccgccccagtgggagggggccctggggaccctggtaatgctttagtcaaagggatatctctcttgtatcagaggctgtgtcttttagtaacaggagtcctcgtcagaattgcgtgtctgttgtctctaaaagaatgggtgaaccaatcggcctttgtgaatttattcagtgccttctctgtaccaagcactgggtaaggcacttttgtggagcattagacagtaaccctcaag

SEQ ID NO: 107235 - DNA, 1698 bp, Homo sapiens
gtacaaacacataaactctgaaacactgacgcacaagcgaaaacacacgcacatgtttgggtcttctcccgctgcgcaagttctttgaaactgagcggagaaaaatcgtcttcacatggtgtctcacactttcgacacaatcttatcgggaaacgtaacacgtaaacaaaattttttaaaatgcattatcaaaaacgatgacaatccctttcgtcttatgttcctttttgtctttaagctttggggggatttatgttgcgtttccaaactgcttctgcctgtcggcgcctgtgtggaaactgcgacgagtctgggagcggctgccggagaggcggggcagaggtgtgacgtcatcgccgcggggcggaggcgacagtgtctagcgggagctccgcgtgtagctacgccggccgcctggctttgagacaacgtgattctccgcagctggtcgcctacccgtgatgttctgcccacgtcgagacctgagctgaaatggcagacgatctcggagacgagtggtgggagaaccagccgactggagcaggcagcagcccaggtacccactctgtgcccgcgctcctacggggcctctcccggagcccttccgtgcgcctcagccctggtcgcttctggcgatcgcggtgtttgcccagcaggggtgtgcaccgccttgggagcgcgcaagcatctcggggaaaatggtgcaagagattctttaacacgtgaaacagacagctgtgacattaactcagatctgtctgccagccaggaaggatcctttccacaagctttctcttttccttatttcttgagaatggataagacagtttttgtgaagagaggcaactttgtatgatggttaagggtgacccatgaactgctttcaattcagactgaggtcagaagcaggggttgctgcttcagactccctccattcaaatcacgactccagtattctgatactgtttagcctccttttcctcatctgtaaaataatgataacaataatgtccatttcgtaaagttgtgaagattaagtgaagttagtacagtaatgcactttagcatagtgcttgacatataatgtgtggtaaatataagttactgtatttcttgtggtcatcatcattatcatggaatttggaatagtagaactggaaggaggcttaaatagagatcatcctttgaactcacttattttacagatgagaaacataacctaaagatgtcaagtaacttgacaagttcacaaagctagctcctttcagaaacaatactagaattcagttaacacaatttgaatagtttctactatgctctgctgtgtttaccaactcctgatgcagtgggcatttcatccccaagtagagtagcgttaagtgaccccccatgtcaggctagccttgaactttttaagttccatcacacctaccatgcaattattggttggttggtttttatcactcctcaaggtctgcctcttttctctacaagagaagacagggccaaagtcagattcatacttctgtcatccacagggccctgcacatgttagacacttgatacctatttgctgcaaacaatcttgaaatactagttgtgaaatatccattaaaaataaccaacttcatttgttgcattgtttccggaaggtcaagccttcaggtacaaactaagcagatgtcatttttagaaagg

SEQ ID NO: 107236 - DNA, 1040 bp, Homo sapiens
cccggctaattttgcatttttagtagagacgaggtttctccacgttggtgaagctggtctcgaactcccaacctcaggtgatccaccgcctcggactcccaaagtgctgggattacaggcgtgagccaccgtgcctggcttctacctaaattttttagtactttgtatactatcttgtccctctttttgtgcttcctcttaaacttatgctagcttggataaaaatgtactttaggaagtctcctgacatgggagaaaacaattttgaaagcttcaacatacaacgtattttgtgcttcatttcagagtaaaatttttcccaaggtattttgtttttctgggactattgttagtgcatgttgtttttcctgttttatgcttcttttcaacctgtttggttttcactaagggattccaatgggttttttttctattagcataattaccaatgttgaatgtcacctgggcataactacttttcctaaccctgtcataccattgctatctcttagcatgttttctcaagtgagaaaatgtcttgactgaatggccttctcttcttcatttactcattctctattcactctagatttatcaaatacctgctctatgtgaggcacaatactaagcactctgtacatacgtgtatttttttttttttgatgttagagcttcatcactgcacccttttttttttttttccccacaaacaaggtcttgctctgtcagtcagtctggagtgcagtggtgtgatcatgctcactgcagcctcggacttctgggctcaaacagtcctcttgcctcttcctcctaattagctaggactacaggtgtgcaccaccacacctggcttttttttttttttttcttttcggagagacaaggtcttgccaagttgcccagactggtcttgagctcctggcctcaagaaatcctctcacctcagcctcccaaagtgctggggttactggcgtgagccaccatgcccagtcttcaccttcttttgtagtccatccccttctactattctcttcctgctt

SEQ ID NO: 107237 - DNA, 1445 bp, Homo sapiens
ttaatagttgggcatattcataggttatcagaactggaagggacctgaggaattatttcactttcctgttttacatgtggaaactcaaggcttagattgatgaatgcaaagctcgttgtcacatgaatgaaaatctaggattggaatttgagtctcctaaccccaagcttttgttgaatcaactgattttcgatagtgtttattcagagaagagatatgaataaacaatgtcctgtgagatgataaattctgtattttttcaagcacctggaatattgattcatgtctccctaaaatatctcaatgttactgagactaagtgccagtggtcaggtatgcttactacaccagtgattgtcaggtattctgcacaaaggatatattcggctgttattcacttttgttatgcttttcctcctttaagaattatcactttgctttttccctcctggtcataaagaaatcatagttttagaccttaaagtgtgattttaattgtcctgtcatcttgatggaaataatctgattttcttgactcagattaggaatttttgctatcaccttttcttagcaaaatatgattaatcagcaaagttctgtagaatgaagaattacttctgttttcaccagaaaactcttgaactgttctagtgaattcagtcctatcccaggctgattctagatagttcatctttgggttagattatatgtcggatgaggaaatgggtagatttgggtgtgggtctaggcctgcgagtgtttgtgtgtgcatatacacatatagaagtaaaataattgtagacgtgctgctttttgggggatgatcttcatcaggtccacaaagctgcttcaccatttcctggagagatggtcctttggcctttcatagtggtaattttagctttccacatatttctgtagatgaatgtatccaggcagtgcattggtatgagttaccttctccctcccacgtggaggaaggtgttggaggtgacagttctcacgatgtgtagcttcccacagccattttggtaaataggcttatccataggcactgtgggggctttagtggaaatcttggtgatgcctgtagatttcggtttagggatccgtgctgggattctctgcttgcatacctccttgatcttgaattaaacaagagaacaaaaggtaattaatggtacagttggtggagaagtagaaattgtttaggacatggagtcagtttggaggatttggctttgaaagcaccagtttctggggatgtatcagatcaaagatcgtcaggttgaagaaaagaatgtcagtaaagtaatctggtgtgtgttgaatgtgtgctgtgtgcacagttcttgatagagatagtggtagatacagagatgaatagatatttggcaatcacggtgtagtaggacatatacaagagtagtgtcccaaattaatct

SEQ ID NO: 107238 - DNA, 1373 bp, Homo sapiens
catatttgataggtttggcctaaaaaaatagtaataatcgtccattgttctccctagtcttctcattgtccttagaagctataatcagcagcctcagaagcatttatatttttcagtttctgtaattaatacatactcttataatcaggaaatttcatatgaaataaatgggctgcttatataaattactatgagagctgttcttctcagcatgatccgtactcactgattccctccctgttgccctaaaggaataactatctgcctcttgtgttatggaacttttgaggacctcttgcagtttttagttagctcctgtttatataaaacagtggttttctgaggcttcaaaagtgactgatctcaggcacagtgaattcaggcaagaacaccatgaaaaggcataagaatagaagaagaatagctttttctagttaaagagaagagagaaaaaaaaaaaacagccaaaccactaattgtaaaggataataatgcatttttgaggaattactttgagttgtttgaagagtgtctgtgttgatgcagattattgtattgtgaggggagacataggagccaacttgacaactttcctttgcagtggcagtttttacttgggatgcttccttggtttacagttttgtactcctgaatttggagactgacagggttgaaccccaacacttctccttctgacctgggaagatacatagtgattatttctaaaaaatgattttgggagtgccagtcttattaagttacagtgttccttgagaaatagaaatccagatttagagtgtaccatctgggaaaattttctgtttctgcaaaggcagaatcacaccaaatgtggcctaagttggtggtgcttgtctttatagtggctggaccttgatcccttgattgccttttctgaaagtcttgggtcattatcataactgtcaaggcagccacctacttataagctcagatgtgcatggttgtgatgttccttccgtgaatcattttcactcacttctgatgcttttctatcccatcatctctgaggctaatcaggtacctcctgctctgcacatattgattgcctgtccaagctcattcttcatgcttggcatttgtgccctttgcttatagaatcttaccttaggataaagtggacactgactgcaccttttgtgttctgagaacagtctcctaatgagaacatgagcttctctttggacttgctttctcacatctcctatcccaggtcagtcttccccgtgcctgcccatttgtgtggggcttggcttctcacattcattatctcttgtcaccctaacagtggcttcagggaagcaggtggagttggaaggagaggcaaatcactcttg

SEQ ID NO: 107239 - DNA, 1011 bp, Homo sapiens
acagaaatcagtgccaagcatgcgatattcagagtctccccagaccggcagtcatcatggcagtttcagcgttcaaacagcaatagctcaagtgtgataactactgaggataataaaatccacattcacttaggaagtccttacatgcaagctgtagccagccctgtgagacctgccagcccttcagcaccactgcaggataaccgaactcaaggcttaattaacggggcactaaacaaaacaaccaataaagtcaccagcagtattactatcacaccaacagccacacctcttcctcgacaatcacaaattacagtaagtaatatatataactgaccacgctcaccctcatccagtccatactgatatttttgcaaggaactcaatccttttttaatcatccctccatatcccccaagactgactgaactcgtactttgggaaggtttgtgcatgaactatacaagagtatctgaaactaactgttgcctgcatagtcatatcgagtgtgcacttactgtatatcttttcatttacatacttgtatggaaaatatttagtctgcacttgtataaatacatctttatgtatttcattttccataactcactttaatttgactgcaacttgtcttggtgaaatactttaacattataaaacagtaaataatttgttatttttaccattgcttgctgaattttcttttggtcattctgtgttatatttctgcatgtacaatagaattttgtcttttgcttatagtctctattaattcttccttaaaaacaaacaggacctatgtcccatttatggtcaacttctaatcacatattagaggagagaaaagtggttcaaataaataaaaattacatctctttgatttcaaagtgaactataagatctttcagaagcaaacataacttcatgcttgggatatatttcagtatctctaagagcccagcacagtgcttagactacattaggaacttaaatgtttataataatgaaata

SEQ ID NO: 107240 - DNA, 1057 bp, Homo sapiens
tagttcactttgaaatcaaagagatgtaatttttatttatttgaaccacttttctctcctctaatatgtgattagaagttgaccataaatgggacataggtcctgtttgtttttaaggaagaattaatagagactataagcaaaagacaaaattctattgtacatgcagaaatataacacagaatgaccaaaagaaaattcagcaagcaatggtaaaaataacaaattatttactgttttataatgttaaagtatttcaccaagacaagttgcagtcaaattaaagtgagttatggaaaatgaaatacataaagatgtatttatacaagtgcagactaaatattttccatacaagtatgtaaatgaaaagatatacagtaagtgcacactcgatatgactatgcaggcaacagttagtttcagatactcttgtatagttcatgcacaaaccttcccaaagtacgagttcagtcagtcttgggggatatggagggatgattaaaaaaggattgagttccttgcaaaaatatcagtatggactggatgagggtgagcgtggtcagttatatatattacttactgtaatttgtgattgtcgaggaagaggtgtggctgttggtgtgatagtaatactgctggtgactttattggttgttttgtttagtgccccgttaattaagccttgagttcggttatcctgcagtggtgctgaagggctggcaggtctcacagggctggctacagcttgcatgtaaggacttcctaagtgaatgtggattttattatcctcagtagttatcacacttgagctattgctgtttgaacgctgaaactgccatgatgactgccggtctggggagactctgaatatcgcatgcttggcactgatttctgttggttctggggagcgtccctgctcaggagagctagctgaaccagtcacagccaaaacctgaataggggacattgtcctttctggagttagagaaccacaagactctggggtctgtgctctggcaaaggttgccatggtaattggggacatgccttgttctaa

SEQ ID NO: 107241 - DNA, 1044 bp, Homo sapiens
tcttcagttgccatgtattcatgaattttctcttttaatgcatccacttctcttgagaggtgccctgacttagcttcttcttcttgaagccttttgaaaagccattgttcatggctggtctctgtcttttctgctaacttgtacttagcaagttccattttaacatgttctagctctttagataaaaattgagctttgtctcgttcattagcataccttcgttctagagtctcatattcatcttctgttttcatgaggtcatcctcaatggctttcatgtcctttagcttcagtttcagtctttccacttcttgagagagctccttaatcttattgttttcttggtgtaatgctgttgtggatttcccagagtcttgatttaatttgttttttaggaaatctttctcaattgcttccaatgattgaagcctatttttcaacatattaactcttgacaggagatcatttcctttctcttcttccgctttcaatttgttttttaaatcatctctctccttggttacgctgtacatcttttcttctacatcggttttggacttgagcgcccttttagtttcctcaattaacttctcagtaactgttgttactttattttgctccacttgaagctgagaagaagcagcttgtaatttatcttcagttttctttaatttttcactcattgttttccgttcatctacaaacatcacagttaatgttttcagtttagttaaatcctcttttagagtgaattctgtcttttctagccgactttcaatggcttctagctctttgatccttacttttaaactctccagttcttgagacaactgctttgtggtcatcctttctttttctaaattgcatttcagagagtagcattcttgtttgcttttgttgaaagcgtcttctaacttttccagagccataattcttttactgagtttttcaacctctagtttaaagtctttactctgtaacgtctccctttcaagcctcttattgagatctctgcactgctcctccatttttatgagctcttca

SEQ ID NO: 107242 - DNA, 1093 bp, Homo sapiens
atcacaaaataaaatgcactttacatttttcagattaaagaagctaattgatcaagaaatcaagtctcaggaggagaaggagcaagaaaaggagaaaagggtcaccaccctgaaagaggagctgaccaagctgaagtcttttgctttgatggtggtggatgaacagcaaaggctgacggcacagctcacccttcaaagacagaaaatccaagagctgaccacaaatgcaaaggaaacacataccaaactagcccttgctgaagccagagttcaggaggaagagcagaaggcaaccagactagagaaggaactgcaaacgcagaccacaaagtttcaccaagaccaagacacaattatggcgaagctcaccaatgaggacagtcaaaatcgccagcttcaacaaaagctggcagcactcagccggcagattgatgagttagaagagacaaacaggtctttacgaaaagcagaagaggagctgcaagatataaaagaaaaaatcagtaagggagaatatggaaacgctggtatcatggctgaagtggaagagctcaggaaacgtgtgctagatatggaagggaaagatgaagagctcataaaaatggaggagcagtgcagagatctcaataagaggcttgaaagggagacgttacagagtaaagactttaaactagaggttgaaaaactcagtaaaagaattatggctctggaaaagttagaagacgctttcaacaaaagcaaacaagaatgctactctctgaaatgcaatttagaaaaagaaaggatgaccacaaagcagttgtctcaagaactggagagtttaaaagtaaggatcaaagagctagaagccattgaaagtcggctagaaaagacagaattcactctaaaagaggatttaactaaactgaaaacattaactgtgatgtttgtagatgaacggaaaacaatgagtgaaaaattaaagaaaactgaagataaattacaagctgcttcttctcagcttcaagtggagcaaaataaagtaacaacagttactgagaagttaattgaggaaactaaaagggcgctcaagtccaaaaccgatgtagaagaa

SEQ ID NO: 107243 - DNA, 1053 bp, Homo sapiens
tggtctgcgtttgcagttccttctctagtctggttgccttctgctcttcctcctgaactctggcttcagcaagggctagtttggtatgtgtttcctttgcatttgtggtcagctcttggattttctgtctttgaagggtgagctgtgccgtcagcctttgctgttcatccaccaccatcaaagcaaaagacttcagcttggtcagctcctctttcagggtggtgacccttttctccttttcttgctccttctcctcctgagacttgatttcttgatcaattagcttctttaatctgaaaaatgtaaagtgcattttattttgtgattgatgctttagtaactcatcgaatgtacttaaatatatatgtaatttagaaattatgtaattatatgagctgtgtcagttcatatacaatatgcaaaagagttcctgaatttgatgacagaggaaaatcttgataaagttatcttgcttttttatttgactaccattgatcagtaacagctgcatttcaccaggagccttagtaaaagagtaagggcaagaatatttagtttaaattgcttgggtaacatgtaattagtaggcagtctggcctgaaggctgtgaaaatagccacaagcttgagatgatgcagttagacctggcttcaaggccgaccctactcttaccaactaattgatctgggcagttatttaacatctctgagcctcaatttcctcatatgaaaaatgggggcaataattttatttacttcaggggctttttatgaaaattaaatgcggtaattcatctaagattctcattgtcctggcacatggtaagcatttggtattagttgttgctgctgtctttattaatatggttattatatttatcaaatggcttgcttgaaccaaagtgttcaattaatgtttgatgttcaagtccttgattcttagttaagaaaaaatttagtcacattgcttagaagttatgcacttcactgatagacctctgtgccaattaaaacttggtttgcactagcacaacattattctaggaactacttc

SEQ ID NO: 107244 - DNA, 1050 bp, Homo sapiens
atttgcagacacatataatatatgtcagcacagatgtgtgcctatattttatctcctctgtgagacactgagtattagtaataatgcatcatataatacacatatgaaacacatggtatatctaaatgctataataccagtcatacccataataacttatattataattcttaccgcttttgattttatcttattttttgtacattacagtcaaccctactaaaatacagacttcttgagaacaggatgagtatcactgtctgattcatttctgtgtcctacagtgtctaccacaaagcacttatatgtagagggaaccacatgaattttttttgaataaatgaaagaatgaacaaatactcccttttgtgaaaaatactgtagcactgtcctaagtagttttattcactatttaagaggatgctctaatatttaccatgtacatgtttttaggcatttaagaaaatgaggtatgagtgggtttcccatcagtgttctccaagaacattattttctctatttcatagctacagagcctctagaaagaatcaacactgttggaacaggtccttctctcctttcttcagatccctgcattagaactgtatgtgcttgcttgtttgaggagaacagggttaggtggtaaacgtccacatcctagcccatcagtctcctttggctttatcaactctgctaacaaaggagtgactattttatgttttcctcagagtccagagatctactggacaaatatgtttgtttattacataagcaacattgtatcaacagcagtgacagtggaaaggaaatatctataatctgaccaccctaaaacatcaattatgtttctgttttcacagattgttttgcagtttttcagatgcttggtccatagaaataaacttagggtgatcatcaagcaataaaacgaattccacaagccattaatggtactgtattgtttctattagtttcagaaatcagcctgtaaatagagaataacttcagagtcagcttagcttctcatctgtctctttaaggaaacctatt

SEQ ID NO: 107245 - DNA, 2164 bp, Homo sapiens
tgccttcaaatgttctctcccagtccacagaaaagtcctaaatgacaaaactgttttcataagacattgtgttttgtttgaaactccaatttgaaataagagtatggaaaccactaagttgcctggtttttataaatgggtccatccatagtgctatgcagttcagctgacatttaattcatttcagaccttgatgagacaaatacagtgacagctactatgtgcaaggcactgtacttgctatttgtcagttcttttttccccaaaacctgcctgtattcttgcacagatcagtctgatcatacttacagtattctcccagtaacaaccaaatagtatgatgataccaaagcttgtttggtcttaagatgtttgaaacagtgtaacagtcaccctagtcctaagtatgtaacttcattttgatgggcttaaattcctgtatttgttctcattattccagagctagtttaatacattactttttcttcctgatttaatatgttgattactaagcagaaaactgcatacatcacactcctttatttatttttatatctgctctcacagctagactttgatagcctgattatgattatatcccattttatcttttagcaattcttgtctaatacataattttaactgtgttgcgttgatagtagctgtgttcatggttaaataaccatggatttctagcagtttgcagagtaattacatggaatttattggaaagcttctttatttgagataaattttggtatcaggcctataatttatgtttccttgctttcctccctgctttttctatgggacttttcactgtttagtctaaattttaagagcactcataaaaatagctgtgacccgtcttttttattctgtgtatgctgcttccttgtatttcacaagtcaaaggttttctaaaaattacagctacagcataccatagccataatgtaatgtacaattcatttgacttagtcagcaagatcagtagaacagtaacactttttttggcatctgctagttgaatatgagtgtacatctatgtctgctttatgtccttgttactgaagatcctgtcatcatcactgagatcctttagagataccataaatgggtccagacccagcaatttgggttaatactattttccttcattgtgaaataagaattagggcaggaagttaagaaggaggctttagcttggtgtcagaggaatatatggtaaaaatggtatactgttagtcattactcttcatcacctgaacgattaatcttactaggccccccagaggtcaggagaagtgaaataagatggaaatagtcaaatgacccattaattataaggagcttggtagcttttagcagagaatcaggattctaaaaagcggtactgaaatcctcaaattgagcacaaggactggaattgaggcaaatctcactcttttaagagcagaaaaaggagcaaagtaactgagaaaaagggtctctgaaaggtgaggttccagaacaagtaaaaggccagtctgagggtccacaggcacagaacttgggtagttaggcagctacaaggagaatattttcatcttgagaacaaaggaggtgcccatgattctgggctagaaaagacactgtccatgctgctatgaaagggccaggtggagacttgaaaagatgctcaggctagacctggaagaagaaactggaactgacaggggagtgacaacaagtacagcacatgtaaatttgtaccaggataattactgcctaaataatgtgttttgacttctgcagtactgtattgttagggagctttctagtaagaacctttggacaatggatgttcatttaataccgtgaatattgtgcctctcctatcactcttttaatttttcttattaaaaatacctactcaaatgaagttttctttatgccgtttactcagatgacatctatcaagaaggagcttttaaaaagttaattactgtgaatacactgctgtgctagagagtctactcatttttctcacttttctttttgttttcctcccccaccccctgctcccaccaccactctgaattggggttcttgattatttagaaaagatcccttaaatcaaagtttcctcttttccatactttccattttgattgttaataca

SEQ ID NO: 107246 - DNA, 1720 bp, Homo sapiens
cctaatgctgctgctgatctaacaggaggcagagttcaggcagtaatgctgcctcatcccgctgctcacctcctgctatgtgacccggtaataggcctcaaactggtactggtcttcggccctggggttggggactcctgtacgtggggactcaaagtctgggtgggttgactgggttagtacactgtatatactattcctgggcttggtttccatagtcaaaaatgtcaagtagactattaaggatattttataatttttttgactcttcagaagaaaatacaaagcagcagattgaaagataccctagttgtctgagaaataggtcatttggggttttcatattgttggataattaatttttcagtctattttgtgtacttttaactctttaaatttcaattatggatttttagattaaattagtattcctaaatatttgacacatatttcaaaatgtgtgtattaaaacgtatactaggaacagtcttcctcttaccacatcgttcatctccccaactgtaaccactgatactagtttctcttatgtacttgtagagtttctttatgagtacataagcaaacataaataaagattcttatgctctcccctttttacacaaaagtagcttacaaacactgttcctcagcatcttgttttttgcagccaaacatttcttggagatctttccattggatcagtgttcttaagcaggagcaggaaaagggaataaaaataaacatggttgctaaatacatctttacaacttcatgctaaagaaattaaactttgtaggatctatttttaatggaattaatatgtaggaggtatggaagacatatacttttgctgttttgaaattattaagatagattgtaacagtaagattatttgacttataacaacagcttgagtgttgtatatctatctttataatgtctgtgtagagcacatgcatttattttcttagttgaaaaactgaggcccaggcagattaatactatgcaaggccatcattatggtggccctggaactggtactagagtgtgagacttggcttataaagagaaggaaacaagcatattgaaggtctactctgtgccactagatctcacttaatacttatagcaactgtatgagctaagtattattattctcattttgcagatggaggagaaaccaaaaaactaaaatttacagaggttaaataattttccaaacagtacaggtaacagaccagaataaaaattcactggctgcgaagtctgtgttctttctacctaacaaccaggctacatgccggaaaccccagacaaaaaatgttgacctcagaagagtttcctcttatcccataccatgtttttggtgttcatttgttcattcccatgctttctgctccacccacttggctccctgaccccttctactgttctcctctttgctcactctgctcctctgcccactcaccagcttctttgctattcctcaaacagaacacggcatggtgtgcttttgtgctcgctgtctccccaggaaccactggattccccctcacctcattagtaccatctggcatactatattttatgtatttattgattactgtctctcctactagaatgtaaactacatgcaggtaatggtgtgtgtgtatgtgcgcacacacgcatctcattcaatgattagtcaatcattggtctattttgtttaatactatat

SEQ ID NO: 107247 - DNA, 1056 bp, Homo sapiens
ttatttgtcttttaacctcaggttctcctttcataatagacttctgaagaataagtctgccatcttttttggaatgctgcattcagtcatctccatttacatttcagttcccatcttttccatgaatgtttcttaacttgtctaaccctggctgattttccttttctaagtccccacagcccttacagctttattacctaaatattctacattattttgtactgctttctaatttgttttagtatattacttttgccgttaagccaactgtaagctccttaaaggaataatacctctgtatccctcatatgggttgaactctgtgcatacttgaccaaatgatagagaggtaaaaagaaccacttcctaggggagtataaccatcccttaggctgagtggtacctaaagttctcagaatgacttgttattagaatggaagaaggacaagtagagttttgttcctcttgttcttgtcacttctggaaggagaaccatttagtgaagagaagaattcacttggagacaaatttaattaaagtccagatggggaaaattggccagagaatcttaactttgcctgtgattctttgcatctgtgttcagcctaatgaattttattgaactgtaaaaagaattttatggggcagaatttggggggagattagtggagccccaaatcacttggcaaagttactctcacttttatttgaaagcctcaagaataatatgcgacttcaaacataatgtatttattttaataatatgagtgtttgaaaagtagataattttccttttagcagcagtggattcattttcacaaaattccacagagtaattcacttcttctgccattcccaattaacagactaacaagttaagactaagggacttccacaatatctcactgaatgggtgtttgtcttcagcaagaaaccagcaactttctcatgttctctctaggctcctggaccaggcaactccttccttttcttcaaatttaacaggcagacacttaagtcttgcgagcccaaatgtgatgttttacattccactta

SEQ ID NO: 107248 - DNA, 2046 bp, Homo sapiens
aatttacaaaaactaaacaatcagtttaaattgaagctgaattcatggtcaaatacaaattaaatggaccttaaaatcgtttaaaattaatatgtccaacagataaggtagggtgtattagatttttcaaagatgacaggctctgtgaacaacagatggggccatttcagttcctgaagcaggttgagaccaatattgccttacatccacaatatccagtcttttataaacagttctcttcttgcccctcttcctttttcctttaaataggaggggctgtatgttttttttctattcaccttgtaaaatgttcactttgccctgaagcactagacatggacagaacatgacctaagcagaattattggaatcttattcttcctcctacattttcagttttttttcttaaatctcaaaatccatttattaccaaaggcacttttttggaggggaaattacagcagagaacccttaaacaaaatttacagccttttgagaaggcaaattaatgggaactgcaagagaaccggaaaattaagtcaaggcttgatttgtgttttcatactggctgttactatagtctccatcacagcattaggaaaatagcacaaaaataccagggcttaacagttaaggttaatcaccacaaaagtgcaaatgaacttactaagcataaaattattatgtgctttatttggaagtgtagaaattcacattcattctatcaaaaacattttcccatcatacagattgtcccaaggactaagaaattgctcatccaaagagcccagtgtgagatagggtatccatgataagtcatacttagctttcagttttaaaagaggtcttatgtgattgttctttgaaccatgctttaaagttaataaatgggaaaaagtgtggaatattaaagagtgttatttttaaattttaaaaaatcgatgcttgcctgctttaaaaaaataaaagacactgggaaacacagctgttagaattttgatggaagttatgattttcaacagttgagttgtagtttatggtacagatggtactctgggtatacctgaaacaataattgatggtttctgtttgtctcttcctctgttagattcagaagagcagaatatcttttttccagagcaggaatttttcagtttccaattaccgcttatatcagataaacaactcttccattgcatattctgtacttctccacagtgacatgggtgttggccccgctcttctcattatggtgggcttccctaggtttgaaataatagtttgtggaaaatcctacttctcagtactaacctgcagtttatatagcctatcctcaggccaaataacatataatttttcttttaaaatatgaaaaccaaagtcgtgcattgctccaaacaaaattagcaaaaacaaaaaaactgctatgaggcaaaaatgataggcaccaatgtcatatacttttaaaaaccatccaacagaaattattagaaatatacagatataacccacattttgagtattttttaaatgctgtgtttcaatgataaaatctgggatctgacattttcttctgacaattaaatataaaaacatgagtttgtaacacacacatacacctcagtggttatagtgctctgctcctctgttaaacttttactgtacctccaaacagttatcttatatggtcattttagtgccaactaaaatgccagcattttaaaatctcagagtaaatataaatggcagcctatgaattctgagtttgaattgtatatacttataaaacatagagactgttttaaaagggacaattctgtcacatagttgttaaagttttattttacaatatatgtttagaccagataaggattgaatgatgaatcaatttttcatctcctattccagtgttctaaagttgacataacctttttatttttaattcctacgttgacttttagttggaaaaaatgaagtaaaatattatggagatttttctgccaagtgttcagttatcatactgtaagagttcattggtagcaatag

SEQ ID NO: 107249 - DNA, 1942 bp, Homo sapiens
agaagtcatacctaaagttctagcccaactatatgaatctgctaaataaattagggacgtggcattcttatttgcaagcttcagatgagtaattttagtagcttgagtccttttaaaacctcttttaaaattacattaaaataggattgcttcctattatgatgtacatatgtctgtagaattattgtttccatatgttttgtcaaacaagaatgacgaaaatagtctgctcgcttcattttcttagtgtggagtggagaaaggatgtttgcagagttgttagtggaaatggtgtggaataaagatgcagggcacaacattaaatgtatgtcctcttcactaaattgggagttcactttatcattattctagatcactctaagtacctactgagaaacctaaagtaaactcactcttgcttttcatatacagtatactaagagatgtgaattacacatactcttcagccgaacttaaaatttaatatttgatttgcaattgtgtactaacattttggatgttgagtttgtagttttgttggttttaactcttctgccctatacttgtgaattgcattgtaatctttttagtctcctgtgcttacctcatacttattaaatatcctttttgagacttttatgctgcattttttattacaaatgagattaaatgacttttatgaaagttgtatgatgcataaacacctgaatctcagccccaaactgatagcatacttttaccccaaagctaacagttttgtagcttgttttgcatctttttccctctgataggcaaatatgtttcctaacatttaacactaccatttgtttctttctcacatatccatactcaagttttgcatttattttcattcttttgacttgctggttcccatgaaatatgttagtattatttcctccttttctttagctatattctgaagaatagaggaaagaggattagggcttctactccttgtatgcccttgcctggtacactacttgcctggttacattactaatgtgttactcctgaaacatcagtctcttgacccagctatgactcagctttccaagtgaggtcatagttatgtgaccactgtcttcaggaaccaatattaatagccctcatttgttgagcttttagatcatacctaccaccatacttagtgctctacaagcatttcatcatttaatcttcacaacacattttgatgtgatatgatccattcttttcagataaagacatttagaaggctaaagtggcttgaccaaggtcacaccgctactaaagtaatgatacagggatttaaagcaatgtttacatatatagccttctacatatatagtcttacatatatagccttcttctacataaatagtcttgtcttctcctaatagtttgttcagaatctctcagaggtatgtttggtaaaggagtgttcagatttaactgagaagtttctgtttattttctagactgaatcttgaactgggaaagccaagactcatcctcttttttgtggatttgtggatttactgacagttttctggaaggtggcagcaacgtatcttgttctagtaaaattagaatatcatcaccatttcacttcaaacgaaagtcaagggttttgagggagcaggacctttaactgatacaagagtaccctgggtggtgtattgcaaactccaaccagctgttggcattgtgcgccattggccacataagtagatgagtagacttttatttccttccctctttcaaccaaaattctttctgagatgtaatttttattctcttggtttctgaaattttcttcatttgtgaaattctcttggtttcatttgtgaaaatagtagagttatgatcactgtgcctcaaaattggatgagagagttttacttcctaaccttgttctgtccaattacttttgtgactttct

SEQ ID NO: 107250 - DNA, 1008 bp, Homo sapiens
gtggatggaccctgtatgtgtatgtatatgtgtatgtatattatgtttctttttgcctttattatatatttctgaatcatgttagtggcttttctgtagacattgggctatttaaaagcgcatgtttacatattctccctagcattggtggtcacaaagccaactactgcctgttggccccctaacattgccacggtcttgttcctcatcaaacaaagcaaggaagtctatttaataaggaatcatctgttggtaagagacttcctacccttggtttacaggggatgccataagttggctatggactctagtgagcatactagtaggtaagtagaatgacttagaaagaatgaagaattggtaatgtgacgccactgtaagattattaaatgggaagcaggaaaagtctgttacttaggtccagtccatttgcttatttattcctacaaacattttgtgtttccttggtaactaataatagttttgagaaaatgttgaactcacaagtattactgcagaagtgaaaaaaaacccccaaatcacagaaattagagacggaaaagacctattaggtcatcttccctgtcccttgccagtacagattgttctcagtgctttgttcagtccattttttaaagggaccttgtcatataatttgtagcccatctctctctctctttttttttttttgagacacagtctcactctgttgcccagattggagtgcagtagtgcaagctcggctcactgcaacctccgactcctgggttcagacagttctcctgcctcagcctccctagtagctgggattatacatgtgtgctaccacgcctggctaatttttgtatttttagtaaagacggggtttcaccatgttggccaggctggtctcgaactcctgacttcaggtgatctgcccgcctcggccttccaaagtgctgggattataggcgtgagccaccgtgactgacccatttcttttttaagtaatacatttttaaagaaacc

SEQ ID NO: 107251 - DNA, 1090 bp, Homo sapiens
aaagcagatagctaattcctttaaagttagctattttaaagtaatcttcaattgctttaatctcaaatcatttatactctacagataatttatttttctgtgatgagcagaaatagtttcatgctgattgagaatgatttttgtttgccagcatccctttatcaaatatagagatacttaaaaatatctttaggttttacttccctccaccccaacccaagacgttttgaaggtaaaaaatctggctccccctttgccaaatccacaaatatttctgtgagttgctctacagttttcttctttttgaagctgggtgtcaagatattcagtattcatttattaaggacctgctatgttaagtgagatacattttggaggaggaaggccagttaacatagaaccagcatataatagcttcagtaaattttctttcctctctgctatgatactcaaagtttttttgtgatattgcagaaagtaagacaaatctcctgctttaagacaattacagctaggagttggttggagaggtattaatagaaaaggagataggatggttaaaaactaagtagattgcataagatacataaataaaatactctttcagtgctaagggagaagatctgtatctgaaaaggtgtaagagaaggtggcacttaggagttcaggtgaagatctgccccatttgttcatctgttgtgggtgcctaacaggagctagtctggtgccaggtctggccagaggtggattcactggccccattagctttgtgtgctggtgtgctattttcttgtttccacttttagttgtcacctttttgttttgggttggttttttgatacttctaaagtctgtgttgcttattatttcttttgctcatggaagaaatgtaggataatgctgaatttactctgaatttagatcttagggcaatttgctttcttacagcaaggaggaaagtgaatactttaattttttaaatgtaggaagtttactatcttgcagaaagactgtttcaagatatttcctcataaaaacgatattattaattatggagttgattcccagactagcacaaggaagcttactc

SEQ ID NO: 107252 - DNA, 1041 bp, Homo sapiens
catcagaacttccataaagtaccaaatgggctgatcattgtgtaatcttccctctttcttcttttccacgcaagtcttaagtgctgatactcaaactgagctgcacgttggaactacctggtgtgagcttttagcacagttgctgtttcagcctcagagattctgacctaattgatgtgccccggttatcaggttttttaaaagcttctctggtgattcttacatgtagcaaagtgttagaagcactgatctaaaggaaaatgaaattggcctaggccctagagtatgcctgaggggaaggggcatgatggtagtaggatctggaccctggagaatccaggagttgaaactcaagccagtttgctttgcttcttattgataattatgaaggcaggcagggaatactgggtggaaatactggataacatttggtgtggaatttaccaaaggattaaactgtatacaacattcttttaacttgttatttaatacaaatcaagtaagctttagtattgctttaaggattgggtcttagatggtcattacaaatcttcaggaaagtgttgtttagaaaaacaaaatggctacacgttgaaataggatagtaccttcctttagagatgccaacttaattgctccaatgagaagagtagtctccctttactaaactgtttaggaaaattgatatttatttctaatgtttatggtttgttgtctcagaagattaatgccaaatcctcaaaaatgtagtgacaagcgatgactcattttagctcatgtcaaaacaatgcacttttgtaattttcctgtccctggagaagctattaaacactgaacaaaatgcctcagaatgaaactgattgagtgtttcaaattatgtacttttgcttggctattagccagatgttcgtcgggaaagctcactgtacatcaaggcctatgatttgtgctgacaataatattacatagtttacactgcttaaatatcagcgatgtgtattctaaagctaaatagtcaaagttcagtctctttgcataatc

SEQ ID NO: 107253 - DNA, 1231 bp, Homo sapiens
gcagtgttttcagccctagcatttttgaattatcaaattaaaatagagctttttaaaaatatatttactatgcttctttagaataggatattccattaaaatgaggtcaaagagccttccaaacattaattcttgttattttgacatctttttatttcaaacatagtaagccttgaggtttccttacttttctcttttttttgtttttttgtttgtttgtttttacttttctttatggctgcttattgccttccagtcaattttagattcatgctaattttaccccattatcactgtagcaactacctccttcttgcctcccacacccacttctcttctgcgagacttcgttctatccatcctcttttgctctagaatcttcaatctcagttggcttttccccctaatttcactgtttctacaagtgaccagcctctctctttcctaccagtccttggcaaacctcttgaaggagtattattacactctttacgtctacatcctcaccaccttctttgggtccttgaagtcaggtttcagtgtctaccattctgaagaaattgttctctcagaggtcattggtggcatcctcagatccaaaagccttcactctgacttcatcctctgccactgctccatgccagttaacatagttgactgcctggtgactcccactggtctttccaagttctctttctgtttcatagactgcttcttgtctaccttcctagatagcttatccccctttgaatgtaggcatttgccaggacaggccaactctttgctttccacagtatttctcccctgggactatcatctactactgtttcaacttcccttctgtgctgaaactcccaaatttttaccttcaccactgctggcctgagttccatctagtcccatgtgtgcacttactcctagatatctcaccagttcctcaaccacaggattccaaagccaaactctcttgtcctctaccagtcttctaattgctcttactaggactaatcttcttgtcatcagggcccacagcaattgctggtctagtctttgtatgtcttgcatctttagaacatgtaacatactccattttacatcttatagcataatcattatttctccatttttctcgtttattgaggtataatttatttttactaaatgtgcacaaatattaagcatacagattgatacacttttacatatgtgtgtactatatagtctctatcca

SEQ ID NO: 107254 - DNA, 1045 bp, Homo sapiens
tagattgggaatagaatctacaccattgattttctagctttcaggtctttcggctacatgactggctttcttgggtctccagtttgaagacagcagctcatgcaactgcccagccttcaggatcatgtgagccaacactttataataacggtttatacacacacacacacacacacacacacacacacacacacacacacacacgttctgtttctctggaggaccctgacaaatacagtgctaatggtcactgagtgctttttatgtgctagacaccttacttagcacttgctgtgcattatataattagtaatcacaggaacctatgagatctctatcattttttaaacagatggtgaatcggagacttaacaagattaaatgctttgcccaaggtcaaatagccagtaggatcagatgagaggatgggaccatgcttcatggtccatgctccacgtttgttgttctaactcgagtctatgcttttaactctgataccctgtgctcttccataaggcctttctgtgcagtgatactcactcatcacttgtgccagccatcatcttcacggctggccaaagctgtttggcttcatcttctcatctgaagaattaatacacttgccaggaaagtttacctatgagttgcaaattcaggatacagtttaattctaatatcccaccttgattttcacttatgaggcaaaaatttctattttgatatggtttagtggctcttattcctctttatattttttagtccaaatggaacagaagtttgaggttgcctttccacattcagtttttggctacctgttttatagggctgttaaactagtaaccaccagctagttagtagatgtattatagagtatttactgtatgtcctgcattctcctagggctgtgctggctgttggataattactgtgtttaatctcctttttgcctgatcttccacagtgttgcaacagtggtgtctgtgccacagaatgaacacctgcattcttcctaaattatctacagattattttgagtgccttgtct

SEQ ID NO: 107255 - DNA, 1551 bp, Homo sapiens
gactccacctgtaattcagccaagtacataattcaggtcattggtgacacacgtatccacatgttggagctggtcagtgaacgttgtcatgaaacatggatagaatattaccatatggacagaccaaaccgcacagattacagctaaggaaactttgcattaacatgcctgggaacaggctttcctgagctgatccctgcccccacccaccctcagtgggaaagccaattgcttactgattacgacagcgacatcacttggcaaacattttggcctgagctcaatgtgtgacatcagtctcctttagggttttccacataaaacaaattctccaaagaaaacacagaaattgagccttaatttgaaatccattattacatcctctgaggtctcattaactacctcaatcacgtagttcttaatttttgttttatttccaggtagatacaaaccaacacttagaatgtgagcagtaaacctttaccgtgtttatttcagagtttcaaccagatacccctttgtatctattttcaaccaacctcccttttactggggttatgatatctttgtttcactgctgggagggttgctagtttgggagtggtttacaacactttgtttgaggaaggaagtaaacattgttctttgacccttcaggataagttagtctcacttttgtgggaggcagctgtgtccttgagagaaagcactcagtgaagttggaaggactcagtcatggtgtgttttgccatgtcacttgaaagcaaggcacactacgggtatttcacactcttgtgtgtaagcacctcctctgagcgtttatttacctgaagtcattagtttcccccacttcctgtttcgttagatggtattcatttaatactactttgatgcacatggccttaaagcagatagaagtcagttatgcctcatgaggcctgcagtctcccagcagaaggcaggaaagcatgaagggtggacgtgaatgggcccacactaccaagatactggaattgtgatgttcaggcaaagcaagggaagtcacatatgcatcaagggagttgagaataggtttaatattgtcacattcaaagaattccatctggaaggtgttccttggcatatagaaatagatgaatattctcatatcttctggaatggctaaacagagtgatagacactttttcctacttcttgttaatggcatgttcactttaattattcttcaaggtaaagaatcctataaaggaaactttatatcctataaagctaaaagtaatctcttaagttctttctcttaaattcattttatatatttcaaaatactattcttcatatattgatttagtagtatacactttacatttttcccacaatttttcttttcctccagcccatggcctttatccccactgatcttttgttcccatttctcagtgttgttccttcttgctctcttggtttaaataatctttgccatctgcctcccaacattccagtataacttcaggatagccctctccagccttcctccagaagatagtagagata

SEQ ID NO: 107256 - DNA, 1111 bp, Homo sapiens
cctcatactcaacatgtctaaaccaggactcatctcctacctactcaccaagtagaaaccatcctgcctgatcaaaatcctacaacacagaaaactgtgccccattcccatatttcatatgttcctgaatagccaggagtgcttctcagtaactccttgttttccttgctcttctttccagtctaaccagtcactaattcatattgactaaacatcataagtagttcatgcgcacacccccctcccaacctcatggctgttggaacacatcccctcatctttctcatctggatatttgcctcctatgtgagtttcctgcgcccagtctaaagctcctccagttgttcctccatgttcccttaatcgttctttaggaaagcataactgatcatcttattttccctttcacaattttccatttgctccttcaggccaacagtataaagtccagctgctcaaggcaagcctttccttttctcatcctacaatcatgccctatgctgtagccatgtgaaaagcttgagttccctcaaaatgcaggttcttttctcacttctatactaacacacttatttcaccccttgccatgaatatggttttcattcttgtttgcctagggactagacccctgttgcctggtctttgcagccttcacagggcactcccttcaagagttaggggcctaacatttatggttccacagtccttatcacacatctggttatccatacattgtactgataatgtcttcaaacatatccttttcctcaccctggactatgagatctttgagaacagagactgtgtcatatttatctttgtatccctgagacctggtacagtggccagctcatagattgcagaatgggacattgtttgcccaaagcagccttacctttcacattcctgttctagtaggcatatgaattcatcactcttctccatgtattctttatgttttctcttttcttcctccaactccaatatggtttgcctacgggatttttctgccactaaaagctgtcccaggattcgtctgtaagattctttatgtttttccacaactttgtccaactacgaaagaaaacatttatagcctgttaccaaattg

SEQ ID NO: 107257 - DNA, 1240 bp, Homo sapiens
tcactctccagcctcaactcatgttcctagttgtttcttttctataaaaatgaaaaattatgaaattttccatgaaggtctcagaggaaaattaaagaataaaataagaattccaaagggtttcagaaatgtcagcaagtaaaagagcaagcagtactgccttctccctagtggtggccctgttgggactgcccacctttgccgttgtaattgctaggtacgcttggtgagggaaaggtctttgctgtcattaaactttgaaggaaaaagaaggtatgcactcatctaaaatatatgtttttaaaaactctatttcttggacagttctttagattatttccattcatgttcaaaatttctatgacataatacctcagtgttttccaaaaattaacctctatggttgaactttatgttttttattacagcctgggtaccctgcaagttcccagagtgtgtgtgtgtgtgtgtgtgtgtgtgtaagcacatgtatgtgtgtgcatgtgtgtgtttgtgtgtgtatgtgcctgcacatgcacgtgagagtggggagcattctctggcatttggtagattttggttgattcaagcaacaaacctagtggacgcatcctgtctatggttcattctttttaactttcctattgaacttgtcgtatttatctgttttgtgtaggctttaagtgcgttagaaagtaaaactgtaaggaatcaaagaggagttacagatcatgctcatctgcagggctagtgcttggctgcctcccaggtacacacccctattgtggtacatacctcattcattggtttctcatagatgtcctcctgccaaggggtagatttcgcttgaaaagcatctctctggagagcctctaacaccttttttggagtgacaaacccatactgagcttccagcaaagccaggtccattttttcagcctttaaaatgcctatgacctcatctcgagcctgtaggaacaaaaagtatttcagaaagcctgctgtctctaccagcagtctcagcaagtgatttttgtgatagttggcagtgctttttcttctctttcaaatctaaatgaatcatatttcattttcacacttttataaaaggtaacaaaactatatcccttcatccttcttgtagtctaattacacaattaatgttttaaaaagtgattactatacaacattggaggactactttttttattatgtttgacaagcagatatcatgatatcc

SEQ ID NO: 107258 - DNA, 1045 bp, Homo sapiens
tcttgattaaggccacttatgtccatgggtaaacaggctgtgtttgaacttcatcccccaagcattccacctcaggaacccaggtcagacctccaaccatgaccctaagtgcttgcttaagacgtacttaacataattataatattgtaaaatggtgactttgctaattcttctaactttcttcagatttactttatagtatttcctttaaaattgttgggagcttttatggggttttttgttttgtttttaaaatttgttagcctttaaaagtgcattaggacagaaatggcagagttactgctacagaattactgcattattttgttttgaaggccaagtctagtattaaaggaatgaaggcttggtccctggctgtattcctgtattcctgacattcttctaaaattctagatctatccttgggtaagtcaagggcttatatttaggaccctcatcttcaaagcggagatactactacctaacgtagttggccattctggaaacaatataaaataaattaatgtttaaaggacacattagctccacatctgattatataatcatccaaatgaatttataataggaagaaaaattcttccactgttgaggtttataactaggagagaaaatatcagttgaacttataattgactctatggcatataagcagattattaattttactctttgtccctacaaatcatgaaactttcatcatcgccagtaccttacttttagtttgtagtatttctttaaaaatctgaaaaactcaagtgtccagaaaagtatagaaaccataacaaactgctatatgctaccacacaaatttataaaattttaataatttactgtatattagaaaacagtttttaagtactgtattatagatgtattataatgtatgtatctcttctgaaaccccttctcctcccttcccactccagaagtaaccacgtaatcttgaatttggtatttatcattcccctgtatgtttcatactttttaaaaacatgtacatatatattgctgaacaatgtatagt

SEQ ID NO: 107259 - DNA, 1025 bp, Homo sapiens
gcgcgcgcgcgcgcgcgtgcatgcacactcgtgctgggtggggaagaaatgttagatccacgtaacttactggaaatctccatttaatttcactgaattttgtaaactttcgatcataaataccctgatctgctatccctcacccccagccctctcacagacaccctcacatgcatgaaatgaactgagtatgcactacactattttttaatttgacagcaccattaaccatcattagttctgtttttaagcatgtaacattttattaaggcagtcatttaaacttagtgtagtgggaaattttagacataaattgtttgttttgatggcaagaagactgcataacacggagtgagtctgtgctaactgtacgacactcatggccaaggaacaaagctgggagtgatccaaggctttaaatttgaatatatttaacaccccatactttgctgagtttagagggcagactgtctgctatctttacatttgcacttgcatttccccctatctttacacagaacctttaagctaagatttagttccctgaaagaatggaaagagatgtattaagattatggggttctcagcagagctggttggcccctttaatattaactgacttatggtaaatgtgattcatctatgaaaatagtggctataaatagatgttaatagcgctcagttgcagaacagccaggttgtgctcacatggccagattaggggaaaaaatcctgttgggtattttatgtggtctttcaaaaaaaaaaagtttccttttattgccctactcacccacatttgaagacactaaactcagccagctgcagtaaagctatctgatggctaaaaaaagacaattgaaaacaagataacctaatttagtaattggcctccgttatcttttttctcccattttcagtaaaaatcattgaaacattttcttagtgatatttttccttgtagggcatagacaagtctttagacaagggattggaaagtggggatgtatgattcaggttcatat

SEQ ID NO: 107260 - DNA, 1078 bp, Homo sapiens
aggtttagtttgaatttaagagaacagtaacagaaagggaaaataaccagccacccagggtctatttttaactgccacggcttgagcagagccatgaagagagagaactagggcctgttaatgccagccatgaaaaagctgctacagtgggcagtgtgtgactgagcccagcaggaaagtgcttacatagcactcaggcccacctttcaaggaccatgcaaagaaaggagacatttgagagccaacaagaattataacatgtatgtgccacagaagggtaggaggaattccacggggaaatggtcacatgggtctacggttagtagaattagacaacatttcagaatacacttccagtgaagcttggtttgaatcttggtactcttgcaggagaagaagagagctgggggcagagcaggcagtgtgaggcatagaggcatgagccagcagggctccttcagggaacagcagtgtggatcatggggctagagcttgaggttttggagaggctggtgatgtagtggaacaggcagagaagggaccagaggagatgtcaaaatgaactggagatagctgtactagtttggcatcttaaagaattttggctttacacttaggcagtgggaagctattagttgtctctaagcaagttttcttgtctctaaaatggaaataatgagctctataccactggattcttgtgtgtaaaaacagcaaattatcatgccttggtaactatttgttccttcatttttttaatccgataaattattgaaataggttataaatgtaacagaatttgaaaacacatcaggatatgatggtaatttaaaaaaaattcattgtgtaaatgttcaagtagtttccatttttcccaaactttatttttattttattttttgaggcagagtctcactctcttgcccaggttagagtatagtggcacaacttcagctcactgcaacctccaactcccaggttacaagtgattctcatgcctcagcctcctgagtagttgggattacagatgtgcagcactgtgcccagctaatttttgtatttttagcagaggcggggt

SEQ ID NO: 107261 - DNA, 1124 bp, Homo sapiens
ttgactgagccccccagcccactcagtgtagtaggactaaaactcagaccactcccattgtacaaaggagatgcattcaatgcattcagatggctaacatctgtcacttgcagaaaaaaagatgggagttaggcctagctgttcctttcacctttcctcctttcctgcctccctccttcatttataaattgtctaaagtgtgtatagcattatgcctctcaatgttataacgattggctccatcccgacctgggttaagtttaacattgaaaaattagtggtagctcacaacctgccaagtaccggagagaagtagttcttttctctccaagatgtttgacatcttggaaacggcagtttctgtgtgtttttctagttagagtagccacctttacacacctagtttttgttattcctctcaacaacactatgaggtaggttttaggatccccattttacagatgaggaaaacgagggctccaaaaagttaagtggcagaacctggatgtcagatcaaacactgtaactcccagcccagccctctttaccacagctgctcctcaattaggcagcccaagtgtttgtccctacccacaggggaaaaatcaaagattttgaacactagtagaagcaacattctgattaggaatataaaagattacagcgtgaagtgaaataatctccctcctcacctcctgtaggtcttgcccaaatcattctttagcatcttcttctatccctccctcctacagtctttttacctgcttcctaatcattagattgacatctcaaggtaggggagaagtaggggagtccagagtcctggtactgggattgaggggaggaacactttcactttcagggctattgttcttgctttcctttgtatgaagtagtattttctgttattgattttatgtttacttactgtctgaattgaatactgttaatttatgtgcccttggctctaaagctctggttatatatttttgcgttgttaatatttttaattggtgtttctaaagtaaatgtactctgtgtgtttggcagaccaacaaagtgaaatgtaaaaagagtctatttttaaaagtaaccatataaggtgaaaagtccctttttgtgtg

SEQ ID NO: 107262 - DNA, 1011 bp, Homo sapiens
cattatgtagttcattttgccagcccatgtgtgaacccatccagtgacgtgcagctgaatactggtcaaagtatcccatgttttacattttaggacattctttgccatattattttggggagctggaaaggctcctgggaaccgatacctttggccctggtgcctctttttgaagctacttagaatattcttttataagtgatttagtctaaaaaaaattttttaagaatattcttctccttccaagacatttgtagatatttaaagataatgacaccgatcttgcctttccccctttctagatgtcaaacatctttaggtctgccaacctattttcttatgtcatagttcgtttgtacatttgtagagcacaaaccgggtatgcattagacacagctagaaactagggaagcactgagggaccaagtagtctgtgattcctgcccttcaggaacttctgatctattaatagcagagtggcaagggctattataggggccccaaatttagccttgctgattgggggttagggatgtcggggaaatttttctgcaggacacaccacacaagcaaagtcctgaagagtactatgagttacccaaggaagcgagatgaatgaggagaggaaggtattccaggaaggactggcttgctggaaaggctgaaggtgaggggatgcgtggtgagttcagggaagtgagggtggttcattgtggttgaggcactaagtgggaggtgaggagtggggaaaacagatgcagaaatgctagggcagaaaccagggctaacagtgggaagatgaggtcgcatgtgatgggagagtggaagatgatgggcagtcctcatcaggaaggatatttattgttctcttgggaacataattactatgggcaacataaaaggttctgcatgaggtcatttaggttttggaatattttgtatattatcttttgttgttagagaaaggatatattcagtcattagggttagacagatatagctctttcagta

SEQ ID NO: 107263 - DNA, 1008 bp, Homo sapiens
acatcaatgagaaaagataattggataatatgaaattcaacaaatgaggctgttacatcagaggcattagggagtaatggtttagaagcattataaaaaggaataatcagttaggcattggcttaaaatttggataagccatataaacttgttgatatttgagtattttgacatataaaaatagtaatttcatatggttcaacctcatactttgcgtgcattaaatcattcattctcacaactaccttctgaaatgggttatcattttgcagctgagaaagtgaaggcatagaaataataagtaatttgcccaaagtcatctgataagttttggagctcagtttcagacccaggcagtctggctttagaggctgcaatcactctgaatagggaatgcccaccttaccctcactgcccttcaggccttctggtgtgtgaggtggatgagaccaaactcctcttaagcatgtaataactgagataaatgctgtaaaggaaatgaatgtggttcactagtcagttttgaagtctcattctcacatactctgtgcttccccaccctatttgtgttcgctttcactcccaaactacttctacctaattgcagaacactttctctacattttgcctaactgaaacctagcatatccctgctttccttgtagtttactagtagataagtaggaaaatagttctagaccttgcatgtacagggtcacaagagtttaaaaagagcaaggaaaaccattcagtaaatgacaagacattctgtatatgggatatgaactgggctgggagagaggtagagtacttaagagagcgtgctacgatagacctcaaaggactttttaccattctaaagaccttaaacattatactatctgctacagccagccacagaaagattttaagaagcaaaatgttgtgaggatattatagataaatgttggtgtggatgcaattaaagggaaaaagactagaggtgggaagatgggttaggaagctgtt

SEQ ID NO: 107264 - DNA, 1045 bp, Homo sapiens
aatataagatattgtgtggctgctttctgatatttcgattatgataattcccatatcaattatcatttacctgaattggatttcttttgaaaacctttgtgaggggggtggtatgtggtaagcaagggatgaatatcatcattgaactcaaaagtattcaaaaagcaacctaaaaaatgcaaaatgaaatatttgttaattctaaacttgagtgggatttataatgtctatatctgtcttttatattccaaaaggataaaatatctaaaattatttgttttatatctttatactagaaagaagattggtagaattattactttgtcaaccaattagaaggcctgccaaatatgagatgtataaaaataatttcagtgctgtttccccattttctttcctgagaatctctagttttctcatcatatcattaaaagcccaaaacgaaacaaaatattatttgtatttttcaaaaaattgattatccagaggaaactccagctttctagtgtagtattttctaactttggaggaaatcaagagccttaaggactacatatcacttagtaaagggtagaaacttatgggaataagaattttctctaacattgggaaggctgggagaggttctagtgcttcaggaggatttcagattcccccaccgtgggcctaattatttcatagactcagttcagctaaactaccatcataaaaggcagacatacatggttgccccaattataaaatcagttgacatcaagttttccagattaaatcactagtgatggattgatttctggatccaggaagcatattcttttttttttttttttttgggttgggggagggacaggttttctctctgttgccaaggctggagtgcagtagcatgatccccagctcactgcagcttccacctcccaggctcaagcagtcctcccatctcagcctcctaagtagctaggattacagactgtgccaccacacccaaccaattttttattttatgtatgtatgtatttatttatttatttggagagacagggtt

SEQ ID NO: 107265 - DNA, 1011 bp, Homo sapiens
tataataagttcattcttctttggagttgttaaaaagtgaggctcaggtttttgtgccctcaactttatcccccttggtttattgctgccttccaagttcagcatctcagcatttttatttcaagaaataagcttatgatgcacagcattaagcaagacactttgggagaggaggaacccttcccggaatttcagaagtctccttgtagagaaaattcctgtaatgttttgttttacttcaaaaatctgagtgccagaaagaacagagtcaagaaaggagctatcgtgagctcttgaatttgaagcaaagtctgtactgtgaccccattttagaagatcactggccctccatagagcactactttgaacaaatcagtgaattttaaatcaagtgtcttggttgcttatatttttaaaatctcaaaagatctaaattcagatgccagtgaaagctttgtaaagggaacctccccttcctcagcctacccttaacttgcattctaggaacttctaggtgctttagatatcccctaaatgattaaagaatagattataattcaatagaacagtgatttgctggttaaaggaagaatagctgatactttatgaaactgttcttagaatagcttggatgctagatcccattgtgtgtgtgtgtgtgtgtgtgtgtgtgtgtgtgtgtgtgtgtgtgagagagagagagagagagagagagagagagagatatgaggggggcaccaagacagacatagttatacccatttcctttttccataaagcatttgcagtagcttgtaaccaacacacattataaaatttacatagggatttttaaaattttaaataaaaatagagggaagcccttggaaaagaaatgatattagaataatgttgagtctcttgggaatcctgcaagttttttgcttcagatgcaattgcagtagcattgagagagatgtcaaacgtcaaacacagttctgtcctgaagaaaaggagcagaccttccattgg

SEQ ID NO: 107266 - DNA, 1066 bp, Homo sapiens
catttttgcctgctgttagagtagccacacctctccatgagtttcaggtgttttaaccatttaggaaaaagaggggagggagaaagaaatgaatcagtagtaaagagatggtgcctgagaatggaaagatcacagctgaaagtggagtatgtgctaccttctggcccagaccaggtggctgggtgtagatggacgttgtgtgtatccccaatgcagtaacccttacagagataattctcccagtttagccaccacgaagtattgttctttgtttttccatagtgcttgtcaaaatgctatgacaactgactggttttatgcaaacagagcctggctctcaagagacagtgtgtctgaaagtcaaacatggatggcagccattggcacacaaaggagtcagaaaccacagattgttttctcgttggatgaacagcttaaagcaacgtaaagttaattgaagaattccttgaaagtgaagtcagactaaaaagaaatgctccgagtctataatttactaaatgtgaaagaactgtaagtggtatgagactaaaacagtttcttggggggagagaacatttttgtaaacagatctggcttttatttttgcttgggctgttttaattatttgctctaataatgtagatctccagaagaatctctaattaggtaaggcttgatttatggagttggcctcatataaaccatgatgtatgtcatggtatgctgcagaaaattacaggcctggtctcgccattgcaaactagtatttctacctagaactactcctgctctgcatgtcttactctcaggaaagcaaagcatactatgttctccttcacagtgctcattgcccaggtaaactcaacatatagtattactcatcaaataattttagcaaacatttttaaaactggggagagaggagtagaagaaaaatgctagcagttaaagaaatctttacttcctgggaacttagtaaataccaacctatgattctcagtagaagtgggttcactcccccttcagctgacagactggcaaggatatgccagactatcaagagtag

SEQ ID NO: 107267 - DNA, 1289 bp, Homo sapiens
aggtatcctttttatggcctgttttaaaatactttgtcaaaaatgcccttcgtttagtcaaaattgtgggcaaatttatgttatatttttgctgccatgagtatatggtagaactttgggcagggatcctaaactcaagctgtctgcaggaaacagacaggcacggacagctatttattattcagaaggccagacataaaacaaggagcaaggtcgatagtgaaccaaagggccagtgtcttgtctcgatggggcaactgcttctcagctcctgttcattttttatcatgtgaaaaatgcagttatgtagttgaccagatcttccagtattttgagaggagctggaagtctggattattaaattaaatctcctgattttaaatgttggcaactcttttcttctacttgttcaaagcagaaaacttggagttgtccttcactcctgtcttcctttcaaaacccacatctaattcatcaggaaatcctgttggctctatcctcaaaatatattcagaatctgatcacttcttacggatttctgttgcactactgtggtccaaaccaccaccgtctctctccaagattgttgcagtagcctcctaactggtctcactgcttccattctttctctcctgcagccagaactgtaagtcagatcacatcgccccactgcccacaatcctccaaagtctccgcatcttactcagcatgaaagccaagatcctcccaataacccataagactctccgacctcatctctgcagctacattggcctcctgtctgttcctcacatatgccagctcatttcctccttgtgacctttgtccttgctgttccctatttttccaggtatctctacggcccattcatcccctgcatccctttgcttaaatgtcatcttctcagtgaaacctgccttggacacgctatctaaacttacacacatgaatacacacatccttcctctccaccttctctgctttttgtttctccttatcacatatggtctagtacactccatcaattttttattacctgttttctgcactagaatgtagattccacgtggatagggactttatatgattttgtgtatttgttcactgctgtttacatctggaaatgagcctcacacatggtaggtgttcaataaatgtttgatgaatgaatgaatcttaaaaacaatttttttaactttgggccaaataaaactcttcaataggccaaacctgggctgtacttcttttggcctagagtcaaaaagaagaatgagtgcttctccagcagc

SEQ ID NO: 107268 - DNA, 1109 bp, Homo sapiens
cgtttatttgcctcactttctccaaagggaaacaccccactagggcagtgtcaacagacttttttgtaaaagcaaaaataggaaatattttaggccttgctggccatatggtctgtgtagtaactactaaactaggtcaaaatcagccaaagacaatacataaattaatgagcatggctgtgtttccataaaactatattttggacagttaaatttgaattttatgtatttttcatgcatcatgaaaaatcctaatttttaattttttcagctgtttaaaaatgtaaaaattatgctttcagattatataaagacaggctacagaccagatctagcccattagccatagtttgctaaaccctgccctatgggaataaataatgaaacatgaggaagattgtaggtgttaaaacatggagtaaaatatgatacttgaaagacaattatttaaatgtggtagaggaaattattgatatgtatgcctctttcagagagagcagatggatgcgttggcccttgattctgttttaggtaatcttagttggtactaggtcaaattccagattggttattttgatttactctcttaagatttatgaaatgcaggttatagctggctttagagaagaaaagtggaaataagaagaggacatgtgacttagagcttgccataaggtatgcagagccaacagaacattttattcggaatggcagctggtggtttctgttatctgtgaatcattgtgaagtctgtctgaggcagagaggagacagctagccgaattcccctttcgcaaaaactgattcataacattgtaaagctcacagaaaatgcattttgtatcacaagaacacataaaaatctctattttttgacataaaggctatattgacgaactttaaaataaaaagaacctgtaaatgtaaaaccataaagaaacattttttaaaatagtatgaataatttatgggcagttgaatacagcttttgttgctttgtaggtaactcacttataacaattgcataaatggtaatgcagttgtgtgtaacaaaggaccattaattatgacacttatgacaatgataacataattaactattttttgag

SEQ ID NO: 107269 - DNA, 1036 bp, Homo sapiens
cagctgctccttatgtactgatacagcaggatctcccagatgtattgttaagtccaaaaggcacagtacagaacatattgtctatatcgtatgctaccttttgcatgtaataaaaagaagaaagaatgaacgtacatgtttgtctgcatatgtataaaacgtctttgaaaaatgcacacacaatattgcttgcctaaggaaataagaattttgtgttgggagacaataattttgcattaattcagcaataacagatgttggaaaaactcctaaatttaatgcttataaaaagaataggaaattatgctttcaccagtgttgtattggtattgaaattatcatcatctaataatagttcatcaaacacagagacattcccagacctttcactgtagtggtgaaaaccattatgcattttatctaattcagttagtctgctttacttattaacttgacctcaaaaaactgagcaaccttttctaagtgttcttgatcacagtagtacagcctatgaagtacataagaagtacagccaagactcacctgctacaggaatatcaaagagcagatgaaatataatctatgattatatttcacagtatgtagtataaagatttcacagtataaagatttcagtggagttctacaaaaataccaacttggtttaatacttaatggaaaggaaaacagtaaaatttatttcaaattagatagtgtaagattcagtcttataatatgcgggataccaggagtaccttggaaaagccagataccaaataagatctaggaaatttttaggaatccagaagaatctagaaaagcattgtccctagagttgatatttcagtatatcaccaagtaatttttcatccaagatctcagtgcttcccttaaattagatattaaatggcatgtggtaattccccccagtggttttcttcacagttaacgactttcttctttttttttttttttgagatggagtcttgttctgttgcccaggctggagtgcagtggcatgatctcggctcactgc

SEQ ID NO: 107270 - DNA, 1040 bp, Homo sapiens
ttcatcttggtgggttctcattattgctgctgcagtgactgattgatttgttgagaaatatctgtctaaatattcttctggtaacattatttttaggaaggcaaagcctttacatttccagacggcagctttgctgtgaatgtggggaaaccacagaaagctgtaacacattgcacatgtcagcaaggccttctgggcttcttggcattcctaatgatgataatgatcccacttggtggagtctgaccctccctgcagctggtgtcctttctgcgcagggatgaggtcactggggaagggggaggaggcggagctggggtggatgagagaagggaaggggaagaagctgtcacatctgcattcttggtggaaaaatggaaacatgtttgccacatgcttgctttgtttgtttattttttaaggaaagggtatggagaggcaagagaatagtgaggaattgtaacatgatgactgcttggttttcccccaaggcttcacagctaaatagctgtattctcaataacaggctcatcaaatttcccagggcactgataactctatgaatctaatcctgaatacttgaaactgatcagggccaggatattccagcgtttggatccagtaacttctttagagttgtgaaaattcctaattctagatagtccactcctccttatgcctcagacatgtcttaaaaagggaaattcagaatttgcagaattatttttatatttggcaatgtagttaaaagtatcaggttgttcacctatttctcaaagttgtcactgaaagtaaacaacctttttttttttttaagtttactagtagtagcctaactggtagatcatagttttatctctagagcttgttgtatatacagagattataaatctagaattccccaactccccccaggatttgggattgttgttacaattggttgttgttgatgtttttgtgaggagagaggttagcaaaagaggggtcctgttgtcattacagggaatgacctggcctgggcaaaatcacaaccaaccact

SEQ ID NO: 107271 - DNA, 2053 bp, Homo sapiens
catacattagcaattcaatgctagtataggaaagagggcctgagacatgaagatagctcaggagcaagtattaacactgagaatccatgggtaagttaatgcaatgtttctttctataaccacattttaagataagtatattctaaaattttacaaaggcaaggtggaaggtaccttccccaacctcatgtaaaccagttgtttgagtatatactgtataaggtaaactttctggatatgatacaagataaagttataaataaattcatatttgatcttgtttttaaatatgtaaatatccttaagtgccttgttattattttctaggatttgttttttcacaggaatttttaaaacctgtaatatataatttcccctaaataagatgaaatttagttcatccctgggataaatgctctgtatatcacctgtggagttgttcgcctgctctccctttggttaccagtcattatttcttatttctattctctcctgaaacaagggtgctccttgttgacagtatgcttcctgtgcctttatctcttaaaccctatatattgctccaatttggggcatagttgtaagtcattgtataattcaccatagcaagccttctgccccagaagtgtcttgaaaagacacagtttcctaggactgccataacagattaccacaaattgggtgatttataataacaagaatatatactctcacagttctagaggctagaagtttgaaatcaaagtgtcagcagggctatgcttccttcaaaggccgtagggaagaatactttcttgctttttgtagcttctggtgcttgccaacagtccttggcattccttggcttgtggcagcataactcccaaatctgccgctgtctttacatagttgtcttccctcgttgtgtctgtatccaaatttctgtcttctcatgaggacaccagtcactggattggggcctaccctaatccagtttgacctcatcttaacttgattacgtcagcaaacaccctatttccaaatatagtcacattcacaggttttgctaggtgcataaatttgggggagtggggagaatgggtattcaacctggtacagccagtaagaatcttactacattctctcatttctctgagcatttaggggtctacacttgagcattctgtttgttttcactgtgttatctttcttacctggaaatctatccaaagccacagaaaccctaactaatcaattctttagtgactgccacaacacatgctgagtctgtattattttataaaactgccccctggggccagattttgttctccattattcatatgcagcttcctactagaatcaaagtaaattgcatccaagtgtttccaagcattgactctggcccacacttcttcccaaattctatactttgttctttgtatatctggacattcggcttacttaaaagtatgtaatattctccccaaggctttgaagagctacattatttccaaatcttttaccacttgagcttccctagtattgtaaaagctggccaagggtcaaacatttgtgtgctttcaagatagcatgtagtgtttaaatcccttccttaaccaaagttgccattgtactgtgaaggaggttcagagcaaaggtcacaaactaaccgagacatcacattcccccttccctcttgatatgttctctttgacttgcttgatggttttttgaaagaacatgagttagttgctagtaatagcaaatttcacaaagaaattgagatatctggcttttcttgaaagctcagatctggaaaacctaggcctacattcttgtagctggccagagctggggagtggctgtcccgtcaagtggagcacgtactcttgcctgcaccatgagccagtctgacctgcttcgttcattatattatgttatgttttgttatgttatgttatgttatgttatgttatgttatgttatgttatgttatgtcatgttatgttgttacctacctgcccctgttggcatttgaactatccactcctggcccaggacttgggaatac

SEQ ID NO: 107272 - DNA, 1162 bp, Homo sapiens
catatgggacagttggtttcatgcagagaagccccctgcttgcccgggtgtttcataaatgcatgcatttggtcgcagaaggtatggatgtgagcgtggctggctcagcataacctacccctgctactggaaaaatcactcaaaccctaggtttttttaacagggtcactgccctcatccttgtttagaattaacaactgtgaatacaatgccggtccaacttctatgtattcctcaaagatcctgatgaccttttacccaactaactgactgtctaaatctttcgacatcgtgagagtctgatgaaaatagctagttattagaggctgactctctgtgaggtactatgctaagtgtttgtgtccattctcccactcatgcctcaaagtaatcccaggcaatatgcacaattttttattttctttttgcagttgaggaaactggctggggaagttacctagctttcctagggctccacatttactgactggcagaaccaagactgagactcctatctgtctgactctagagcctatgctattactctctataccctactgcctctctcaggcagaaaattaagaggcatctgaatactgttctatgttcaaggcacggaacagagttggagattttagaaactgtgataagctcctacttacagaatgaaactttgtacaatcagatgcttataaacgggtatgattttccattgtcattctttggaatgtaaaatgagatcacctctgaaggcaggcagagaaaagttgacacatagttaagtgaggcacaagtctgttcttgggtgcttctacaagcttcccattgatgacctcctctctgtcccggcagcttgagatactcacatccccaatctaaagctttgctcagcttttgctcctccaactttcatttcaaacacaaatccccttggtggacaaagagaaaagtttctctccgctttttttctcctctaaattcccaagcacctcaccacaaactgacttcattttacaccctcaaacccagaagcatcaacagacaacagggcccatttttcctgactgtcccactcagaggcttttcagtagaaggaggacgctgtataacctcctttgttagaacactgagttaagccatgacttctcttctggagccacag

SEQ ID NO: 107273 - DNA, 1114 bp, Homo sapiens
gaacagattgactaacttcactgttgatacagaaacatatacttggagttgaagagctttgttagatactctaggttgtttctgtccagtttctgggaagctatcctttaaaaaatacaatgcctcttaattttctttttccttaaagggctttataaatctctggcatttgaggctataatgggacgagccttccatgtgacatcttttttgagacaatgaaaaatgcttcacacctgtgtccttgtccgtggcttgcttttagcctcatctccgtgatcatcactgctttcccctgcttcttcactctagccttgcttcctttcattcaggaagcatttttttttagcacctgttattaaataatggtgtgctaggccctgaggaggtgaggagatgaagacaaagtttctatcctccaagggtagagggtgtagttcagaggttgaagattcaaacagcgttaggagccaggaaggtttgtgagccagaaggcgggggccaagtgcaggacagagtagtgactgggactgtactgtaatgaaaaggacccatcatgcctgaagaagtcagtcattacacaactccagctgactggaaccatccatatgtgccggcctagaattgtcagagcttccagtttgtcaagagaaatcagaaatccagatttctgtgtgtatgtatcatctcctgatttttaaaaaactctggcaactaattcatattcttcaaaaacatcatgtaggccaaacaaaacatgcatgtggactggattcaacctatgagcctccagtctggggagttctggcctcgttagtgaggtaaatcacatatgtatgaaatgattaatttaaaatgtgacccatatgactaggggtggcacaggcagttttcctgctggaggaggacggttggggaaatgggggcggggggaagatgggctccaggtacatgtgccctcagctgtgccgggtatggtaaagggatttgaggaaactggaggtgtgtgtcacatggtgggtgggctacggtgccagactgaagaggttgagatttactttctatgtcatgaggagcccctaaagatttttttgatctactattttagaaaata

SEQ ID NO: 107274 - DNA, 1032 bp, Homo sapiens
taaagcatctaatttcttctctctgtaaagaggattccattaaagaaataaagtgatttgttctgttacttgaagtatagagaaaaacctaatcaaatgttaaaatctctccacatgtttaccccaagactgtcaggagtacataccgtcagccaaacccattggtgccagtactgaatgttcacacttaaggttggaaaagttgcttctagttctcctctcaaacctcggacctctagaagcaggtggaagagttcttgttttgtttgttctttgttttgttgcttctggtttcagagaacccagaagaatggagattttgaaagtgaatttgaggtctgctgtaaaccttcaagggctctttcctgttaggattgtggggttgtcttccgggaatgtatttaggacgtgtggtggattgggaaagaggaggatgtatcaaagtaaacatttcatgagcttctgctttgcagtttaacttactaatagacaaaacttctgacgatttcctgtgtatcctaaaggaccaatttgccaccagctccccagtcccacggcctctctttttccagctaatcctgacccccccaacacccttttttttttttcaacattaaagccactcattcaatgtgcaacagtgttcgtgtttgccagccccttactgcattaagtgtgctgtgacttcttggtttaatttgtgatgtagctggttttcattctttatgttttgacaaatgccacccactattatatgtagagaactttaagatcctttggctctccagaggatagaaggccctggagcagaggaagggagactggcaaaagggcttggaaaatgcttacagacctaatggaactttttatttccacttgctgattttctttagcttcagattcattaagggcatgttggcaaatcatactcatctgtaagaacattctaataagttccgtgttgctgtctactacatgagagtcaatttgacaaacagctaattttttaaggaattcagcagttggatttcc

SEQ ID NO: 107275 - DNA, 1104 bp, Homo sapiens
aagaagatatatcaatgcaatatgattacctttcaaataatggacttctaatgacacaagagaacaatctagagcatgctagttgctgccacagaaatggatacagagacaacccacagtctggttctcatcctcgtgtcctttaccctacaggagagaagggcttatgataacgagcagagattccacttttattttaggaagcttagaggttaggaagaccataatttgttctttaaacatctcttgcatttttataagttctcttaccttcaaagctttattcgaagcttcgggtttttgctttttacttcatatcccaatctttgtcttctcttttctttttctttttttttttttaactgtctcctatacccactgatggcagactctgttttcttttatcttcttttccttattacacaagaattaaatgaagcaacatctataatataaattctcggaaaaattacacaacatggtaataactaattataaaggcaatttatagatttggggagaatttcatcccacagtgatagtaacatcgttggacctgaaaccaggacctattgatgactgacctggggcaatttatctctgagcttgacttttcttatctataaacttatcttaaactctacaagcttcttgagctaatccttctggggtattaggattcgattcaggagagctgagttggagcctagaaatcttcatttctgataagctctccaggcaataggccctcagacctcactttgaagacacaaaactatgtaatttctaagatcatttcctgcctaaaattctgtgattctgagtcttctttcaactacatggctttgggcagggctgatgcttcctggaaactcactgtttcatctgccatatgtataattaagaaatatatttgttagttatcttgcccggaaaacccttaaaaatgtaaacaataattttgatcagagttaagtacctctttttgtcactgctcagtggaggcttgtctgtttcattcctttaatctctcatcatatgcttatctctgtaaatatatttttccctctctaaaggcctctcagatgcttttcatctttctga

SEQ ID NO: 107276 - DNA, 1029 bp, Homo sapiens
tccaggaatctcttggagaagacagcccataatatctgagtgaggaatgagccagctttgaagaccctaaacagcagcatggcattcatatttctggtcagaagaatgcagctctgggaaacagggtcccacagggtaactattttttggttatagtcgagctccaacaaattttatttaggaagcctttatagatgccacacaaacacacccattttttatacccttacttaaatttattgttacatgtttctgtttctgtgaggtccatacatgtcacaaaatctgtttttcagcatggtagtcatagacttaccttcgttgacttaagacaccacctagtttgaagagatataattcaccccttgggtttattttgtgagaatggcctattgtacattccacaatctgtagaattagcttgcctgtggttttgaaaaaagaacaaattgagaactcttgcccttgtggttttatttaatgtttagaaaaattcaagtttagtctagtactttgggatgtgtatattctactggctatatttatgaaattacaattattttccagcaatttccaggtctaaataaaatcatgtatggattttattgtttagggtcagacatattggcagtcagtacctgacagggtcaaagtgagagtttttttacttaatgcttcaggatattcaacataagactctccagaatattcaacataagaattaactaaatagttttactttatcttgggcttgcttgcgcctgtaattatttgtttttatcttgaccgactagttaattgccaaaggattattttagataagtagcccttaacgtatgttgtgtggaacagcagcatcagcattacctgggaacttgcaagacatgaaacttcctagacccaaccccaggcctactgaatcagaaaccctaggggtggagcccagtgatctgtattttagcaagctctccgtctgattctaatgcacagcgagatttcagaaccattgtttcagaccataatcattgt

SEQ ID NO: 107277 - DNA, 1194 bp, Homo sapiens
cgaacctgcataaagagcatagaacagttgcgtttcctttctggcagtggtagagagtctttgacctgccatgggctgctttattttattcagtctcaaatagttaacctattgagctgattagaaaacaactagaagtcattcagtaccacagaagaaagggacagaaaagccacgaagttagttgtacttgtttggacatcaatatcattgattatatcattccaagtattactactgagaaatgtcttggaatcagctgaccccctctagttctaataccataaagggggaaaaaaaatccaggttctactcttatctgtgctttctcacttataacagtacctaactcctagttgatactcaaatactttttttacaatttgttttagccctaagcctgtttacccaaatcaaatacctttttaagaaaaattaaactggtatttattacccaccaggctaacgtccaaaatatgtgccttcctatgaatcattgcagcaatttagtgtagagcctctttaaatttttgataaaaatcattggagagttgggagcaatggctaacccattttttcactttttaaaatttacatatggtaaaattcacttttgtgtctaggacaggtctgtgattcagacaaatgcatacagcagtgtgatcaccaccataatcaaaatgcaaagcacttccatcacccccagaaatccttcaggctccctttttaatcagtccctctctctattctcaacccctagtaactactgattttttttctgttcctctaattttaccttttcctgaatgtcatataaatggaatcacagtattttgaatctggtttcttttacttagcagaatgtacttgagatactatccaaattgtcatgtgtaccaacagtttgttcctttttgctgctgtttaatgtgctgtcatacagctgtaccatagtttgctaatccaattacgagttgaaggacatttggtttattttctgtttggggcaattatgaataaagccactattaatgttcacgtacaggttttaagtgaatgtagctttcttgtgagtgtttctctaggagtggaattactgggctttgttgtaaatgaatgtttagcatcttataaagaactgccaaactgttttccaaagtgattgtactattttgtgttcccaccaacagtgta

SEQ ID NO: 107278 - DNA, 1047 bp, Homo sapiens
aatttgaatcttgaagaaaacaatagcaaacagctgcacaatggacccatgtggacaaaggtgcctggggccttactagaaggggcattcatagagtgcttcatagtttagggagggactgcccttggaacaagccctccatggaaggagctcagaaggatcagctgcagacagtgaagcaatgagctttgagataaacatcagtgaagttttctgtggctccacgcactcctatcaggagaaaagctagctggctttgcagttgcgggggagtagggaagatgagtgtactatttcctccctccaattttgttcagtactagaggaggtcttagagatcatctgagtcaattcctacagttcacagcctaggaaacggaagacaagacttgctccaggtcactgaactagtaggtggcaaaaatggagactagaatccagttgttcctaatatgacattctacttaaaaagcctgactaaatcttcctcaattagccacgggtgtcttcttttccagattattaacgagcaatgaattcttacttcatacaaatgcctatgaaatttgtatttatattatactaccttttcactcaatgtaagacatcagtaaagtgattcagttatcaaatatcatataaagaaccataatgggaaatgcttagttctagtctgttaaattgttcagttttagaaatgtttctgcttcctatcctttttgcttgacatgaggctttgacttataggtggatgcagaaaaatcttcatatcttcatctccatctactctttagggctttaaattcagttaatccattacttgcataaagttagtaaaaacaaagaatatttaattttgaagagtattagctagcattgttgagtaggaaagaacaggaaaaccaagtaaatctctctggatggttttgcttgtggatatgcgtgtagtaatagaaaatgcaactgaactctaaataataaaatacttcctgtagggcaaatacagccagaaaaattggaaagcagatcaataagattactacatat

SEQ ID NO: 107279 - DNA, 1068 bp, Homo sapiens
atacttcctcacacatttttaagttggatctaaaactttttatcatggctttcaaagtttatttttgttaaataggaggtagaaaagagtaaatattctataacagtattaaataagaattgattgtgattggaaatagttgacatgctggctaaagatgtcctgatgaaagcatgtgtccctgaaaccagtagatttcccgtcatagcatattttggattccaggagtctgtttaccccaaagacaatggtatacaagataatgaactgtaataagatttgttttgagtgagaagtttggcttttttttaacatggaaaagccaatatgaatgtagttggattctcaggcagctgaaaaataaagtacaaatggaagttaaggtctaaagacaaatttccttaaaatacccttgcatgtgtatatcttgtatttgcatgcccagtacacataccccagttggaaggccactagttatgagggttaaatgagtcaatgcatgttaagctcctagaataacgcctggtatctagtatgcactgagcaaacatacattattgctattattattttaggttctccctttagagaaaaaaatattcatacttactctgaggtcctaccttgtcctcatgtcttatctccctgcattcagcatcctttagaattaagtgactaaggatcagaagtatctattacctctgtattgggatcatggttccattcttctcacaagacaaactcattccaggagttaacagcggggactttctggtcaaattctattcagtttagctatctataaatatgacattctcctggatacacataactctcactacctatggatccagcctgatgctaaaggttccataaattgagaatttgtggggtttcataaatacgttgaaggagtagaggttactagataactgcagaaatagaatacagaatggaaaaaattgaagtgtaaaattttaaaagaaaaggttagctcattttaaacatactctatgcactggtcatcagacacttagaaatctcaaaatcaaaacagggacctctggc

SEQ ID NO: 107280 - DNA, 1037 bp, Homo sapiens
ccccacattgctttgggaaattactgagaaaattctcatcagagtagtagaccttaattacccaggtggaaagagcccatgaatattattgctgcctttagaagtttttattaacaaacagctcttacagtatttatgctgatttttaattaagcataatgagagtttcataatagtgtcaactgataaatgtagagaaatgtttacttggaatatttggctttgggagatagcagattgataaatcagaaaatgtcatcacaggaaaaacaagtttaactgtagctaaaggaacattgctgtaattgcaatgcattctctctagtattaactacaccatgttctcctttatgcatatctaatacacacgtggaatatggtagtgtagttaaacagtgtatgtgttgcacctcttctattccttcctgagatgtgaacagataatgaataaagaaagatatgtaatcattaattggtatggaaagaaaaaagaataactgaatatgtcacaaccattttaactgaacacatatctctcttcagtggagcgcctatatacaaaactgtgcagccaccctaaacattgaataatcctcccattgaggagtacagtgagcagaattttctgtgatatcatttggcagcagcctagcatcatttcccatttatatccagatgtgatgtgcccatggatatccagtcatcttctgtggggtgttacagaacaagttcttgataggtatctcccaagacctgccaaaaaccttatctcagaaacctgcttctgttctctggctctcattcattaaatcttaacatcaacagaaggtaaacaaacaaaagaaaaaagatacaatatagttgccatttgaaaatgttagtttcttccattaatctttccatgaaaagagaattcctcctctgcaatttaacctattcagtataattctccattttcaacacattgtgatgattttgacactgtatattgatcattcacatcagcttacaaaatcaagctattaagaaggaaagcc

SEQ ID NO: 107281 - DNA, 1055 bp, Homo sapiens
ctttagggttgtggttctcgaagatcaatccaaacacaaatcattatgtgaatacttttcgtatagttggtagtcagttgataggctaattccttaagcccagtttgtcaataggaaactttaaggatgaagcaatgaaggaccttgtcctaagctatacccaaaaactctgtaagaaaaggctttttccattgagaagctgggtgagaaaattaagcattctgaagcagggtaggtgagcattatacctaccttgaataatttacattaacgggatacattatgtattaatagtataataggtagttgaagtctctgtgaatgccaaagggtactcttaacagaagtactgtgttttttccattgtaacacttctcttccttggggttacactctataacaagggtgagtggatagtaggtctagatgtagcctcataggcttttttcttatgaaatttctgttcggggaaattatgtaactcacatacccacatgtgggccacattaacctatttttttttaatgttaccctattcctctgtacttcagcattccacctcactctggaaattttgacacatccagggtatatagcattcttaacagaagttggcccaaaccagtagagaatcataaatcacagcagtatgacttcatcaatccacaattaagaaaactgtggcataaagtggtttgctcaggatcacaaaaattaaagctaaaatttaggctttcttctgtcgctgttctgggagctgttaacaggtgttccgcagtgaggggtttggggatcaaataagttcgaggatggcctcatctccatttccttacttggacagtagtaatccatattaatatattaaagaatctctgcaataagacagataatattaataaaccagatgggatatagggaaaacaagtataaatcaggactagccaaggcaaaccaggatatattttcttcctagctaaaagataggatggggtggaaggagtggtagagagttactgacagatatttgaactcaattaggtttaggtttttttgga

SEQ ID NO: 107282 - DNA, 1039 bp, Homo sapiens
aaattatgggcagctccgtgacaggttaaaagtttacttgttgctgctgctgttattttaaatataggcaacactttaagatataaaatgggcccccaattcactaatattttacaaccttatacatcactcataactcacatataatctgttttgattgtgtgtgtgtttacaaaattatctacaaagcatgtttattatatttctagactcctgtttcctcaaggccaatgatttgactcacagtctttcctcatacctaaaagaaagtaagtaaactctgattttaatctatttaaactcattcttattttgctctggttttgggaatttaggttttggtctcgtttttgttttataacacattaggccattattgctctaggaatccagagaatggtgttctagtcccaggtcccccaccaatttgctgtttgacctgagacgagtcactgagtactcccctggacttaatttcctatctgaaaaataaggaagatggactatgtgatatgtgttccatctgtgagattctgaaattctgtttgcatgtttaccactcagaccatggctattgtgaagtcaatctaattttatcttttcaaaatttattttttgggaggctggagagggacagggtctcactccatctcccaggctggagtgcagtgggtctggtcacagctcagtggagcctcaacctcctgggctctagcgatcctcctgtctcagcctcccaagcagctgggactatagttgtgtgccaccacaagcagctaattttttttttttaattatttttggtagagacagggtctttctatgttgcccaggctggtctcaaactcctgggctcaagagatcctccccactcagcctcccaaagtgctgagattacaggcatgagctactgtgtctggcccttcaatatgtattatatgtagccagcagtaattaaattattcatatcaactgttcatttattcatggccagcaatgaaatagtttagatatagggagtttccattcttctttcaaa

SEQ ID NO: 107283 - DNA, 1020 bp, Homo sapiens
actaaaaagaaaatgtatgtaaagtgcttagcaccatgtcagtatttagtaaatgtttgctgtttttaaatgtttgttccattttatatcttatgttgaatgtccctttaaaatttaacatgattgaatcagcatttgtttcctatttaatcaacattgtcttcaagtatcaaacctaaattaaaatatcaaaaatgtaatattccaaatttttttacttaattttaaaattagtcacatttagggacttggtatgtttgttttgtgttacaaattaatgatactttattttaatctaatatttacaataaccagaaaattgaattacaattgtaattataatgaaccatgcttactatattttgttttgtttaaatactcaacaaagaagaaatgctcaacttgggaggtgtgccctgttttgccatatttcaaataattgttttctgttcttttttccagtttgtcctaagtgggtaaaacttaggaagaaccacagtgagaagaaatcggtcctgatgctgatcatctgcagctcggccgtccgagccctggagctcattaggttggaaggttcacctattccatatcataaatgttttctgaataactgatatatgccaagctattatgttctatgtgctggagatgtagcaataaacaaaacagagtccctgccctcatggaatttatatttcagtgggggagacagataataaacaaatgaagatacattataacgtcaagtacattgataagttatgtaaggaaaaaataaagcatggcaaagggatataagtagatcaggactacttttaaaagggtggtcacagaaagcttctctaaggagatgacaatttgatcagagacttgaacaaagtgaagaagaaagcccagcagctatctggaagaaaagcattccaggtagaggggagagtaagcacaaaagaccccaagataggatgccattataggattttgaggacttacttgatctgaatcatcattttaaaggttcac

SEQ ID NO: 107284 - DNA, 1051 bp, Homo sapiens
ctctgaagtctcaataaaataattaacagtatggaactggcacatgcatgacagatcagatgagtggaacagaattgaaagttcaggatcagacccaaatgcatatgaaaatgtagcatatgcctaaggtgacaaatcagaaatcagtagggaaagacggattgtttaataagtggtgttggaacaactgagtagccatctggaaaaataaagttggattcatatctcacttataacaagataaattccaaatggaataaaaacttaaaggtaaagattatgttttaaagataatttgtcagtgctttactaagggcttgcacatacgttttcatttactattgtttttgtagaataaacaaaaaggcttccactggtcagtggtaatattcagctttcagagaagagccgtgagagtcagatgggatttgctaggaccagctctctctgagagcctggctctgggccaggctttgacaggagacaaaacaaaggaaaatccaagtcctgaagaaagaggaacttggtcaaatagactaaggtgcaaatctagatattcaatagttatttacatctgttttttctaaatgaactaatctaatcatgaatttagaaaagtagttgttaaactgaaatagtccttcaaaccctcctttctccactgaagtggagacacacattaaattgtatcacattatgcacacacattaaattgtagcatataatctcccagtgaaacacttgtgtttctttccattttttctgctctaaacataattatcttgaagattccaactgcttccgggcagctgtacttgccggtcctgaaatcatgggaattcacactgacttttcagtgctttaaaaactacctcatttcacattcagatgctaagggcaaagagtgtggcctggaggtggactcttaaaataaagctatcaaattgatttgaacttttgttatacataaattccttactgagggcataaaagtactgtgttgtcacacttcatttaccaatttgcagtatttttttgtgtccccagtaat

SEQ ID NO: 107285 - DNA, 1069 bp, Homo sapiens
taggatacccagatagttggttaaacattattctgggtgttctgtgatggtatatttgcatgagattaacatttaaatgggtagacctgagcaaagaggattgcccttcataatgtgagagggccttgtcctgtcagttgaaggcctcaatagaacaaaagactgactctccccaaccccccaagagaattctgcctgactgcctcctaactgaaacattggctcttcctgattctgtggcagcctgttggccttcagacttgaattgggacatcagctttgcagattttgggcttttcagccccataatcatgtgagccaattccttataatatatatatatatggtcatataatctcctgttggttctgtttctctggtgaaccctgagtaatacactatctgtgaagctccttttagtctgggatttgagttagttggttttgttgttttataaacagtctaagaaatactattctcattggttttttgctgtaattaccctcttgctaggcattatctatgtaatataatgccatccaatccaatgttggaataagtatttgaatcacaaacataccccaatgttgtgtaggtcaaccctgttcttataatctaatctcatagccttttactgccttttaaacccaagctcttgaccatgttttatttagtaaaacaaatggtaaatgttaactagaagtgttcactgccatctcctcacacaaggctgtttgataccaacaaccgtactagttgccacctccaaattagattcaaatgtcatgctgaaaatttcccgttggtattttgctttttatacagtttgtaaatggaaagctttaactccgaattggaaacttcctagtgtaagcatttgcatcaattttgtattctttcaaactaggtacatttgccaaagtcattactttctttgatacaaaaatagtccaggatggcttctctgactaatgtaaattaaaagggaagattagaaattcacatgctccctaattttaaaaattctaattctaaatcctaaatgccagttttaaaagaagtaattatt

SEQ ID NO: 107286 - DNA, 1044 bp, Homo sapiens
gaacgtatctcctttagtatatagcttcatttacaacttttaaatattcagtcaaaaagtatgtgggccttcatttacacttttgacggggcctcacaaataggggtggtctgcccctttccttacgtcccactctttcttcaaattaaattgctacagcaggaaattactgaactgtggctcttctcctacgtccgccttccctatgtcaattcccatttcccttgctttctccaatagttaggactgtaaattctaactttgttaatttcgacgccaagctggaatgaagacgctaagtggacgctaaaaagacacgctgtttgtcacacaaggcctccaactgggacggcgtccaccgcgccccgccccgcccgcggcaccgtggcatcttgggacatgtagtctttggaggggcagctgcctccaccaagtctcctcccccaagacgctgcctttcggcctcgggacgccgtgacgttgcgttcctccagtcccttgccacctccctctttcttcccctctggggaagctcagtgctggacttccgaagaccttttacgacattgagtctcggagttggtctcagcgccggatccacttttcggcaaagtgacgtggacgtcaacagcaatggcggaaggagaagatgtgccgccgctgccaacgtcgagcggcgacggctggtgagtgaaagccggggctaatttccaatgcccctttattcttccttctcaccatcttgccggtccccgaggagccgtctggcgtcggcatggaacggagaggccggtcctaggcgaagtccggtgccctgccctacccctctgccagctgggtgccccctgcctgcctggttctgcccaagggactggggcgggactcccaaggagaggggtgtcatccaggtgctgggcctcagaacggtcctcctgtgtcgtctgtcagtctccaaagtgtgctggagtgggtggcttcagggctgggtttggccggagtcctggctgtgggagttggagtaggctgaagaaggaagtttgttgg

SEQ ID NO: 107287 - DNA, 1060 bp, Homo sapiens
ttttctaaaatgtatcatatatcttactgcctagctcaaactcatcttaatgacttgagtcattcagtttacaaatgtaagtgtaatttaaggatagaactaggtctctgtcctcagggaatttatgttctagatacaggaggcatgtttgagaacatcgattacttttgtgttattgtaatgtggtgagacttttagggcctatctagacaaattgttgctatgttaagtgacacagctatccctttttgagattgctttttataagtttttcctattttctttttttgttgtcagtggtatctcaatttgttcctagtctgtgaaactaagccattgaacttgttgaaattgtatatacattcttaaaaaggctcaggatggaccttgaagatcttaaaagtatgtggactctatgacattgtttttgctgattttcagttatgttctagttcactgcttctcaaaatttaaacgtacattggaattatctggggagcttgttaaaatgctctccaggtaactgtgattgtgattcaatatattttgaggtggaacttgagagtctctgtttctgactagctgctgggggttgccaattctggtggtttatggaccacacttaagttagcagggttctaggttatatatatatcagaatgagtaggtcagaggaatttgtatatgtcacattgtatcaccttacatgttatactaaaatatgtgtaattacatgacttatcattgttctttagataatgaacttctcaagggcagtggctgataaaaggcaggtgtctcagtaaatgtttattgaatgaatgtacgcatgaatgaaaactttcctgtaattatgtgcaatagcatactaagctgtcatttcatataaatttcctgactccagtgtttttgtgagctgtggaattgtctgttggtataatgcttattctttatggaaagccaaagtaatcagaaaatgcctcagctttcaagctccctgggattcagccatgtaagctcaaagggtgtggtgaaattcttgtaaaaatgcttatagtta

SEQ ID NO: 107288 - DNA, 1008 bp, Homo sapiens
ctgattacattcacatggtgtcatttatcatgttctgtccctggtattttctgtaagccagtagtttagagatgtgttcagacttctttgtttaggggaaggaggttctgagggggtgatgcctgcctcttttagatgataaatactatttagatgtcttttttgtgtttctctttttttttatttatattacttagatccattatgtttttagtagtttgcaaaatggtaacattcccttatttcttcataattagctgtaatgtttctttttatattatcttttaataaaggacccaaaatattttgaaagcttttaaaaatcactctgattacatcctaaaatactgtttaactaattttggtttgaccattgcactattgaaacaataatacaagcaaaatcaagacttgttaatagccttgaagttgttcccttcttcccacccaagcaccagaacttacaatgcataataaggtaaatggatatacctctctctgccaaagtccaaaatgtcaaggaaatgagaaagcccggtaatttaatgtatcacttggtattgtatttatcagtgttttagaactagctaaagttttaattaagtcgcagttttggaagaatttaaattttcttttccattacagaaaaacaaagaatatgtgagtattgccagtggaggatttatgggtaagattttgatttattagtttttttcctctatgtttcagaagaaattgtattgattatcaatagagttgatctggagtggtcacattagttaaagggtagactcttcattcattcaatattttcagaaaaggcaaggccaggaggacttacagataacagacaaacgtaataggcaattgaaattggtgactatttgatgtaagactattttaatagatttgtttccaaaaaatatttttgtaaagatgaatgaaaaactgcccatatgattgcctctatggagaagaaggattaaatgatgggacagggaaggaaga

SEQ ID NO: 107289 - DNA, 1044 bp, Homo sapiens
aaaaccatgaagtatttctttaccaagaataatctctctttccgtaactgttaatggctaacaatgcttctttattatgggagagattgattgatatctccttatggtataacaaaagtcacaatcggttttctgttatcctttatgtcataaaaatgttgcagaaattatctgttaatacttgaaagatttcctttcaaagaagaaaacgtaaagcctatacagttatcatcacattggcgtcagttaagaaaagttatccgtgtacagagggttttagaaggaagaataggaaggtttgctctagcttggaggcctttactcctttacagacgtgcagaaagaaatacctgtgattatttccttcagtccttttttctcagctgtgacatgtttattgtatttcgttggtaatgaatttttccaaagagtgttgatattttaggtttttcttttttttttaatttatcttaagcactgcagcagcacctggcagacattaatgtggatggaccagaaaatggatatggccattggattgctagtacctcaggctcaaggagcagtatcaattctgttgatgtaagtatatgtagagaatatgttaccggatttggataagttcccagaaaaggtgattaactactaaacccccaccataacagaaatggagtcaaaacatttcaaacacatgcaatgaagagtcatattattgtgagattaatgagatgatacagcaagccattatttattgtgagattaatgaaatgatacagcaagccttcacagttaaactaggtgggagctcttgaagttcagctgctgaattcaaatttctccctgtccagctgtagtttggtatcatgtagtgacagttttatgttccagcttaaatatcaatggggacaaatctgggtcctgtaaatagctgggactcttaagcaagctgattccaggcatctcccagttagtttttgccagaatactagggctcataatcatctcgtgcacactatgtctgtacccatccccatcacagactta

SEQ ID NO: 107290 - DNA, 1103 bp, Homo sapiens
gccaccgcgcccagcatctaccttctattcttaaaatgatttcacctaatgaattagtttgcagctgccgcaacaaaatatcatactacaaactgggggcttaaccaatgtaaatttattttcttactgttctggaggctaaaagtccaagatgaaagtattggcaggtttagtttatcctgaggcctctctccttggcttgcagatggatgccttgccttgtgtgtccttacatggcttctctgttttcatgtgctcatgtctttctctcttataaggacaccagtcagactggattagagaccacctgaagacctcatttaaccttaattatgcctgtagaggccttgtctccaaatacagtcacattctgagatatactgggagttaggacttcaacatatgattttggtgggattgcaattcagtctataacatgtagataaccattagcagtagtatgtcttttagtcattcagaggcagttaatccattatgttctttttttagggtgaatctcctaatggctcaagtgatagaggaatgaaatcactagtaaataaaatgactgtggctttgaagacaaaatccgttaatgtcagggaaaaagttatcagttttatagagaatacatcaactcctgtggatcggtgagttgtttatacagtatgagtttatgatgagtaattaaaactaaagaaacaatgtcttagagtaagtaaatgttagttgaatttaatgtgttccagaaaaggattataaagtatattttctattagatgatttcatagttttcattagaattgcaggaatgtactttatatccataattattctctcttactactcaaagatgcaaataatgtatctgtcacatcatgccattcactaaaagaaatttatgtcccagtatgtatcacatttcatatagtagctgcttcccaaatgtcaaatggatggagaatcatctgccgaattcagtgatctcatagtaggaacttcttcttctgctccaagattttaaaacctagaaaatctggtcatgctaaatatagcagaaacccaccttctgatgtttaagatcagaccttcatagaatttcg

SEQ ID NO: 107291 - DNA, 1043 bp, Homo sapiens
ccgcctagcagcagagaaaattatagcacctaaaaataggcaccgttcatggttcaaaatttttgttaatttgtgtacattatgtaattttatatttttagatttttcttaataagatgtatgtatataggttgagttagcatatataaatctcttccaagaaactacagttctagggttctgcctttggtttttgttgaaaaaaaattacatttttttctaggtagttgattactttaatgtataatctgtcacttctctaacccaaataaaacgaggtgcttctcattaaagacaataagtttaaggtttaaaaatctactggatcttcaattagggtaacaaaagaactttactaacttaactctgtgtgactttacagttcttatactcacagaatttttcagcaatttaatttagaatatcaattacagcaacacctacaaacatttaaaaagaaattctataaatcctaagtgggccagaaaaaaaaataaattctagtcatattttcaatgtaagttaagctttggaataatggaatggaatttttctcgggtcacttcagtattctcagtgacttgaagtagcatttttaagaataatacttcactctctaagactatactttcagccgggcgcaatggctcacacctgtaatcccagcactttgggagttggaggtgggcggatcacgaggtcaggaggttgagaccatcctggctaacatagtgaaaccccgtctctacagagtgagactgcgtctcaaaaaataataataataataataatataataataatagttcaccctctaataacttatcttctaagagttttgatttattgtgactatgcctacacaacgccaattacaggacttctgctaataattttacctagcactactttaaaggaaattgcttgttttaaaattacaatctatttgtgaatcatcctttccattttcttctgttacaggaccattgaattagtctaatttttttcaactcccaagttctcaaattattaatttttgtaact

SEQ ID NO: 107292 - DNA, 1048 bp, Homo sapiens
tcttcatttctattgaaacaaaagtaacagtaataaaaaaatgtgaagataacccttaagacacctgcacttatatgagaagccttaaccaatcatattggaatttgaatatttggtgttagtaacttattttacctaacagacatgaaggtagcaccaggcattgtcctaatagttttacaataaaattgactgatttagttcttactataaccctgacaggtagatattgttagcactattttacagaggaggaatcagaaacacaaaaggctaaataacttccgcaaggccaaacagatctaagcattggttttaatatggatattgaaattgtttaaaatttaatttttacatatttaagagcattcagcctaccaaggccttatgccacttttgctaacataatttctttatcttcttttaatttccttaacatagctctcctaaaactatgggtagtacatggggttttgggggggtcaggtaaggaataattacattttgtgtgaatattcaaatgatgcttggtaaaaatctttgataacttcttaagtgattatttctctcctaaaattctttgaatataggcatgtgagcagcagtgacagagtgggcaagccttaccgtggcgtaaagcctgttttcagcattggggatgaagaagaatacgacacaggtgtagtaatacacttagctacagacagctttgctgtcattaggagtgattacagcagtcattctgggaatagccaatcaactgcttttttaaaaaaatgagattctgtagaaataattggagaatctgtggctttctattaagagtttggttttagacaccttgaattgttgtacgtattagaaatccaagcaccaacatggcacatgtatacatatgtaacaaacctgcatgttgtgcgcatgtaccctaaaacttaaagtataataataataaaattttaaaaaaaaggaatccaagcagaaatgttgagtagaggcagttgattataggtgtcttcagctaaggagagaggtttaaactgatgat

SEQ ID NO: 107293 - DNA, 1035 bp, Homo sapiens
aggatttgacacgattttgccctttgatttgattgtagcttcctgttacggcttccagagtatacctattaggctacagttgagtacctcccatctagataataagcattcaattagaatgaatttctcatctttactccgctgatgtaaatgatgtctttatgagatgaagtccaagtaggaatgagcttgtaaattatctctgtcctcaggtcctgtgttaatttatccctgtcagtgttttgtgatcattatgtcatggaggatttcccctgccacaccatgctgtagggagttaacttttcatttgtgcattttctgtttggaaacagcttactgcagagtgggtctgggcatctgctacgacatgcggtttgcagagcttgcacaaatctacgcacagagaggtgaggcagtgtaatagctgtgttatgtgggtgcttggaggcttggttctaggctggtctatgtgggatccttagtcaagaaaagctgggagagggctctttaatttctccatcttcagccctttcacccccatgaggcttcccagacttttgctgtgtatggatgacagggtttttggggggttgtaattaaacacatcatgtagctaaggtaggagctgtgctcataaaggtctggtctacccttgagtccttgttactgtgtttggagagtcacttgaagcccagtagaaatgaagtggatttcaccactcagtacccctagacattgggtacaagtagaaatgtggtctgtgatattttggtccagacgaggagaaatgtgccagtatctgggaagagcgagttcaaaagatgtgggttctagttccaactcttccctttaattggcacagtactttgctaaaatgatttcacctctagagcagtgtggttctcagtttagtcacaggaatgatatgaggattaagaagagagaacctataaagcccctcgtgtggtactcaacaaataccagcatccttactagactgcttgaagctacttccaaatagactgtcacttaacc

SEQ ID NO: 107294 - DNA, 1040 bp, Homo sapiens
attgactacagggctgttgataatcaggtgtatgtggccacagcctctcctgcccgggatgacaaagcctcctatgttgcctggggacacagcaccgtggtgaacccttggtgagtaaggctaagtgagaataggctcagtcggagcttgagcttgagtggtggctcgttggcagatgggttttctggttcctgagcagccaggcgctcacttctcactcccatttccccacatatcctgccagctttctgcctgtctctgtgagaggagcttccatttgaaaaccatgtgagaagcaaatcaccctgctctcatgatcaagcacttggccttagccctcttctgagtttctggtgaccttcactgtcagtcatacttggatcacatggggaaacaaggcagcagtgacaggcaggttgtagtaagagactctgaaatttttggttaaaatttaagttggctgactagtcccagggtaggaatgagttacagggtgaggactttgcttccagcataatgatcagaggagcagtcaggatggttcaataagtgaaactatgaccctctccccaacaaaagggtgaagcattttattactcagtggagccagcacataagcctgcccagacagaattacagtcatacgctcatacgcattccttacagtctacatttgtacagtttacatcctactttcacaacatggtctcaacttgaactctcaggaaattgttcttattaagcccagtttatagatggtagaattacagaggaagcgactggaattccagatgtagcggctagacccagtgtttgaatccaggatatttgccttcagaacttggatgtattccacactagttctctgtatgaaagcacacacacacactggtatgtatgtctacatttcaggatgagtataccagtaacaagactgagaagagttaaatgttactgtggggttcctgagggttctgtcttctgcctttataggtagggctcagagctcaatgtgtgtggtggggaggccttggaagata

SEQ ID NO: 107295 - DNA, 1033 bp, Homo sapiens
aagcaatcgtgtattcagacataggtaagattttcctgggcatggtttaggtctctgatgtccccattgttctgaggccagactccatggctgggaagtccctgtcatttggaggggttcctttatgccccttctcattgatctctggggatattctagggtctggttctctggccaatccctggggagtgtatcagcttgaattttcttggtttggtttgaaatgatgccaggccatctgtgcacctagataagacctatgttactaagttacttactaagactctggtggtttatacagtcaggggaagaaatccccttggttagtgaggagttgcaaattattaatagtgcactttcctgttttttgcagacctgaagaagctggctgaaatacgccagcaaatccccgtttttagacagaagcgatcagacctctatgctgtggagatgaaaaagccctaaagtttatgtttctaatgtgtcacagaataggacgatatgattctacaacataatcaactccctattaaattctttaatgaagattttttttttaattcggccttgtccttcctaggttctctattgagatgagaaagcctcattatgctgacattttccacgccacattaaatagttaaaaaggatgcagcctggagccagagagcagaaagctgggctggttctgaagcttcttccatacttaagttgcctccaagcagtttgtgaaagtatcagatcttggtatcctggtgattgattcacctaatataaatatatttgtgtcatgaacctcttatcccgttgctggagttgtaatctccatcatctagaaaacgtggtctggtgctattcttttccaagcagtaccttgaagttccatttttggttcatgagtagctatagaacgcaaggtgatacatctttggtgtttgccagagaagttggcagccccacccctcctaccagcctttgcactcttcaaatttaaaaaggagctacttatcaaccccaggcccttctggtctta

SEQ ID NO: 107296 - DNA, 3405 bp, Homo sapiens
aattgaactttgaaaaaatccattctgaaccttacaattaaataagtgaatttgaataaatgaaattgcagattatcctaggattttgcagatctgctagctgttggcctaatgccagaacatgaactcttgaaaaaagttttttttaaaaataagcctatcacgttgccatatattataatgggggattaaatatagtcaccctagtggtacctcttactggcatataaagtctaactggcacatatgccaataaaatgtaccttactaacatgtatgccagttagactctgtatatgcaggtatatatatatatagtagggacttaatattctttgtaggattgcatatatatgtagctaatactagttacttaaaacagttggttcttagatagctgtggatttgaccagaatcaggcagaggcaataaatctgagtatttattgagtaggtgtgaggaactcacatagactgcctgaagagtagagatgcatggggttggggatgtgctggtaagagatgaaacagaaagaggtgggcccacatcagtctgtgaaggtaaggcccttgcatgtcattagtgtcccggtattatgtcactgctttctaaaggagtctcatgttaacagtagaaacatgtaaaatttaggaaccagacggaattgtgattttaaataagccaatcaatttccctagtctgactgttcttatcagtaaacacagaatacaagggatataatgtaagcacatagtatttgtaatagtagttgacattcattgagtgctttcaatgtggtaggtactcttgtttattttaaaagaagcattttactagaatcatagtagaaacttagtggtcagacttcatgtagcatcacttacaaccttcattgaatattgtgaagaaacttagtggtcagacttcatgtaccatcacttacaaccttcattgaatattgtgaagtgcttgttgaatctgagacttaaaaattttgttcttttagaggaaacatggagaaagccattgacatgttcaacaaagctattaacctggccaaatcggaaatggagatggcccatctgtattcactttgcgatgccgcccatgcccagacagaagttgcaaagaaatacggattaaaaccaccaacattataaaacagggggaaagcagactgaccctctttttaaaagtttaccccctcttcaactgaaccctaaagacactgtcatgaactgtgttgaatggtggaaatcagtatttctgtttgtggtgttgttatttgttacatctgtttcatgtctaggtgttgtgggtgtggctgttgaaggaagtttgcagtcttgcagcttttattccctgtgcaacaaaagattagaacatgttaaagggatttttaaataaagttgcaaagagtacaaatgataattggccatgcaaataaaaactgatttgttgattttttttttaaggggggttggcagttgattatgttctggatgattccgtctatatatgtgtgaataatgtaagtattttacagcatgttgatttttaaattaacgtagtaaatgctgtaaaatagatttatattcagttaaccgctttcagttgattttttgaaagaaacaaaggttaaatgggggattaaagtaaaattgagagaccctttaaaccattgtcagcatgcacaatgcctctgattctgcagttttagaaacttggtggcacttattaatcctcttggcccctttccactctaatggatagtgtacattcttcttaaagtccacaacagcagattttcttgcagtaaattatgcagatgcaaaatattctaattgatatatgtgttggaagactgagtattgatgggggagtggaccagacaaagaggtaagatgaaacagtagtgtgtttataattgtctgtgactattttctataataattagtactatttaatggtgagcttttaaaaatgtaggatagagggtacagtggcactgtatatactatttatagtctcagctactagggaggctgaggcaagaggcttgagaccaggagctcgaggctgtaatgtgccatgatgattgcacctgcgaatagccactgcactccagcctgggcaatatagcaagaccccatcctttaaaaaattttagaacttttttaaaatcaaagtgcagattgcttgtatgtaaaacccaaataaaggtagagtaagtgtgatatatgggagtattaaaatagcttaaaatttctcgtgaaggacatgtggctaaagggtcaaaaaggatgtaagacttggagccagagcatagtatttcctgaaataacaagtttagtgctttaactatggctacatgtgcttaaggaattttgagccacttatttttgaagatgctgaggacatgtagagtgctttttgtagtgagctaaccttgatctctaaggactaactacccaggtccaggtcttcactaggggtactgacagtgtttaagctttactccacctccttacttagaaatcactttacgatttatttccattttccacttttatagaccatccttttgcttatatgctagatttttctggtgagggaagggttgtgttcttcaggggtcttttgttttgaaatactcaggatggggagaggtttatttaagaacgaattataattatggtttacactgttgggagtaaaggagcatttttacaccccttaagggtgcttaattctgttgaaaccaaaaagatttgtctacaaatgctatcttttttagaaactattagaaatgactccctttcaaagtcaatctttggaaaatattgaggaggtcactaattagttggtgcagttaatataattcaagatgatttggatgatgggaagtttgagaccgctgcattttgtttttaaattatgcaccttctgataacccccaaatacagaaatgttctacatctctgaatgacctctgactttaaaaaagtttttatttgcatggctgtatttacattaacactgacattttcttctactcttctcccttctttcatcttggggttgggtagagaaacacaaaggaaactgaagcatgtgccattctatactgtcattccaaattctcatggactattgcctgttgtgaaaatgtttgaaactgcactgaaagctgcatctgtctgtatctttcttttgtaaatgacctcacatgtaaattcaccaaataaatattacattcaagctcttctatctattctttaaatagaaagataggtagtttaggctgggcatggtggctcacacctgtaatcccagcactttagcaggccgaggcgggcagatcacgaggtcaggagatcgagaccatcctggctaacacggtga

SEQ ID NO: 107297 - DNA, 2065 bp, Homo sapiens
agggggatcacttgaacccaagaggcggaggttgcagaaaacagagattgcgccactacaccccagcctgggtgacaagaatgaaactctatctcaaaaaaaaaaaaaaaaaaattcccttgggctgtattatgataaattatgaataagtgatgtgactgtacctatgagaatgtgatattagagctgtgactaagaatgggattatctgtattgaacagtttaccagagattatctgctgtggcatataactaaccacttgctgaagaaagaggatagttaagatttcatatttatagcagtgccacctaaaaactccgataattaagatgtaaaatgtaaatcagtctgtatccccaaaacgtgataattttgtaataatgaatgaagtaaatttttataatgaataataagtatacttttaactgcttaggttgacggttaccttaatataactgaagtatctcctcacataggcattaacagatcaacaacagtttggtaaagctgatgaaatgtatgataaatgtattgatttggaaccagataatgctacaacatatgttcataaagggtatgtatttttgtgattgttccaatgagataataaatttcttgcatagtaataaaatgtatttattttggccactgaggaaggggactgtggtagagaagttaattgacaaacttcttaatgctcctagatgtcttttcattcttacagaaattagttaaggaggccaggcgcagtggcttacacgtaatcctagtactttgggaggccgaggcaggcagatcatctgaggttgggagttcgaaaccctcctgaccaacatggtgaaacccggtgtctactaaaactacaaaaaattagccaggtgtggtggcacatgcccgattcccagctactcagcaggctaaggagtgagaatcacttgaacctgggaggcagaggttgcagtgagccaagattgcaccactgctctccagcctgggcggcagagtgaggctctgtcccaaaaaaaacaaaaagaaagaaattaatgtactattcttgctctgtgttaagggttttaatttcaaactgaacatcctgtcagctgttggcttatatccaaatacgaagcatacacaagtgttcgtgtccttgcgtacttgaattatcctaagaaacttcacttaaatttatataaagtgaaaaataagggatgcaagattggtaatagagcctagaccattgaacactttttgtaataaggaacttagactagcaaaccaatataagctgagaaaaaaaacacaatttgatgctgattatatattgccttataagttataagttaacttataagttcattgaaggcagaaattgagtcatattaatgtgtgtgtattcctactgatactgggccatggtcacatctgacatttttttgcatttgcagtttacttcaacttcagtggaagcaagatctggatagaggtttggaacttatcagcaaggctattgaaattgacaataaatgtgattttgcctatgaaaccatgggaactattgaagtacaaaggtaacttctggagtctgttaggaaatatatggtagctccatagatatttagctttttgttcttattacgtacatgttaaagtctgttatgttctttcctcttttcacctgtattattcacgttggaaaaaaaaatgtgctaaggcagtgacataaggattggtagccaagttgccagaaaatctggaccctcctccaaagaagcatccagccaaatggctgggcaagttgcaacatcaactcagagcccctgaattttctttaaaatcagagttggataagaacattttttgcagctctgtccttaacctcttattttgtgtaagtgtttatccagagttgctcttaagatccaccattaaaaggtgacagctgttttatatatgggatttattgtataccatcttaatactggtattgccattcatttgagtttcctactttaggccaagtattaaactttagatgtttcctaagtactatttcaattaatcttc

SEQ ID NO: 107298 - DNA, 1495 bp, Homo sapiens
gcccttttggaaattagtttggcaattcctcagaaacttaccatatgatctagtaattccactcctaggtatatacccaagagaatttaatacgttcgttaacacaaaaacttgtacatgagagctgggtgtggaggctcacacctgtaatcccagcactttggaaacccaggagttctagactaccctgggtaacgtagcaaaatctcatctctatttttaaaaagcttttttaaaaaccttgtatgtgaatgttcatagcagcattatttatggtagccaaaaagtggaagcagctcaaatgtccatcagttgatgaatggataaataaaatgtgatatctgtacaatggaatatttttcaggcataacaaaagaatgaaaaactgatacatgctacaatatggatgaaccttgaaaacattatgctaaatcaaagaagccagacacaaaaggctatatataatgtatgattccacttacatgaaacatccagaatatacaaatccatagaaatagaaaataggttggtgttttctaggggctgaagagtaggaggtgagggggatggagagtgactgcttatttgtatgtggtttcttttaagggtgatgaaaatgttctggaattagatagtggtaatcaacacacaacttagtgaatacactaaaaacaggtgacatgcatactttaaaagggtgacctttgtgatatgtggattatagaaaaaagctgttatttaaagaaactagattggagggaaaaaaaagtaatgatgaacctttcctcacttggggtatatagcttcgagcaaatgctctcatcaaaagaggcagcatgtacatgcaacagcagcagcctttgctgtccactcaagattttaacatggctgctgacatcgatcctcagaatgcagatgtttatcaccaccgaggacaggtaagtctgttttcttacctagaggtctgacttgtggattgagctttgataccatttttgagaatttcttatgtaattttcttgagttttcttatataatttctgatagctgtgaacaaagtatcacagtggtttacagtttgaattggcctttgtttagtctgtcttgaatatttgtctttaattttggtatttacttatgaaaaaagagtaaaggaaggcaaaaactgttggcttaccagttcaagtttgtttttctggtgtttctggttcataggtttcaatgagtaaaacattaataacatttagtaagcaatgtgagttaattctagaatcaacaggatgatttttgtgagcttcttgctataaggaaatagtctggactgtccaaatagtaaaaataaatatatttatcttttgaagttttataacaggcatattagttttttagtagaaatatatagtgaagaaacagtttccaattactgcctcaagtggggaaaacatggctttataatcagcttaacatggcttcttggaatgcattatggtataaa

SEQ ID NO: 107299 - DNA, 1132 bp, Homo sapiens
taaagcattcaaaatacattatgagagccttttgggtgtgttatttccactttatttaaaacttatttatttaaaacggtaattgtgtttcgggaggaacaaaatactcccataattgtgaattgggtggctatgcctcaaataaataatcaaaacaggaaatgtgatttcagtatggttttcagtggcacttacctgtaataaagatcttcagatgaaagcccaaggtaaatggacttaacattttcagcacctgtgtaagatgtggtcttacatctttgtagagggaaaaggctctcatttaaaaccagctttaaacagctgggactggcagcttcaccttttccactgtcttttgttctgtggcttggagcttaattttagttatttgaaaatgagaatccaatttttatgacagttattcttagcgttctacaatgtacctgcttctttggttggtatttcccatcctgatgtctttaaacatgactaaatttcagaatcgtgaacctctgatgccatctccacagtttatcaaatcttacttcagttctttcacggatgatatcatttcccagcccatgcttaaaggagagaaatctgatgaagataaagacaaggaaggggaggctttagaagtgaaagaaaagtaagtatgtcaagcatagtgtctacttagtggtgttttgggtgctttgaactttccttagggcccatatgggttctgagccatctcacaacagcagctatctatctacagatagagatagacagaaatataattaaaaattatataatattattattataaaaacacttttctttctagcatgtatctgttacttctctggtaactcagggttttactgccaggagtctaccctgcttttactcaaggtcctatatgatcttctcaaaaggactccgattgaatccagtggctgaccgtgtttgaatagaggcaataacttgaaaattattgtgtagctcaacatgcagatgttctagtgcagggaagtttttaatttataaacagatacttttaggggtgcccaaagagtgaattttttcaaggatttttctgcttgtctaggaagatgcccatttggagggcttcttgttggagcctgta

SEQ ID NO: 107300 - DNA, 1053 bp, Homo sapiens
tgacataaccagatgaaaatggtattgaggcagatttatttgagagctctgtggcaagatggctttggagacagggaataactctgaggcctataaacaaacaccagacatgagagagccacactatgtttatatgccttagagttgctagccagaagagaatgttagagtggtgagaaacatcagaaatcatgcagcatagcccctttcatttcacagttaaggaaagcaaaccccagagaagtggagtgactttctgagctttcagtttggtcatagagaatataaaattaggtattaagaatcagttaattggaaatgaaacagtcccatttggccatgaatttagtttggctttctgtagttacattgtacccatttgatgctgctgaccatctttgcaataattttatatttacccttgtgtttttcatcatttctagatgtcactgctgtgtgtatattagaagggttccaaaatcaacaaagcatgctgttagccgataaagttcttaaactccttggaaaagagaaagccaaagaaaaatataaggtaaattgatctgatttggggaatgggggagtactgtgtacattgtgaagggtattttctaatttatgctgcttaagcttaggcatagtggtaatggcaacaactgcaattagaactgggttatatttcttcttcctgttatctttggcttttatggcttgtccttcttcagtaagaatatatgctctgtccattactctacctggagaatattggaattcatctgtgttagggattgccacactgtggcccataggccaaatccagtctgctacctgtttttataaataatgttcagtcacatgttgttttcagctgcctttgagatacaacagcggagttgagtggttgtgacaaactgtatagactccaaagcctaaaatatttactatctggcctttcacagaaaaatatttttctatattattaaagtttttaaaggtatactgagtaagttggcattagttttaggctattattaacaggtagtttaattcaac

SEQ ID NO: 107301 - DNA, 1571 bp, Homo sapiens
tcgggactgcaggcgtgtgccaccatacccagctattttttgtatttttaatagagacggggttccgacacgttgcccaggctggtctcaaactcctggcctcaagtgatccacccgcctcagcctcccaaagtgttgagattataggcatgagctgccatgcctggccaagatatgctttttgactcaacaatcctactagttagaatctattccatgaagatatttgtatgaagcaacttacattgtaaacagccattctgtcttcctgtttttatcaatttattgtttaattactgtggtctgagtctgtgaatgttgattagtgtttgataattgtttcctctcatttcagaactctcttgatagagcccaagcagccaagaataaaggcaataaatattttaaagcaggaaaatatgaacaagctattcagtgctatactgaggctattagcttgtgccctacagagaagaatgttgacctttctacattttatcaaaacagagctgctgcctttgaacagttggtatgtactctaggttgtttcttctgttccttttctttctctttatttgcttaaagtttcagttaaagctactcaaataaacctaatacattttttgaagttgtttcaaaattatgggatgttgttcttatttccattaattgcaaaactttttaaagaacaaattctatagttttgctgactacagatatactccaaagttaagtatatttcacattttataaaattagatagtatagaaagtttctggtgaccctattctcctcaacagtttgaggctatttctttaactttttgatatttatatgagcttttgtaatatattgcagatattaactctttgtattaggaatacttttttattctaggacttttaatactcaacctatcaagtttaaactgatttctattgaacagtactttctttagtgtgactttttttaaatactttcaattacagcaaaaatggaaagaagtggcacaagactgtacaaaagctgttgaacttaatcccaaatatgtgaaagctctctttagacgtgcaaaagcccatgagaagctagacaataagaaggaatgtttagaaggtgagggtaattttgtgtttacatatgaaaattacttaatattttgtagtcattggtaaatgtatatgaaactgccttgtgagtgcaagaatcagttgtttttaaaagttggattcctttgcacttaagattgtgtcttctagtttaaagtaagattgctgatacttaagtattgtctctgttctcaactatggaattaaatgactattaagattaggagtttatgtactacacattttaaacttagcagctaatgagcattagtataattctctgaataaggaaatcagaaaagaagttttagcaagtgatagtgtttctaaggttctacatatttcatttaatatgtataaatatagctttgagagctgtgtttataatatgtataaacatagctttgagatgaatcattaaagaaaacattgttttgtgcccttggtattttcaaacattat

SEQ ID NO: 107302 - DNA, 1082 bp, Homo sapiens
tcattgtggtttcagccaccccacctcatcccaggggatctgtaccattggtatttgataaaacctagccatctccttttcacattttagatgtcctaattcctcttttccacgttgtctggatcaacactgatgattttttaatttcatgatatttcagagttttttagttttacaaataactttttttttttgatacggagtctcactctgtcacccaggctggagtgcaatggcgaggtctcggctcactgcaacctctgcctcctgggctcaagagattgtcctgcctcagcctcccaagtagctgggattacaggcacgcaccaccacgcctggctaatttttgtatttttagtagagacagggtttcaccatgttcgccaggctggtctcaaactcctgacctcgtgattcacccgccttggcctcccaaagtgctgggattacaggcatgagccactgcccctgaccacaaataactttttattcacctgactgctgttaaaaattagaatttaagattggactctttgtgtaacttaaactgctttaaaatgatttatttttggccccaaataaaataaggcaaaacatttgcacttaccattgtccatcttgtggaatatgtaggcctacacctgtaatctttgaattactagattgttctttggtaaagcaacaataggaaggtctttgtgatttttttaaactggaaatttatatcttaactgttggtgaccagtaaatattgaaagactacttttgtcttcttttaatagtctggtccttagagttattattagactatctaaatgtaattaattgatcagtaattgtaatttcttatctgtggttggataaactgctgtacatttgaatagcacctctaaattggcatcctcggtggatttcgcaaccagaagcatttgctttcactgatggaaacctggcagaatcctgatgccctaactgtcctttctccacctgagcaatagctacagtttttaaaggaatgaataaatagacaaatattgtctgtttagggtttgatatcagaaaatagaatggaaaatctgtat

SEQ ID NO: 107303 - DNA, 1900 bp, Homo sapiens
caaaaacaaaaacgattagatggctttctacatagaaaaagaaagactacacaggttctaaagagtgaaatggtgttcagtggcatttgttttacagcctctgaactgtaagcagaactgtcaagctcccaaggctcgtcctctctcagcaaccccgaagcccccttggctgcaagcactcagcgcccgtaacctctcctgccatgccccagccccaaggtgtccttttgcactccggaccccttggcctttgtcagaaaacgctctgcactgcactgtcccctcttgctgcacaagagtagcggccacagcaatgctcaccaggcttggttgcacacagccccctgccccaggtccaggcctacacacacatacaaaaaaaaaaaaaaaaaaaatgggagtgacttcttaaactttttgattggaagcatcttaaattcagtttttccatttcacctggaaatgtacatgaccaagcctaatatgcatgatacagtttctctgatgtgaggccaagcattggattatttagtgaactgctttgtatggttttggtgaactgactgttaaatccttttggtatctgacagctgtgcagagaattagtctggctgcatttgacaatactgggattgggtgtggtggattttctctgggtctggagttgttcaatggtagtaccagagtaagtcgaggtcagagaaacgtttggtcaaatatctcccagttttatacataagtatatacagttggtcaagtaacttctaattgtatccaagtgtatacacttaaatatgtatgcaagtcatttccatattatactattcaggttgaattttttttttttttttgagatggagtctcactttgttgcccaggctggagtgcagtggtgcgatctcagctcaccaccacctccgcctcctgggttcaagcagttctgcctcagcctccggaatagctgggactacaggcgcgcgccaccatgccccgctaatttttgtatttttagtagagacggggtttcactgtgttggccaggctggtcttgaactcctgacctcaggtgatctgcccatcttggcctcccaaagtgctgggattacaggcgtgagccaccgcgcccgggcgaagatatttttactaggatgtcaaattagctttaaaggaagttttggtgtaggaatgaacaaactagtatctgcagtgtgtgaggcattgtgctaggccatgagaaagccatatgatctttcctatgggagagtgaagcattacctattttctaaaaggtttatgactggatagtagaagaacttatggactgtgttagaactaggatttgtaagctttatagtgggctctccagcattgtcactttgggaaagtcattttgtctccttgaccttagcgtcatccctgtagaataagaggattaaaatattagatctcttctgtttctttcagtactaaaaattgatgattctcattatgatcatttataatagctcactgctgctattaaaagtagttatcaagaggattatttgaattaattatcacttgtcttacatcaattttggatgtctgaaattctccagtcattttctatttcgtttgttaatttagttttaatcatggaagaatagtaggtaaaataaaagatccaaaaagttctcagttctgtaaacattaaaaataaagatagtttctatacatgaaactaaatttttttttttttttttttttgagacagcgtctaaccctgtcacccaggctggagtgcagtggcacgatcttggctcactgcaacctctgcctcctgagttcaagcagttctcctgcctcagcctcctgagtagctgggattacaggcatgcgccaccatgcctggctaattttt

SEQ ID NO: 107304 - DNA, 1193 bp, Homo sapiens
tgtcctctgccaccgcctccctgtctgtcgcgagcgccacaatcaccaaacagcgtgcgaaggaagaccgagggagggaaggaaagcaatgagcgagcgagcacgctaggcagagagagcggacgacagaaaagggccagaggtcaccggaagcccagggcatgccgggccagacctggccgtccttctcctccagtatcaaccgaagagggagaggaggggcggaaatcacttccgggttaagggaaagcgtgggtgtgagtaggagtcttcggaaaccctttttctttcttttcgccccgctgctgttcgggagatggacttctggagtccccgtcgtagctggtgttgtcccctctaccttcaggaaagaagggcagatggccctcttgcctactgaagccgaggaggggcgcgtatacagcgggctaagggcgctcaagagatccgagtggaagaaaaagcagcggcacagcactggaatgggcgggagtggcagaagagttgtgaaggctattggctagcaagggtggtgggcggggcgtagaccgagctacccagtttactggtcgatttcggatccagttttccagttatagccacgttggcacctcttgaacctctgtggccgttagcacggttttctgcccgcgtgcccgagaaaccaacggattagaaggacttttaaagatgtgtgaggaaagagctcaccgctgaagaaggctgctgcatcactgaacttcttatcactaacatagcgagattttagtttggacgaatttgaggttataggggagatagcgatggcagaagactaggtggaaatggcacatctaggttggctgcagtcgaaacggtttgagcgtggtcgctgtggctcatcgtcggcaccaattaacgaagcgatgacatctgcgttgttaggggtttcttaaactgagttggtagaaatgcgaagcgtcagggttcccgccggcttcgagcctttcttggcgtatttgtatcttgagctgatttctgcgtcagcccacatctcgctctgatccgcacgccccccgggttgttttgcagtagcagtctcagccctcttctcgtctcattcccaaatcgtaatttcagttcacagctttttatctataatagctttatcaactctttttccgatgctctgcaccagatctcttaaaatataa

SEQ ID NO: 107305 - DNA, 1029 bp, Homo sapiens
tctctttgtaatgtgttgagacttcctttggaatacggcccagtgtcagtggttgtaaatgatccatgtagtcaaaggaaagtatatcctctgtttggtttaggagtcctcatatatttactagatcaagtttgttaaaaagcgaaatattcaaataaagaaaggcaggacaagaggggaaaccccaagagagcggaattataaacataagagcagaattaatgaaattaattagtgttcagttaataatgactaattaatgtctaggatctgaaggaggaagctgtgggttatacctcaactgggaataggttggcttagtgttgccccttttggcagataaatgttttcatatttcccccaaaagcttttctaaggaagagattaatgtctttgggcataaatccgtgattatttagaaaatttttcatctaccaatatgtctagactagactgtttccttcttcctggtggtcagcctaaataatgtccgcagctttaaagaaaaatgaacatttaataccagcgcaaacacacacactggcaggaaatgaaggtttagccatagtgacattcccactactgcacccctctgaaacaaaactgtctagaaacttaggtgaatatattatgcttccagtcggtaagtgtggcatatgaatgtttacagcaaaacgctgtcttaagctaacaatattatgtcgtgacttgcttttcaccatattaccatatttttttctcactacttctccataaatggttaatatgttaatacttgtgcatgaactgtgtatagagggattagataaaacatccacctagactcttggaaccgtaagtatggagatgtgaattgaaggaaaccaatactcagattggccacttttttatcacacacatataaatgattgggtaatacgtaaatggagagggaatttcccttccaacttattagcaatgctttctttcctgaaccacatcacagtcaaaaatgctttctcaataacctagccacatcatgcaatttaa

SEQ ID NO: 107306 - DNA, 1069 bp, Homo sapiens
ctgcggagaggcggcggccgcggcctccgcaagccggtatggccactggagacgggggttgcgggcgctctgtccgaggaggccgggagactaggaggcgctgggagggcctcgttcgaaccgcgcggcagctggggtcggaggcactgtgggaaggggctggagggaggagggggtgggagggaggagggggtgggagggaggacgaggccgggggggagggcgggcggggccttgcatggggggaggggaagggaggtcgcggagggggaggggagagaggcaacccctggctgcggtggccaggaggcgcgcctggggggctccgggaggggagtgcgccagctaatgccttggtgcagcctgcctccaagcgtttggattgagaggagaggggctttgggaggtttggggcggccggcgcccaatacccgaaggagctcggaagggtgtggagtggcgcctacgggaataagttgattggggtcatagaatcggagcctagttccttggctaagtcagcgcttaatcaagcgccggctggaggcccagcctggtttatagtgatgattctagctaactttaagagtttgctttgctggacactacagtaagtattttggatgcactgtctcatttaatcatcacaaggattcctccaaattcagatatggttgttttcatttcgaatgtgatgaaagtgagccttggaggacttaagatcacatagctagtagtgagaatctttaccgtcttgctgcactgcctttgaggcagggtttgaggcctcttggcattctttagaataattacaggttgacttggcttagtatttcttgaaggaaactgctcccctcaggaggtgcttaagccacagcctctgaaattgagcagggtcttacccttagaggtagtagaaccagaagtttgtccgccgaacctagaacctggttcaggaggcaggctttttatatgaccttgggcgtgtcagattattcccagtgctgagaaaagtgtacctggtagagggttatattatacaagttagaagccgagtcatttctggact

SEQ ID NO: 107307 - DNA, 1225 bp, Homo sapiens
tcatttaggcaagtgatgatggtggcttgaatcaagttgatagcagtgaaggtgctgaagtggttggaccccagagttattttaaaggcagtggcaaccatattttcttggcagtttggatgtaaggtttgagagagagagatcaaccaagatttttttgtcttatacaactcgaaggaagataaagaagcctctaggagaggcaggttttaggtggaagatcaggaatttatttttagatatattaagaaaaatctaaatggtcatgtcagatgaacagttaaatatgagaaaaaataatagtagacgtaaaataaaagcttattttattatccctacagtaaaataatgttgcctccagaccattttaacataaatatggtaacatggggataatgaatcttttggaggctagagtttcttagcatctaatagtagctttgctctcaacttttacggtatgttttgttgtttaattatcaaaaccacttttatcagtctttctctagagttgtatatatagaacatcctggagtccaccatgaacggacagttggatctaagtgggaagctaatcatcaaagctcaacttggggaggatattcggcgaattcctattcataatgaagatattacttatgatgaattagtgctaatgatgcaacgagttttcagaggaaaacttctgagtaatgatgaagtaacaataaagtataaagatgaaggtaagagtgtttttaaagctattttttaaagtctttttaaaaaaaaaaaaaaaaagacagagcctctgttgcccaggctggagtacagtggtgtgatcatagctcagtgtcacctcaaactcctgggctcaagcaatcctgcctcggcctcccaaagtgctgggattacaggcatgaactgccatgcctgaccttaaagtcttaagtattgtatgtgttattttgcccatttttattggactctttcccatcctctcttcacggtagttgagacctcactttcttgtattgaatgtgatgttcctatagttactataattctctcatcagttaaaattagctaagtggggccgggcgcagcagctcatgcctgtaatcccagcactttgggagaccgaggtaggcggatcatttgaggtcaggagttcaagatcagcctggccaacatggcgaaaccctgtctctactaaaaataccaaaaattagctgggcgtggtggt

SEQ ID NO: 107308 - DNA, 1018 bp, Homo sapiens
atgtttcggcaaacacactgagtagaattatagtagtagactgtatttcctattcttcaacctgccttctttgttaatatctctgctgaaattttctctttaggtggttaccagtgttttttactgtggaacttacttgcagtgtatttaatcttgacctcactgtttagcactgctacccacaccatccttgtttttaaatacttttacctcttaacatctctgacactgcttaacctagttttcttatcactaacagttttttctctgtctgtgttagggttgggcttaaagtaatgccagcagatataatagaaatcttaaaatctgagtggtttaatagttgagaaatctttcagggatccaggttgaaagaagctgttaccttcaacacatggcttataagctcaccataggcattgacattggcaagcagatgagtgaagacagagtatgaagaatcatatgggagattttactcactaggcctgatggtgttgtatgtcatttctgcccttatgacattggtcagtacccagttacatggctttgctaagatgcaaatgggttgggaagtatagtccctggctgagcagccacttagcacaacttatactgtggaggagaagtgtaaatcactggtgatcagttaaattgaccatctagctaaaggtataattctcctttgtttttgtgatgtgtagtctaagaatacccaaaacaaatttttgagagttgcccatgttaagaaacaataaaggatagtacttttttcctgttttcttatgcttatcatacattgatttgcacctctgtgactttgaaatgtgtgtcttaatttgatcagtgaattttttttttttttgagacagggtctcactctcatccaggctacagtgcagtggcatgattatagctcatcataacctttaactcctgtccccaggcaatactgccaacccggcctcccaaaggcataagccaccatgcccagcctacaattcagatttttaacttt

SEQ ID NO: 107309 - DNA, 2099 bp, Homo sapiens
gtccgttggtcacagttcatggacccttagcttgaggtgtcctcgttgtagtttgtcttccacatttagttacaactttgtatttcatggttttttttttttttttttttttttttgagacaaagtcttgctttgtcgtttaggctggagtacagtggggtgatcttggctcactgcagcctccacatcccaggttcaagtgattctcctgcctcggcctcccaagtagctggaattataggcacacaccaccacactcggctgatttttgtatttttagtagagacggagtttctccatgttggccaggctggtctcgaactcctgacctcaggtgatccgcccacctcagcctcccaaactgctgggattacaggtgtgagccaccgcacttggccaaaaagtttttgattgttttgatttgtgtccgttagattctgttagtagagtggagggatggcttaggtaaagttcctgccatcagagatactctgtttctgttgtaggattcagaaaagaaaaaaagaacaggaagttttcttcttttacatacatactttattttctttaaaaaatgtgtttatgaaaattgaacattaaacaagtatgttatgggaagtgggtctggctataaggagctaaaaacagttataaaattctcagttttgtcatctttgcccaaaataaatccaactaattagtgttaaagtaggtgcagcagagcatcccagaagtagtcttgtggcctccccaggacagaactcctccccacccaactgtttgtgaagacaccctgcagaggtccctgatgaactccttgtctctggctgcttttctgttcttgctttctttagagaatgtatttttcccttagccctttgaaagcttttgagacacacagttggtatgccaattatagcattctttatccctgagatctgggggatttcacggtcataaatacacactgttttgaatatataaatatttttctggggagagttgattgttttcatcttaatatcaaaatggtcagtgacctgaaagaatttactgtctatccattcattaaagcagttttgcaacagtagtgttttactctacctatgattaagatttgaactttgggaaacttttttatttcttggtaaaagatgtaaattttttggaatgaaaagatttcagtctaaaccaacaatttatgatattgctctctatgaatctcttactagtgactaataaatattaaggcacttaatggattcactttagctgtattttttcatgtggatatgtgtaaataccttgccataagagtaataagcaaaattgatttagtatatttttgaacaaatgcatttttgctagacctttaaagtttaaggtttctatgggagagtccaactatgttctacaatctacattttggatttttaatttttactagtttactgcttatacaaatctgaaaatttaaaaaattaaaaaacaaccttttttttttttaaattccagatggagatcttataacaatttttgatagttctgacctttcctttgcaattcagtgcagtaggatactgaaactgacattatttggtgagtagtaaactttctaatgaatttactattttattcattgtattttaaagatgtttggcttttttccttttaaagactcaggtaagcaataacttattcaaatattattacatttatttgtgttcaggtagttgttttagattacttgaagcttatggctgtgtatgtttttaagaaaatgatagaagtttaattcagtaagaacagagtgttaagtatgttttttttgaaatcaggtataacttaggtatccctggtgcagtattatagttttaatttagctgtattagaatttttaaattgtaattatcttccttcacattacagtatgttgttacttattatcagggcttaacatgtaagtctgatacttgaaaccagtagtcgccaacctttttgcactggaaactggtttcgtgtaagacagttcttctatggaagggggcaggagaaggtttggggatgaaactcttccactttgcatgtgcaattcacaa

SEQ ID NO: 107310 - DNA, 1087 bp, Homo sapiens
agagggataacagacctatcagtcatgttatatctttaaacatgtatagagtaaggtatttttgtattattttaagaatagcgtgaaataaaatgagctttttaagttatataatttttattaaatttaataatttctattaaatttaataaatatttaagaacagcatgaaataaagtgagcttttgaagttatgatttttattaaatttaatcatttctattaaaaagtagagctcggattttcctaccaaacctttttaccagtaaggtcataggctataggtatggcatcaagaaagactgataattctgctttttttccaaaataagttattagccatagagaattctttttttttaaaaaaaaagttactccattacattgatatcttgtttttgtttttttaaaggaattgtatttatttttccttgttgcatattattagtatacttattcatgaacttctaattttaagcaaataaatgtttttatttcagttaatggccagccaagaccccttgaatcaagtcaggtgaaatatctccgtcgagaactgatagaacttcgaaataaagtgaatcgtttattggatagcttggaaccacctggagaaccaggaccttccaccaatattcctgaaaatggtaaaccctgaatccattgtattctgacttattgttcttacgtctttttggaggttttaaaaaactctttttaagtaggagaaggatggcatccccaatgtcactcttgtttcttcctctgcctctctactagtatttatgtctgtgttcctaaactttgctgttcatcagaattactaggaggtttcattataccaatttctggatctcatcatagacctactggagcgtagcacctggaaatcccatttttaaagtgttttttgggtgattctttcgcaactagtcttagacttttggatttgttacacaggtcagttttcaaatccttttgacacatgaaccctttttagtataatagataagtaatgaaccttgggaattgaaaatcatttcatgaataattacatagtgttggaagtattttcaactaaaaatca

SEQ ID NO: 107311 - DNA, 1067 bp, Homo sapiens
gagccaggaggatcacttgagcccaggagtttgagactaggctgggtgacatagtgagaccctgtccctacaaaataaaaaaagatttaaaaaaattagccaggtgctatggcatgtgcctatagttccagctacttgggaagctgaagtgggaggattgtttgcattgttgaattgaagtgggtggtctaggctgcagtgagctgtatcactccactgcactccagcctgggcaacagaacgagaccctgtctcaaaaacaaacaaagccaaaaaaaaaaaaatccacagagttgtctgttggatgaacaccagtcattatggactagcaggtgacattttgctgatgaatcagtggtttgcgaagaatttcttattgcttaagccttttctcaaccaactttaattaactcctcctctgcaccaaaatgctactgccaaaactagaacaaactagaactaaagcagatgtcagctgaaatggacaaaagcagagtataggtatgatgagagtttaatgcctacatcaagcgaactaaagatttgtttttaaataaatcccattttaagcagtgtatactgtgatacaatgacagttggaaggatcattgtaccaaataatgtttgctgtttatgtataaataaatgggaattaaggcgctactagcaatatctaaacattctatgaagtgtttaattgagcattttcaaataagtaaaattttaaaaatgcgaaaggacatacagtgaaaattctctctcccacctctgtccacagcaaccaaattccttttttcagaggtagcagattaacactgtttatatgcatttaatttttagagtagtattgtatgccttgctgcaattaactgttagcttacattaaaacatacagtatgaaaattgtacaattaatatgtgacatcatttaaactattaataactgatctaattctagatcagtgctgtccaaaagaattacgatagaagccacatgtagtttttctatttagcagcattagaaaaatgtttaagaaaaggtaaaattaattttatttagcctaatg

SEQ ID NO: 107312 - DNA, 1119 bp, Homo sapiens
agaaggtaactttgtgcagcatctaccattttccaggaattgtagtcccacattcataccactgaacataattgatttgggtgtgaccacctatttctccaaattggacaggttcctggcgaactgctctgaaataacctgagagagaaaatagtttcattttaatagctgctgtattatatttttgccctcacagctcatagattgaaggatgtcgttgactagctgaaggctaatcttagtgaagcgaggtaatttagaaaactgagagcaagaagttctggtgttttttcctgaggtgtagtcatggttggctaaaatgggcacctgaaaaattgttgacatttgccgtgtcaagttaggaggggatggttggtagtgagtttcactgcccattatgtgttcaaagaacttagtaggtcatctttcagtattgttggtatttttaagtgcccgtgaacaaaatgtgttactgaaaaatcgaatcaaatagtttatttagagaacctccaggtgattctggactaataggaacaattaatttacccccttctgcactgcttagacaaggattaattttcagtcttattcagtcctcattacacagcttggtgccaatgggtctttagcaatttacagaggttattcatttcccacagaattattctaattatatttatacagttacttgcaaggtaagtactattttttccatttatgatagcagtagttaaaaaattttttttcttaaggaaataaaaataacgcaagtacactcagtatgacaaaacccataacattaataaatgagtgatttaagtttgggaaactgcttttttatagctgtttttgcaagtttagagtttcttgaagtagaatgcatttatattatgtctgtaatttcccttggctccaggtttctaagctgagaaacttacattgaagtcttcattttttcctagatatgtggagcagtagtactatagaattctttttaaattgcttgctttcctcagcttgatttctttctgagttaatctgtaaaactctgttcttatgaggaggatcagaaaacataccttctttgattggtaactggtcagaagtgagttgctgccc

SEQ ID NO: 107313 - DNA, 1042 bp, Homo sapiens
tttgagaactactagactaagctatagttagtctgtttaactgtagactaagctatgggaatagatacacataaatgtttctttgcaaggacttcctagttgtatcgcctggaacttgggtcttctgtggatcacaggattctatgatgtctccagaaaagaggcatggtaatgttgccttacaaagagcaggaacacaaacacaggcatttctctccctccataccccaaattcatatcggccagtcccttaaccttttgttaaacaaaacccccaaacaaccctaggtcccttggaattataagttccgttgattgtatccttaagaattattcttcaaattattgtgcagtattagcaatttttattcataaaatatgtaagcaaagcaaatcttttaaagaaatgtaaacagtaaagcaatttgccatttgcctgaaattaagatttcccttcagcagcaagtggacttggcagtgaaagaacattgaattcaaaagtcaacctgagtcagctaataatattttgagagtttcagatttgctcaaggcttttgggagataaatttcgtctttgagaagtttataattaaataagaatgcagaatgcacaaaagatagatattttataaacaagtgaaaaatggatgacagctgtcagtttggtacggatggtactaaatgagcaggaaaaaaaatttgagtcagtttcttgatcactgaggtattgtgttaacattgctagtatctaagaacagattctagtgctacaacaatggcaaccattttctgaatgcttactatgtatcagatgcattagacattctacatatataaagcaatacaacacatgtaaaccctgatgagataaatcttatcctaattttcagctgagagcaatgaggctcaaaacacttgtactgttactatttttgcttttcaaaactttaaaactggccaggtgcggtggctcgtgcctgtaatcccagcacttcgggaggccgaggcaggcagatcacatgaggtcctgagtttgagacca

SEQ ID NO: 107314 - DNA, 1061 bp, Homo sapiens
acttcctgccatttagtaaacattgaaagacaagaactacggaaggaagaagcggtagaggtttgcagcaagaatgggggaatcggcaagctgtagggaaaagagagccagcaagggaatgactaagaaggaaaatcgctgccagagtggtgtctgaggacagcagtatcgtgctgaggccacaccagccaaaacagtgtgggagcctgcggggctgtcactgcctccttcccatttccaggccccacactgtctacatctgtgactctgatgtacattaatagctgttcgtaataacaagcctagaaaaagtaaggaaaggtcagcaaggaaatgtttttttaaaacattgtacgtaaaacagttctattaagattggattgtaattggttaaacactgtatcttggaaattatcacagtacttcattttgcagtgagtctggttaacaaacttttccctgcccttttatttgataagacataggagaggattcacattgtgaatttctgaatggaaattgtagaggtgttggcagagacatattgagccacaggactttcctgatgccctttaaaaacctacctgtagagacgcagctatttgctcattagtagagtccttatgcatctttggattgtggattaagcaggagagcatttctaggcctagaaaaaaaattgcattcttcagctaaatgattttttaatttttggcagcacatattgtacatatgttcttgtcactttaactggacactggtctgtaactggacactggtctgtactggagtcagaactcagaacagaaacgttgttccattcatgtgaagagcagaatattttccatttgtccttgtcaaaaaatggtttgtttgaaacaaatcattacaacaaggaaaattaaactggtataatgcaattcagcagcatagcaacatgtaggcttttctgctctaatgtgttaagtatcttggaaagacttcgcattcaacaaaacgtgcgctaagtacaaaatgtgcactaagtgacaggagatgtagggcaaatagaggacaggcca

SEQ ID NO: 107315 - DNA, 1068 bp, Homo sapiens
agaaaacatttttgaaaaatatatttattagtcttactggtttttgtaaatgagcatattgagaattaaattacttacatggggttcttaaaatttccataaaactaagtctttgtagtgaaatattttattggtttattgataaaaaggcttgagcacttataatgtagactttgaatatgtacttgtgatttgaaaaaaaaaatttgaatagtaacacattttgagtggtaactcattgtttgctttttaattttttcttcagatcacaaaaaaatatattaagatcccatttcaaggtaagttatcattctcttatgaacttgtctttttactatagtttttagtataaatttaagtaaaactaagtttaataatgtttcaccttaatattttttagcaattccaaatggagtaaaaatgttttataatggacttgttctgaaaatcgtatgctattgttttaatgactataaatcaaacagtgttaaaggattcatggtgatttcttaggattaacagaaacacagttctgatagatagcaacaatattttggtatatataaaaatggataacaatagtaactataagaaaagaagcataaggaaaatgtttaatattgcacacaaacatgtaaaatgtttttgcatagagggtaagagaatgttatacaattgcatatcttagtaagggaaagtagactggaaaatgtacctgtaacttatagagactcacaccattttctcattctcttcccaactgaaaacctttcagaataaattatgacactaagaaaaccaatatacaatagaggataatctatttatataatgaattctaaaaagaacaaggaagaaaaacacacaaatggcatagataggaattagagaagaagaggcttctgttccaagattggagatgctatcaaagtagctttagttggattagttggatttagttggattccacagatactttatgtacagaatccaaaactatgttatgataattgttctaataatttgattgcttactgtatcttaattaagtattaagaatataaaggg

SEQ ID NO: 107316 - DNA, 1027 bp, Homo sapiens
taaatttgcttagatgcccttattcttcaagaatgattcttgagggttgaggagtggaatgatttgactcagtcagaacctctttgcaagtgaaattggctcacccttacgattttgattattttggccttttaatttccaatctgaaaataaagaaaattttaccaaagtaaatatgaaaatgagcagtgtaatagcagcaataaccctttctttaactatgacactacactggtgatgtttggatactgtagctttttttaatttataagtcatttttagccttccaaataattctctcaaaacaaggaagcattacgtgtaattggtctttatagtccttgtttttgacttatactagttgccttagttgtaaataatttatatattttaaaattatgaaatacttcaaatatgtacataagtatagagaataatatgccaatacatatcactcagatttaaccaatataattcctattttttcagatttaaatttgtttttaaagaagtattatagaaagttgaaaacttatttattttatattccctgattctaatactctccctctttagagttatctactacccaaataggcttgaatccttccagtctaagtttttatattttgtttcatatgtatgcacttatacattatagtatgttttatatttctaaattttccttagtagtaacattgtgactatcattccaaaatttgttattttaccagtaccttagactttaaattattttctctgtaggtaaaatttattaccacatactactgaaaatttgttaccatacttttggtatatgaaccacgcttgaaatatattaacattcagctttggcttataattgtttgcctatacataggtttaattattgaggtacttgtgtccttggaattttactttttaaacctaatttaatacttgtatagtattactcttttgctcattttgcatgtacacaatcctccaatgttgatatctcattttttttccccctaaacacacatgg

SEQ ID NO: 107317 - DNA, 1038 bp, Homo sapiens
caaattgtaatctgtacgcttctgcctttatgccattctggggctaaggtttaataatattaataggtataatatttctggtcattccccaaaactattcagtgggaacactagctctcctttaaatcctttctaaatagatgtggaatttccaggtggttttgatgtggaccttgaaaattcattcccttagtgacaattttatttgattcatgtatttggaataagcatgaactttggagccagacatctggattaagatattagctatactgctaatacactgacttaccttggacaggtttcttaccgtgtctttaaagcagggataataatacacaccttattgggttagtgtgcagatataaggagatgatccatgtaaagtcccaagtataatgccaggaagttagtaggtgattattaaaagttagtcattatttttgtgtctctcttattggtgctgatatcagaagtattataaaaggatattactatagttgatgttactgaaatcttctacaatgagggtgccaacatgtgttcctgagtccacttatcgtcatcaccattgctgccaaagcaattgttatggctttgttagcctccccatttaatttagcaaatactgaactccttaaaccaagctttagttctttcttcccttaagatgaatttgttaatcttaaccctaagatcatatggaattaaaaaagagcccaaatagccaaagcagtcctgagtgaaaagaataaaactggaggcattacactacctgacttcaaaatatattacaaggctatagtaaccaaaacagcatggtataaaaacagacccataggccaacggaacagaacagagaacctataaataaatccatatatttacagccagctgattttcagcaaaaggtgccaagaacatacactggggaaaggacaccctcttcagtagtgatcctgggaaaatatgcagaagagtgaaactagacccctgtctctcaccacatataaaaaatcaacccaagataaattaaat

SEQ ID NO: 107318 - DNA, 1051 bp, Homo sapiens
tatgttaatagctctttctagttcctcagagttttccctgcattattaagttatttgaatatgacagtttccttgctatttaaacaaggaaggaacctgtagtttgcaattgagaaaactaagagtcagagagaataatcatgcagagacacagtcagaaaatgatactacttctcaggccagtatactttctgctacctctcactgcatttcaaaatttgtttctgctttggtttagtgtatttatgatatttcgaagtgggatttcatagtattagtaaataaaattaaataaataataccttacgtactgatactgtttacatacttaggaaaaaattgggtaaatgtgtgaaatgacaactttagttcttccttccagattcagatagtatgaaagatgaagtatacacctttatatacttcaattccttgcagaaattcagaacttctgaaatgctggctagccctggaatgtccttgactgtgctaatttataaacctgtactgcaaaagacagctaggtattgttaatttagctctcagtttatagatttgtgttcttcaagcctatcacacaaagttccttgtttcctcagggtacccaaactggataagttttcaatagttgatgaaaggtgtttgggctgtggctgtgtgctatgaagagctatgtgtactgtagtcattgctaactgtttaattatatactttaattgtatattgaaaattgcaaacatctaataagattttttatcaagattgcagagcatagtaaattataagtattatttgaaagggtagtttatagctttgagcaagactacaataatatgaaaattattacagaaatatgaaaattaagtgatattccatttattgtgtatttactatgtgccaggaattatgctaactgctttccatctattatctcattgaatcttaacaactttgtaagggagatattattcttcccattttagagatgagaagatcaatgtgtagaggtagaaattatggtaattaacttgcccaaggatttatagttata

SEQ ID NO: 107319 - DNA, 1029 bp, Homo sapiens
acaacataaagaataaaacaagaagaaaaagactacgtaaaggaaacctaatcaagttactaccatagtaataaaggcacgaagttattagggcttgaactgatgcactggcaataaagatggagaacagatcctttaaaagacagatttaggggttaaaaataactatatatggccgcacagcatggggcagtgtggggtcaccataacagctacagcagctgcaggtgacgagtggtagaatcgatggtgaagagtctggagagagagaacatccggaagatgcagggtctcatgttccggtgcagcaccagctgctgtgaggacagccaggcctccctgcagcaggtgcaccagtgcatcaagcactgccatgtgcttctggctcaagcccaggctttggtcaccagtgagttggagaagttccaggaccacctggcccagtgtaccacgcaatgcaacaacaaagccaaagattcaatagctgctgggagtaaggagcttcaggtgaagcagcagctggacggttgtgtgaccaagtgtgtggatgaccacatgcacctcatcccaactatgaccaagaagatgaaggaagctctcttagccattgggaaataaaagtctttgccagtggccatgggggctgagggcaagaatatattttttataaggcatttgggaactttagtattttaagcaaagtttatgaatgaagaaattaaggatggccacaagtgtaatgcatatgtcacttgcctctagacactggttctttcatgtttcagtcctaaaacatgaaatggaaaaaagtggtgttaaattgggtcagagatttacaggagagttttagatcttatatttcctgtggccagtgcttgtcctggcagtaaggatctcccctgtaacaggccagagccctccaacacaccagactcttcttactacacaggtaccaataggctggcaggttagagttggtggagtttgaagaaagatattttctctttgttgccaacatcctgtttacca

SEQ ID NO: 107320 - DNA, 1040 bp, Homo sapiens
ctgtatcttaagactgtatagccttaagaatgtaagtgatgcagtagtggacccttagttttaataatgttttctgaatcaacaaatgctaaaacaaaaacacatttttagcacaaacagtggttacatctgtgatgagatctgcaaatgaacactgtccttcaactaacattgttaataaacatgaatgcattgccaggagtctagcagctgtacatgtgtaatgatagttgtagtaaacttgacagaattctgaagaaaatcccaacttaagtgaaatagattttactttttaaggtatctttgataatagttaggcattttttcttttttcttagggtatttactatagttgcttgaggaactgaagtttacagtttctggagatattagtttgtgatgaattcatgtattctacaatgtgtagtaccatatatactaattatttatgtgtataacaggcaactcaaagttatgttgacgaatgtcctatggacggatttaggacgaaaattcagaaagaccctacctagaaacgatgctaatttatgtgatgccaacaaggtgcaatcagactcattgccttcgacatctgttgacagcctagagacatgtcaaaaattagaacctcttcgccaaagccttaatttatctgaaaggtatgttgttcagtattgattttgttcaacttaccacatttgaaataatatgaatcccgtactcctaatgataaaattgttgaaatgacctgaaaggagatttgcatatataggcataccacactctaaagcaaatcttaaagctgcctatcttaatttacagagttagctgatgtttctgtacttcattaagcagattgacatggaattatatttaaaaacgagtatcattagtacatttaacttatttaaatttgatacatgtacacatctttttagggattattttatgattaaaatgaagatacatatatatacgtgtgtgtatatgtattatatgcatataaatgtgtgtgtatatatgtgcattaatattttctt

SEQ ID NO: 107321 - DNA, 1080 bp, Homo sapiens
agaaaatattaatgcacatatatacacacacatttatatgcatataatacatatacacacacgtatatatatgtatcttcattttaatcataaaataatccctaaaaagatgtgtacatgtatcaaatttaaataagttaaatgtactaatgatactcgtttttaaatataattccatgtcaatctgcttaatgaagtacagaaacatcagctaactctgtaaattaagataggcagctttaagatttgctttagagtgtggtatgcctatatatgcaaatctcctttcaggtcatttcaacaattttatcattaggagtacgggattcatattatttcaaatgtggtaagttgaacaaaatcaatactgaacaacatacctttcagataaattaaggctttggcgaagaggttctaatttttgacatgtctctaggctgtcaacagatgtcgaaggcaatgagtctgattgcaccttgttggcatcacataaattagcatcgtttctaggtagggtctttctgaattttcgtcctaaatccgtccataggacattcgtcaacataactttgagttgcctgttatacacataaataattagtatatatggtactacacattgtagaatacatgaattcatcacaaactaatatctccagaaactgtaaacttcagttcctcaagcaactatagtaaataccctaagaaaaaagaaaaaatgcctaactattatcaaagataccttaaaaagtaaaatctatttcacttaagttgggattttcttcagaattctgtcaagtttactacaactatcattacacatgtacagctgctagactcctggcaatgcattcatgtttattaacaatgttagttgaaggacagtgttcatttgcagatctcatcacagatgtaaccactgtttgtgctaaaaatgtgtttttgttttagcatttgttgattcagaaaacattattaaaactaagggtccactactgcatcacttacattcttaaggctatacagtcttaagatacagatttaattttatcttatttctaaaataggtcaacttaaaaa

SEQ ID NO: 107322 - DNA, 1997 bp, Homo sapiens
tttgtgcatttggaacatcttgataagctttcgctgataatgcaagagttatacatagactgataatgatgattgaatcattgtttgcgatcagcagtgagaaagggtgttccatttctgctgcttcttcttttttattttttaaaggctagtcaaatgaagcagtgggagtggggcagaaacagacatctgcaacttgtaatcaactggttgtaaacacctctgtacttgggccagccaaaaatgctctgtttagcaactatggtcctatagtcatagtgttaaattatttgtataggggaattaaatatctggaggattcaaattacagttgttactggaaataatttagagcatttcagaattggacataaatcaattattagaaagttattttaaaaagagtattgaattttctttttaacatagtgaatgaaaaaatgacaatagcaaattataattattggaaagtcacacaaatttagaagactcattggggtccttgaatttatgtcaaagtacttctataaactacttagtctaattctcccttttcaggtaaattgtgtgtaggaaatataaacatatattggtgactccatagcagtttatgagccttttgacattattaccataccatggataaattgtcaaggtgaataaggcaggtctattgatgcaatgatgatgctttcatccttagaacaagcacacactcagttttcagacttggtttcccaaaaagatttacataaataattatacttggtttgagagatggaatgctagaagtaaaggaatggtaatttttaattaataaaaaccaagccacattttcggaaaggtttgcacatacaaagttgttttatcttatgggagacatatcctgaagactttgcatgcttcacaacatacatcattcccctttagctgccgtcttgcatctccgcatgtgtgcgcctaatctcagctggtccacccaggaccctcttagcaccaaccctagttctctgcatggccccttatctgctctgataggatgaaagaaacaatcatgaatcaggaaaaacttgccaaactgcaggcacaagtgtgcattggtgggaaaggaactgctcgtagaaggaagaaggtggttcatagaacagccacagcagatgataaaaaacttcagttctccttaaagaagttaggggtaaacaatatctttggtattgaagaggtgcatatgtttacaaaccaaggaacagtgatccactttaacaaccctaaagttcaggcatctctggcagcaaacactttcaccattacaggccatgccgagacaaagcagctgacagaaatgctacccaacatcttaaaccagcttggtgtagacagtctgaacagtttaagcagactggctgaagctttgcccaaacaatccatggatggaaaagcaccacttgctactggggaggatgatgatgatgaagttcctgatcttgtggagaattttgatgaggcttccaagaatgaggcaaactgaattgagtcaacttctgaagataaaacttgaagaagttactgggagctgctattttatattatgactactttttaagaatttttgtttatggatctgataaaatctagatctctaatatttttaagcccaagccctttggacactgcagctcttttcaggttttgcttatacacaattcattctttgcagctaataaagccgaagaagcctgagaataaactttgaaacaaaggttaataaagttctttgcctagtaaaacaaaacaaaacaaaacaaaacaaaacaaaacaaaacaaaaagcttatatcattaaggccaggcgcagtggctcacacctgtagtcccagcactttgggagaccaaggcaggtggatcacttgagtgcaggagttcaagtacggcttaggcaacatggcgaaacaccatctctacaaaaaactaataaaagtaaaatttaaaaaatactta

SEQ ID NO: 107323 - DNA, 1050 bp, Homo sapiens
aaattttacttttattagttttttgtagagatggtgtttcgccatgttgcctaagccgtacttgaactcctgcactcaagtgatccacctgccttggtctcccaaagtgctgggactacaggtgtgagccactgcgcctggccttaatgatataagctttttgttttgttttgttttgttttgttttgttttgttttgttttactaggcaaagaactttattaacctttgtttcaaagtttattctcaggcttcttcggctttattagctgcaaagaatgaattgtgtataagcaaaacctgaaaagagctgcagtgtccaaagggcttgggcttaaaaatattagagatctagattttatcagatccataaacaaaaattcttaaaaagtagtcataatataaaatagcagctcccagtaacttcttcaagttttatcttcagaagttgactcaattcagtttgcctcattcttggaagcctcatcaaaattctccacaagatcaggaacttcatcatcatcatcctccccagtagcaagtggtgcttttccatccatggattgtttgggcaaagcttcagccagtctgcttaaactgttcagactgtctacaccaagctggtttaagatgttgggtagcatttctgtcagctgctttgtctcggcatggcctgtaatggtgaaagtgtttgctgccagagatgcctgaactttagggttgttaaagtggatcactgttccttggtttgtaaacatatgcacctcttcaataccaaagatattgtttacccctaacttctttaaggagaactgaagttttttatcatctgctgtggctgttctatgaaccaccttcttccttctacgagcagttcctttcccaccaatgcacacttgtgcctgcagtttggcaagtttttcctgattcatgattgtttctttcatcctatcagagcagataaggggccatgcagagaactagggttggtgctaagagggtcctgggtggaccagctgagattaggcgcacacatgcggagatgcaagac

SEQ ID NO: 107324 - DNA, 1045 bp, Homo sapiens
agcggaggccctgattccgaggagaagggagatgggcgccagaaagggagaccgaactcggggtgggaccaggagcggcggtgcaggagccgctaccgccacaccggagacgcacatcacacaaaacacacacaccggagacgctcatgagacataacatacacacagtgcgagccaccgagtagttgccgcgggaactggccgcaggctgagtttctgacggtgccggcctctcagttacacgcaggagttaattacgcttgctgctcccttttcactgaggaggtggacaactccggcctgctctctttcctttacttccaagtttaatattgaccctgtgacaggatgggccgaggtgatggaggggaagaggaatgcctttgcctgccctctggtttaagctgcggggtctagggctaaggtttggttgcttttctttgaagtatctcccttaggctgttgccagctgaccgcttgccagatacttaggcgactaaatagtctagcgtgactcttcctgtattttgttacgacgttaaactcaggttacagctatccttattctgtccattccactccctaaattcgggtcttgtgcgtgaaggaaaagaaacgtaatctctccagctccctctttgcacataacaagacaagtgacttaacacgtgcgagctgtttaaaatgtttttagaacattttaaacattattctctattctgaccaccttagttatcattcccgaaattatttaatatgagaaaatagaaacgattaatagcatatgaaggccactagtagacctactaacataatgtttcatgttaattgccttgggaacaaaaattattgaaaagattaagtgtaatgttaattactttggacccaggatttcctttttaaaaaacacgtacaattctgttagttaagctggaactccatctctctcttccctccccaccccctgtctttttttttttttataactagtaaaataccttatgaaagaacaatttaaatttaaaccatctactactttctcact

SEQ ID NO: 107325 - DNA, 1396 bp, Homo sapiens
tgtctgacataataaatgtcaacttcattgacgcagttcttggtataaccaaaaaagcttgagatggccatgattatgtatgactagctcttctttaacatttttcttaacattatttctcctaacattatttcaaacagctacaaagatttaaccaaagggaggagaaaaaaaaactaccaattttaccctattatttaaagcaggtagttcaaataagtagcttctctcatagacagaaattaatgttggccgggcgcggtggctgacgcctgtaatcccagcacttcgggaggccgaggcgggcggatcacgaggtcaagagattgagaccattctagccaacatggtgaaatctcgtctctactaaaaatacaaaaattgctcctccacaggaggcctacacgccgccgcttgtgctgccgccatgtcgctagtgatccctgaaaagttccagcatattttgcgagtactcaacaccaacatcgatgggcagcggaaaatagcctttgccatcactgccattaagggtgtgggccgaagatatgctcatgtggtgttgaggaaagcagacactgacctcaccaagagggcgggagaactcactgatgatgaggtggaacgtgtgatcaccgttatgcagaatccacgccagtacaagatcccagactggttcttgaacagacagaaggatgtaaaggatggaaaatatagccaggtcctagccaatggtctggacaacaagctccgtgaagacctggagcgactgaagaagattcgggcccatagagggctgcgtcacttctggggccttcgtgtccgaggccagcacaccaagaccactggccgccgtggccgcaccgtgggtgtgtccaagaagaaataagtctgtaggccttgtctgttaataaatagtttatatacctatgaaaaaaataaaaaataaaaaaaataaaaaataaaaatacaaaaattagctgggcgtggtggcccgcgcctgtagtcccagctacttgggaggctgaggcaggaaaatcacttgaatcggggagacggagtttgcagtgcgcccaggtcacgccactgcattccagcctggcgacagagctccatctcaaaaaaaaaaaaaaggaaaccattcataaaaaaaaaaaacttatacttccaacttagtagactgctcgacaggaattaaaattcagaatattctctagttaagcccctaagacaaacttgacagtgttttcaaaaaagtgactatctgccacaaaattaccaattttgcaatatccatggtatgacatattttaactatgattcctatgcacaatttcattaaaaatatctgacattcaaaaatggcttaaacttaacagcactactttcttgtaacggc

SEQ ID NO: 107326 - DNA, 1441 bp, Homo sapiens
ttttgatttcatgttaattacatattttatttgctcagagtacaaattagataaaattccttttattaaaatattccttagtaaagaatctagtaatttgctattttatccatgttttatgttctaaattgataagttattttctcatttttaaaaaaactgatcatgtatttagtcattctttagtgtatagattgtttctacatataaagccagcaggttttctgtttgtttctctgttccattgtgtagagccaaagaggtttttattttaactgtgtgtcagtcacaggaaagtagttattgtttgggctccactatgaaatgtcatacttgattagagctacaaatagaatacagaataaaattagcgtaagtgcttttagttataaacagactctgaaaaaactgtttgcatcatactctttcagagatattctgtgcttcataaattgagttccgtttttcagtgattgaatagcaatcttgattctttaattcttcaggtgcttttgtgattttatatataagtaagagaatggcacctcaagcagccatttcagtgctatctttgtctcttagggaaatcccaaaacataatcctgcttaatttccctgccctatactgtcattacaacttttactccttgtccaaagggaataaagagtttcttttatttttcatctaaacagaatcaaatgttttgttcaaagtgcttattaatctagagaccccattattccaaaactgtatagatctatatctatagcctctgatcttttaatcctttacttgtcagtctgtgttcgactttttttctccccattctagctctgtgtcctgctttcttaactgttaatcaaggccatctcttggagcatcttctttttctccataaataaactcttgatccagtgtagcataatacattccatatggtgaacgggcaaactggggaaagaaaataaaagttttaatcatcagccagccttcttctgtcttaccgcctgatatgttcttagtctcatataacagacccaagaaagtcagaatgtgaactaatttcatcattgacttcatacaaacagaagcaaaattagcaagacattttgccttccaaacctacatatgtatgccttctactgtttgaaattatgattagctcatctttcatgaaaaaaactaacatataaaccaaagtatgatttttttttttaaatagctcttatgggtagcttaaaacaggtaataaccaaattgtcagagtagaattaaatttctcaagagggaatgaccttgaagttccttttcaactcctaagattgtgtgagatgtacgtgaggaacacatcactcaaggaaataactgggctgtattaacactgtcatttgggtaataatgggcctgtttataactaggtactttgtatgattattacat

SEQ ID NO: 107327 - DNA, 1032 bp, Homo sapiens
aattcatgggagcctcttctactgccacacaatctcagttcctgctgtatactctaacaaacagtggaagagactgttgggtcagtaggtgacaactgcagaggtatcttccttataacgatgctttttgaggttgctgctcccatcaatctgctcagtaaaaatagctcatcttggtaagttgtttcgacttcaccaggacctgaagaagaagcagaaaaacctgtgaaaactaagactgtttcttccagtaatggaggggaaagttccagtcgcagcgctgagaagcgatcagctgaagaagaagctgccgacctcccaacaaagcctacaaagatctccaagtttggatttgccataggtagtcagacgacaaagaaagcatcagccatatccatcaaacttggatcaagtgtgagttgttatttcatatatgatgtttgtaatgggtcttaaggatttgctttggaaacgtggcgtttactaggttatggtaaattaagggtgaaaaggtacattgtttgagaagtaatctttgacgtatgaacttagatgattagcaccctgtttaagaagggtctgaatgaattttatctcaataaagctgttaagaaacaaagatttggaatattaggaacaactattatagggaatatgatttataaaataataaacttagaatttttctgcgttggctgggcacagtggctcacacctgtaatctgaagacttggggaggccaaagtgggaggaccagttgagcccaggaatttcagaccagtctgggcaacatagcaagatctatctctacaaaaaataaaaatataattaaaaaaaaaatcttttttctaagttgagcaagtcctctgaaaaatattgtcagaaagattttccaaagttttttttttatctttcagtgcctgtagtattaaaaataatattgagcaatcagttatttgtatcttaaaagatgaatattagtaaggtattgcttgataagatctacctaattatcttactttggaacgacaa

SEQ ID NO: 107328 - DNA, 1052 bp, Homo sapiens
ccactgcactccatcctgggtgacagagtaagaccttgtctcaaaaaagaaagaaaggtcaggagatttttttgttttgttttttggattttgagacagagactcactctgtcacccaggctggagtacaaaggtgtgatcttggctcactgcaacctctgccttctgggttcaaccaattctcctgcctcagcctcctgagtagctgagattacaggtgtgcatcaccaccatatccagctaatttttttttttttttttttttttttagtagagagagggtttcaccatgttggccaggctggtctcggaactcctgacctcaagtgatccacttgccttagcctcccaaagtgctgggattacaagcatgagcccctgtgcccggctaggtgatgtatttctgacagtagtccaggcaggtaatgctaaggaccttaagttggtaatgtgatagcatgattgaaaaggcagagggagaattaagtttacttaataggtgtctaatcaacaggaccttacaagttgaagaaaagattttctggtttgagtacttatgaacactgtgaaactaaagtacctaggggagctcctaagtggagctgcccagtaggcagatgatagcccatttaggggtagacataggattaggtagttaaaactaggaatgaatgaaatcgaccagagaaggaaaagtcattgacaacaaaattctggttgtctgctaatttaaaaaaaaatttttttagagatgggggacttgctgtgttgaccaggctggcctggaactcctggtctcaagcagccctcctgactcagcttcccaaagtgttgagattgcacatgtgaggcactgtgcctgcctgggtatctatatcttctaaatggggagtagcaggaaagggacagaacaaaaggtgggagaattgggagaataaccagtaaaaagcattgttacagaagccaaggaaagggtgtttttattttttattttttttatttttattttttgagacagtctcactctgttacccaggctggaatgcagtggc

SEQ ID NO: 107329 - DNA, 1287 bp, Homo sapiens
ttttttgtgtttttagtagagagcaccttgggaggctgaggcgggtagatcacgaggtcaggagttcaagaccagcctggccaacatggcgaaacctcgtctctactaaatatacaaaataaattctctgggcatggtggcacacacctgtaatcccagctattcaggacgccaagtcatgagaatcatttgaacccaggaggcataggctgcaatgagccaagattatgccgctgcactccagcctgggcgacagagcaagactctgttctcaaaaagaaaaacaaaaaacatagtgagaagagatggtttggattaattatgtttataggcctagaggcagaaagccccttttatgctttcaaggcacattgtatttaatgttactgtgggaaggtattactaatcattttctcttgcctgtaccaagtaccccttaggtaagtgatattgtagatcctaactagaaaatcttttataggagggcaacaaatggatgccacaagttagtaaagtaaaacatacccactgataatccacatttttgaaaagagagaatggatttgtccaaagtattgggttcgttactatacaaatttctgtggaaatatagttaaatcattcaagataaattattcatatcattaaacaagcttgtataaatgttatctacatgatattctttttaatatgtttcttcttcagaagcctaaagaaactgttccaactcttgctccaaaaactctttcagtagcagcagcttttaatgaagatgaagatgtaagttgatatcgagttttgtttttttactttaaccagttatttaaggaaggtattagtggcaaattataggttataatagtattagtgaattttctttataatagtttttgtgtctgtgtgtgacatccataaaaactggatactctatttttgcattttatttggttgtaagattattttagagtattgttgactttggggacaagaagcttaaggatgaaatcagcaaatgtttattatgagtagtttgtgctaggaagtatgtaggatccaaaaaaagaaaaatctaatactgttgccttaataatttttatagttggggtcttcagtaatgatacattatgcatgcattcaattttaaaaagccaactattggctaggcgcggtgtctcatgcctgtaagcctagctctttgggaggctgaggcaggtggatcacttgaggtcagcggttcaagaccagcctggccaatatggtgaaaccccatctctactaaaaatacaa

SEQ ID NO: 107330 - DNA, 1080 bp, Homo sapiens
acattttagatactgaaattgaaggaaagaaaatgcatcttcaaacattttttggaatctcaccacatatactttgttagatttgtgtattgtagggtgtttgttttgtatttttgtattgtatatgaactttttttaaatgtgacagttaaacacatctttaaaagcatagtcacagacaaaagcatacagtataaaaatttccttgaaaactcctacaatattatatttggaggcagcttcagactgttttattggtggtagctgcttgctgaggtcttttagttggtaataactccagagaagcagcctgtgtatattcctaacactttgttcactagcatttaagtttagaataagcccaagtaagacaatggaaatgtatatagaactcttagttcttacatgatttaattatatcgatacatgaatttaacttactttaatgtaggcaaactatcaattttttgtccattttcctgtttgttaaaataacatacctctcctacgtattattttcttgacccaaatgaaatattaacctaaggtcaagctgggagagagaaatgactgagatgaatgtctttactaaagtaccaataaatttgtcaaactcaatagtgtttttattttctattccatttaattgttgcttactggtttttgtttttaaagttgagacaaatgtcaagtgttgctcttgttcattttgttgaccaaagtaatgggggatttaaaattctgaattactagtgtctacctagctcagcacctagttctatagcattacagaatctcagactcaaaaagacttaatcctcctccagtgccaaaggattgtctgtccagttctttagaaaatcttgccaaagcttttctttgacaatcactaaatattagaaagtattcttttttttttttgagacagagtctcactctgttgcccaggctggagtgcagtggcacgatctcggctcactgcaacctctgcctcccgggttcaggcagttctcatgtctcagcctcccaagtagctgggactacaggtgcatgccaccatgcccagctaatttttgtatt

SEQ ID NO: 107331 - DNA, 2333 bp, Homo sapiens
atatttgcctttgaattatattttatattgtcataattctgtattgtttcattgataattgacttttttgtctttaccttctttgtattcatacaggtttttgtaaggccagcttccttcctttactggaatttgcctatacttctgtactaagttttgatttctgtagcatggctgatgtagccatcttagctcgtcatcttttcatgtcagaagtcttagagatttgtgaaagtgtacataagctaatggaagagaagcagctaacagtatataagaagggcgaagtacaaacagttgcatccacccaggacttacgagtacagaatggaggtacagcacctcctgttgctagcagtgagggaaccacaacaagtttacctactgaacttggggattgtgaaattgtactactggtaaatggagaattgccagaagctgagcagaatggagaggtaggacgacagcctgagccccaggtttcttcagaggctgaatctgccctgtcatcagtaggatgtatagctgattcccatcctgaaatggagtctgttgatttaataacaaaaaacaaccagacagaactagaaacttcaaacaacagagaaaataacacagtttctaatatacaccctaaactttcaaaagagaatgtaattagtagctcgccagaggatagtggtatgggaaatgatatatcagctgaggatatttgtgccgaagacattccaaaacataggcagaaagttgaccaacctttaaaagatcaggaaaatctagttgcatcaacagcaaagacagactttggccctgatgatgatacttatagaagcaggcttcgacaacgttctgttaatgaaggggcatatattcgactacacaagggaatggagaaaaagctgcagaaacggaaagccgttcccaagtcagcagttcaacaggtatgatgtaagaagggttgacctttgtagttttagctttaggttgaaagcattgtattgatgaacttatggctataatgaaaattatttgggaggtgagatgggtacaaggtagcaacttaatgttttaaatgccagtattaataagataatgtgaatttgaaatctttttgttagaaatttacaacatgactttaaaaattaaaattgagtagatttacttagattgtgatttctatcccttactaggtggctcagaagttagttcaaagaggaaaaaagatgaaacagccaaaaagagatgctaaagagaacacagaagaagcatctcataaatgtggggaatgtggaatggtttttcagagacgatacgcccttataatgcacaaactgaaacatgaaagagctagagattacaaatgtccagtaagtatttggaaagctaattgaaggtaactctaattcataatatatagaatccaacttactgcatggttatcttttcgcttgtattctatgtcttatatggctataagagtcatcttcttatttaaatgtgcatgtcatttacttgcctcccaaaaatattcagtgacttagccttatctctgcttcctcttgataccgtagtaagacaatagtaaaaagatcattttaaaaatgtaactcatgaaaaggcagaacaggaaatcttgaaacaactaaattctggatacaaataaatagatggagtaacttattcagcagagttgaaagggttcacttccaggttttcagtggggaaagctaagaatcaacccaaattgaattgtagaaccaccaaaatgtctcaggaattagtagtgctagctaccttgaaagcagaagcaattaaatcactacccctgtccctttagccaaagatccatcttctactctctggaaaggataaaaccataactccactggggagtactgtgtacagtgaagctaaatgtactgtactcaaaacagggaagagtgtactgtactcaaaacagggaagagtaaaagcttactgaatattaagtttttgttttgttttgttttgtttttgagatggagtcttgttctgtcacccaggctagagtgcagtggcgcaatcttggctcactgcatcctccatctcccaggttcaggtgattctcctgcctcagcctcctgagtagctgggactacaggcacgagccaccatgcctggctaatttttttgtatttttatatgcagggtttcaccatgttggccaggctggtctcaaactcctgagctcaaatgatccacctgtctctgcctccccaaggtatgggataccaggtgtgagctaccacacccggcccaaggtctttctttactcaagtcccaggatatagcca

SEQ ID NO: 107332 - DNA, 2000 bp, Homo sapiens
tccggcctcagcctccagagtagctgggattacaggcgtgcgccatcatgccctaaattgttaatttgtgtaggtcaaaaaaaggtgaatattggcagtttcatatagttcctcttgcatgaaaacattgcaactcacatgaaaatgggtggagctatatagtcatcttatgattagagaaacaaataactgggaataaataaaaaaaattacctcagcaggagaacatcatttataactttatattttttgggaaaaaagtatattttacattctaataaactctacatattttatgggacatgaatgtctgcacatatgtactgaaatgtgttaatgtgcacagactaaataatatattctgttttcagttaacagtattaaatttgacttgttaatattttcattgtaggtatattgaagcaagtcaaagattacattaaacagtgtagcaaatgccaggagaaactagatcgatcccgtccaatatcagatgtttcagaaatgttggaagaattgggactagaccttgaatctggagaagaaagtaatgaatcggaagatgacctgagcaactttacttcatctccaactacagcatccaagcctgcaaaaaagaagccagtatccaaacatgaacttgtgtttgtaagtggtactctccagtcagctttaagatttgtaactagtgtactagtatttgcagccttggtgacttatttttctcaaaccactaagactgcttattgaataagacaaaatggcagtgtactgtgttatataagctgaactgcctcttcatttatcataaatgttcctgttattttttcagaatgaacttaataattacctgttggtttgttgttaattatcctccctcccttcttttgtgatgatatattggtacaagtagacagatttacatttctggaagcagtctctgagtttacgccccaaggtaaaattaatctggccaggtctttgtttttcacctgcatcagtttcatacatcatcatatttctgattagtaagaagaggcagccagaagtgagatacagattttcattaggtgaggtagaatgaacatggcagaaaataggataggacaacatatctttttatttaaatacataggtaacaaagaaaatatcaaattattcatacctggtaaaaggtaatatgtaatgtgtcttgttttaaagcttgttaagggtaaaaaatacaggtaatatgttactcttgctctcaaacttattttgacaggttgacaccaaaggagtggtaaaacgttcttctccaaaacattgtcaggctgtcttaaaacagctgaacgaacagagactttccaaccagttctgtgatgttactttgttaattgaaggagaagagtacaaagctcataaatctgttttgtcagcaaatagcgagtattttcgagatctttttattgagaaaggagctgtttccagtcatgaggctgtggtggatctttctggtaagggttttgtattactcttgctttttgtttgtaatgacattctagaagagggggatatgtatgtcttccacacacggactttatgccaaagtaagagaagcccactaacaacagtagactaagctgtactgaaaaggttctttttagcaagatttctgtggtagagttatggaaaagggtgtcatttcctttcactacgtcttaagtgagacaattatagcagaaaaagaatttctaggatttaaactgttaaaaacagtttgagtgaaatccataagtgcaacaaaattattacattaaatgaatatgttatttaaaaattgattgtttaagctaggtgtggtggtgcccgcctgtagtcccacctacttgggaggctgggatgtgaggatctgcttaaggtcaggagttccaggctgtggtgtgtcattgtacctgtgaatacccactgctctccagacggggcaatataacaagaccctgcctctaaaaataaaaagc

SEQ ID NO: 107333 - DNA, 1052 bp, Homo sapiens
actctgtagcccagctggagtgcagtggcacaatcacggcttgctgcagcctcaacctcctgggctcaagtgatcctcctgactcaggcccctaagtagctgggactacaggcaagcactaccaaacccagctaataggtattttagttgagatggtttcgccatgttgcccaggctggcctcaaactcctgagctcaagcgatccacctgctttagcaccccgaagtgttgggatgagcccctgcaccatgcctggttttgaaagttactatggttatctacattgataacattgagaaaagctgagtaaacactgtactgttactgagatcttttctgtgagtttctgttaggatgcatttcaggatcctacactgcacttggttgtgtctcatttcatccagtctgtgagggtatcttagtctttgtctttcattgtaaagatgggctttaaatatttaagggtagtcacattaaaagattggcattaggaatgcagttaaattactaagaaagtgatctaagctacataaacaatctggatgtgagagatgggtaataatagggtaacaaaagttttgtggagtaatattgtgttatctttttacaggcacctacaaaggcagcacctaagcaaaagattgtgaagcctgtgaaagtttcagctccccgagttggtggaaaacgctaaactggcagattagatttttaaataaagattggattataactctaggttgtgctggattttttttttttcttgtaacaggcatgttggactttacacggtcataggtgacctaacaaagaatgtaagacgtaggtattttattaaaaagtctattgctcaggaataatgcatcctataaagttttaacttctttgttggagagaggttaagcaaaataatgtaagatgggtaaggtcagatgctatcttggcttggctggggtgtatagggcacattagaaaaacttaattgccttaactttttggttacattgctgtaagtattaggatgttgctggtgcagtggctcacgcctgtaatc

SEQ ID NO: 107334 - DNA, 2062 bp, Homo sapiens
ttccggcccccatccccgcagcgaccttataaggtctcttcccatgattctctctttcttttcgccatcttttgtctttccgtggagctgtcgccatgaagtaagcacgacccgtggttcccaatccgcttacatcctcgggcagaactcctctctgtcgtccctggcatggctgtagacaccctccctgatggactttcactttttgttgcagggtcgagctgtgcagttttagcgggtacaagatctaccccggacacgggaggcgctacgccaggaccgacgggaaggtaaaaagccgcgtcggcttcacctaccttcttgtactccgaggaggaaaggctggtttaattcggtttaggcgggtttattccccacatcaccactggcctctggaagtcttcgtggacgctctgtggactggtcgttaggaccagaaacctctaagtgaaccagtgttgattatttattgtgagccaggtcggacatcaggaggggtttatgtaactgatgtcccggtgtaagggaaataactgaggtacggaggtaccctttggaatcctgggacggacaagagcagaatgcttcccagaaggacgcaccaccctgtcctttgctatgagcctagatttcctgctctcgagaaaagactaaacgcaaggaccttcatagtgtgacacagttacctgccagttatgtgacagccttttggtccttgtgggcctcagttttgtaaaatgataagccagaactagcatattgatcttctaaggattccaagcttactcagcctcttgtactttgtatagttaaatagtaattcctttgcatttgtcactctaggttttccagtttcttaatgcgaaatgcgagtcggctttcctttccaagaggaatcctcggcagataaactggactgtcctctacagaaggaagcacaaaaagggacagtcggtaagtggaatacgccttgatgttgggggctatctcttaagttgtcaaagctctctgaacgttggttttctgctctgtaaaattaaatcagactgtatgcgaaagagctcttaaactgtaaagcgtcagcaaaatgaaaaagatattataaactgtctctatatattttaggctagtagcaataccgagttgaaattttaaagtcagataaattacgttaagcacctttgcgttatagggcagggtggaagggcttagttttccagtgggaggaaattgagaagttaccataatttggttttgattgcaatatttacaggattagtcctaacatagccagtggaccatgaaccagtccaccatacactagttcattcactagaaaaacagtggtttttctggtccttgttaagtgtccttttagctgggttatacatgagaaaaagtttgagtgccatggtaggactagtattcaggaggcttgggaatacttactgaacaccttctggatgaaggacttttctaggtattgtgagaaataaatgccatcagacataaaatatgttgaaagttcagaggaaggagaaacttaaaagtggatatgacacacctattagggtgactattcaggaaaaaaaaaaacaggaattacaggtgttggtgaggatggggagaaattggaacctttgtgcattgctaaatatgcaacagctgtgaaaaatcatttggtgttttctcaaaagggtaaacataaaaattatcccagcagttccacttctaagttataccctaaaacagttgaaagcagggactctataacttgtatatcagtgtcatagcaaatccgggcttggtggcagcggctgtactctagctcctccggaggccaaggtgggaggattgtttgaggcaacataggagacctttaaaaaaaaaaaaagttatttagatggataatggtgatagctacacagcgctatgaatgtacataaggccactatacctttttttttttttttttttttttttttttttttttttggggagacaggtcctctgttgctcaggctggagagcagtggcaggatcacagctcactccacctcaa

SEQ ID NO: 107335 - DNA, 1014 bp, Homo sapiens
ttgctctgttgcccaggctggagtgcagtggcgcaatctcggctcactgcaacctctgcctcccaggttcaagcgattctcctgcctcagcctcctgagtagctgggactacaggtgcatgccaccacgcccagctaatttttgtatttttagtagagatggcatttcatcatgttggccaggctggtctcgaactcctgaccttgtgatccacccgcctcggcctcccaaagtgttgggattacaggcatgagccactgcgctgggtcccaagtctggatttttttttttttttttgacattcagaattgctgtttttaaagtaataggtattagctaattgtcaaaattaatttcacttagaaaaaaacatgtagcatgtagcactttttatggaggggaatgtatcatgcagtcaaataagtaacagttgaaatcacagtcttgaaaaacatgtagaacattttaaatattgttgcctcattggatattattaccatcagatatgttcattaagccctagaagcagtatcttagttcactttttcccagatctttagcagaaatcatttttagcaataattattctaaacattttgatgtagccagatgttgtcctaatagatgctaagagaattcaaatgaaccaaagatgattgaatttttttttttttttttgctggaatagaagcctatttatctgatcagaatcctgggtgttcagttttgggtttattcttggttgttgctgacttaatgtgagtcagctttatctgcaagtaacacattctacctccctttattttttagttacctagagaatacagttgcaattatggatgtaggttatcactctcttttttggaaaatttgctttatatgtggttgttttaatgacttttttttttttttttttttaatttgagacatcagagtcttgctgtcacccaggctcgagtgcagtggtgcagtcatggcttactatagcctcgacctcctgggctcaagtgatcc

SEQ ID NO: 107336 - DNA, 1019 bp, Homo sapiens
tattcttatatgtaccattttggtgttgtcacaataggccaatttatttgtaatcttttcatttgtaattcatactgtttttactttcaagaccctgcttttacatggaaacatcatcacctctcttagaatggcacctgcttacctacccagaagtcttgctatactttctttggcagaaaatgaaatccgagacttaaatgaggtaaaatttgagggtattttgtgagattcaggaagctggaaatcctaggaaagacacaggagagggttgtgagcttacttttagactgtgagcatcttggaagaaactgccattcatatgaaatgcttggctctagatctttccacttttccttagtgtcagtgggtcattaaggtctaatttcctttgtaaagctgtaattatcattccactgggaggcgattggtggtagagggacatctacgttataagggtttataagactccctgtccacctttcctggctgctgtgatgttttcaaaatagggttatttctgctaggaaacagtgctgatatttgccaggggattttgtgcagcagggacagatggctatattgttgaaactttggaagtcaatggacacttgtcacttttcagaacaagagggaaattatcacattctcaaatgctgccaaagatatgtaatcagtggaaattttgtgcttgacactgaatagtccttttgttcaacaaagatatcttttgttccagatctcttttttggcatccttaactgaattggaacagttgtcgattatgaacaatccttgtgtgatggcaacaccatccatcccaggatttgactatcggccgtacatcgtcagctggtgcctaaacctcagagtcctagatggatatgtgatttctcagaaggaaaggtaaacatgtgctctttaacatcacaaatgttactgaaaagaccatttctagtttactacagattaatagagtatttcttaaaatgtgcatttagataacaagagtattagtg

SEQ ID NO: 107337 - DNA, 1117 bp, Homo sapiens
ggcatttcagtgtgacagaatgaatggggagaatactcattgcttccttgaaaatgatttaaaaatatttggcaccattagtccaagctcaatggaagtgcccctaagcaagaaaaagggtttgaaacattattagaatggtgaatatgagtcagaatgatagattttttaaaaaaattgagtgaattttatttatgaaaaacatacaatggtgctataaaggtaagttaacaaggaagatcattgttgcctgacaatgtgtgttgactattctcatgccatctcctcttttttatgttccccaattccagtttgaaagctgaatggctctatagtcaaggcaaggggagagcatatcggcctggccagcacatccagcttgtccaatatctggctacagtctgccccctcacttctacactaggtcttcaaactgcagaggatgccaaactagagaagattttgagcaaacagaggtaagcccatttatttctaacaactgatgaattcacaagttaaaatacctctgagtctttgctatggtgatagtaagcctgaggcaagtgctgcggcccacatttctggacactcagtccccttgtcactgcaacagttcctgcagggaagctgaatcgtgcactgcaaacagccaaacaatatggtatggaggaatagaggggtttttttgttttaaagacagggtcttggtctcttggtctgtgagtacagcagtgcagtcataggtcactgcagttgcaactacaggtgcatgccaccatggttggctaattttttgtagagatgaggtctcactttgttcctcagtctgattttaaactcttggcttcaagcagttctcctgcttcggcctcctaaagtgctaggataataggtatgagctactacaccaggaaacgggataggatttttaaaaaatatatttgttctttttttttttttaagacataatatcactctgttgcccaggctggagtgctgtggtgtgatctcagctcattgcaacctccatctcccagttcaaatgattctcgggtctaagcctcctgagtagctgggattacaggcatgcgccaccacacctagctaatattttatt

SEQ ID NO: 107338 - DNA, 2073 bp, Homo sapiens
caggaaagtggtaagaaatgaatttatctctgatcccttttctccaagttgtttaatttgtcgggtatcataaagcagaaaaaggtgcatattttcataattttttgttagtttactaacttcagtaatcatttagatcttatacatatctatgtataaacacacctatatatgtatgtatattataactgctatatttctaattttaagaaacatttcaaggactactaccttttatatagacctgatgctttgattattcttatgattatcacaagaattcattttcttaaaaatgtttggtttgatgttttcggcatattggaagaagtcactgaggggatttttttgcattttactctatttcaaggaatagatttcattaaagggacataactaaaatgtaaacatttagtggtttaaatgatactctgttgattcttctagaacccgtcattcaagtgaattcttgggttgggataaacagtaatgatgatcagttatttgcggttaagaataattttccagcctctgtacacactacgagatattctcgaaatgatctgcacctggaagacatacagacggatgaggacaagttaaactgtagtcttctctcttcagagtctacttttatgccagttgcatcaggactgtctccactatcacctacagttgagctgaggctgcagggcattaacttgggcctagaagatgatggtgttgcagatgaatctgtgaaagggctggaaagccaggtgttggataaggaagaggaacagcctttatgggctgcaaatgagaattctgttcaaatgatgagaagtgaaatcaatacagaggtaaatgagaaagctggactattaccttgtcctgagccaacaataatcagtgctatcttgaaggatgataaccacagtcttacattttttcctgagtcaactgagcagaaacaatcagacataaagaaaccagaaaatacacaaccagaaaataaagaaaccatatctcaagcaacttcagagaaacttcccatgattttaacccagagatctgttgctttgggacaagacaaagttgcccttcagaaattaaatgatgcagccaccaagcttcaggcctgttggcggggattttatgccaggaactacaaccctcaagccaaagatgtgcgttacgaaatccggctacgcagaatgcaagagcacattgtctgcttaactgatgaaataaggaggtgggtcagaagtccttttgatgcactgttttgttggtttgagggtgttagattcttatagttgattcagaacactgtgcttctgtgattataacacttttcacacaatgtagccactgttgctttggttgtctcctacagtgtaccgaaagcatctggagagcagacactatctgctctatctcctcatctccatccccagcaaagcacttgatacatagatgcagtgtagtaataaatgttcaatgaacgtgagctttatagggatctataattctaaacatagaaaggtacagaaaacattgaaaaaccaagtataaaaatgagaagatgatgaagtctacatggaattcagtacatgacataagaaataaagaaaatagcagggattcagaaggggctaaaattctatatgactacaataggaattattccttaatcccatggctcgtatgttttactgactgctagcccaggaaagttaggatttcattaatattgcaactagtaatatttactggtattatcaggtagaagagaaagaggcagcaaaggatactgagaagggacagccagagtggtaggaaaactaggagagttccaccttcaacaggagcaagtgtttcaggagagatgagaggtgccacagagaggacacaggcattaaacttggcagttggaggctattggtgactgtgttggtgattctccagactatcctcaggttggatgatttgctaaaaggactcacagaacttgggaaaatactattctgttcgtcattatggttcattacagcaaaaggatacagattagaatcagtaaagaaaaaaggt

SEQ ID NO: 107339 - DNA, 1034 bp, Homo sapiens
acagaatagtgaagtttgatgggattagtctttagcagagggtgtttcaagctggatcacgagtacttaaatgtgacccttaattgttttggaggctttggatagccactccttttttgcactttctgttcctttggtttgtttggctgagaaattgaagccagacaaagagccatttaacattttattttatttcttattactggaaatactttgtagaactaatacctgtatttcagtcatatctcctttggcttctactttgagtcacagttcaaaattaaggtttatgatgtcacttataaaactgttccattttgattctgaggttaaaaaaataaaaataaaataaggttttaatttagatattctaaaagtgggaaagacaactattagattattaatctctttacaatgcatgtgtttatgagttgtaacaggaagtctgagtcaaagcacccttccttatgtcaataatgtgttttgaattattgtagattacgaaaagaaagagatgaagaacgtattaaaaaatttgtacaagaagaagctttcagattcctttggaaccaggtaaactccctcctgctgatttacctcatatatgatcaaatacagattctatattcattgagataatcatagagtactcaggtgtattaagcactcttgttcaaggttaagggtatggcttgtgttcttcgccactaactgtgaactaggacagtgaattttcttgcattttatttaatctgaagaaaaatattctgacaattttgacaagaaaaacaaaatagtataaagcaggaggaaagtggcttaactgaaggctgttagagctttccaatagatacaacaaccccaatttgaaatttcatgtagctatcgatctgtcttttgggaatatttgaatgaattgtgattaagatggtatatgactacaatatgcatgtcctaaaaagtattcataactgtataggagagtatttgaatcctataatagcacactttagggacagtttaggcagttggtt

SEQ ID NO: 107340 - DNA, 1041 bp, Homo sapiens
aatttcaaaaagatctggacttaatatgatgacttataaggagcttagaaaatgcaggttacatttatatctacctataggattttatccaatgttgacttagccatggtagaactcttaactgcatctacacactatattgctcttgtaaccaaagatgctaatgagtgtatttgaattagcttctcctaggaggggtgactactttgctaaagagtatgaaaaatgttttgatggaagggacaagtttggttggtagtagagtgtttgtagcttatctggtaaaggaaattgagtgcatctgcatgcatagcacaagtaatccatcttctggcggttaactagagaaagcttatagtcagaggctcttgtgaatgcactgaagactgctgtgtctcaggagtttctcttgatgatctaccttttctgaattacttgaaaaggccaatgtgcttggttcgagttttttagtgaatatttacaatttcctgcttttatctagaaaagaagcaaaagggaaatatgaaagcagtatatataaaatctgtgctttggaattgatatttgcatttggtgattgttttttatttgattcagctaaattttatgtgttgaatacttactctagaataactacttttggaactggaagggggaaatctgtaaatggaaatttatttttatgttctgaaatttgagggtttaggaattgacttttgtgtaaagaatgctacgatattataaagctgtggaagttttttccactagtttcaggtgtttttttttttgttgttgttgttgttattttgaactacttaccaaaattagaagttaaaatctaattagaaattaataagatactaaaattcatgacagttttttgtttgtttgtttgtttgttttttggtatttcttgatttgggcataaaaggcacacccattctctcatgcttggaagaagctgctattcctactggctatctaagaagaatggaattattaattttatttgacttattaattttaaacgagtttaatttg

SEQ ID NO: 107341 - DNA, 1018 bp, Homo sapiens
agcagaaaagacaaattatgctttgtaatgtttcatttgagtgtaccaatatataaaaagggggctaaaggaagatttttttttttttttcaaaagaacaacttagtgaaatcagaagtgattcacccgctttcctttccatgttccccaggttccttcatattgctgttgcccaagggagaagggcactttcctatgttcttgcaagaaagatgaatgcacttcacatgctggatattaaagagcacaatggacaggtgaggaccttgacagagtctgaaatggcaaagagggggtcatggtgaagtgaatgatgaccagccttatgtgtagatcatcttagagctcaagatcaagagagtttagttaatattaactttgagatgttgactttttgctaccatcaaccttgaagttattaatgttaactttgtagctgtttgaccaaacactgagagtaataaagccacaccctaggcttactttagtttccttgtcttacagtatctgattgcttattcaaaggatttattttctctctgtgggtttttccctcagtcatagtttagtttcatattccttgttatgataacattgtatgtttaaaatatcttttttcctctggatatccacagagtgcctttcaggtggcagtggctgccaatcagcatctcattgtgcaggatctggtgaacatcggggcacaggtgaacaccacagactgctggggaagaacacctctgcatgtgtgtgctgagaagggccactcccaggtgcttcaggtaagaggcagcaaaccaggcttccatcattgcaaggccagagagatagagttggatattagaagtcggatataggttgcctgttgcaatgatctattttgagttaacttattcatttcttggggattctaataggtatatgcgcagcttatgtagctaacagatgtctgtttttaaaatctgcaggcgattcagaagggagcagtgggaagtaatcagtttgtggatcttgaggc

SEQ ID NO: 107342 - DNA, 1045 bp, Homo sapiens
caggctggtcttgaactcctgagctcatgccatctgcctgccttagtctcccaaaatgctgggattacaggagtgagccaccatgcccggctggcagttgcatggaagagaacacctctttatggcttaccctctagaatttctaatttatgtgttctgttgaaatttttgtttttttacctttattgaaacaacaaaaagtcagtattgaaacatatcttcctgttttctgttgtcaaatgatgataatgtgccatgatgttttatatatatcattcagaaaaagttttattttttaataacattctattaacattattttgcttgccgctggcatgcctgaggaatgtatttggctttgattacacactaagtttttgtaataaatttgactcattaaaaaccttttttttttaaaaaaaaaaaaaaagaaaatctcattagtgaacttatctttgcagctgagtacttaaattctttttaaaaagataccctttggattgatcacattgtttgacccagtatgtcttgtagacacgttagttataatcaccttgtatctctaaatatggtgtgatatgaaccagtccattcacattggaaaaactgatggttttaaataaactaattcactaatattatttgtcttacatgcattttcttttcctagtgccttatttccctagatagaaaaagtactattgatgattttaaatacctttgagttagttaatttatgttaatttgggttttttggagaacatgtttcctgaaagtatacaagatttaacatcaaaatctatttgctaagtttactaggagaagtctgttaggttttgaaattatcatggaagtttaatagatgctgtcgatcattcacatgtttagatgcttaaaaaaaaaaaaaaaagctaagtgggagcagtgaatcataggaataacagtttggagattaccaggatcatccttagagagatgtaaacctgggaaaggttcttccctttgccagcaagccattttgacgtgtgagaacaaacacatcaat

SEQ ID NO: 107343 - DNA, 1049 bp, Homo sapiens
ccatgcctgcctaatttttttttttttttgtatttttagtagagacgggtttcaccctgttagctaggatggtctctatctcctgacctcgtgatccacctgccttggcctcccaaagtgctgggattacaggcatgagctaccgcgcccggcctctgcatgatatttttgagattaatccacattggtgcattgatcactaaagtatatttctattgctgagtagaattccattgcactaataacacaatttgttaaccattcacatattagtgggcatttcgattgtttccagtttgggactattattgaataaagttgatatgaacagtatttgtgtggacatatgttctcatttaattttaaattcttaggagtgaagtacctggttcatataagtgtatgtttagccttaaaagaaatggccaaactctgttttaaagtggttgtgtcatttttctcttctaatagcaatgcgggagagatttctcaatcttccctcaaacttggtattgccagtctttttaatagtagcccttctaatgcatgtgtagtattatcttatagatttaatttccggggtgactaatgacgttgagcatctcttcttgtgcttacttaccattcatatatcttgttagtgaagcatctgttcaagcttttgtctgttaaaataattagccccttattgagttgtaacagttttttaaaatatatattctagatataaatgtatttcagatatatgtattataagaatttctcccagtcagtggcttgcctttttatcacttcttaaaaaattattttgccccattttcattttcttcttctgggtctctaattatacttatttataccattgtctattgtcctgaaggtctctgaggatctgtttatttttcttgaatctattttctctccatccattagcctgaatattttctattggcctgttttcctgtgttcaacttcactgcctttcttctaccatctctgatctactgtgatttctttttgtcattgaacttttcagtttcagtatttct

SEQ ID NO: 107344 - DNA, 1022 bp, Homo sapiens
tttcctacaatatgcttaaagaatcttgattttaattagagattgccaattagaatagtcattagactcagacaattttaataagctgctgaggtgagttagtgaaaaggaagttgactctagaagtcagtgtcagagggacactaaggaaaaaatggacttttgcaagatggaaagtccaggccctttgttgggagaggaggagagcctctgttactgagactcagccaattttaagaatgtgacacattgacagatgttccaataatttcaagagaagattcagaattatgtaaacacccatttttttaaagccactcttaggttactttgtgagttgtcagtttctgccctttgctactcatgtgaagtggcacttaaaaacatatgcagatactacttagcccagggcctagtggctaagctggttctctcctttccagttggaggcctctgccacaaacatactctgccagatcattagtcaggtcaagaagcatccaagcttgatgcccctctttgtatttattggagttggagatactggagcagcactgtatctcttgtttctggcattgttcaatccagatgttaattgggacagaaagaataactcagagccctggaacaaactggatcccaatgatcagtacaagttctactcagtgaatgtggattacagcaaactaaagaaagaaggtccagatttctaaatgaaatgtttcactataaagctactttagaatgaaggtcttccagaagccatctgcacaattttcaacttaacaaggaaatatttctcctctaaatgcatgaaatcatgttgatgtaatctattggagattatactgattaataaataactgaaacttgaaaataaaacaggtgccataaaatcttttcatttactaatgagctactaaattaactgccccattctgaagagagatcaggcttatttctgagaatgtagagagcatggtgcttctacacttgtcttatgatgcacagctttgatcttg

SEQ ID NO: 107345 - DNA, 1138 bp, Homo sapiens
cactacatacctacattgttaaatatagttgcttcacaaacaatacaataagaaagaatttaagaaaacagattctatgtaaatagtctgcgtcactaactctattatttagtgattaaacggaaaaatatttagtattgagtgttggttcatcattgttgaatcagtaacggttaccaggatcattgtcaagttaataattgagaccaggaacttccttcttgctgagggcttttagtagtgatcagtggcagagggatatgaaaggctggagaagaaaacaggagacccagtcctgcctttaccagcagccctgagattttggttaatcacttcatatttctgttctgcttctttgcttatacaatgacattaggctacagctgagtgggctcccttccgtgtggttgtgagactttattctactgccaaataaaaataatatttgcattatctctttttttaatatttgcacttttttgttctcatcagtatccataatgaagcactaagcatgtaacattttgcagattgagatttcccagtcaccatgcaccataaataaaataattgagacataggaataaaaatgcattacagtataaacaagcagtaacagagtgtggaaaataaaaagacaaggaagtacaacctctcctctgtttaacactgaacaaaatttttgggagagtataatgttatatttataaatagagcaattagatttggttcagagaaaagaaaatgattaaacctatagaatacagttgttgtaaagaagggaaaagacctggagaaggaagaagtaaaaggtgaattaatagctgtgatgagaacactgatccatgattcttcatctccacagacgactgtcccacaacaaaaacaaaacagcatgcaattgctgaaggaaaaagctagttcctcaaatttgaaatgctacttttgaggaagactcagggacttctacctcttagagtattacaaaatgttatacatataccatactccaagcagagatgttctgctgtctctttaaacttagtttagtataaaaggatggtaaatttggtgataaatttagtaataaatgcaacatttttcttatctgtaacttaataggaataaactaatttaa

SEQ ID NO: 107346 - DNA, 1097 bp, Homo sapiens
aggaaggaaataatgatattcacagcaacctgtatagaattggagactatcattcgaagttaagtaactcaagaatggaaaaccaagcatcatatattttcactcatatgtgggagctaagctataagggtgcaaaggcataagaatgacgcattggactttggtgactcaggagaaaggctggggaatggcaagggataaaggatgacacattaggtacagtgtacactgctcaggtgatgggcacagcaaactctcagaaatcaccactgaacaacttactcatgtaaccaaacaccacctgttccccaaaacctatagaaattaaaaaaaaattaaaaagaaaagaaatttcctgtcctaacaatcaatgaattattttatcatatattgccaataggagctaaacaacgagtttgggccagattgatctgtattttctaatatactttattttttagagatgttttatattcacaccaaaattcaacaaaaggtacaaaaatttcctatatatccccttttgcaacatgtgcatagccttctccattatcaacatgctccatgagagaggtactttgttacaactgatgaccccagcgttgacacattattatcacccatgatccatagcttacattagggttcacgcttgctgttgtacattctgtgagtttgggaaaatgtgtcatgacatttattcctatctttaaaaataggagtaccaaccggaacttgaatttggcccttgtatctttacagtgctggttttattttactctcatagtcatcttttgatgctgtaacagaaccacctgactacccatactatttgtaggttgtctccaagattgccaatatgggtcacccagaattagcacaatgggaaaggcaggttggctaggccaccttaataaccacaaagacaaattgtcttaaattagaggaaaaaaggtagtgtctaccaagacatctaccgtaaaatctatctgaaaattagaattggtttaaggtgaagtaagtcagaagagttaatgtccatttcttgttcatgtacgtgtgtatgtttgagtctttatgtagtaccactctgagtg

SEQ ID NO: 107347 - DNA, 1038 bp, Homo sapiens
tttgcaaaattgccttctaccttcccttctgattagattgtaagcccttgaagatcagggagttattactcatgtgatacctagaaaaatgcttagcatgtagtaagtactcaatccataattactgaattgaattgaaagtactccaacaaatttccttgtagtttgtttgaacttctaaaatgatgacatcattgctgtgtgattaataaagacatttaaagaaggaattacaaaacttcctagggaaatcatttctcctcttagttcccgctctcttctggtttcttacccactctaatagactaattagacttgcatagagatgggacagcaggctgtggaagggaaagctgtataatgcagtagaagtaccatagaaataaaaaaataaattggattttttgatgacaaaaaagtatagaaaaaattgctggaaacattaattcaagaagcatctaggtgagaggaagcagaatcagaactgtgtttggggaaggaagcagtcaaagtgaggcagttttgacagtatgtggtggatagtctctctggtatgactaattgagaattgattgtgcatgcagaaaggttatgttttattaagggaaaccttttttcccttttgtcgttatgaaatccactcttctgcagatgttattcccttcccatactaaaccctcattaatttataattcaccgcattgctttaaaagtgctgcacagatttcctgtttctctcacatgcagtgcttctaatagagaaagtcaactcaggatataggttgaaatgctgcttgtcttgagggctgcatgccagacttgatggtgccaaaacatttcaccaattgtctcttagatcattgtaaaggtttcaaagtgctatttcataggctttaagaaagtgaatttacactctaaaacaactctttcactattgactgtaaattgactctggtgtttggaatctggagtcaaagtcaaatggtttcctggtgggattctcttaatttcaaggacaagaactcacagagagaaggg

SEQ ID NO: 107348 - DNA, 1051 bp, Homo sapiens
catttccctaaagaaccattccaatgtaagatgcaaagtatccttgcagaaaattaaacctaaccacaagtgcctaggccctaggctatttagacatgaatcaaaaacagcagtaccaaggcacttatttgtatagatgtttaatcaagagtgatgcttaatgtctatctggaatttcttgcaaaaaaagagaggatagatggtctaaaacaagactaatatatctctactgggcattttaatcagtgctaacataattaaatatttatacagcactttgggtttgggaacattttctgtttgattttcaaagttgcatttctcaaaattcttgtaaagtaggtccattacacttgataccttctctttgcacatagaatttataaatcagagaacataactttccctgagtcactcaacaattgacaagcactagaattatgatcgtatcaattagtcccacctcatgcattagatattaaaaatagacctaaaaacagttaggcaagatctaagcaatccttctgtgggcaagaaagagaatttaaaataagtatgtgactttcacctcctgctattatcacatattgcaggaggtatcacccagaaagataagtacatgttgacatgatttggctgttctccacccaaatctcatcttgaaatatagttcatgtaatccccacatgttgtgagagggacccagtgggaggtaattgaatcacaggggcagttaaccctcatgttctcgtgatagtgagtaagtctcacgagatctgatggttttataaggggctcttccccccgtggctgggcacttctctttgttgccgccatgtataagaggacgtgtttgcttccccttatgccatgattgtaagtttcctgaggcatctccagccatgctggactgtgtgtcaattaaaactctttcctttatgaatacccagtctcaggtatgtctttattagtgtgagaactgactcctacatgttaaacatgactaatacatgtaaacatgttacttattgactagttggggtgtttaaaa

SEQ ID NO: 107349 - DNA, 1044 bp, Homo sapiens
tgggaaattaatggagaaatgagataaaatcatctctgtgtaaatgcttgaacccacagaaagttttctaaatatggactaattgtgggtttgtgcatatttctgtgtctcctcttttcacttcacacccaccatgatataaaaagatgcatcagagagtgagcctgccttcaggacctgaaaggacatgactgaacatctagtagatctggtggaaattaatgttatacaaaagacacgtagactaagttgaccctgggagaggagttaatacattcctttgcaaagtgacatgtgccctttttttgacagtctggctttcatggtatgagatgaggactcacaggccttgggtaatttctgcttttgtatgaattttttcagatggttctgagctggttatgtccctggaggggaatttttcatttgccttagatgttcttcccatgagtaggtacatgagtgaagtttcttacacttttaaaattgcattggcaaattttcttttgctttatgaacccctgttttgtcattatgatttttcacttgttttaacagtttcagatgtcaccttggaatagcactgtttattttggcctttttatgattgctgatgataggtacagtctaaaggccaaaagttgccacttcattgtgataacattgttgcaacattcctaatatattagagaatgatgtaaaataagaatgttagagaacatagcacattctcattcagtttataaacaatatttgaaaatttccagtgagaattaaaaaaggactagtgatgatatagcaaacctggacctgaaatttgggggtggggggtggggggatatctgttttgcagagaaaatttaccagcctccagcaaaatctctgcatcttgtactcaatagcaaccattagtattgtcatttaaaaagaatgaatcaaaaattcatacgtaatggaatgaaaagaggaaaactttctattaaacactgtcaagaaagacccattgctatctatcacctatgaaattaaacctaaaaaaatttt

SEQ ID NO: 107350 - DNA, 1004 bp, Homo sapiens
ggcagaggttgcagtgagtcaagattgaaccactccactccagcctgggtgacagaacaagacgctctctcaaaaaaaaaaaaaaaaaaatccatacttcctcctcctaatcattgataggtatccttcctttttttttgttgtttttttgtttagttttgttttgttttttgcctacgagtatgtaagttcacatttatgtaaaatttatttctcatagtatatgctatttataaccattttccagttaatatgtcatgagcaatgtatatagttgttaaatatttgtacacaatataatttttattgatgtatatttcctcatttcttttttaagtagcaaaccatttcctcccagtcttcccttagttttttataatctctcaaataagtactaaattttcagttttgcagtgctgtactataaatcacaggcagtagtactttgctttttacaacagattagtctctgtatgtgtatccatttatttctcaaacacttatataagtgataaattggctgtgatcatttcagtttgttttaatcctgtggatataatatttttctttagtttttgaagaatttattttagaaaagctttattactttacaaagttttcttatcaggggacaattggtaattattatactctgtgtagcaattgtgttatatctaatctctttccctttaaagcctgaatgcttccaactttataatttgctttagagagcccagtttaccctatggctgacaaatagcaaacttaggatatgatgcaagatagaacatgataatgattcaaaacagaaccataagcaggtatttttgctatttataataatattttgagtgtatctagtaccttttaaataatatagtttaatggaagaatatagtacagtggtatattttatagtctatgtatggctctgaagtgtatccagagtttactttttaaccttaaataaatagatgattagaaatagcattaagtgtatttga

SEQ ID NO: 107351 - DNA, 1003 bp, Homo sapiens
tttaagtcctgctcataaccataactaggtgtctttgtgcagtgcacaaaatacagtgtttttgtcagtctttatgctacctttattttgctgtttctctaacctgtaatctcacttgaagatcttatctaatcttaaagtcacagttcaactctgaaagctagccaaattgactttattaaagataaatggaagttttattcttggatccagaaatgcaactgcataagtaaaatatgaagaaaatccagatcattagcaacaattgttgaaaaggttttaggggttttgttgactacaatctttataaagcatcatcatgatgagaaagcgcatgccatttggggcttgaactcacagaattcaaatctgaggagtgaagtcctccacagtactcagcctttgtggagaccactgtgttcagatgttgaagcattaatgggctagagcagcaattctcaaattgtgttctccggattcacaacattagcatctcctggggatttgctttaaaatgaaaattcaagacttaataaatcagaaaccctgggaatgggactcagtggtcacaagccttcctggtgattctgatgcatgttcaagtttgaaatatactgggctggggtattctcaaaaaagtgcaaccaggatgataaagtaaactagagtggattaaaggaactgagaattggctcagagaagagaagaccttggatgtagacgagagttgtcttcagttacagtatttgggaaagaaggattatattttttccatgtcacttcagaaggtaggagtaagatcaatgggaaatgttaagaatgaaaattgcattcatcctacaaagaagtttcctaaatcattacgaattgttctaccttgagtgtagtgagttatctgacactggaggatttaaaccaatggtagatcattacatagtagagatatgaacatgagctaaagcatgagggcagcaaagaggggagaactttgtttcacctaaat

SEQ ID NO: 107352 - DNA, 1114 bp, Homo sapiens
cccctgcctcagcctcccgagtagccaggattacagtcacgtaccaccatgcccggctaattttttgtattttagcagacatggggtttcaccatgttggccaggatggtctagatctcctgacctcatgatccacccaccttggcctcccaaaatgctgggattacagacatgagccaccacgtcaagcctcatttttctttaaatatgccattatgtttaaatcattcaacttaaaagtgtgaatttttattattagaatatgtgtttatgtataccctgtctcattcctaaagtattttgagatagcttaccaaacatgtgctttttttttttttttttttttttttaaagactcaaggtaatgaaaactatgagtagaatagtaaggtgtgacaggggacaaataagtagatataaaactatgctgcaatattctagttattaaagctgggaaatatgcaaatgtaagtagtgcttggaaccagagaaggttctatatttagctgttcttctgtagctaaatctgacaaattgaaaaatatcatattctctgctctaggtacattttatgtatattttgacagcatatcaaatatatgaaacattaggttaaataaattaaaatccagtggaataaactatatgggataatctaaactattctttgacattaaattatatgtatttgaggtgattttccagttaaaggctgtgaactctttttgctacacagaaaatcctgttttcatagtgtgactgataataatttttagttcaaactctgagtcctaatattataaaggttacaagtgaactatgagctgtttcataagttacaatgctgctttttataaaaaggcctgatagaaaaagtttgcatgggtgtgtttgtacgtatgtatgtatgtatatgtgtgcatgtgtgtgtttctctccagactctcccacaaaataattagatcccattatcaaagttggtgaactgctggataaaccctgcgagtgaaattctttataagcagcaagagaaaatcaattattacttttgttagatgctgtgtattttgattaatgaagttctgctgctgatatcgacctttctttaaatgca

SEQ ID NO: 107353 - DNA, 1143 bp, Homo sapiens
taagttacagaagcaaaaatatgatattaaatactatcaacaaataataaagtcattgagactgctatatgtttttgccttggcacatacatctttttttacttcaaaaacttgaccaggttctattgaattcttccacagagataagttaattttacatagtgtttaggatatcaacaatttttgtggcccttgtaattcttggttatagtttaaaaaaagagagactgtgttacttgagatatttacttctacattttaaaataagggatgagtatcttgatgttattactggtaattttgagaaaagaaaaatatatgttcaaactttattaaataaacaggaatactagttccctctacctctcaagttacttttaattggaaagtattctccttatataattttactctgaactgtcctttaggtcttgtgataatggtcactgtatgctgaatggaacacatggtccatcttcagagaagaaatcaaacatccctgacttaagcatatatttaaagggtacgtatagaatataatttcctttgtgatgtacatcttaatggtcagaatttaaaggcaaaatttcatgccattgtactgaaaatacattaaggttttgtgttatcctctaggagatgtttttgattcagcctctgatcccgtgccattaccacctgccaggcctccaactcgggacaatccaaagcatggttcttcactcaacaggacgccctctgattatgatcttctcatccctccattaggttgaaacctttaaaaaagttttgaacaacccacccctccttcttttaatttcagaattttcagaattcagagttcagtataacacagactcactgggttgtgaatttgcctgaaatttgaatgggttctccaggtgccggtgactcccaagttcacgagaccattactccatgtagatgattaaggtagtagtgtagtagttgggcatcagtcaggttttaagcaagttgttttgtccatactaaatgtagtctaaaaacacatgagagctttgtgctctagtagttttgaagtgatgacttgaagtgttgagattttctttaagtataataattcttaataaatatgaacttgcttttcttgcagcatgagca

SEQ ID NO: 107354 - DNA, 1033 bp, Homo sapiens
ttaatacgttaaattttaattgttacatcatattggatgtgattttttgtggcagagctcccaaatcttgaaaataaatttgaattataaccatcattaccatttttctattgttacagaaaagtaataaacgttgataatccctaaatgtaattggagtgaattctttatctaatttgttcttgaaagctgatggatgaagtatcttcttttgtgctctccaaagagctctttaagcttaacactttctttccctgtgtgtatttttccccctttggaacatcaggagaagtgaattgtcaatatgtagaaaaagtgacccagtaaatgagtaattcaatttaatttcagtaaaaatccatcattattatgaagattcaatacatgataactatttttaaatgaactatatctggccccttaaagagaagtggccaccagagagaatagaaatgaatttcagatgaagcattcttgcattatctattcaaatatccgtctcttccattacatacgcacttttactttgctctaaaaattcagagtaaatcagagaaaagtaaaatgtaaactctgatttctatagctctttgtcagttgattgttatagagctatatgctgaaggcaaaatatgctccttatcttctcttcctgctgctatcttcccatggctcaattttaaccattgtgttcatagtatgattccgaagaattaataccaataatttggctgggttcggtggctcatgcctgttatcccagcactttgggagggtgaggtaggcagatcacttgcggccaggagtttgagaccagcctgggcaacatggcaaaaccctactaaaaaataaaaaaaattggctgggcgtggtggtgcacgcttgtaatcccagctacttgggaggctaaggcatgggaattgcttgaacctggtaggcggaggttgcggtgagccaagatcatgccactgcactccagcctttgcaacacacagatacacacacaacaaaacaaaaaaagccccaacaactc

SEQ ID NO: 107355 - DNA, 1040 bp, Homo sapiens
tctcctaattcagagtaattgaacactggctttggatggtcccatatgagcaagttagaaattgtggtttgtgtgttcacaaactgaaaattttgtttaaatttgcctgcacttggaaagccagaacaggtctctagttatcattagcacagaagcttcaaccatgaaagaacaaaggcacttctgattatattaatgtactgtttcatcagaaagtttaagaatgttccgttcaccatggagaaatataatttagagcactttaatttggaaggaattaaaaaaagaataacatcagtgctgcttttttctttaccccttatagagaatgctaacttttcaataaaaactgatcatagttggtgaattttactgtctacctatttagccattaatatctgtatctggtgtatataaattatagtattccctctcagtgtttaagaatcatggtgtaacatttttattttttgtgtaagcttgaacccctttgggcagtggtgaatcatcagtgtggtgctactgactcctgaataaattgtatgacatttcacttatttaaatatactgaacttacatattgtcttcagaatggtagagcagctatggctttaaggtccttcagaagttaaattcttggaaactaacaatttgatttactttcaggtcttttccaatggtcaccttggaagtgaagaatatgatgttcctccccggctttctcctcctcctccagttaccaccctcctccctagcataaagtgagttttgttgaatttggagatcacttgtctatgcatcaagatatggtagagtggttttgagaggttctcagtacagacactacatgatgaatagaaagtcattgatagtaaacagccagctgtatttacaaactaaattaccataaattaagatccttccctatactttgctggtaaccacaacatctgtgagacttacctaaactcttgaggttacatagagcaacagggagagaaagctacgcattccttgcatcaaagagggtagagtagcac

SEQ ID NO: 107356 - DNA, 1770 bp, Homo sapiens
taagtatagttattttgtaaaatagatttaaaaggtcattatatgcattaaaataatttgcatgctgttatcaaatgatattttacgctcatttttatagtgccatgacaagaaaaatgtgatgggagtatatttgcaaagggcttaaggtatgacaaattatcacccttgtttcaaggcgactcagaagagggaattatatgtagtttttaaacctggagaaattaattacaatgaattgcaatatttgcagagtaattatattactgtttaatattaaagacataatttttactctacagttaaacctacagtttattttactgtgtggattttttcctcgaatttgataagtataagattttaaaaattaattttatttggtaacatgctctgttgtctaaaatttgttggaagcacaatatatttagtagtgtttgattttcctgtattaccagttaacctggttttaagatcacacattattagaatatcatttagaattatgtaaacacaacagattccttttttctctgctattttctaacattaaaattacaaatcaatcatcagattaaccatgtaaataaaagtcaaaagctacgaaaagcatactcattcaattcattgatctatacctttatatttctatgtaagaatcagcctgatcttttaaaatactgtaagaattcataaaattgaagtaattccatatgtagtgctgctctgttacttgtgatcttttactattctggtaataaccgataaagaagcagagcacatttgcccccatatcagttttgctgtatcacagtgatgaaaacaaaaataaagaaaaagcttttaatcttctaaaaatattacaaatattacaaatcaagttactctttaaaaaaactgaaaccatgacaacttttctcctctctcctaaatcatagagatgtgcaaataaattattgacatattcttttaatgtcaaagtcattgtatgattttgatcttctacttgtttctgtatcatttctataacttaacatttggatttatgtactcatttctactttttcctaatgaaatgtatttatgagttttttattctcatttaaatttcattaactagtaataaaagcaacttattaaaagatggcacaggaatctagtaaaactccttgtttggcttagaaaattaaagcaataatacactagtttggaagttctgtcagtgcatggtacaacctttagtttttttttttttttttttttttctcttctgtttctttagtcttctccttgcatggtgagaaaacaagataaaccactcccagcaccacctcctcccttaagagatcctcctccaccgccacctgaaagacctccaccaatcccaccagacaatagactgagtagacacatccatcatgtggaaagcgtgccttccagagacccgccaatgcctcttgaagcatggtgccctcgggatgtgtttgggactaatcagcttgtgggatgtcgactcctaggggagggctctccaaaacctggaatcacagcgagttcaaatgtcaatggaaggcacagtagagtgggctctgacccagtgcttatgcggaaacacagacgccatgatttgcctttagaaggagctaaggtaagaaatacgcaaagcagaagctagagaatctgcttataaatgcttctgatggtcagtagcataaaaggttgggaagtgtttttttttgcctagcatggcacttccctgtaagtctttaa

SEQ ID NO: 107357 - DNA, 1605 bp, Homo sapiens
gcaattgcttgttccaaccagctttagctggcatttggagagcaataagggttttcacatgaaagcattttttcagtgaccaaaatttattcctttaattctcagaatgttcttgtttcttggccatttttatggaaatatttctgaattatatgtcacccttccctgccttctcaaaattggttatgcagctgagcgaaccaaagggcataagaagccactgtagtcaacatgacacatttctaaaagcttacattttgctacaagatttgagggtagcttgcataaagagaagagaaccataaatttaaattaaaatcacacatatatttggatcaggatataaaatttgtgtaaatgtttaaagtaaaatacaaaactttaaagaaatttcaaggttatggaggctgatcataggccaggagatcaagtccctctcataagaaggtacttcaaggagaagcagtatcatcacttgtgttaacagtgtttaatatttcagtagagcagtgcccttaaggttatccccaagtgtgagactgcactactttaaaggagacctgtcggcaactttattgaccacttctctgccagacctcaaagagaaatcagctcttattccatttggtgtttcttaatatataggtttctgttttcctccgcttctttattgcttctaatttgaaaatttccagaagttactagtggaacatagacagtaattcagcctttgaattagtgaacttcattttacacagaaatcaaatgtccatattcttaggaaggtagcagggtgcctacattctgtttctgtattaagaagtagaaaaaaaaatgttcctcctacttcagaggactttcctgtttcattctgggtttctccccaaattattgtaggttgagacttctggaagtatgaccatgggtaaccaggaaatgattgtattgctctaacacaatattcttcatataagcttttgtttattatctgtggaggtactctaaaatagataacacaagtcatttacttaagctataatgccatatgaatatgtgagtatgtgtgtaagcatttttgtagcatataccctctctgaataatattctgtataggctactattttaaatactcttgatttttgttttgttcacaaaataaagtgaaaaaactgagaatagtagcaagtaaaatatgcttagactattttatcatgtgataaaagttttatcaatgtcttcattaattttcacgcatttatagaaaaacattgactctctgagtccttctcatcatccttattatagtaactgtatatacctttttcagatatggaaattcattaagtaaaaatcttgttaaaagtattataaaattgactttgattatctctgggactgtcagaactctcatcttattagtaattggagaggttttctcttgtcctgtttttataataagcctgactgtgcttgaagtttcttaccaaatgttttgccatttccataataatggatcttattaacgtttttataaaatggctctttaaaggtgtggataaaatgaagagtgactaaaatagaatgagttcccaattattattggta

SEQ ID NO: 107358 - DNA, 2035 bp, Homo sapiens
ctcaacctgctttccattgaattaagttgaagcttgagcctcttttcagtagtggcactaacaatcgaaaggaaatgctgggaacataacatgagaagcagaatgttccaaggtgactctagtgtttctccttgatcttatcacccgctcccaagaccattcatatttcattctctctggcacactggtgagctttctgtcaagggagctgagacattttcaaattgatcctttctgttttttaccccacaaagagtagaatgatgatctcaagcattattgtcctagaagtcacacttcagtagcttatttggcagtcagcagtgtcatttaataaagctttacttcactacaatcttgttatactttcttatgggagttagatagtttagaaatttatatcacttgtaattatttgtttttaagttgaagaggtatatttcagttaaatgtctttatgtctactaatctgcctctagtcaattaaactgattgtgacttttatagcatttcataaatgtgtaccacttaattttcaataaaacctaaatttttatatagatacaagcataattctttctgaataatttggaagaatattgctatgatgttatgttcttatagtattttatatgtacttctatatcaggagttacactaaattgttatttaaaggactgtctttaaggccagggacaatgccttgtatttgtgttcccaggcacctaaatgcactcaataaatatttactaagtgaactaataaatgcacactcctgcacacatgttcctttagggcaatgacctaatcttatgcatattttaaactttgttccaacctgaatactaaatatatatatacacagagcatcaaactgatagattttatccagttttttcttataggagtggttataaacaaatgtcacatggtcattttgacacagtagttcttctacctgaatgttcttcctctgttttttaaatcattcttttgtcattcattcatgcattttcattcattcactcattcatttattcatttattttttaattaactgatgaattaatttagagctggagtctcgctttgttgcccaggctggactgcagtggcactatcttggttcactgcaacctctgcctccctggttcaagtgatttttctgtctcagcctcccgagtagctgggattgcagacgcctgccaccacgcctggctaatttttgtatttttagtagagacagggttttaccacattggtcagcctagtctcgaactcctgacctcaagtgatccagccgcctcagcctcccaaagtgctgggattacaggcatgagccaccgtgcctggtgcctggacttactcatttatttttaaaacattttattctctcagttaaaagagtgactgccagtgattgtccaacagaatggttccattgtttctatctgccattttgaatactcatctttttcttcttttatgagcgggccaatgataatattgtgaaattgtttcttcctgtcttcagcatattacattctttaaatgagtaatgctgccatcgtagcatggaaacctgctttgattgtatattcctgttaccatggtgatatcccacagctggagttcataaatagtagcatactaaacatatagtgtatttctattatttcttttatagttaaatgtgtttaataatgctaatccttacagaagcaatagaacctaaaagtctataatacatactttttgattccctctctgatagaaagtattttgtgatactaactagaatatgttttagattttgcccaagtctgtatcgttgcctgagttttcaagctgtcagaatcctgggataattagatctgatgtgagccctcagacaaagtccaggatgtgactggtaagatcacagccttctctctgacttcattcagatcagagctaaaaaacagtatctgttgctacccagtgatttgcttcattttgccagaggattaagaggaatcttaacagtttttcacag

SEQ ID NO: 107359 - DNA, 1050 bp, Homo sapiens
tttctcccttccaatgttccatgctgaccaaatacattcccttaggatattttacatacaaatttttacataggaagatatgttaacatcaccaacatggctactctcaaattttgcatttttctggaatgatttttattatttatcttattggtttttcataaatgttataatttaacactcagagaaactacacgatttcactctttaatcctgaaagatacagtttttattaatagtttgaattatgtgattttttttgacctaagaaatggaagaaagtagttattcctcagaaatcctgaaggatgaacaagaaaaaataatcttagattgaaacagacttgagacttgagtctcaaaacaaagttaacttaaggaagacgtggaataaagcaccagttctgctacagagtagtaatggcatgctaggcaagttatataacctctttcttcctcagtttaccccttcgtaaaacagaaaaataatagtagcttctctgttgggtgttgtgatgatcaaacgggatcaaggacctaagaacctagaagaacgtcaggtcaccaaagtcataaatgctcactatattattaccaatgttaattaataatactatgtaatacatattctaggatatactccataatctgagttagtagaaatcatttcatcactatgcatgtgagagagctacatatgcggagctggtgatattgatgtactgttccccagaagacataagtttgaatactggctctacaatgtacaaatacaaacaaatcacatgactagtctgagcctgatttcctcttctgaaaaatgagaagaataatacctccctaaattgttgaaagaatgacatatgttattaatgctggttttattgatttgtgaccctttttactgcaagttaaaaatgattttacattttaagtggtgtatatttaaattcctatataagtacctacaaaatgtccttgattttacatcttgtcctaaaatattcactacctggccctttaagaaaaagtttgcagccccaggtctag

SEQ ID NO: 107360 - DNA, 1036 bp, Homo sapiens
caatgttgtctgtagggcaagaaaacagtctttatttccctgcaaattgtgaatttttaatgtagttagttttgagaaatgaatgtaggaaactttgagcaaaacatccaataatgaccagtaaatacatttccagcccaaaagtatttgcacaaatctttttgtatcatattgtttaaaagcaagataagggcaaaacttagtatctcacagagaactttatatttgagctgtgtgtcaggatgacaggctttcaggacagatgatggcttttgaatataaatgtacacattttaatttttcctaattgtgtataaagattttaaaatacacaggcagttaaaacaaatatttagccacagttagatgcacaagtattgtatttttctcaccgatactactgctttattatgaatttttaccaaaatatacttttttatggaatgtttggttagtactgcactcttttcataaggagagatacgattcaatttccagttttcttcaggactctaatgccttgatacattagaataataagtgaacagtcaggaaaataaagaggtttcttctcttgggaaaatcaaactttcttaaaactttatttttccttcggaaactgaagatactgaccatttattatacattttgttggctccctgttctatacccactaccacttcaagagaaatcttcccccacctcctaccccaaaaagtctttttgggggtgtgacttttatagttgtagaacattattagcatttctcggtactgtttattttgaacaaaaccaatccatgcattttctatttgtttaggagtcggatggtcagggctgccctttctgtcgttgtgaaataaaaggaactgagcccataatcgtggacccctttgatccaagagatgaaggctccaggtgttgcagcatcattgacccctttggcatgccgatgctagacttggacgacgatgatgatcgtgaggagtccttgatgatgaatcggttggcaaacgtccgaaaggtaaaactagaa

SEQ ID NO: 107361 - DNA, 1044 bp, Homo sapiens
acacctttccagatttatttccctgcatctgattaatcccattgtctttgaaaagatactgtttttccaccgcatattctcactcataggtgggaattgaacaatgagatcacatggacacaggaaggggaatatcacactctggggactgtggtggggtcaggggaggggggagagatagcattgggagatatacctaatgctagatgacacattagtgggtgcagcgcaccagcatggcacatgtatacatatgtaactaacctgcacaatgtgcacatacatgtaccctaaaacttagagtataataaaaaaaaaaaaaaaaaaaagaaaagatactgtttttcaagactttaaagaggattactattgttttttggtagacagactagaactcattatctaataacaggattataacatagtcttatttatcatgttcttatctctcatgatattatatgaacagaactatcactttaacaaaaagtcattaatagatttctgtgtaatagataggtggtagtaagccatcaataaatggcagttcttactcttatttgaaataaaaagatcctgaaattatattattattacaggtgcatggctatccattggtcatgtattctattctttgtagattgacagttacttatacttgttcactgtattttaaaagcgattcagcctgcaacttaagtggtttataattgtaagggtcaatagaatatattgaaagatttttggattagtgaaaacttggagtttagttggcctttttattttctctctctctctctctctctctctctctctctctctgtctctctctctctctctctctctctctcttcccttttcttcttcccaggtctctgccagcaccctgaaatttctacatttgtaaaacaatttgctattgatattttctctcatttgcttcatctctaaaggaagaggtagtagaaaccaccactgtctttttgcagaagtttaaatggaggtgtgaaaattcatgctttctgggttcacttcctctcatat

SEQ ID NO: 107362 - DNA, 1054 bp, Homo sapiens
tctactctcaatttccaatgacttcattatatataaattgatctctttttaaatgatcagttcctacatttctattccttagatgcctctcttccctctttcttttcatctgtctcagaattttgacacctttctttaagttcagttcataagtccacttttctgagtttttctcattcatatacacccttctacgtgatctatgttaattactctatactttggttgctgttgtattttagacacatttatattgtaaaatgtgtttactatgtaggtctttcttgcttgattgcaagagtcttcaatgactttctatgcaaaagttggtgaaaacagacacatttattagagttattgtatgtcagattttgtgttcagtgctttcacatatgctagcctcattttcaatataatctttaaactactttgtaaatggttgttgaatgagtcttttacgtaccatatacattgtagacatttagtagttattagttgaatgtatgagtataggatgcaacttttctgccatttaagctctctcttcctttacttatgttctgttcttcagtcaaattggcttatttggctctttctggacacatcagcaattataggtttctatgtctttgcttatattgctccttctacttgaagatttttataatctctggcataacaattcttactaatccctcaaagataatattgctcataatttttcccattagtgttattactagatctcttcttaaacttcgctaagctctggcttatcttctgcatttactatttttatggttttattacaagtatttgtctagttgtcatacttccccctagactatatgctccatgaaatcaagcttatttattcatctttgtatttctaaagtagctcagcacaatgttttatatacaggctttcaggaaccattgtacatttaattcagatgagttgagaagtagaggaatgtgcattagcatgtgtatgtgtgagatggagcctgcttgcttgattgattgggagacagcatacttagggtttggcatg

SEQ ID NO: 107363 - DNA, 1072 bp, Homo sapiens
attctgttttcctaagttcctgtgttggttctttgggaaaaaattcacactgaatctctgcacattattctgtccttccaagtgggagaagcatgctgacactgcctccagtctgccatcttgaaaaaaaaaaaaaaacaaaaattagcattgagaagatttagacataaatttccaaacaaattataattcaattagaaacacagattctaactcttgaatcttcttacatagcctctcctctccatacataaaattctcttcttcaaatttaaattcatgctctgcattaccccaacaaccttctgattagtctccctatctccaataacaacctatcctattgttcttaggggaccagtgagctgtctaaaaagcagagctaatcattccagtctttcgcttgaagtgtttgcatgaatattaattctaggttaaagtctaaaatcacattaaacatcacaagctttagaaactttttcgctggcttctttttttctacttatcatttcggtatacttaactcatctgcaaagaaacaactcaatactgttcatatttcccaatgtgtgtctcattttttactcctcattgtctttgttttcgtatgttgcattcactgcttggataggcagtcacccatgctctatccagtgttgccactttgaaagctttactttagtaccctaatggatatccctactctgtgctgccaggtacctgagctcacatctgtcaaaatatattacagtgaactgctgacatgcccccatttctcaattgagaggtttccaatagactggaaagtttatttggaagcagagactgcatcttacttatttttgtgtttttgagcctgacacgtttcctggaatgtttaggcaataataattttttttttttaggtggagttttgctcttgttgcccaggctagagtgcaatggcgccatctcggctcactgcaacctctgcctcctgggttcaagcgattctccctcctcagcctcccaagtagctgggattacaggcatgcaccaccacgcccggcaatgttttttttgtatgtttagt

SEQ ID NO: 107364 - DNA, 1522 bp, Homo sapiens
tacagaactttcattgtgttttatcgtaaaggaatgaaagaatggattattttttcttttttgtctcaatggagtggtctacattttaaaggtttattttacaaaaggatacttgttacatattaggtttcatcaaaagaagttcaatactaaagataaagagttttccttattgaaatatatattgttaagcttttaaaccaaatgaaagtatgagtggtcatatttatactgtagtaggttttcataatagattttccggattaaaaccatttgttgaaatcatcaaagagatgttaatcctgctttagcattaatgcaaagttaaaataactgacattaaaaaaatcatttgggaagctttattgaatatattgagataaggtttattgtagtccttctcttcatgcatactgctgttacaattccaggaggtttcaaaatccatgtgaatgaccccattcaaccctcaaactgtccaattcctggcctaattcaccttcactctgctgtagctaccagttgcaggactagctgcattttggccagaactgcatcaccctggaaattttaaacacactctctctcttctgattgccctctttttctggttccatctcagctttattcccactgcattgttctttatctttggagctctctaaatcccttaaattcattgggtataggattctgtcatcttcatctttgtaatatcagtgcctagactaagcctggcgtataataggcactcagagatttgaagaataaatgactaaatgactgtatcaaatacttgcccattgtttgctgtttctgaattgtacaaggccatcatgataattgatgatcttaataatgtgagaatatgattctcttaccttagtaagagagccatcagtttattggatgatagttatatggaaaaagaagaaatgctactgtgataaatatttataattttaaacaagtggtaagtagaattaatgataaataacttacttattgaaggttttcaaaaaattagatgcatcagggtcttacctacatgtcttatgtatttttattcaaaatttttagaaatgaggaaacaggttaagtaaccttttctttatctttaaacaggctaaggatattaagccagtactaacaaacttaaggaccaaactcgtcaatatgtaagatactagaaaaattaatcagaatatattttgaatatcttgtggaagcttctcaaaggatattacattgagcatcataggctggcatgttatttcatgttttaagtaaggcatttgtaagttgtccatttaaatatatttattttagaaagcaaatatatttgtcctgtgaagagcatccttattttgagggatagcttcttgctgttaataaaacttcgtagataacatgttggaaagaataccacaggccgggctcagttggctcacgcctgtaatcccagcactttgggaggccgaggtgggcagatcacttgaggtcaggagttccaaaccagcct

SEQ ID NO: 107365 - DNA, 1127 bp, Homo sapiens
gaggattgtattcctcgtccagaggtttcatttcagtggtaaatacggttaagtttgttacaaggtatttacatgagtatgtacagaagtgtattcatttatgcattaattcaacacatactatatgtaatgacgtcttaaagtgagaattaaaaatctctctgaatttctgagtttttaaacccagaatcaatttcattcacattgttctttcttgagcaaaatgtcattttaaagtgagaattaaaaatcccactgaatttctgagtttttaaacccagaatcaatttcattcatcttgttctttctttagcaaacttttcttctgtagagttccccatatgtagaccatgggaggaataggcactgtgggaacatagtggtttatgtgactggcttcctatccttaagagtaatttttttctgttttttttttttttctttcccttttctccctccctctctttcattctttcattcttatttcttaagaatcatgcagtggagatacgtgaatataattcaaggtaataaaagaattaatgtcctactactgatggtggcaaagtggtatgcggcttcagagaatagagtgattaattccaatttcggggactggagatagtttcactaggagatgaatggattttgataaacacccatgtgagggaaggctcttgcagcctgaagccgtaagacatgtaaagggtttttaatgaacctggcagttgagggaataaaatatagtagtataagaatttgagtcatcggctgggtggggtggctcatgcctgtaatcccagcactttgcgaggccaaggcaggcagattgcttgaggctagcagtttgagaccagcctgggcaacatggcaaaaccccgtctctactaaacatacaaaaaattagctgagtgtgatggcacatgcctgtaatcccaactatttgggaagctgaggcacaggaatcgcttgaacctggaaggcagaggttgcagtgagctgagatcatgccactgggcatcccagcctgggtgacagggtgagactccctctcaaaaaaaaaaaaaaaaaattgggggccatatgttttgaggagagatgtaataagaaatgtggctgggattttc

SEQ ID NO: 107366 - DNA, 1644 bp, Homo sapiens
gctaaggatggaagtggagagactgtactgtgtgagacacaggggcaggagatacagggtgtgtggcattagagggtggggggtgggtacaaaatttggctctggagataagtgggaccatatctgggaggtgactgaatcttagactatggattttcttctcatattcattggacatgagggataattgaagagaattttcatgaccagaggtgtgtttatgaaaatttgtcagcactgttgagtataaattggagcatcatgaaattggtaatgaggacggtcctaaacaagacgttgtagtagtataagtaagaaataattgaagcctaaactgaagataatggcagtaggaatggcagtaggcaaaagaaggaatggacacaagagtgatttcaagagactcagcataacttgctgccatattcatttatatttccatgaatcctttttgtcattccttaagtacatattgtacatgtacgctattttccttcaatatattcagtggtggaagttaattgattaaacaattttagttttgtagcatcaaagtctgtttactcttgtgacaaataactgagttcaggtttgttacagaatttaaaagagttaaatataccatttgcataaacaaaacaaaagggaatcaacagtctcagtaatactgattaatgatttaggtatattgataaatcctcttatctgggttctatgttgttagttttattttccgtcacattttgtttttcttatctctgatgcacgtataaacataaagcacacaaaagctttagttgggagaatttaattctttctgaaattctattcggattttgagtctcactctttgatttctcaagttctgagtcatgagtgtttgggcataaaaacctgatgatctttttttaaattttcattagaaagaattaaacaagcaaacaatcagaattgcttaattgaactacatttgaaaccaaattatagaggtagttataattttatcaactttttctgtcctacgatctttcttattagacaagtctgataggctttgtaagcagtatatatgacaggttttcattgaaatgctgccagtgttgaagaggagaaaagctgattttccagaagtgagaaagacaaggaaacagtcacaattttttaagattagttgaggaataccacacttggcttcttgttattgaagttttttggtgtaggtctaacaataaaaatcttgtaatattggttccatatgtatagctgcttacttgtttcatgtaatactttcatcacaaaaaatatatatctaatatttctgtgataaattataaatacagtattggttttggtccttggaggaataaccttacaaacctttaaagacttttaattttaatttttattttctttccagctttattgaagtataattgacaactgaaagactagttggtaattgaaattaggactcatttttatagtcagacaatgttaatatttaggaggagaaatgatgatttattaataactttactcaaaataccattgcataaaaattatacatataataaagtgattaaggggcacccactttttatttactaataacttagaatattcagtaactattgtttgtaaaat

SEQ ID NO: 107367 - DNA, 1026 bp, Homo sapiens
aaaatagtttgtgatatgaaaatgtatatgctcaattgctgtgaccactaagggagacaggtatagcaagagaaataatggttcagtctggaggggaagccatcccttctcgcccttcccctacgttgtgtggatggaaggtctccaagagaagcatctatgagattaggccagggagccttctgtttcagggccaccccattctgtgtggttttatttgtcagagacgctgatcctaacagaaacagctgtttcagtgaagttcaagcttgccatctattttcagtagaagcaggaagaatgtcagagacaatgtttgcattttagggcctttttataggagcctaagataaagctgtttaaaccttctgtcctctgtcatttaacttatcaaattcaagcagagccttttaatttcaacacacttaacttctagggatgaatagggcattgaacggattctataaacaagtacttttctgagcgataaacaggaacaaaagcagcacaaagatagcatgtcaacaaggtagggtgtattgtgagaagggcaaggcttgagagcctaatctatgctattctggggaagcaactatgtttgtttgtttgatttaaggagcagtgaagttacagagagcagaaaatgctgatgtacctgaaggccattattcacttctgtagacagtgctactgggtgagaagtgaataatattagtaatatatgttcattaattaaatgtagcttttaaaagaaaacacaagatggaaaagtgaaacaaaatggatagagttgtttgggtactaagagtagtagagtagattgaagaccatttaaatgggaggcagattttcccatgcatatctaaaaaggtcctagtgttatcccttcactccattttagatttgtttgtttagtttggccctgagtatgctagaacagataataacctcccagcaaatgtaactgagtgggaacattattttagttcactttcaaaagaagagggagatccaattcataatacc

SEQ ID NO: 107368 - DNA, 1290 bp, Homo sapiens
aaattgaaaggagcgccatattatattacaggaacaattcatgtcctactcttggtttcctttcaaagccctgtatttgtggctgtgctaataaattccatcacattcattatgcatagctgtaagtgtatgtaaataccacgcatcttgcattttgaagaaaaccagggagtgaacacacatagtctttcttgcctgggattcatttattttttaaaattcattttatatatgaatgagaaagttgagggaacatttcctttcataccaacatagaaaatcctctaataccacatcccctgtctcctggtcctgggagcagtaatgggattttctgggtgcatttgcatcatgtgtatcattgcttttctgtttatgttcagaagccttttctgccaaggcttccacaatcttctgaccccagcagcaggtacatccttgtagatgtcagtgtaagtctttatattatgaagagtatttgagagaatggtacaagaggatgaaagggtgaatggaagttgggggcaaaataatggagggctaaagaatatagatttgatcttacaaaagctgtcgagaaaccattgtgcattcttaagcagtgaagtggcaccatttaaaatgcacatgaatgattagtctaatatagtttgtctgacggcaaagactggagagtggagtaagaaatttgttggattttataccaaaaagctaaagtgtttctaggatagcatgtcttgtttaatattttatcttttttcaaaatggagatcatgttttatactgccttgttatatggttttattacttctttatgaatgacttaatagagcattttgtgtatgtggtaaatatttgtatgttcgtttctctgatcaagaagctaatggattattttgaagtatctactattttgtagcactacatgagttgtacaattaacttgagtccccataaacaaaattggggacatgctggatccatgtcatgctgtcatgctggagccgtgtcatgctggagccatttcaaactccagtgtgcttgacgttaaatttcaaaagtcaaggaaattgttgttaaggagcttagttgaagctatcttttcaagaatttaatctactaattcattttgtttaatttttaggaatttgtatgtcattaaaatactctcaaaaatgctgttctgatttgaaatgaaatacgagtataaaaattggggtcgatctttggtacattgtttattgtactggaaaatgaatgcttaacattagtctgtgatagtgatatcat

SEQ ID NO: 107369 - DNA, 1042 bp, Homo sapiens
tgattctacatattttcaggggagggataaagatctaagcataaatatcacctccttagatgggtcttttttgaccatcctatcaaataggttgtcacagttagtattgtgaatattttctgatgatttattttctcccccaacaaattttaactgtctttcaaagtataattgaagttctcattcttgaagcattttctgaataatcaagtgctagaacttgagcattttttagcttttactttttgtcagaacattgtagttggtggtgtagagacagttctatcttgatgcttcaggttctcatttctacttgagggaagctcacaattttcaggaatcacggaggatggcatttgagcccgcctggcggtctgagcccacctggagatccccatcctttcaatggggaaatgtatttgagctattccccaagctaatgctcaggtaggagatacaggcaggaaaagatgtcatggaagatattttaaaggaatgggagtatacgcctagcttagaatacaatatgtgaaagcatattgtattgtggttctttggtgctggatatctcaggagtggaggaattgaaggattgtgttttcatttttacactttttctcttctgctcttctgatttttcaaccatgaacatggttatgtgtatggtctggtttgggggaagtatatatcagaaaaaataaaacaagaaaggaagttactctggttaccatgcaatttcgtatttaaatgacaaggttttgcattttggatatttcatgtcagccgtgtctcctcagctaagttctagtcacttagaagtttggtgtcactgaattataattttggtgcttcccatgttttatatttacactagactacatgctatatggacaatgtgcaatcagttaatatctgaatgaatgaattgaccaacttttgagaacagagtttgacataaatttggtggtttttggttcattgtgctttaattgaaggagaagtagacattgtacttcacattaggctactctttagataagct

SEQ ID NO: 107370 - DNA, 1050 bp, Homo sapiens
tcttgaggcagtgcattaatacgcgtgcacaatgttttttaagtcttattgtgggaattgtcttgtgtccttgttgacggaattccttaatacggatgaagatttccaaacttgaaaactagtttttaaattttagctaaggctattttgtatttatgtattgcttaactgctatctctttttctttccttttaaagtaaaggtcggagggttggatctaatattcttgctataaatgatttttttttttttttggtcttgttttgttttgatgtgagcatatcagctttgagggacatctgagatattttgaatatgtaggcagggcttttaaagaaaggaattgctgttttcttacatccaccatgcagacttagacttgacaggaaaacagaggcatgtgtgttctcactgtgtattatcgttgcgccccctcacatagctgttagggtttgtcagcagtttgttttgactcactagaccaagggtgggggtggttttgtgtgtttttgtaagttaactagtgtgggatgtcagtaatctcagctttaccattttagttggccatgatcccttcatgtaagaaaccgtcatatttgccctatttctcaggccatactgtggttccgaaacttgcccgtaaatatttgtgaaatagtttttcttttcttataactctggaggtcaaaacccagccctaagataaactcctgtttcatattgcctctgcggggtgctcatggtatgtccccagactaatttgggaacctccttgaattactttttaaaatttatctggatagttcttacacaattaaatttaatttttatttattatagcaagattgaggacactcccaaatccacacttcatttcctgggagatcatgttagacacagataactatgctaaattattttgatccaggtaagcgtgttagaaagagaggatggggctgctggacttcattgagaggatcttttgatttcagaaaccattagtgaaggaaaggtgtactagacagagctgtcataacctttttactattt

SEQ ID NO: 107371 - DNA, 1089 bp, Homo sapiens
ctcccaggttcaagcgattcttctgcctcagcttcccaagtagctgggactacagatgcacgtcaccatgcagagctaattgtttttgtatttttgtagagatagggtttcaccatgttggccagactggtctcaaactcctgaccttaggtgatctgcccacctcggcctcccaaagtgctgggcttacaggcatgagccactgtgcttggcctacattttttattcttgtttgcatattagaaaaaaaactttaataattaaagaaggaacagttttacaaagacttttcatttcaagctcattatcctttaaaagagaagacgattatattttcttctttttttttttttcttgagtaatacttcattcacttttcaactttgactactgtaactttaggtttagacccaaataattggtttcagtaggtaaggaaggttgaaattatgtgatataagaatgatattgtttatctttgttatcagtgtctaaacctcagagatgagcaccaggtagtccaattccattttcctgtgtggagaagctaaatagattggaggttacatgacttgacacactggggtgtgcatgtaatattcatgtgtgatatatttctaaatgaagtttcgttaccagttggcatgtctgagcctacagctgttggcatatgaagggtatcagaattataatgcctttttcaactttgtttcgggaggactcatttgaacaattagcacattttatggttgtgaaaatgaactgttgttttttctcttcattaaaccagaattaatattgtatgtcatctggtcagtcgatgcaacttttttttttttctaacacgatgcttgtattcattaaattcagaaagactatttaaagctttatttttcaagtatacctttttctgtaaatatctcttcctttctcactctgtttatgtatatacatgtgtgaaatattacttgtaactttttaagcatttaatttgtcttgatgggcacagatttttaaaaaggaagtaagaaagattacctagttttttctgaactatattaatgataaagcatctcagctcattttaca

SEQ ID NO: 107372 - DNA, 1032 bp, Homo sapiens
gtaattcatttccttagcatgttgggttttatcttcattctgttcccttcacagttgtggaattcctgttgcagcttcattttttaaggacacaaggcaggaaaggggaagggcaactccacacgtgtctgtcttcttatcttgaattgcaaagctgtcccagtaccttaccacctacttgcttctctagcagattctcttccatattatttaagccactgggtcactccaggttacaaaggtagcggtatattgaaactttgaaatttcagcctccatagtaaagaagggcaagggagaaacggtgtttgtttagtcagtctaaattgtcaaaggagatagccagatatctctttttgagagataaacagacactcttcatttaaacatggtataacttggctttaaggcatatttctttaaaaatatattgtcaaggactgcgaagagcctgaagctactttgccatactttcagggctagcagaagacaggagaatatttggtcggggaaaatgaaccatttattagtcacagagggacagcattaggcaaggggtcatcacttgtgccaggtcaccaaccctcagtttctataggacagtataaagggcaggagacacctgcatgtgcagtggctggcattacagatgaatcccaagcctaaggaccctgaatttttataatggacagtaaacctgcctgactcttgctctggaaggagacattatctttattgaactggactgtaaccctctttttttttttttctccagaggaaaacactgtccctattatctaaggctgtttgatacacaaatgttcctgaaaggataatttgaaaggctggcagtatctggttgcaagacatgaaaaaatgtgggagacctatagatacttctccccaaaatatttatgttctgttctttcttaaaaaccataatgtatctcatgttctcagttttgaatgctacttaagagtaaggatatttactctattttggattattggtaagcttaaaatcttgggttc

SEQ ID NO: 107373 - DNA, 1003 bp, Homo sapiens
gggaaactagaggaatgaaaatatgaatttttgatacttcaaaataataatttttatcttggattcagaagacaaatagtaatcaatctcttatgtagaagtatgtctgccagataggaagtagaatttgctttagaaagcttgaaaaatcttctgagattgatttattgtaaatgaataaaaagtttattttatcttgatgagaatgtttttatgcatatttcaagcatctgagtggtgtgaatagacttttctaaagtttggaaatgaaggggctcatttctttaacacaccatgaaagtagaggccacaagaaagttatttagacaaatgttttcaaagttaaacaaagggagtctgttaggggaggcaggtgagagcttgcagaatctttgactgttaaggactttatggccctgtgtatttggctaactgcacccctgctgcttagctagctagatacaatgtaattttcttgttgatttttcaatgaaaagtgaaagttttttttttttaatagcagtttcctctctagggtatattttacaaaatacaaaagaaaacgaaattattcagatgtaattaaaatgaattccaccattagctttttaaattttaataaaatgcttacttgtaatacatttatttgctatttatttcatttatttagtttagtttttttttttttttctaagccccatgttaatactgttcagcccccaactcctggtttcttagtaactaaaacttattgcaagtattttaatttcttctaaatcagattatatattatgcacatatgatatttggatattaaaattgaggacttttttcccccacagatgagcatttgttaaatgtttatatattcctgagaatgataccaattattatatatattaagcaaactcacaagactcaagtgaacttggctttgcagtggaataccgtttatgtttttcagtcttaggtagcttattaaaattgatgttttcctttcagt

SEQ ID NO: 107374 - DNA, 1049 bp, Homo sapiens
cattttctaactcagtagatgttttataatttccatttgataattttgatagttttgcttatgtggaaacatttcatgggagacatttaagttttgtttgataatgtatagattcccatagattttgatagctctcataatgctgactattcacaatgaggtcactcattctgtgtattcttgcctgcattttaagtgtccaagtgaattttgttcactgtcctaaatgcaaccctaagacaaaatttattggtttctatgctgatatagcatatccttaattggatattactgttatccttgttctgtttactgacaatgttctgtggccagctgtgtttatgcagaatttacatttgataaatgtttcataacaattcataataatgtaccattcttggtacaccataacaggcacataaactttcgaactgtgtttctttttctagtaatatatttggacacattcacttctaggttcccttaggattccaaatgcaaactgagtctaaaatgtgccattgcacatggagctctgaggcattttgctctacagaacacagaagagtcttcttagcatgttttcatttacagagtggcctcattctgaatagtcagcattatgagatctattgatctatgaaaatctgtacattaccaatcagaacctaaaagtctcccatgaaatgtttctacataagcaaaacaatcaaaggtagttaggcaacaaagtatatggtttagtagaatgactccacctaatcggtatgacaacgctggttactgggaatattataaattcactacagaattgtttctttgattctgtaagtagctcactagggacattactataattgagctaaaaatgaaggacagtaatagtagaaacagtaatttggagttaattgacttaatcagtattacttcatgtgattctgcccgctttattgaagaaattgtgctggatgagtacatgaatcaaaatgcatattttaatgttcctgcacctctgttgtgtcaacaataaatgcggattgttatacatt

SEQ ID NO: 107375 - DNA, 1023 bp, Homo sapiens
attgtgggcacctcaggtatttctaaaaccatcttttaaaaaaagttctattacagatttaaaaaatattgtatttatttaaggtgtataacatgatgctttgatatatatacacatagtgaaatggttactacatcaaataaattaacatatccttcaccttccataattacctttctgtggtaagaccatttaaactctgttctcttagcaaattttcagaatacagtattattagctataggcctcatgctgtacattagatctccagtattaattatcctacataacttcaaatttgtactctttgaccttcttctctccatttcttcccctccccatccctggggcccacccactgttctactctctgtttctttgttgcttaactccttcttttaagattttgcatgtgaaaatgagatcatatattaatagtatattctttctttgcctgccttatttcagtttcattgggattgctgacagtaattaaaccattttacaggagtgactgtatgcctcacatataccttccattaaacccaaagtaaatgtgtcttcaattcaaatttccattagccagattccaaaaatacccacagccactccagtgccacccaacaggaggctttagccaattatgtttaagatattatactcttaggccgggtacggtggcgcacacctgtaatcccagcactttgggaggccgaggcgggtggatcacaaggtcaggagttcgagaccagcctgacaaagatggtgaaatcccgtctctactaaaaatataaaaattagccaggtgcggtggcaggcacctgtaatcccagctacttgggaggctgaggcaggagaatcacttgaacccgggaggcagaggttgcagtgagctgagatcgtgtcactacactccagcctgggtgacagaatgagactccgtcttaaaaaaacaataaaataaaataagatatactcttgacaatttgacaaaaaaaaaaaatacaacgagggccttagaag

SEQ ID NO: 107376 - DNA, 1329 bp, Homo sapiens
tatgtttatttttactgtaagatacagtaaatagaaaggcattgataattactaattggcagtatataagtgtgtagtacagaaacatccccctcttttgtttatcttttcttatttgttagtggtgaaggaagtggctcataatatcaacattgtcctgatgattacatcaggaactttattattagttctgaagttaatcccttgacacattacctttttaaaaaaataactgcaatagcatgaatttagtttgtgaataacagaaaatagcaattttcaagtctaattggtaggtatgtaaaaggcagagttaagtgtatagttaatatttttttcttatgaagcctctttgcaagggtagatcttggaagtataaatatgaacacaagcttcaatttcagtgtgtttcagctaccaataaagtaaaataactatttttacagggaataatgaagcagtcttgggttgtaggggaaatatctagtgagtatgtagttttaccatttcttggcctctggaatttaaaatggtcaattgaaattctttccaattaatgttctgttttcagagggcaggcttttgctctaaggtcactgagaataggagagcgtaattgctcagttgtgttccttataagatgtagagtgttttgtaacagaaaatcagtagcacagagttagcatagtctatgttttgaggaaaagaatagtagatagtagcatatcccaaaacatcccattacagattttctggccttagctctgtgtatgtgtaatttgatagccgacccagaagccctcacatcagtggatgcttatttgatacagtgatagaagtattaatcatgaatacatatctaggttcaagtgcgccagaatgaaatgtggagtctgttctgaagctactcaagagacaaggtttcttaaacacttaataaacattttttgagggcctactgtgtttccactgagtgctcgttactggggatatgaagctagacaagacataatcccgcctttgacctgtcaaggaactcagagaacagtatcagagccaaacacataaatggataattgccatgtagtatggaaagggctatattacaaaccccaagtacagtgggaacagagtagagaacatcctccttgtttttctggccagtgttgagacagttttctgtctggattctgctggccattgccttttaggaacagcattattgtgttcttgttggaaatgctgaggtgagagtaaggaaatgattactaatcagtatggttggaatgataatttattaatgtgaggttcctgagcatggttttcata

SEQ ID NO: 107377 - DNA, 1994 bp, Homo sapiens
catttaaagaccagaacccgcaggccggggaggagggagagggcgtccaggcagacggcggtgaggactgcagcaggcggccgggaggcgcgtccacccaggcgccgagcccacagtgtccctcccgcgccctagacggacggtgctgcgggcacgggagggacactttgtcccctcccagtccaccttcctcctgcagctcagacccgaggggccgggaaggggcctgagcagggaagggacacaggcgtcctgaaacaaagctttgggttgagggcagaggcgaggagccagagaagtgaactcctcctttccgtggccgctcttgtcatttttctcttttctcttttcaaatgggctatttgtgtgttaatttcatttggttcttgggaataacgactcaccgcgttgatttaaagaaaggtgttcgtgtgtccgtacttggtggttttagtgtgggacatgccctgcgcttttgttgacaacagagctgtcccttacgtttgtgtaggataatctttatgtttatgtaacttggagaaatctaacagagtgaaagtgaagtttctgcgtaaggctcccaaaatgtatgataggaccttcagttgttctggtattttgaattggaattaaggcaggaggggaagaacattctgtttttatctaggtgggggaaacctgtttaagttttgtttgttcttttttttttttttatgagttgagtattagttcagccttagctacttgaaacgtgagcaggatgcatctttaactcttagtattgtaaaagcaaatctaggatcactgctcttaaaactactgtgtgtaaagattgagagtgtaaattcacaagcttattgataaagatgaatccggaacttttggttttgctctaatcgatggaggaagatgcagtggtacaagttagtctctagttttctggtgggtaaatattttcaaaaccaactaacttttctttttttaaatctgccttttaaagaactaaaattccagatggcaaactcaatgaatggcagaaaccctggtggtcgaggaggaaatccccgaaaaggtcgaattttgggtattattgatgctattcaggatgcagttggaccccctaagcaagctgccgcagatcgcaggaccgtggagaagacttggaagctcatggacaaagtggtaagttctgtctgacgttgcctgtgcgaaacactattcactttgtctgtggtttctccagatttatttatactgttaattaataccaaccattgttatggcaacaatcttttgatttcaattcatcatttttcttcaactctgtgttttttgaaaagttggattcaaagacttttttgttttttaacctttcatcctttctactctttaaggttcagagttcctctacatgactcagtatgtaaagttttaccattggctgctttttgttggtgtatggccatagaatgcttggaagtgtttgttctgtcttctgtgaggttgtgttgctcttagataacaaaagagtaccagcaggttatttaagtctttgaccactcatgacaatcatctggtatgatactgaaaatatttactggggaaagaaacagattagttcttaagtgaagaagcagtagttgagggagtttccattttcatctttgagaattcatcttcattaagaaactttttttgttgttaatgggagagttaacagtttctttcatctactattccattttgaaacaggaaacctttcgatggcacattgtttattgtgaaaggaaaatttatgttgggggtggtgaggctgagagtatcagaaacctctgtggtttctgcatgttgctttcagacaaactataatttcacaagaagaaatcatgatgggtgtcagtatccagagaagtcaatctgaataccttacagagatttactcagaaactgtagctgtcagtatcctaccttactaagtatgattataaaataaa

SEQ ID NO: 107378 - DNA, 1030 bp, Homo sapiens
aataggtttcttattttagcaccaaaggcaattctttccttgtagactgaagagaagccctaaccagtcagttaaggaatagaacacagtagctaccattttattctctctcccacaggactctggaacctattttattttgatgaacagctatatattgaatgccattttactagtgttagttcatttcatcctcataacaaccttgtgacgtagttactattgttatctcaatgtacagaggagaaaatgagacactgagtgggactcagggattgctccaggccacacagtcagcaggaggcaaagcccagattcaaatgcagattactcagctccacaatccacatcctcacaggaggctgcactccttgcccaagcgtcagacaggagcaaagagaaagaaggcaaccagctggctactttcttcccttcttggatgcctccaacagggtgagaaggactaaacaaatgaccaagtgtcatcccattttggacatacttaaaacaccccatggaatttttattctgactttcttctgcctgtgtggcatttatgtttaaataaaagagaattcaactcgtatgtctgatatcttcatgactagtttgccagggatagtccccatgtacactttgttgtatcgttgacctgttcagtttagcatttgctcagggatttccatttttaacctagtgctattagcaacagttgtgttaaacatgctaagatgggtctggtgaactttgacttttcgagcttcagtctggtctcagcaaggagtaactgagattttgtgcagtgagcagagttccgactttaacacatggttaaatctgattgacttccaaccctctctaaacacaaagtaactaacagcaacttcccaagtacattgctacaagctgaatatttatgttccctccaacattcagatgctgaactccttaccccagtgtgagggtatttggaggtgggacctttgggagattcggtcttcataaatgggattagtgcccttataaaaga

SEQ ID NO: 107379 - DNA, 1014 bp, Homo sapiens
atcataaagtgtaaaaaattggagaatgctagtattcccatttctaattattatactgtgtagtttgcagtggtgtcgtctctgggtatgttactatgttagtatagccttaattttaagaaaaactctgtttttctgtttggctttttagttgtcctaatgctttgtagtactttggagtacaaaatccaaggagctatcttctttcttattccaacattttaaaggtgataaagtgaaatattgcactggcttttcctaatagtgctcaccttgagagacatgtattatgatggcattttatgtttctaatggaatttgcacccatatctctgtgaagtgaatgtgtatttatcccttgactgtattttgctttctgttattagtgtcctctctatcttgggtgtattatttttccgtttcattccatctatacaatgagaacagcagtaaagccatatgttgacattgaagggggtcacagaattaacatgaaaatgtttattatatctaattttaaattttatattatatctcttatttaagaactgtaaacgtcttattatgcatggttttggcagtgttttttcttcagcagtttgattttggaatcatttcctttctctgtttaaagctacaggcatcctttttcctgcatgggtttggattacaaagatcttatttaacttcccaaatgtattccttctgcttgtgcgctatgattacacacaaaatggaaaatgtccaaaaggcaatcataaaatgaagtggatttttttttcttccttctctacctaggtttttataactataactatgataatctgaggagaaaatatttattcatttttttaaatatttattgaaggctcccccagtagaaatgtgtactgttgctgcagctgtttctattatgccaaaagccagctagaatacaaaaggtgtttaggaatgtttaactgtaagattgagaattttatttttttgggggagatgggtacttctctttctgga

SEQ ID NO: 107380 - DNA, 1123 bp, Homo sapiens
gttttctaacctgcccctggggtttctgctgtggtaaattccaattctctgtatttgcttgttgctctcttcaagtttggggcagtggtttgccctgtgacctcacttctctgacagcgctaagtgctgttgatttttcaggttgttcagctttttgcctcttgttaggaagtgtgacaacttctaagttcttcacaggccagactagaaacggaaagtctccagttctttactttttaatcacagatgtgagcctgctatgcagaaaaattgaggcaatgtccatatattcatctgatttttgtacctaatgctttggaaaccttttggataaaaatattaatgaaatataatttttacattctcctgaaatagagcagaataagcatgaaagaagtacagagtaattctagcttcatgttggtatgtaaaacctgagataagcaaaattctaatttttaaatcactcactatttgtgtatggtttcaaaggcattatgaaatgtttatgtagacataataccaaacatgaacaaaattcactcctacctcatttatcccctgactcttctctagagcccttactgttagtggcactgaacccagtttggtggtagaaggaagacaagcacaagttgactacattttaaaaaaaattttctttgtttgaatagtcacaaagaggttttgttctgaagctatcaaagtacaaaatgttcctaaactattaaatatttcaccaatatggttaacttttccacatggattataattcctgaaagctcagaaaatattttttggagagactcttgttctctgagacagctctgattgttggcattcagtaagcaatgcatgctattttcccaattttggctccccagaaaaataggtccctaataccttataagtattgtttccacacttttatgcatagaataatataactcaatggacataaggatcaaagatgctatgaaaactcataggtgagtaaaattagttttgattgaggaatgaagacaaagatcataaaagctaatggcattaaacattttaagaccagtagtatgcaccaacagctttaaaaatctccatgcccatttgtctaggtattccactt

SEQ ID NO: 107381 - DNA, 1040 bp, Homo sapiens
tcccaagtagctgggactacaggcatgtaccaccatgctcagctaattaaaaaaaaaaaattgtatggtctgggtttcaccatgttgcctaggctagtctggaatgcctgggctcaagtgatctgcccacctcagactcccaaagtgatgggattacaggcgtgagccaacatgcctgggcttatttagctttcttaatatgtgtctagtagaagaagatctcatttttagctccaaattttcattgcatccttagtatcatatagccttatgatagcatttttcaaagtgtggttcactagaatcatggaggtgacttgttaaaagctctaattcctggccgtgatgtggcaagtatctgaattttaaataaatgcccaatccagctgatttttatgaacatctaagcttcagaatgactagaccacacaaattatggtgttccacaaataagctatactcctgaagctcggtcaggttgtgcttattacttaaatagtaacttgggtgatatatttatgtggcataccctgacaccttcacagaacataaacttttttgtactttatgccttaacaaccccttccaaatcacttgattaataatgattaactttctcttctagccttgagaaacaattgtctttctctgctttttctggtaacagctaaattgttaagcttatcctttttactaaagagcaggactcggctgtgcacctggctcacgcctataatcacagcactttgggaggtcaagtcacttcagcctgggcaacagagcaagattctgttcaaaaacaaaacaaaaacaaacaaacaaacaaacaaacaaatacagtagggctggacggccgagtgcagtggctcacacctgtaatcccaataatttgggaggctgaagtgggagaatcacttgagctcaggggttcaagactatcctgggcaacatgatggaacttcatctctacaaaaaatacagtacaattagccaggcgtggtggtgtgcacctgtagtcttagctacttgggaggctgaga

SEQ ID NO: 107382 - DNA, 1123 bp, Homo sapiens
agagggcgagggagaaggggagagagaagagggagggaaggggggggagagagggagacagagagagagggagagagagaacgggagggaagagaggagggggaagaggaggagggaggctgtgtcaggattttgcttgaatgtgggattatgttgtgtcaataagtttaaggtggagagagcgaggctgagggtggtggtggaggggaggaggaaggccttggccgtttaaagtcttatttctgaaggtaagttacggctttgcctggtcgcgatgacagaaaacttgcagatcctttatccggggatggggtcgatgcctctagaaagagctccctagccctcttaagccacactcgtgttacactgttatttgctgcgatccgggtcgctagtaaattacagaaatcagactcgaggtttcttttcctcctccacctcgtctcgctcactcaccctctgaaatttattatcatattttatttattttttggtattgtatgaaacttaacataactgagaccgaacccgagtcctgtaatttacaaggaccctgaatcccagaatctggaacacgtttatgtgtgaaatagccgcgatcatttctgctaaatgaggaaggtaaaacgaaacgatgcaaaaagctaagacacaacatgtacgacagagggggggggggggagagggagagacagagagagaagctattttttgctttcctttctgtaggaaggaaaataaagcgtgcattccccttccttcccagtgtgtagggtctagtcaatattttaactgtctgtggacaaattagtccaggtggatcttgttgaaaagtttcgcgaggtggggtggaggtgggggggggggcgaaggggaaggtgggtggaggttgtgggggatggggacggagcgagctctgcctctgctaatggtcattggcctggggctttgaaaccattgcctgtcctgctaatgacacgtccagttctcttctcccggccgcggacgccgggctgccgttcccggggtggctgactgggactggggtactttccccgcgcggggaggggcgttcttcgccatctcctggggttgcccactggcggcgtgggggcccccacgc

SEQ ID NO: 107383 - DNA, 1613 bp, Homo sapiens
gtacagggaagcaggatgacaattagtaatgacataagggtctttattgttcacagaggaagatgctttattggggttacagcaccccagaaaccttgtctcactgagtttcccacagcataagtcagtttatgattcttagtgtttagaattcagctgtgggttattattaagatagtaaatattcattttgtgtttatctacaagtaattgtcgtttcaaaacttattctcaaatagacattttaatttataatgaaattttacatggcattgaaggtctagtaaatttaatgctagacaatactataggaagagtgcagtgtatgagtggagagaattattaaaaacccaaggaagcattgtgcagaagtcctctaattatagtgactgacatttgcttactctctctcaagttctctttcttgagtaacctgtggtgtttgtaacagttacttttggggtggggaaaggtgggattggcagtgtggtaaatctagcgtttagtgcactaatttgattcaaaattgatcataatttcttttaaaacttacatgtttggagaaattaggaacaattcggtagcctgtaaatttaataaacaaagactttgagatctgttgttaagtgcctttttcagatatatgactcccaagtggaaaaatctgcaaaatatgtgtgggacagtaagtgtgtggaaaatttgtgagaggtaacagtgtgggtaagaactgagggtttacagagcatttgaaagcagcacagtgagcctaatctgcagaaaaccaccttgtaagtttgcccctccattgtaaaggaacaccccaggtactcttgagttgttgatgtttggaaactagtactaaattgtgtaaatcagctgtagtgctttgtaatattaccatagtgaatttagagattgtattttgtgaatgaaaatgaacttgaacttacttttctgtgaaagaaaatttagagacctcatctgtggtgtttcctggattgctgacataatgtgtacattaacaaaattattgtctttgtattaagaatataaaactgttgtcttagtattgagttagaggactagacctttctggtagtgtccatttggtaacaaaatatactttcatgttattgaagactttagataatctatgtaagttttgcattgaacatttagaaaatctagagaactttagataatctgtatatgttttgcatcgaacattttctatggaatataaatattgcattactgctgataattaggtggtttgttcactaagagctcagaatacatcacatacatagcaggccaatcggagtgtcaaaatgagaaggttctataagttgaatttagtgcacactaaaatacatggatttcattgtctttgagtttttttaaagcttgtttgaaaagtttcattttgggcaagagtattcaaaatgcattcttgattactaaagaacaccacatttatactgttaggcacattattttgttcattgcaacaaactgttaatattccttccccatggaaatgtgtttgaccaattcagaaattaatatgataggttagtaatgttgagaataaaagtctgataagtgct

SEQ ID NO: 107384 - DNA, 2053 bp, Homo sapiens
tccatcattaaaagctaattgtcacataatataagtgcaacttgatgggatttttaacgtaccaaaaattggcaatctgtgatgaggaaagtgggctctgtgaggactcaagttaagagaatgaaagaaaaaatgaagcttttataaatcttaagtggtagctaaatggaaataaaagcttttaatttttgtaggagagtagtgatagcagatcagtaccttatgttttgctggaaaccgaagttttcagaatgtgcttgtatgactgctagggtggtggtttgggccactgaagactgtacagggttaattccttatgtttggaaaaatggtaatgccttctttatctttgtgctatccatggagttattttcttaacaagagcaataatgacctttcttgctcctctttagggaatggcaattggtgggatattcagtaggaaatccattaccctgtctgtgtcttgggtagtttgtggtgctcccctggtccagtttgggtcttgctcagtaggtagtgatgatgcattaagtggataaaaccacagtcatgctggggctttcatttggctcagtgacatggttgtaaaacacagggtttcaaacaaagatttttgaaatggtgctctcttactaatcctcctcacagtttggtagaaagggcactaaaatgttgctggtttgtaaaaagtagagtgcttgtttatcgtagctcaaaggtgctaattgtttctagcaggagtattacacatgaaacctcaaggtcatgcttaacccactggctactgaacagtttgactgcactgtaatacacaacctgtcccaagctttcatgcagcttcctagctcggactcattagataacgttagtttgtttgaatcagcacactcttctgtgccttctgaagatctaagacctgggagctactgaccatccatattttcattccttaactcctaagactgtgccaagatgttacgtcttctctagtcattcctgcctataaattatttgcaattttgttttacctttactactgtcataaatctaggaaattttagtttgggcaacttaaggaccatagtttttatagcccattgtcagaacactagttatttacttactttttgtgacataaaacccagattttttagattccatgatacacagaaccatatgattaaatcagttgttattatgtgcttttagtgacaaatctttttagggctacatcatcttatcttacatgagacagataatttctgtaagaaacttgtatcagaaacatgtagcctgtcgtgaatttttattactttctttgttgtttattgaaagggttgggacttctgagttaaataatttaaaaagttacattttactgttataaaaatccatgttaatccaagaagaaaatttctgttaaatgcctttttgatttaaagtgtgtgaattagatatttgatcatgatttgggacctgaaaaactatcttatttctttataaatgtaatatagttactgtatctgaaagtaatatatggttcctttatcctctctactactgctgtattttcagaaggagaagcaattatattgatttgctgagtaacttcttactcaaccagtttctgttatagtatattaacataactgttctgttagtttatttattctgacttgtgggcatgaatattttaggtaaactttataatgttcaagatagtttgaaagattaatcaatgcttatttccttgctttacaaatgtataagagctattcaagtaacagttatctaaacaagttgttttataatgaggtagtataagagaagtatttccctagacaacatgaaataaagctcaaacatcctcaattttttttgtttgtgaatatttatagctttgaatctcagctgtagtcgggatgatggcataaattgtaattatactgcagaactgaaagaaaaatttgaaagaactgataatggctctaaaacagtatctttaataagctaatggtattggtgaccattcagtaagtatctgctcagt

SEQ ID NO: 107385 - DNA, 1018 bp, Homo sapiens
aacaactttcctatgagaccttaatgagataacacaaggggaataatctagcacatacctgggcatagtagatgctcaataccaagagtcaactgttgactcttggataaagtgattagtcactctggagaggtacagacaatatggtcagatgagggatcggtaacttttgacgctattgttggggaagtcctcatggaaacttgaaatgggccttggagttgaatgggatttgggcacatccccctgagcgtggggagatcaccttatttggctttgtatttttagcaggtggtacagcataggttggaaataatttttttagatgaataaatgaggggaaaggacagttttggtgaggggtaaaccgcaagcaatggcatgccagagattgggaagtacaacagagtttaggggctccagcagtgattcagttcagctgaagaaagagtaactacaagggaaatgtatcttctaagtaagatcagggtcagatcctggggaggtcatagttgccaggccaaccatgtaggatctaaagcaggcttggtagccaacactggtgacattggagcagggtatgggtggcaggagcctcagatgaggagactattacagcatcagagctggaagtaattactcatctagggtggccatagggactatagagacctggatagaggtaagtgatattttagaggcggaattgacagcacactaaagtaagtacttcaactgtagctcagtggaatgattttgaatgcctccttttgctataggaactctttttgagaaaatgaaaacctcaaatcaaatttcctggaacaacttttttggagagtttagcgctatctaagtcattctcctaggagctcttataaaacattatgaaggcaaaaaaaatgttaaataaagttattatatcaacaggtaatttacagcacagttcaatatttatacactgtaaatatatttttatagttcttttggaccctttgtatattctgtgttatacata

SEQ ID NO: 107386 - DNA, 1033 bp, Homo sapiens
caacaaaaaacagggggctatcttcatactccatattaatcaggtatgggctgtcaggggctgtcctagttgacagacagtgagagaggagcataatttcccagattctttgggcaagttggctctcaagcagctgtgagctgatagcatccaacaatcacagcatctgggcagtgggtatgccaattaggtaaagggggtctagatgggacattacactgagttacaggaagttatttaactagcttaaagttccacagctagtagtgggatttgaattcaagcagcctagcaccggagtccatctttctaaccattagctataccatgtgcagtagtcagaacaacagtagcaataatagcaggggcataactgaacaagggatgattcagagaaaggagttgcttctgaccggggggaaaacaaagaaattatcatggaagagatgtcatttgattttgctttgaagtagtagttcatgtaaaaatttatgtgagaggctttttaggcagaaggaatagcctgagaaaaggcatagtggcatgcaaatgtggtttgtgtgtaagaaagttggttattctgtttggcttcgatttggcttatcaaagagagttctgggagaaaagttgttcaacattggtttgaggccaaataatggatatccctagatgccagacaagtgaagatttttaaactgggaaatgacgtaatcagagtatactttagaaatattaatgtgacaacagatgaataggggaaattttaggaaaagaaactggatcagataagtaggagggagacaagtctggaagcaatcaatgtgtaggataaactgggacctgctctcagctgaggcaattaaactggaaaagaaatagattgaaaagatactacagaagaagcagtacagaagttgggggactgaaggagagggagccactgcaggtgctagctgcttaaggggataccagtccttttacagatataatagatacagcttctgaggtggagggtgataggagtgtgtagaga

SEQ ID NO: 107387 - DNA, 1021 bp, Homo sapiens
ggcatgtgttgtatggctgtggtcccagctacttgggaggctgagagttgggaggataacttgagcctgggaggtcgaggctgcagtgagctgagatcataccacttcactccagccagggtgacagagcgagaatctgtttaaagaaaaaacaaaacagaattctaatcctaataacactgactccctcttactatttccatccttggcaattttattatcagcccttttagctttcaatgactgcctctacaatgaagttctctaaatctacatatccatccctgagttttagttcagcattttccagtacttgcttgacatcttcacatgggatgcctcttgcctaactgcatgctccagttctgaactgcaatttctctacacactcctatcaccctccacctcagaagctgtatctattatatctgtaaaaggactggtatccccttaagcagctagcacctgcagtggctccctctccttcagtcccccaacttctgtactgcttcttctgtagtatcttttcaatctatttcttttccagtttaattgcctcagctgagagcaggtcccagtttatcctacacattgattgcttccagacttgtctccctcctacttatctgatccagtttcttttcctaaaatttcccctattcatctgttgtcacattaatatttctaaagtatactctgattacgtcatttcccagtttaaaaatcttcacttgtctggcatctagggatatccattatttggcctcaaaccaatgttgaacaacttttctcccagaactctctttgataagccaaatcgaagccaaacagaataaccaactttcttacacacaaaccacatttgcatgccactatgccttttctcaggctattccttctgcctaaaaagcctctcacataaatttttacatgaactactacttcaaagcaaaatcaaatgacatctcttccatgataatttctttgttttccccccggtcagaagcaactcctttctctg

SEQ ID NO: 107388 - DNA, 1195 bp, Homo sapiens
gagcatagttgctattttcctatacctttgaaaaacttagtattatcagactttttttttttccagtctgatttgcagaaaatagtatcttgttttaatttgaattttccatgataactggggtgatttcatctgtttattggccagtgtttttccccctgaaatgacctgcttatatgtcttgcccatttcactattgggctctcctttcttttctaccttttcttgatactatttttgaatgagctttacatatatagtctgtatattatttgactatatgtatgtatgtgttagacatatatttatatggcaaatattttttacagtttatttttttaactttgtagtgtcatgtctcatggggatgttgacagtttgcaggtagtcaactttatcaatttttccctttttatgtctttttgaactataagaaactctttcgtataccagtgtcattgatataggttgattcacacatttaagccctttaaaaaatctatctgcaatttattgttaatgttgtgagatgtagatgaatctttttgtccctcccatcatctcaatcctccacacagggggtggacagttgttccagccccgtctgtagtctagtgggcgttttctcttaatttgaatgcttttatcacgtacaaatgtttttgagatgtttttttgaatttacatgttatattctatcaatttattattgtatttctttggaaataagtgattgacttatagctttataatcctcttgctatcagatagagcaaattctcttatttcttttcacaattttttggctattcttgaatattcattcttccaaatgaatttagaatcgcctcttgattctgaatgttgcatttggatttttatctgaattgcatgcaactaatagattcatgtggggaaagttatcataaaatactgattatccatctgggaacattcactccatttattcaagctttttcttccatctttcaggaaatgttagtttttttcctacaaatctcacacatttttttcttgggtttattctcagatactttatagtttttgttgccatgataaaggggatttgttttcagcagttgattgttgctggtgtatggaaactatttgatttttttaaaaaattgatcatatatgtggccaccttgtaaaaccttttattagttttactagt

SEQ ID NO: 107389 - DNA, 1084 bp, Homo sapiens
attttaaaggaaataaacagctttggtttcctgtgacagtcctaatttaaaatctctctctctttttttttgaggtaaggtttcgctcttgttgcccaggctggagtgcaatggcacgatctcagctcaccgcaacctctgcctgctgggttcaaacaattctcctgcctcagcctcccgagtagctgggattacaggcatgtgacaccacacctggctaattttgtattagccgggagaccgggtttctccatgttggtcaggctgctctcaaactcctgatctcgggtgatccacccgcctcagcctcccaaagtgctgggattacaggcgtgagccaccactcccagcaaatctttttctttataagtattcttatgtttgttcagaccatgtatctctatttttggtttgaaaaatataaatagatagtaaaaatagtttaacagctatcatttcttgaatactcactctgaagcaggcaatatggttaagacctttggaagattatatcatttattcttctgaaaaaaaagttaagatttgtaaacatctccattttataaacgagaaatttgagacctggaaaggttaggtaggtaatccaatatcacacacctaatagggggctccaaacttaaacctggcatcgtcttactgcaagattaacattgtgttatatttgggtacaggttatttcactctttgcaatttagcgactttaggttgatcttttgagaaatgtaatttcagggaaatatatatcttagataagtatctattaaagtttaggctgatctttgaatgttatgaagaagagggatcatgttatttatattttggtactctcaacatgtagctcagtgtcacatatgataataaacactcaattcgttgaaatgaagtaaaggaaattcttcattgggagcttaaggaataaaatgggtgaaaaggtatggagcaatattgtaaaatccaccttttacatcaccattattaaagatattactaattttaattacaaattataacttttaaaaaatgtaattatgaatgagatgcaactgaatgctgaagaatatct

SEQ ID NO: 107390 - DNA, 1006 bp, Homo sapiens
tgtaactatgcaaacaaatgttaaaatatggaagacctaaaatctacctaatatctggtctgagtgtaatctttaaattgttattcataaatgaattcttgaatgagttttgcttaaagacaatcttgtatttaactaggagcaaatttaaaccaagcttttaatttttcatatccaagctgatgattttgccttaaaatgtctttgatcatatttttacttactaaacatctgtaaaatagttacattcattattatacacttatatatatattattattacacacttgttggcagtgtagggtggataaaagagaaatttaagacgttttccctgtgtcctaggaaggaaatggccttttcccatctcctttgaatctcttttggttatgcaggccagtctcttttatgattcttaaacttggaaattccccttctgtgatctttcatttgtgtcatgttcctaccaggtttgaagtgaagagactatattttcttctaggggcttagcagtactttgcatatactagatagctaaaaattgtggaattaagcatagatttttaaaaactagctttgataatataagtatatgccaaattataattagtggtttggtaactggtcttctgtgctgtgggcatcagctgatttattcagtttttatacactgcttcatactccgtcgttagtgtccttgaattggctgtttcttttactttgcaaccaggaacttaagaatttgagttacacatgaagaatttatttatcaacagcagggcagaatttatagaatttgttaaatctcattctttatcatgtactatgtcctctagggaatagttggctgatatttttagaaaagaattatgttattatcattaccattagaatgctttttttaaaattagaatctagattacctttatcaatttgtacacagtattattacatctgtagtggcatatttgtaaaatatttactttagtatataatgtgtatatat

SEQ ID NO: 107391 - DNA, 1101 bp, Homo sapiens
ctttatatatattatatataaagtataaagtataaattatactttatatataatatatatattatatatattattatattatatatattatatatattattatattattatatattattatattattatatatattatacatattattatatatattaattatatatattatatatattatatatatcatatattatatatattatatatatcatatattatatatattatatattatatataatatatatattattatatatattatatataatatatgatatatatattattatatatattatatataatatatgatatatatattattatatatattatatataatatgtataaagtataaagtataaattatactttatatataatatctctaatttattagttcttctgaacttagttcaactaactttgcagttggtttgtttttaacacctgaatcaaattgaaacaatactattttttctttagttttgcacacattttagaattaaaaatagtagttgtcaatttagtttgtgaaatttgtccattcaaatcttcatgtctggaaaactatatggtgggcaccggggatgatagcccctaacgttacactgtaatgatggtaattattaccaaataattaataatgtcattattttaattcagattgtcataaatgcttaacacagaacaatggaatatcaagaggattggatgatgggtgcagaattgatcaaaactttatggggtggggaaggcttctttaaaaagtgatttttccgttgaaatcttttttttttttttttttttttttttttttttttttgaggtggagtctcactcttgttgcccaggctggagtgcagtggcacgatctcagctcattgcaacctccgccttccgggttcaagcagttctcctgcttcagcctctggagtagctgggattacaggcatgcgcaaccacacccagtggttttaatagagacagggtttcactatgttggctgggctggtctcgaactcctgacctcagatgatctgcccacctcgtcctcccaaagtgattacaggtgtgagccaccacccccggcct

SEQ ID NO: 107392 - DNA, 1070 bp, Homo sapiens
catggttggagaattcaggggaggagtgtaagtccattaaaagaagcttataaagacttggtttaagatctataaacagtcagtaaactgctaaaaggggttagaaaggaaagggggagatattttatgttgtgttattttatttttttgagacacttctcactctgtgacccacactggagtgcggtaacgctatcagggctcactgcagcctcaacctgcctgcctcaactgatcctcctgcctcatactcccgagtagctgggaccacaggcatgcgccagtacgcctggctaatttttgtattttttgtacagatgaagtcttgctttgttgcctaggcgggtcttgaactcctgggcttaagcagtcctcccaccttggcctcccaagtgctggtattacaggacatgagctgcccggccagtaaatgttacatctactaaacacttttaaaagaaaggtccaaaccccacactgaaatattttattgaggcagagtattataggtgattgaaatgttcttagtacaatttcatggaagtaaagggaagatatttgaaagtatgtggtgaggagattctgaaactttccagtgtctttatgctggttagcatttgtaatcattaaggtgcaaaaaatgttatttttgaatatttttggcattgtatatgtaatttgtagttagctatgactgtggcttcatattagagattaaccccatcaagaagttaacagtctcccagtttagtatgactttcatatttgagaaaacttgtaagcttgtctgtttacaaaatgtaatctacttactgttcctatatttttcttaatgttttgggttaaaaatggtgtattaaacagctgggtttagtggtgcgcacgtgtggttccagctactcaggcgggaggattgacacttgagcctggggtgtgaaggttgcagtgagccgagattgcaccagtgcactccagtctaggtgatagagcgagaccctgtctcaaaaaaaaaaaaaaaaaaaaaaaggtgtattaagatgactgtatgttctttgtgagattactgattt

SEQ ID NO: 107393 - DNA, 1007 bp, Homo sapiens
tttggtcccctaccccaagcaatgccccagagtgagaaactgatgatgggtgagctgtgtgcctgattttgtaaaatgggagaatgaggggtttgggaaagggaaggtaagatagggtaatctactcccctggagcactctcagacaggtcagttttaggagagggtacttggaaaagttgacatggaaattgatttactacctgtgtgcctgcatatcctttggaaaaccatgtgcttccagaagtttgcttatcccagtttgaagactattgtgatagtcattggcgtattttggcatcttaattttttaataagaatttctagggggtgtgtgtgtatgtgtcccttaaacttagaacactgctgaccaaggtaaattgtttatgctgtctagggtaatgtcttaggtctttggtcttgattgcatctatgcatctgtttataaattgtcttttcctgcgcatgagtctttgcaatcctaattctctgtaagttttccagatcaggagtgacacttgaactacctgtagcttatccccctttatatcttgtgctagtcttactcacattgactagtactttggcaaagcagatctaaaatagcttaatatagggaactacttgcaattttgagtaaacaacaaacaattggccacagtaagattactttctgcttcccggcttatttattttgggtgtcagtttataaaattacaatagtacaaaagactgcagatataatttatattaattctttagttttacagaaaatgaaactagagaggttatgccaattgcctgaagtcacataggtggtaggaaaaaagtagaacctatgtcccttaactcccagtattataacctttgctacatcacaccttctgctgccttttggcagattgcattcctcacctcaatcctatttaatactatttctcttgaggactgattagcttttagtgatgcagcattattttttaaatggaaaggcatttactctctcat

SEQ ID NO: 107394 - DNA, 1049 bp, Homo sapiens
gggggaggaaggggatattaacaggtcagagtagaggtggattggcagagcgggggctggtgggaggtgggaagcttacatcatttccctgcaactgggctctggcggggctgtaaggccttactttcccctgtgtaatagtttaccagattgacagagattcatacaaggaaggaaaggtatggcaggatggatgttcacgctgtttataaatccttgctattagatgaaactgtcaataagtaactagaagcagccagtactgtctgtgcttcgctctctcccccagctgagttcctttctgctccgccccatccctgctctctgctgctcagatcagcttcctgcttctcatgaaagctgttcccctataaagctggtctgctttcactgaaagaattatattcataagtctgaggctggttttgtggaagtattgttggtttggtttcctttgggggatgaaggaggaggaaacaattttttttaaaaaaaaagtgggggcaggctgaaagagcaaaatcatcttgaattttgttgtcacatcgtgccggtgttataaccagctctgtagactgccgcactgaaaacatttctgtgagaggtatgtgcttgaaaaatggaaaggtgttggctgtggaacaaactgcccgtccagcagctgcttagatggctgtaaggtcgtaattctatctagtgttttgatatggaaagggtaatccttacttgaaacgtagtacagttaaccagcttaatggtaaaaaaggttaaatatgtgcttcgtccccacatcaggactcctgaaatgctggttcaggctgaaaacgtctagtcaaatccacagtgttattccaggctcttttggtggcggttgtctgtaaacaagatgatgatttttaatacgtctctcattatttatgaaccacatgacaaagattaatgagagactccaagtagcctagaagcttcagattcatgaggagctttttgcactgacagatggcaaaagtaaaaggaaatgggtgatgatttattgtaaactaaagtga

SEQ ID NO: 107395 - DNA, 1037 bp, Homo sapiens
agtttttagagggtgtgttacatttaagtggaaaaatctggaggagccactaaaatttagaagcatagcctaaaaccattgatgcctgacctatattaaggccagaagccttttgaacacacatgcatgtatattttcaaaggaaattaagaaatctttatacatgtttttattcagtagtcagagaaaagtattaagaacaagactataaccaatacctaaggaagcatggagaactgtatattggttactaagaagccacattgttctgttatagaaagttttagaaatgtttgaagtaggaaaatatataacattttatcatgtgcgttagatgagctactagtggtagagaccattcaagctacaaagtagtttctgcttgatttgaattattttatcatggaagatactggagaacatttgaatgttagtatgttttaaatttattttacaaaacttgggaaattaaattgtttaagttaatttacatacaaaggtgctggcactgttcttttccacaaagacagtagtgcttaaatctttgaaaccttttattcatgaatagaatacactggctgttataacccaagctattacaaattcttgagagtgcgccatttaaatttcgtttcttctcaaatatttgtaaacaggagttaatcttcatgatcatagaggataatgttgggcctaacaagttaaaaatattaaaagttctagagaagacggaatctgggaagtaaacctaatacaggcctctgaggaggactcacctctacaccacagagagacaggtggccatcctgactgtccatgtgtaccttgctttactgtgcttcactttattgcacatcacagatactgtattttttacaaattgaagatctgtggcaactctgcctcaagcaagtctatcagcaccactttgccagcagtatgccctcacttcctgtttctgtgttacaatttggtcattcttgtaacatttcaaatattttcattattatcatatctgctatggtgatctgtgagga

SEQ ID NO: 107396 - DNA, 1118 bp, Homo sapiens
gattaacaacagaaggaaatattttgcaaatgagcaggtgatttgtgtacagttcactactgtcaagcctagaaccccaatctaactctgctggtccccacttcattactctttgtatcaaaccacagtagctgatgcaatttgtcatttaggataagacttcaaagaaaactaaaaggaaacaaaagcttccatggattcttcactttctatttttttttttgggggggggatttaatattaaaccccacagcattttaacatatagcccagtcatggatttgttattcactcagtgttctgcccaaagcaataaaaagaggagtaaaataactaaagtcaacattcctaaggttactgcagagaatagttttcttaggaatttgggcatccaaatttttactttccttggagagttagatatcccttccttctcctaccaccctctcaccacccaaacacacacacagttgatggtagagtaatatcgttttgttcttaataaatcacagtatgagaacttttgcatataaagggacaggcatgtatgtcccatctcctcattttgcagatgaagaaatggaagcacaggaagtgaaggcttgctgtagacatagtgcttagccagggtacttagtacataagacatactagtatgtaagacatgcttaataattacctggatgctgagcagctttcttcagtactattttcttgtccccaagctttttggattttacctttcttgtccccaagctttgctgttggatactcattgccttaactgttgaaaatggaacagatttttcaagaatacctattactttcgaaaagctccaatgatatagtaaaagttcagataaccaggtttatttttcctgctcttgacttttaggaaaataagctctttttctcccctttaaaaattgattttaaatagttgtagttaaaaaaagaggagtttccaaagaatgaatagcctagggtcagtttgtatatgtatctaacccaaatgttcacatctttgtttgggtccagtgagaaataatgttcacaacaatgcttatcctaatatatggtaagacccacggtcagcagtgggagatttaattatgttc

SEQ ID NO: 107397 - DNA, 1192 bp, Homo sapiens
gtggataggaaaatctgaagatcctcaggcccctgatattaaatggtgtagtattttcatataacatactcatgtcctcctatattcttgaaatcattctagattacttctgatacttaatacaatgtaaatgccatgtaaatcattgttatactgtattttttattgttatcttttatttttaatatattcaggctatggttggttaaatctgtggatgtgaaacccccagatctggcagactgactgtatattaggtagattggtctgggagtggtaggaggaaagtgcaaaggccctgcagggagaatatcagaataccttggagaaactagaaaaatcttattatggctggagtttagaaatgaatgtgaagagtggcatgatgtgggtggaaaccggactttgtgggattttgtgtgctttgataaggatttctataagcacagtagtagcagtgaaaagttttaagctaaggagtgaggtgtttggatttgcattttgtaaagatcagtctgtttgccaggaggaatgcttttgaggaggggacaagtagagctacagaaatcagctaggagactggtatattggtgtttcaacaagctggctgtgttgaggatgggaagaagtggactcattgaccatgtatttaagaacttgagttaatggtgttttataatttactagtatatatgagaataagaatgagtaaaccagacaccagcttgagcatctgggtgcattggatggtaatactgacgtcctaagtccgttcaggctgttagaacaaaataccatacactgggtagcttataaacaacagaaattaatttctcatacttctggaggctcagaagtccaggatccgggcatataaggtgtctggttcatagatgggattttttttgatgagtccttacattgtagaaagagcaaggctgctctctggggcctcttttataagggcacttaatcccattcatgagtactctaccatcacgatctaatcactacctcaaaggttcaactccaaaaaccataaccttggggcctaggttttcaacctggcaattttgaaggaacacattcagaccatagcaagtgacaactactgaaacagggaaagatccaagggaagcagatttgggagctgtaggggaaaatactatgtttcaatgatcgagcttgaaat

SEQ ID NO: 107398 - DNA, 1292 bp, Homo sapiens
ggcgatatggcacttttatcatgatacagtgtttctgtctgtgatcattgttttttgctctgaagtctactttttcctattaatatagcactcctactttattttgattaatatttgcatgatataccgtttttcttcttttactttcagcctacctatgtcattatatttgaagtaagtttcttgtagatagcatatagttagatcatttttttaaccactgccagtctgacttttaattggtgcataaccccataacccctttatgtctctttacttcctccattggtaatataatcgtcttaaaagctttctttaacacatttagatccacagcagatagtattctaatttgtttcagtcatcaaacataactgtaaaattcaagagaaggaaaacttattatatttacccatatttttgtttaccattttttttttgtcctttctgatgaatatcaggttttttctttcactttttcttctccgtttattgaatgtttttagctgctcttttagggtagtcttttggggaaaaatatccatgtttttcttcattggagagtgtctttattccctttccattgctgaagggtattttcactgggtataggatcctggatcgacagtccttttcttttagcactgcagaatgtgtcattccttctgacctctgtggtttctaatgaggaatctgtcatttgaatgttattcccatataagtaaggtgtcttttttctcttattgttttcaagatttgagagggaggggagatgattaatttccagaagtttgactatgttgtgtcttggtatatatgtttctttgccacagttgggaagttttcagccattatttgagtactttttcagccctgctctctttcttctctcctttctggattacagtgacatggattttagttcttttgttactgtttcataggtccctgaggctctgtttatttttttcaatatattttctttctttggctcagattgggtaatttcttttgttttattttctcctttactgatctttttgcctctgtcccctccattctactgttgagcccatttgttaaattttttattttggttattgaggcttttagttccaaaatttccatttggttctactaatatatcttctgtttctttggggagacattttatgttttcatttgtttcaggcacggttgcttattaaaacatttttatgatggctgctataaaatctttgtcagataatctaacaacactttcatctttgttttgttgtctgttgattgta

SEQ ID NO: 107399 - DNA, 1019 bp, Homo sapiens
ttactgcactagcatatttggcgcagatcaaagggatagagctgtcatctctgggcatcatgcctgcggacatgattgatttcaggcatcatggtttccagctctcatttcttttgttttttgaaagataaagaatcttgaaatgttagaatcttagactctaaggcctcagtgccctgcacaaacatccaagaggaactcacttcatttttagacagatctgatggttagaaagaatttcctcatacggaacccccaaaactgcctgttagaaacatctgcttattgatttcagttttaacctctgaaaccaccatacaaaattatgtctgatgtctcttccttaagaccataaaaggatgtgaaaagagcacttcttcttttccagagtaacattttcatttccttcaactattgtgcccccaacagggtttcttagcccctcttcataacctctccatagtccttatgttcttaccagatgtagacagatagcaccagatagagtgggctttcatctcttcttgctagccagctacttcacagtgttggctcatattacaatatgtcacttcacatgcttttcagttaaggtaggcatcccctctctattctctacttttggacttctattcattccacttgatgctactaagtttagactataggtgatacctttcagttatataaacagataaagatgacaatgcttacttatgtctgtgggtatgcttacatgccacctcgtcttattactctaccattggatttttaacttagacagatgtctgttagtatgcattgagttctcatgctagaacttcaaaagagaaacctagagtttccctcttagtcctctcctctacctctgttatctgttgtaccattctcagctctatgtagaattagtaccatacaaaatattcagtaagtatattaaaatagctttggagagaggactggagtatggagacaaagcgcgacctaattaattaaaattattttctagcaacagtgtt

SEQ ID NO: 107400 - DNA, 1204 bp, Homo sapiens
cttcagtcaatatataattttaatatagttagaatgtaataaactggcattaactttttaaaaaataatagacctttttttagaagttttaagcttacagcaaaattgagtggaaactacagagaattcctctatactgtctacactgacattaactttttattctaaggtatttataggaatatttaagaacacaaagaaatattttacatgctcacttctacagctaacaggctgtagaaggcatctttctttgccttcagactagaaaggagaaaatgttttagagccaagaaacattctctgactgagcattgacagtaaaaacttaggccctggttttaccatacttttccaactgaacgcttctgtagaggaacacaggaagagtagggatgcattgtaatctggtctggagcttcctgctagtctgtggatgacaaactgcagatcaaacggattgatcatattccagaagggcagtgtgatacagggcaagtgtactgaccatggcagtagccctgggttctggcctacctctgcctctgtcttggttgtgtggtcgatgggttgaactgagtggcttcaaactcttatctgcctccaacattctgtaatcctgtgatttcacaggatgtgtgatagggagaaacatcaactcctacaagggcagcagtgtgaagtcatgagaaaagcaatgtgaagacctgggatgttgtcacagctctatcataaaccagctgatggccttttgtgtagtcacttaaactttctgggtcctacttggcgtcagctatggaaatgtgattggacttccctgatggactctaaggaaagtttcttggattccttctttccctcccttctttcctccttccctttactttcttctttcctttcctttatttccttccttttctttcttgagacagggtcttgctctgttacccaagtggaatgcagtggtgcaatcatggctcccggcagccttgaactcccaggctcaagccatcctcccacctcagccttccaagtaactggtactaactacaggcacaaactaccaagcctgactaattaaaaaaaaatctgtacaggcaggtctcactgtattgcctaggctggtctcgaactgctggaatcaagcaatccttccacctcagcctcccaagtagctgagactataggtgtacatcactatgcc

SEQ ID NO: 107401 - DNA, 1019 bp, Homo sapiens
tataccagtttatttacttgacgtttatttacagttatttacttcatgatatttactcatctgtttcataatatttaatgcttcttctgtatactttcatagatgtatatgaaaagtatgtgaatgtgatagtattatgagattttctttaaaaatgtttttgatatttatatgttgcctattttataataatagactttgatattatttatttcatcagtgtttggaattggcatgctgctttcctaaactgtagtaaaagcgtagacgtttgacttgaaagtattcatatgtgtcctttatagtttgcttcaaagatctggatttattcttttatctatgcccttgttttaaaaaatatggatgaatgagtagtatcttgcctgaagccacatgagaccaattaatactttattcattctttccagcttttgtttttgttaatagcacggggtggcaactgagtcatctaattctagataggattactcagatgaatcattacatatttttgatatttaatgtgaagagccagttcttccatatcatagtggcttattagaaaaaaaaacttaagctaagccataaaatgactgatattatattgatagagccataagccagaaagtgatatccagtttctacagtgtgtagcttacagatttagaagaaatatattgtcataatctgcctagagcagggaattgcttcttttagttgagtgtggatttagtttcaccactgaagcagcctaaatttgtcttacaaagaaacataaatgataacttttgaattcttagaaatgatatggtttagggatatatatttgcagtgttattaaaataaaatattccatttaatttacatgtacaccatttcactgattttgatcttataattacttcatcctttatccttaaaaaataaaaattattttctatttgtccccctcaccccaggctgctttcttgtttgttcgtttttactatcttgccctattaactttaaaatatttaaaa

SEQ ID NO: 107402 - DNA, 1582 bp, Homo sapiens
ctgaaattggattgcagtgtagactttaggtgagacatttgagagaacaagtagttttgagcaccggttctttactagtgcttagctctaagaattcattgaaatgcagaacatcagtttatctttccagtcagctgaaatgtgttgaatcattaagactgaaattacaaagttgtagaagcaaataaactaattctagccctttttaaaaatttttgtcaagtgactgttcacttaatttcatttctgttcttaatttttttatcattctgatatttttatgcagatttttttatggtatatcttaaaaatatcctagtgagtagtgtgagtaattcagtgtcccataagatagaaaaattttatccttaattatgtttatttgaattttattttacaaaaccagtttggatttctttaatattctactagggacaatataggataccagaaaaagcagtggattttggaatcagaaaatttgggggcctcgattatcattcatttgcttgtgtcttgggcaagtcacattacctctctgaccttcattttctaaactgggaaaaatacttccttatttatagctgggttgtttggaggattgtgtgtgtagatgtatctccaaagatgaaaccctgtgaagatgaattttaataggtaaagttacaagctcagaaaaaccatggcaataacttcaaaatggttgacggtatcacagatttagtaacatgagagcacctattacatgagtaaatagaaccagaaatgtggtttcaaaaccaaaacccaagttcagattgccagcttcctccctgtctgtgatttctctggctgcttaatctctccattaacttctgactcttttgctcctctcaactctttatttctgtcctctgtttatttccatgtttcctctctctgtgtttctcctgactgtctctggtctctgtgtttttcttgtcccaggcaccctcaggaagaccccaagcctctagcagtacctggtatcatctccagcatgttatagatgtggaggattcactgggatattgagaaataccagaggcgaattgttccactgtagtaagtcattcagcatttgttaagtgactactgttcacgcagcatagttggtggtccttttggggaagaagaatttgttaggacacaggacagaagaaataaatttgtaaactcttgtcagtggttcttgcaggctagacaaacatgcaaatgaaaaaaacaatgacaaattaaaaagctgacagataatcatataaacgaattgtgttttatgtgtgctgatggggcctagggttaatggagtagagaaagccaagtggtattaatcagatttcctgcatgagtttaaaattaggttttgaagtacatttggaagagagatgaggaaagagagagtggaagtgagtaatttctgtggggcttggcaagcctttttgcttccctgtgagtgaatccctgacggtggcgggtaatgaaatgaaagtgctaagtttcagtctcccaacagctaactttacttccagtcttagagaaattccagttatgaaaagaagtacag

SEQ ID NO: 107403 - DNA, 1909 bp, Homo sapiens
taagaatgctatatatacaagaatgtttgtatatacagaaaatgctatagatacaagaatatttattgtgcatggatattaatgaccctttgtaccttctgctaataaaacattagaaaactgtgtttcacagtaataacaggtataatgtcacaatactgaattaaatattagaaatggtgaattagactctctgtatgtccctatggtctgcaagctgaatatgtgcctttaaacaaaaaattttattaacttgagaaataagtttgtggctatagtcagcaccctattatgctaccttctctaccattgtctgtgtttataattctgcagtcatatctttagaatcatgatgaatctaaactatgataattttttttgctaccctacacaaaaatatttatactatgtagataaggtacaaagaataacattaacacgaataactgagaacctaccactagtttaagaatagaacattaccagtttctttgtagcccacagtgtgccccacccagattccattgcctctctttaccccctcatcacaatccttaatgttgagtttattacttctgtgtttttcttggtcgtttttctcatacttatgtaccccctacattaaattttgcctgtttttaaattttatataaataatacatactacatgttttcttctgcaacaactatttttcctgctcaacatcgtatttgactcattcctgcttgtctttgtaattcatttattgtcatatatgtataatcttttattgtatgaaaataccatagtttatttactttcttttaatggctatttagctgtttttctttctttctcttttttttccttttttttttttgagatggagcctcacgctctcgcccaggctggagtgcagtgatgccatctcggctcactgcaagctctgcctcccgggttcacgccatcctcctgcctcagtctcccaagtagttgggactacaggcacctgccactgtgcccagctaattttttgtatttttagtagagacgaggtttcaccgtgttagccaggatggtctcgatctcctgaccttgtgatccaccggcctcggcctcccaaaatgctgggcttacaagtgtgagccactgcgcctggcctctttctttttctttttcttttcttttatttttgtcattggaaataaagcagcagaggaaaagttcttgagtcctgtatatgccctctttatgtacatattacttcttcaggatatatgttcaggagttgaattgttaggtgataggatatgcccaacctgaaattccacaagataatgccacgtggatttccatagaacttgttacattttatgctcccactaacagaatgtaagtattctctctctctggctcctatagttctttaaaattactagatttttgtttaatatgttcaccatatctttaggaatgatactttgcatgaatgtgactatatccgagcagaagtttaaaaatggaaaagattttttagtttgcctgtaaacatcatcttaacaaaaaccctgatgaccctcattttttaaaagttagttttactctttgtggaagctgcttttatttttgtttcccaattgtcactcataccttttctcaaactcatttaaatctagacatcctgaaatagctggatatgtgtgctcactaaatgttttgcctccagaaaaccttatcataagaataaatgttctcttgcaataaatgaaaactgtcagctgtttctgacttctaagaaatacagtttttgcagagaatgtacatttcttttcttttccccctaattcttgttgagatagagaaagagtgacccacagaggactatttgcaagctgcagcgctttgatcaacccatcttttgttctgtat

SEQ ID NO: 107404 - DNA, 1287 bp, Homo sapiens
ccctgcacaagacattctggaaggctggtgtttgtttttaattgatgctagctttttataatttgttgttttttcctaaaaacaattttaaaaaatatatggctagttgaggaatgtctgttagttgtgttctgagatttacgtagatcagattgctgttttatccttaaacatgttaaatggatccttcctgttgagcattttaaaaaaattttttggagtattctgatttttttttttttcattgtacaacctgcgcttccttcagtgaaaatagttttgggttcacaaacaagaagcagctgtcttaaatatgttcattgactcagccgagtgtctgcagttgcccaacaaaagttatttgattttgggtagtgcaaagaaatcaaaattagcattcagattatattttggctgctgtaataagagcttctgtctgtaacttgaagttctgaaatccacatgtagtgtatttttgtcttaaaatttgtagagatttgagcctaaacaccactgagactattaagagaacttaactgatagagctcagtatttcttttgaattatttttctgatcctcagaggaaaacattgagtcttcatttcaagattgacctaacaagggctacatctcaatgttattcacaagctgagaaaaaaaagtcataattttgtgtgtattatttggtgaaattaagtgaatgctttagttcactgaagaaagtcaattcgaagaatgacatggacaaggccagaaacatacagagaaacatatctcaaaaagacttttcagaattgtaaaattgagcgctgcagaataaaacaattcacacattttattagatccgtatagcactgcaaactcattgcctccttgagagaccattgctgtaaatatgtagggagcaaaagagtgttgatgagtctctgacataactaaatattcataatggaatagcatgctacaagaataatgaccacacgaatgcagcctagttttacgattctgttttctcagatcctttttgaaaaatcttacatcttcaaagtctctacttgtgattctttatctcagacaactacagaaagatcaacatggtttagaaaagtcctaaacaccaaattttaatcgttgataaaatgaatttttgaagttttgatatccacatgtagtgtattttatttgaaacttggaggcaaattggaaaaggatatcttctgtttcataactttctaatgaggcataatcttatgtctggactgttaaattgagaattagagcagatg

SEQ ID NO: 107405 - DNA, 1024 bp, Homo sapiens
tcacttcaataactgatgagtctgttctgttgtctctcagtccccttgtcaaaaccactgatctggattgctctacagaagctgctttgcccctctcttctcatgatcatggaggagctcagttttaataccgtcgtttgtgtctgatacacttaggcagcagttccctcatggaccttttagatcaaaaatgaaactatagtaccttaagaagcttttaaaggagacattctgttactatttggggaagaataaaaaggcagtatgatatagcggaaagagttctgattttgtggtcaagagacccagagcttaactctgccactaattggtttggtgaacttgagctaacctttaactcctgtgggtctttttattgtcatctgtgaattgggggacaagatgatctccaggggctggatttgcagtccctatcaagtctatattgaagggtttcatttttagaagagtagctctttaaactatcctataaattaaatatgacaccagaaatagcagtgacaaatggagaattttcctagggaagccagttatgataggctacagaaaactttttaaaataaaaactttttattatcacacagtaggaatgccctccaaataaattgataatttctgttttacaatgtgggaatctgaaaatatctagaaaattagaagcttttaaaaaaaattatagaatctgcttccaaagatcaaaagaaaacaaaacaatgagtctataactaaggtaatttagatagatgtggatttcatctgattaagtttaattataaattgtatctgaattatcatagactaatactataaataaacatttggttggatatcagtcttccattttgccttatgtatttatgctacattaattggtttcattaataccatttaattgatcataacttgtgttactgccaccctgatggtaaaaggagcctttacagctgtgtacatgtagggacatggtaccactttcacagctttgctggaaacactatactga

SEQ ID NO: 107406 - DNA, 1326 bp, Homo sapiens
gtattttaagttaaagaaaagctagaaaatagaattaccaaaaagaagaaaacctcatccataattttatcacagagaaataatgtcgtaaacaatttagcattcattctttcaggcttttttggtttatgtgtatataagcacatatttattatgtatttttttaaaggaatcaggctcttatattctatgcaaccttttttcccacttatcttcagtgtctttttatgccaataaatgcattttcatggaattcttagtcactataaattgttacattttaaccaagctcctgctgtttatattttgccccccacccccattttttctctacccacagatttttgacatgcagagatatttctttacctaagggtatttagtgaggagagcactggattaaagcagcataggtcaacctagcacaacatctggttaatagtaggttctcaataatattgaatgaattttttactttttttggttacatgagtttaatggttagaagttattatgggcctagcatggtggctcaagcctataatcccagcactttgggaggcaagccgaagcaggaggattgtttgagcccaggagtttgagataagcctaggcaacacagtgagacctcgcttctgcaaaaatttgaaacattagctgggtgtggtggtgcacgcctgtagtctcagctactctagagactgaggtgggaagatcacttgagcccagaaggtcaagctacagcagtgagctgtatttgcactactgcacttcagcctcggcaagaagggcaagaccgtttctcaagaagaaaaaaaaagttgttaattgtagtttatttcaagttgacttgaatgtttatagtccatgattaattatgatgataatgatagcaaatcttcatttgcacttactgcaaagcactattccaagcagtgtatgtgtatataaaaatggcttaatcctcacaatgaaatagatactgttattatccttccttttacaaatgaggatgccaaggcacagggaggttaggtttcttgcccaagattacacagtttgcagctaataatttatagatgcgggtttacaaattcaggaaaaaagagagttcacagttaacatttgtgtcaaatcgcatgagatatgaagcatagacaaagtgaaattaagcaggatggtctaggatttctttcaaagtcatatttaagggcttcattaaaaaaaaaaaaagccaaagatttgtgtagttcttttgaaatggcgtctgtgccattttcttattgaatataagatcgcaagttgtaaagtttgtagtctagataa

SEQ ID NO: 107407 - DNA, 2821 bp, Homo sapiens
taaaattccttcatgaagactcattaaaaattactcttccccaaagccatattttaaaatgagttttaatttattatgttacttaacccttgttgtctcattgggaaagcccagcctatgacaacctggaaggactcagaactggcattttaaaacagaaagtctatcagcaatgaacagcttcagtaagaaagcagggtctgagtccctgggatcagggaaggctgggaggaacaagtgttcagtgtgaatgtaattcaggatttcagatacttcctgctgagcccataagtgttactgtggccagaaggctgtcagactttgacaagtgagccctatttttggatgatggagaagcaagccaaaccttccttactggccacatggggctttttggttcttaggaatgtctggaaaagctcctcacagaccaaagtcgaaggatggcataaatgaacacatctggcttccctgttttacctagagctactcctgagttggacttctttatcaccgcttacgagtacctctttacaaagccaatattccaaaatccaaataggatttcagaagccccatatttctaagaggaggccaaggggtgtaagtggtagtagacatgcagaaagtaagggtgaagtggtttccaagtaaaatgaggttgttgattgacttgaagaggtgacagagccaaatttatgaaagcattagggtttcccatacctgacagtatggcttgttggaaaaaggagcagaaagaggctgagttttctgtcagaaaccactgaaaccactatttatgtaatatttatgggagaccatgtgtgattcaattgaattgctctgtctcgctatagcagtttttaaaagcttcttcgattgttgaccggtccgttaagacatgctgcccatgtagataaggaagacactcaagtttcaacatccacactaagtgatcatgaagttcttatggtttaaaaaagttcagatttacaattccatgtaacctttcattaattaaacagattggatctttgttactcttctgaaagttttagaattgcacttcatgttttagaaatgactcatcagctttgcattgctctgctgactggaaagcctaaacttgcagaagtagtgtttttcactggattttggagtgtgcctctttacgtgtgttgtaccatggtggcccagcatagagggtatagcgattgactcccttcctgtaatgcttttcaaaatgacacctgaatggtggaagccctgatggtagtgctgataaataatgctttagaaacctgttttaacaaaattaagccaatttggatagcttataagtaatcaacacaaatagacacagaaatattaatggaaggtttatgatatcaggattgttagcaaccagaggtcacgtagaaaatatttacgtccaccaaggatgccttaagcatatagtagatgagtcttgtatgttcctggaaatagatggggaaaggtttagttaataatggtgttatgaaacgtcttttttaaggagtcttaaattatttttaaaattcaaatttatatagtgcagtgattttcaactagggatcaatttagagcagtgattttcaactagggatcccacaaccctacaaggagtgtttagaaattcgtgggacattatttggggaaatgccacagtctgggagtgggtgtaggggtcaaagggcagggaagagcctagatatatgttaactcagcaggaagtgaaacagccttgccaagtaaggaactatctcactcaagatgccaaaagcttcctcactgagaaatgctgattttagagtaccggatattactgtaagttaagcctaaccagagaagtaattggaagtgtccgccctttggactctgaagatgcatatcatatactgagagaataaagtagaatttcctgtagaaattctggagatttccacacttactattttattaaggtgaactaccttgtggatagttttactcagttgcttaactgagggtaaattttatttctccctgtcagtaaagctagcaacaggggggctataaatataaatttccagaatcttacacctgctgaccataaaagtcagtctagatcactggggaagctgcaccaaaagcatgttttcagcagctactgataaagctaacatgaaataaaatcacacacattcaacgtgcttcataacagtgcagtgtaatgaaatccagaggccaattgatagtaaaaatcaggtgttgtaaaagtgtacttcacataaaactaatttgattactctttttaatagcagatgtagaataaattcatgaagatgttaggaacatgggtagggtgagtgaggttcgaggaaggaaagacgacttaagttgttgggaacttttcttatggaaagaacatttaatagtttttccagtgttattgaggttatggatgattcactatgatttcttaagctgtctctgacattttccccaagttatttctaagacagttcactcgttcattcatcactaagaatttgttctttgtagtaggtatgcttctattaagtgtggaagacaaacctgcaaacaataaaacccctgtcgaaggtgataatgtcacagtagctgtgtagataaaatactgtgggaccgaagggtctactccagcaaaccaactccagcttctgatcataatggggcaatcacttaagatacctagaaatgagataaaacagtatttctgctctcccactagattccataacattggttaataagctaggatgactctggtataaacaaa

SEQ ID NO: 107408 - DNA, 1022 bp, Homo sapiens
aagcagcagtggcggagcaaaggcagccacttctagcctggcaactaaaagctgaaaactcacatgactgaatttcagggaacagttttcccatagttgagagtggggtgcctaactgaatcatcaatgtcagctatgaacagtaagaaaaatgcctttgtaagatcaaagatagatactgtatttggaatttgttcaggaagagtaactttgcaattgcaaatatacttttaactgcagtatttgttatctgtcttcgaaggagagctgcatgttgataggccacttcctgcctttcatcttttttttctgattgtaggcaaagtgggtgcggggaagcagcaccgtagaagtgccagtccttttttaagagctgttttaaaacatggacaactgaattacatattttagaaagtagagttggttctgaagaaatgcaattttgtggtaattttgtggtagggtcactatgaatggcttccaagagacttctgccaaataatagcagaggtcaacagtataatctatagagaaactagagaacagaaaataagaatgtattagttttaggagccagggtgttatatagactgacaggaggctgccaggatcaagaaacaagttttaagagaataggaagcccatctgataggagacagtatccatgagagtagacactgatttgtcagtttgacaggttcttgttcgtggaatcagcataaagttaccttgatccactttaacttgagggtgtttaatcaggtgtttggtataacgaatgttgagggtagtaatttggggccacattaggctatttgcaaagtcacacttgaatagccttaaccaagatgatttttctaaatgaaattgaaggaagcaaaggggaggaaactcatcaaaggttgctgaaaattacatgtagaagatacgctattccctttccttctcagccttcatttttcttcatcagctctcgccagtgatgcatctgtgagaggataatgcaggctatcctgccatga

SEQ ID NO: 107409 - DNA, 1037 bp, Homo sapiens
cccttgtctttcccactttttttcatctttttaaaatgattctctcttgctttctcattacttctgaatcataatcaggaacatcatttcccttcactgttttgccttctttcaataatttgaacatagatccataaggaattaagaaagaattagataactataaattattaaagtgcacagtttatactttgaggtatttcatagttattagatcaattacagtacatttttcttgatttttcatctgaggtataccatttccaattcacttactgttttattcatcttctgtacctgctaaaaatgtacctactttgttccaggccctgtactaggggttgccagccttatttctccccaagcctgtgcatctggtggttctcagacatcacatgccaccttggtctgtgtgtctgagctgtgcacagttttcaattccctttgtttcccacttagaaaagaatatctgaattcaggaaagtgtaagaaattgtagttaatcttgaagctatcctggagaatataaatagtgaatcatcatcacaatttggcacaggagtttgtgtcattgtttgtgacaatcctcacaactaactgatcttaatgatctgatgtgccaggatgtttctgagtatagtcttggaccattaagaaaaaggcctagcaatggaggtatgatgtatctaaataattataattgaagggaaaatgtggtaagtgccattagcaatgtagagtctttctaatgtatttctgggtgagaaagattaatttctggagtatcagaaaagacattttctccaaagtggtatgtgagctacgtgggaagaattagaaatgagggaggactgaatgcgattattttgaacccagaaagaagccacatataaccctcattaatttgattcttgagaccctgtttttctctttgaatattgaaattacatgtatatacacaaaggtgcacacatatccacacatatatatacattcacacatagttaaataataatttaattcaaaattttgggggc

SEQ ID NO: 107410 - DNA, 1070 bp, Homo sapiens
cccaataataattcctaacatatttccaaattagatggctatgacctcaagattttttctgtactctttgtgtttgaagataattaatggttaattgattgcatttgaaatacttaacggcaaaagactttttttttttgagacggagtcttgctctgtcaccaggctggagtgtagtggtgtgatcttggcttactgcaacctccgcctcctgggttcaagcaattctcctgcctcagtctcccaagtagctgggactacaggcacgcgccaccatgcccagctaatttttgtatttttagtagagacagggcttcaccatgttcaccaggatcgtctcaatctcttgacctcatgatcctcccaccttggcctcccaaagtgctgggattacaggcatgagccacccgcctggccaagactttttaaaaataccagttggattaagcaggtgattagtcctaaagtatctgcttgtaacaattgcccaataaacattgtaataaaagaacatggttgccttaaagttgtggttctcagagagtgatcctcaaaccagtaatatcagcatcacctgggaacttgttagagatacaaattctcaggacccactccatacctcagaattggaaactctgggaatgggatttagaacctgtgttttaacagaacctccagggattccaatgcatactcaagtttaagaattaaccactctgctgcataatgcagactaatggttacaagttgagtatccctaatccaaaaattcgaaacacttctggtcccaagcattttagataagggatacttaacctgcaatttgtccttcttgattttaattttgaaaccagaaattaaggaaatgggtttagtaaacattgtggacttctgtttatagttacattgtttctaagaaacattatagaatcattttttccttagaaaatattttacaatcataatatgttctgagattctgtaatcagagatgggctttaagaaagttaacctggcagccatgtgcaagaagtattgtaaagaagatgaaaaacgggaagactaggcgt

SEQ ID NO: 107411 - DNA, 1044 bp, Homo sapiens
aaaaggcacttttcaaagcagagaaagacaaaggtactattcatatattttatgtggatgttgttaatcttgatgcccattaaccatagaatgggtttattcattcattccacaattaattaagtactaatattatatcagacattgagctaggcactatggttgtaaaggtgaataagagcttttgtcctcaaagagctcactgtttagtgagagagaaaaaaatgtaagcaattataacacaatgtaatatatgctgtaatagagacatgcacaggttgctatagaaactaagcagaaggatacatcataagttagttaccaaccatgaacagtggttgttgattttttaaaattatatttttttcaatgtgtaagttgtttaaatggagctaagaaaaaaatacaatttgcaaaccaagactaactgttaaatcaaaattatccaaaatatgttaaagatctggctttgtttttggtggtaataggttcaacttcttggggccgatggcctagagcaagatgttggtgaaactgaagatgatgaatcaccagagcagcgagcccggagaccaatgaatgcatttcttttattttgcaaacgccatcgctctcttgtacgtcaggaacaccccaggcttgataaccgaggtgctaccaagatactagctgattggtgggctgttcttgatccaaaggaaaagcagaaatacacagacatggccaaggaggtaggttacaatgacaaggtattctgatagctaaaagcaaccagtcctgaaactcccagtcaacaaatatgaagcacctgttgaaggtctagcaatgagaaggtgaatcataaatgagatgttaagtaaaaacataaccgctttctttgtatgacttgttcctgttcctgtgttccaagtccatgtagaaatgctggtggaggtgccaagaacaatatattaacaaaaagttttttctcattgtctataccccactgattgatataagggattgatttattgtgaaggtttattatgaatggtttacagtgaa

SEQ ID NO: 107412 - DNA, 1032 bp, Homo sapiens
aaatttgcagaaataaattggaagccatgaggtgaattttcatttaatgggagaattttgaaaatcagtatttttaacaaaaatgttgttatctgagagagtcttccattgaaatcttaggagcaatagcttttctgatgttttcggaggataagtgagcttctcctcccaccatcagtatgaacagtctggccttggatatctggggcctgtctcttaggccttttcagtcctgtaatgagggattttgcctacatgattgaacggcatgctaataagttcactcagctgttcgcttcagaggagtatacagagtcttcccccatttgtcccttacccagccttctcctaataatctcatcacaacaaatgattaagcctttctactattgtcttttagctaaatcagagcgagtgattgatgaagtgccaacttccgagaacagatagacatcctcataccctgaggctcttcccacctccaccctcccttgatgctcatatactgcttgtgttaacttgtgtttttacatgaattgatggcatctctatctaaactttaaactccttaaggacaaagactgtgtgttattctgttctctatctctcacgttcttaactcttccactcaatttatacttgatggaactaatgaacgtggttttgaacatctacattgagtttaagaatctgcaagaataatattgtgatacagttacagagtgttgaccctcatagtaaattctgttattgttttccataaaaccccacgtattcccggcctttctcttgctctctgttactccactcatataggtagttagcccttttgcagatccattgtgaaagcatttttcctgcccgagccaggggaagccatggtccagctttatggaccatgtgtaaaaagaaataatgtatttatgtagtaaactgtggactgtaagcaatatgaagacagggactctatctaattcatactcttctctctccccaatgtctggcaagtttctgtcatctagtcagtgctca

SEQ ID NO: 107413 - DNA, 1052 bp, Homo sapiens
cacattggtatataaattatcacgtaatcatgttcctattttactttgtaatttgaactaacacatttttatctttagaaagctatcatccaatcctcctgatctctaggatgacagctgcaaaagtatttctctttgaaagaaccaaactaaacttttactttctactaaattcatttccctctcttgatttttaagtagatttaagtatctatttcaacagccatagtatttcttaaacttagcatttagttgaagttggagtctcaaaacaataccaaagagctttgtttcatcaaattagctactgtttgtctgtgtattctctgtgtatgtcttcctatgtggctgccttccaatgttgagctattttttgaccccctgatcttttggtaacatagtttttcctctaataacctcttcccccaacccctgccccttttttttactacctcagaactttttttgcaattttttttttaaaactgtcgataacatatagtcaaagttgctttatgagttcctaagacaggttgtatacaaagatgtacttaaggacatatcttcaacccgaaaaagaaaagaaacaactgaatttctttgtgcaacattttgactgatcctcattttcaattgtagattcctgaaattaaatatacgttgaggaccttatatgtactaggagagatgccgagttaggcatttttacatatgttctttcattacacttctgaattttaattcaagatagacttacaggacacaggtgccttttctttgataacttctttgtttttatttattttctatttgttcatttaattttttagagacagggtcccactctgtcatccaggcctggggtgcagtgttgcgatcttagctcactgtagcctcaaactcctgacattaagagatcctcctgccttggcctcccaaagtgctgggattacaggcatgagccactgttcccaattctgctttctttatttagatacaacctgggttatagatctaccactttgctgtttttattttctctgtttatattg

SEQ ID NO: 107414 - DNA, 1037 bp, Homo sapiens
tcaaaaacacatcagttaatataaatttatttttaaaactgtaaagaaagattatttgaataaaacctaccagattttacaggcctgatttgaaaacttctctctgttctctagttctctgatagcctattattttaaaactagtcctgatttcacatggcagaattaataatttgagaataacaatctaaaatttctcagaagacaaacagaaacattcttttgtttaaaaaatcttatctaaactccctaagcagtaaggaaagaaacattgcattaggagataaattaatgttacaaacagcaatggtattgaagaaagtgttgttggaatggtgagacaagagtggtattcaagaggctcacaaagtatgagcactaagcacatatatgccaggttactgttgcataaagagtttttaaaagtttttataaaaagttatatgtggttctgttggatttctgattgctagtctttatgagtattctttttgactctgtggattgtatgtactttatgcttataagttggtgatttgtttttgacttatttagatcctactcaaatgggaggcctgagtatgctgctgttagctggagaacatgctcttggcacaccagaggtaagccagtccttttccgtctccactctgctcatactgtgggttgggaacacagttatagtctgtttacgttgttcattctgcattttcactgtttacagctcatgaacaaactttataatctttctctttaagatctttctgtgtgtcttgtgtgttgagtgtaaaaaaaaagtggtgtaaataaggccatgaggatgtaaacacaggtgttgttttctgaacctacaagtaaggttgtagtaatgcaatatatagatcactggtgtttgcatgactctgtcatggttatgtcagttgggtgctgtaattcatttattcgaaacattctctgcttgggtgatgttcacatgctagtgaaaagatgatagctaaaaatttgcagctgtcagtctctctggtacctgaataatt

SEQ ID NO: 107415 - DNA, 1021 bp, Homo sapiens
agttattggactgctttggctaaacatttttaggtatgattttgacgggcaggtagtggcagttaaccatgcacagtctgcatttgtagaattcccctatttcccagagacatttaacagaggccaattgaattaacctacaggtcatgttattttaccacactcaggtttttgagatggaaatttttcaatccccaaccagaattgttgtttagggccaaatagcaatgactcaattttattttgggtcatattttttactttttgttttttagttgtgattatgtcatacatattatacttgaaggctattcaaatagtggttttgtagacatataattagataataacctatttacattataaaaggtttttattttttatagtttacatttgggatccacaattgttgactatatattcaatttaacagaattattttgattctgttcacttcattgtagcaagaaatgtataaatgtgtaaaaaatgcactggtagttactttgtgctaatcttcagctggaaaaacatacatgttactttgtgcctttgcatattcattattcatcatgtttgtagtttctaacataatagcattgtcaggcatcatttcactttctaacacattgctgctacctcttaacaaatcaaactctcacttaggtgtagagtatcccaagcgtgttccaaaggtgaatgttggactaataatatgcacttgacctttcaacatgtctgactcaatatgattcccaagaatacattgaattgtgaaagccagcatcatctttcttaactatttaaattatcatagtgtttcattcgcaacatctatttagtgttctttttaaccttcaagtacaaatgtaaacaaatcaacgtctgtagaactcatggatgctagtcaaagaaaagcatggtttctttttcccctttttgcttaaagtttgccttttgggctcttttcaatgagaagttctcctactccttcttaagaaggcagagttttgacacatgc

SEQ ID NO: 107416 - DNA, 1050 bp, Homo sapiens
tcaaatctcaaggctacagtgaagattaattaaataaaagctgtaaggcacttttaactctcctgcaaataattcttgtaggtatatattattgccattagttattctaggcatttcatattcaacttgcaagtttaaattatatcagacatttctcccacaggctgatacgctttaccagcaacatgcatacatacacacagagagagagagagagagagagagagagttcttgtctattgaaaacttagcagaaattaccgttgtaatttactatctttatcatcaggtgctcaagaaggagacaattttttaatatctgggaaaaatcagtataggaagtccaaagtcagcagagtagctgagttagtgtcagattagtggagaagatgctaatagatgatggcacacctccataaaaggactgtaaaggtcgtgttctctgagaattgaacagtgctgaactgtgtgccatcttttcttatatttaattacatgacaagtgtttattgaatgccttgtatgtgtaaggcatgtcagggaacaaaccagacagcctgaagctgatattgtcttaaggttcaagtttttagatatagcaaattcttcacatgatacttctagcttaaaaggaaatcacattgattttcgtttgttcaccatgatctgcctattttaaaatgtttacagcttatgcatcaagatttcttaaaatccaaaaatataggttaaatattgcttattcaaaacgcttgggaccagaagtacttcagagttccagttttttttttttttttttttttttttttttaactatttgtatgatccttaccttttgggcatcccaaatccaaaaaattgagatctgaaatgctctagtgagcatttccctttagcattatgttggcactcagaaggtttcagatttttttgagcatttcagatttttggattggggatactgaacctgtaataaatatattttgccttgtaagtttgtaatatcaatctgtcacctcctccaggaagtccttcatgatttcttgagcc

SEQ ID NO: 107417 - DNA, 1052 bp, Homo sapiens
gcaagcaactaaggcttaggcacatttcctttggtcatcattttattccctaacacatactagatacaagtagaatacaagcttcttgaaagtagcagtctttgtgtctggcatgtcataggtgcctattaaatatttgttgaatgagtgagtaatcaataaatgtttgaattagcaagggtaggaacgtatggctcagatactaccagtgcaatactccttttgttgaccgtgtgttcatgccggcagtgcatggttgtggtcctgtgttttgcaaagtaaggacaggctcatgataacaacctagctttccacactactcacaatgcatgtaactggcttgatcttgttttatatcaggaggccagttcacttttttatgtattcaatttcactatgtgaattgctcctgtgaaaaaaactgcattattgtaattcttaattatactaatcactccccttccatggttattgagaattataactaaatcaaagagaggattgaatttggggaaatcaaatgaatatgtacttaacaaaaatcccgttagctatttttgtttttgggcatatagcaacacctagtggctttatcgattatttcagagactatttctagaaacagcttcttgggtttttttctcccttattaaataaccactacttatttaatattttttctttcctcttaattaacgaacaaatatctttgactattttgtatttagaaagtaaactggctctagcataggaatagatattacagaattgatgtttatccataaaaagtgtggcccacctaataaaaataagtgaagtactttaaatgcagacatcacaatgatatggcacaatattttaaacatttcacaacatctagaaccttctgaataatgacattactcaaatgggagccttttgtgggaagtattctctcccttttatatagatagaatttcttatttctttatcaaattcatgtgtagatcagtgtatccacagatatatacattttatgggttgccttacttatcaagtactcaataatgaat

SEQ ID NO: 107418 - DNA, 1052 bp, Homo sapiens
atagggtaatttacctcctcataaatggtcactatttcttgtgaattgtgggatctgaaataagcatgtatgtcatatagactttatgcagtggagcaactctaaataataatacgtttaattccaaatatattttatagatttctgtcttatgcacacctgttttattaaagttttatgaagacattttataattttcaaaaagtcctaagcttgaatgtaagtaaaattttgattatttaccaaataatctaggagccaaaaatatattttttgataaagcagagaagttgatttttttaaaatacctctaaattataaagatatattttgttctggtattcctaccaataaaggagttctcaattttttgtggctacgaatttcaggatttgttggcctttttaattcattttgtgtctccttggtgggacatttggcacagcatatcaaatagtgacaataagagagtcaggctttgcagccaaaccacaggtggcaaattaataaaagcttctgcaccttcactaatgtgcttatctctgggagaaggtgaccattactctttaaaatccaaaggtgacaattaaaatttcaaatgtttgctcctgcccagtggcctgtgacattgttagagaaacacgtcctcaatgtcttaagagggtcagtgagaaactgtttttaggagcataatctgggtaactagtagctctttccataggatttatccatcaaatataatcacatgcagctattaaaattacactagagaagacttagtgatgcagaaaaattaatattaaagtttttttaaaaaagaacattctgtaactgtggtagaatattctatttttgttaaaaaattacacaactggaagaatatataagagtattaacagtacttatctttgggaggtaacattgtaggtgatttttcttctttgttttagtggtttttttttttttttttttttttttcagatttttaacagtgaacttggattattttgtaatcagaaaacaagttattaaaaagtatttgtaactttcat

SEQ ID NO: 107419 - DNA, 1018 bp, Homo sapiens
cacccccaatttcagcctgtctcccattccaaggtgagactcatatttcatccagagtcagcttggcccatccaaagtgccatctactctgtgtttccaggctccgatccattaagttggtcagaatgaatttcctatctgtgtcttctgttgtttacaggtagagtgacacatcagttactttttaggtctggtttaccaaagactaatgaccagatataatgtcagaagggaactgttgtctttaattatttaacaggcctaaaagccatgaccaatccacatattctctgatctgctctgtggctcactcttacacctagagtatatctttgcattgaaaaattatatttaccttgaagacacagctaatctgggtgatttagatagatttggactttaaaacttcccttagaagatatttgctttgcctatataaatataactataatctcaccaaaattaaaatattgtcaccattggatataagcaataggtacaaatttaatgcatttattttcatgagggaatgctcagtttgttacactatattacagttgattaaaaacaccatatacttacactgtaactaatcagtggatgtattttgtgttttattggaagcactaatatttctttttagataagaaaggtaaggtaaagaaggccttatttgttctttgactcatttattcattcaacaattatcagtcattttctcccaagctacaatatttacaataccgtcataattgcaagacttccaccattacctaatttgattctcatctttaccacctgtttgctcacccacctcagacagccataaaattagcaatttaacatccagggtgatcatttttcttagcactttagctgtacctcatgtactgttgcacccaccctgtagctagactttatggatgaatactgtttatccaaacattacataatagtcaagagagactacagtggaattaacttattggcaagccctatccaatttgaggaaaataag

SEQ ID NO: 107420 - DNA, 1045 bp, Homo sapiens
gtttgcaaaatattattaagtttgctaagatgaacctgtgcaaatgcaaactgtcagcataccactaaaaactagcgccggtaaggtaaatgttcctgaagtgacctattaaaagccaccagagtgacagtggctgaaaaatcataaaatttaccttgagaatgcctttctagccttttttccagaactagtataatttctctccccccacatgggatagttattcacgaagggctatagaagttgagaaaggaaaataaaaattatttcaaaattgatataaaaatagtacattctcccataagagtaaaacatgcagggaatattaaaggtttcagtgattcagaattaagataacattttgctttgagcttatttctggttatgtttaataaagagaagttcatagtcttcatagccacttgctgaggtctaaaggttagcttacctgaattcctgaaaaagacagctctgttgtgaatccttaatatttcatgtcttccctgtgaatgatccgaagggctgtgtgctcttgtcatgttcactttttttaattgcagtgtctgcctctctccaccctttctttaatttcttcccagacttactaatcataacataattctcacaggaagattggtgatgcattgaaaatactaagagaaaaatgaggtaaaaaagcatctggtatttaattcaatgtattatccacctaaaaatgaattttacagatggtaatgatctctgacaacttgccatttaataaaatgatggtttttaaaaacagatcagtttcctactcatgtgcttgattttgcattgactcagcaacccccaatactctttcccttctaagttgctaatacaaagtagataaaataaattatgactaagacttccttgctgcccttgaccaaatcggcatcatcaatctctttataagttcctcaaaggcagacagacctgaccttattgatttttgtatcattagtgtcctccatgggggctggcattttgggagccttgcagttaagtgtgtataaatgaa

SEQ ID NO: 107421 - DNA, 1029 bp, Homo sapiens
gccagtagcaagataataattagtgatgttcccagtagaaaggatcatatgtgccatcctcatggaattatgatcattgaggatcccgcagcattaaacaagccagaaaagctaaaaaagaaaaagaagaaaagcaaaatggatcgacatggaaatgataaatccacacccaagaagacttgcaaaaagaggcagtcttcggaatctgacattgagagcgtcatatataccattgaagccgtcgcaaaaggagactggggcatagagaaacttggagatacccctcgcaagaaggtccgcacatcctcaagtggcaagggaagcattttggatgccaagccaccaaagaaaaaagtgaaatcaagagagaagaaaatgtcaaaggagaaatcctcagacaccaccaaagagtcaagacctccagatttcattagtatttctgctagcaagaacatttctggtgagacaccagagggtataaaagcagaaccattgacccctatggaagatgcactaccacccagcctatcaggacaggccaagcctgaggacagtgactgtcacagaaaaatagaaacttgtggttccaggaaatccgagaggtcttgcaaaggtgctctttataaaaccctggtgtctgagggcatgctcacctctctgcgagctaatgttgacagaggtaagtaacttctacaaacctgaaaagaattcaaaaaccaaacagaatttcacctttagacctattgaaaacaactgccataaaaaacaatatggtatcaaaataataccttacatttgtatatttctttatggtttatagatcataattatttgttactttacttacatgttttctagcaccattaagggaagtgtattcattttgtaggtagttctcaggatgtaattaaagtaattttaatctcttctttccccccactggtatgggctggctgtttgttttgaaagattattattaaatattcagagctttaggtttggttttgaaaactggtggaatttcgagaa

SEQ ID NO: 107422 - DNA, 1067 bp, Homo sapiens
gcacctttgcaggtataaaacgtatacctgatacaattttgagttccttaacaatgcatgcatgtccagcccaatgaagtggctcctccctctgaatgaatcttaacttgattgtgactgattgactcagagaacttattcaagtcagtaaatgcacatgccctgcaggtgggagcacattgctataaattattgcataggaatatattttttcattgggtactcattacttacaagtccaatacagaaatggtagcctagtcttagaagaaaacccttgctctttatatatatacacatatatatagtttaaaaacatgaaactatagaacctgggcaaaagccaccaccaccagagttacgcctgacatttgtttctcacaacaggtgtaaagagcaggttcacttaattcaccttactcactgaccttgagaaagtatcgtgctaggctcatgctgaagtggctcctgtgtcactgcaacttctcacccccaaaacattcatttttcagcaaaccttgaacaagaatgttctggaaaggttattgtcagtgtccttctggcacccctcctaatctctcggcttgtcatttggcccttttgttttctgcccagctgtgaagttgaggtgcaaaggagattgataccttcagaatacgggtcatctgcccaaaaacttaagtggagacctaagccagtttgcataccagcaatgagtgatttttttttcataaggaagctgaagctgatgcagatattccctcaagaaatttggtagggaaagagatgggacggaagcttgagatatcatagtagagtgaagaacagttgtgaatatttgttttctgaatgattccttctaaaagcccttctgcattttactttctaccattcttcctcctccatggatacttctacattaatataataattgactaaggaaaagatgtaatagtaaatttccttatatttgctatttattacagattttgactttattttctgtagacaaaatacccaacatatacactatgctgattggcagaaatcaaatttttcacttcttg

SEQ ID NO: 107423 - DNA, 1089 bp, Homo sapiens
tatgctaagtcaaaaatcacattatatgatactatttatatgaaatttccagaataggcaaacctatagagacagaaaggagattagaggttgcttagggagagggggaatacaggtataggagtagtagtattaaaaaggtttggaatttatttttgaggtgatgaaatgttcaaaaattggtgccggttgcaaatatctgaatataaacacaagttttatactttaaatgggtgaattgtatggtatgttaattatatttcaacaaagctgtttttaaaaatcagttaaaacaataggtttgtgagggaacgggagatcaagtgatgggcatggggttggcttgcagttttatatagagtggtctgaagatagttaagtaaagccttgaaggaggtgaggaagttagccgtgcggacatcttggagaagaacattttctaggccatcttggagaagaacattttctaggcaaggtaatggctggttcagagatcctaaagtcaggaacactgagactacatgtgcagaggactgccaggaggcccatgcagctagagagactcaaaggaaaggagtggcaggatatgaggttatggaggtaatggagctctggatctcttaagtcctcgtaagatagtataagattgctgacttttcatatacacccaatataagaggtctggctggggtgatgcatttttgagtcttcaacctatagctggtatttattttattttattttatttcattttattttaaagccctgacagtagaggtaatcaccagatgagtgagaatagagacaaggacaagggccaagcccagagctttccaaaattaagaggtcagggaaaataataagcaaaggagagagagggaaatatcagtgatggagaagagaaaagaagagaaggtggtatcctagaagcccaatgaaggaggcattcaaggcagagggtgtggctctagtggtcagaagctacaggaacagcctggtgcaataaggacccacaattggccttcacagcatgggggtactggatgaccccttgaagagcagttttccatgagtggcagggcagaaacc

SEQ ID NO: 107424 - DNA, 1049 bp, Homo sapiens
cctgccactaatcagcatttttcagtatgacaaattgtttaacctcactaggattactctccacattggtattaagtacatatataatttgtgtgtttagagattgggtgaatgatgagatgtagtagtacacagactgtaaattctgtttcccctctaacacttgataatgattttattgctctgatatcttgagtaagtattgtgttactagaagtactatattctgtagccctaattttctgcttttgggggcagaaaagtaaatcacttttgagtcttacaggcagtcccaggctttagcagaaatatagttataattggtgatatttaattatatttattattaatgtatatgaaacaacttttggagaatatgcactgaaaaatgcatgtccattgtttagtgtagagtacaaactcattttatgtggccaggaaaaacaggaatcaatttgagcatcagaaattactagtaatttaaagtaaccatttttggtttttcattttcttactatctccaacatttacttgtttgtgtagtgactatgtgctttgtgagttttctaggcctttaatcctctctctcgtctatgactatatcactgcttattgaaacttcaccttggagagggtataaatatatgacagaaaatatagcaataatatagaataatttaaacatgtctaaaattaaaatcctgctcaaatgttagacaggcattgtttgtagctgatgtctttaatagaaatattgagtcaactgatgctatataactgttcagctattctgatttcttctaaagtagatgacttcaagttcactgtgttttctttatactgccctgtgtacaggcaccttgcaatctttcttttttttcaaaatatcagaaatatttagatgcttagtaatatgtttaaatgctaagtttataatgtgtcttaaaccctgggcttttacaattcaaaattgttaaaccactttttgaaatttcggtatatatgtattaaaaaaaattgtccacaggctagaattaaaggtaggattt

SEQ ID NO: 107425 - DNA, 1049 bp, Homo sapiens
tttgcagtgtataaatctaattacaggcaggaaaattctggtttatagttagattttcacacacgatccacagtgcccaatctaactcgatctcttttcttaagtttgaaatagttgctatataacttcagcaaagtctcccaggatgttggataaggctcattcgtttctttttcctgtgttctattcagcatctgactgctgtttcagctcatgggagacctaccaaaggcaattagattccagatctggctataataatttcagtgcaagtttgaaaccccagttggaatgtgaattcatgactctggagcactctagtggcctcatggggtacaatacaagagcaatgctgctttcccaaaaaacctactccacattttgggatcagattttggaaaacaagacggtctcttattgctacattcctgatgtggctccaggagtgagcttgcatcatcactctcagatgatacgcaccaagtgtgttatggttattgtttgggtgtaaaaactagcccagtggatttgttctgaagtgttcgggtagttttgtgtgctcaattaaaagctggaaaagaaatgactaatttgttttggagccacaaagcctttcttttcttacatttccattaggttgcgggttgtcgggaggaactagcttgctatctttgtactcaacttttgtgcttgtttccctctctgaacttttttcatctcatgtccctcaccaccaagcttttgtctgctttgccaatgtcgttggactcagatctactgttttgttccagaaaattacttctcggatacagtcccatctgccttccctaattcttctgtcttaggggaagggtctccctgagggctgatcctgaaggctgtcctcagtctaaaccaccaaacaagaccatacgttctggggttaacccttgggtcagaacattagtctggacccttatcctctttcaaactctaggaaggtcacattacataccttttgcaaatgtgcatcatctgcagggcccatcattgcattttgatgtaatagt

SEQ ID NO: 107426 - DNA, 2803 bp, Homo sapiens
tttgttaaaatctaaaatccagcatcagtgcttgttttcttcctctaaacactctctgtccatgtgcatgtgagttcagagggttttattgtttcttcattcctttttttttttttggagtcacagtccatctctgtttctcttccagagtcattgcttttattatcactaaattacctgaaggttaccaattactataggagaactttcccttcaggcaagtcaagaaaaggaatgtgtcatttttaataccaatggatcaacaggaaaattattgtccaagaaccccagtccttgattgaaattttcccacttcttaaagagttgccccaaatctgttggtacttaaaatttcatctcttcaaaatggaagtggttagttgtttgaggccagagggtatgctgttgagttgtatgaggggaattcagatataaaatcttaggaagggagacagaatgggaaggaggaaggggaaaaaaaggataaggaaggggacagaagagaaaaaactctaaagcaaaaacagttttcattaaatgatgtaagtaacagcagtaactgttaaacaagatattggaacacacttgttattcatcgtcctctcctgtctctaataacatatgctgaataagtgactttttcttccttttattttacagaggtcagaggtcaactccgctcacccatgatggacagccaaaagaaatgccgcaggctcctgtacttatttcctgcgctgaccagtgaagcgccctttcattgtaaaacattgtgctttacctactaccctagccttgtctttaccgagggatgctagtgagtccaagtggtggaaaatatagactgcaaacaagtgcttgttgccccacacggcccagattcacttgaagcagaagttagcatcctgggccagtttgttctctcagaacccagaatctttgagggtaaggttatctgtctgatactgagcagaaacagaatgatcctggagctttgctttctattgaaggcttttgacggtaataggtggtaacttggtaaaaggctgcctttactgtagctcacccagcatctcttttaccaaccagagagtgtgaaactagtttcatatattacctagttattctttcaaaacaaaacaaaaaaaaaacaaaaactgacgcactgcactagttattattagatattcttagtcttttttgtacatggagatttaagtttaagatggtttatataataggttatacctacatttatattgtagaataaatattaaaaagcctgttccagagactcccaagcagcctgggcaggcagatgtaccattgttagtggtgtatgctcggcctcgtggtccatatattctgcacttttatatttgccaccagaatggtagtttgctggcaaaaaaaaaaaaaaaagagagagagaaaaaattacaactcttacaatctgaatttttttcttagccttgagtgaccaagaagaatttgcttgaggcaaattgtggcaaatattttcccagacaggggaagagtcctgcagattacagattactggtgttttcatgccttgaggattcttttatttttacataggggtctaagtgaccaatggattgttcatacaaacaaaaaaaaagacaaaaatattattcagaagtgaccttagtattacttcactattctaaacacattgaagacactcacttcatgtggacttggagctacagaccttttacatccatcacagattggctggacgggttgcaattgctatgcacagcctgattggcactgcaggtttttagagccattttgagtttgtgttgtttaggaggtactgagtcaatgatgagggaggtatgcctgaccagagtgggactctcagtcatagatccacctgcaagtctctgtttcctttttgtgttttgttgcttttgaacataaaaccaaccatacataagcagcgccaagtggattaactggcttagaacattcaacatattgacttaaccacctgacattcacagtgtcttgtttcctagcaacagatgcaaagtgataaatcaaaattagtctgaggctacagattttacagggtatttgttctatagcacaaagtatttccccactcttgcgtcacagcacaaactaccaaattttaattattggattccagcaataatttttaatggttttcaaactggcggaattttgacagtgctagttcgagtttgaagcttttgaattagatctctaaatggtgacagtttacatggttttatctagctttcttatttatacttgactgaattgtaatgattttttttctaattgtaatttgacgtaatagccatacaaaaaatgactctattcatactaggtttagcttctcatggttgtagatattacttcagttccggtgctggaaaatatgtacaacatactaacaggattgaaaaaaaaatagaggtttttcttcttgtttttttttccaaagcaggtaaagagggtagcaaagcatcggaatgatgtgctcaaaaatgcatattcctggtggggatggaggaagaaggcattagtaaaaggttaatcaaacgttacaacttaaccccattcatgtaggaataaatcaagtgagcagttccagacttttgcataatatttttactatgatgctgttttattaatattttctaaatttcaaaacaaaaagtgaatgtttgaaattgctgggtcccgatgttggtggctgttggagttttggaccactcgctagcagtgatttgaagattataat

SEQ ID NO: 107427 - DNA, 1151 bp, Homo sapiens
gcctgtatataaatcttttgaaaaaaaattgtcctagcccttctctgcgatgctggaagtagaagattgcgtctcagatggagacgcagtactgttccagttttctttagccttttatttatttagttattctgggtatttcctatgtaattttgaagtgtgtagagtatattatagtaactgaagctgcagctgtaagaagctgagtgaaagaaaaaatactgtaagacatccttaaagtttttatttgtttgggtactgtatatgagatcaggaaaaagaaaaatgtcccacagccacattggaaatacaggttcttgtccccaaattaggttagttcccagattttagatcaaaactgttaattcattaaaaccccttttaaaaggtaaattctactgttgtaattccgatagtctttttcccacaaatatcagaaatatatttatttaattctgtcagatgagctttctaccgatgccatgtcccaaagccatgttaaaataattcccacgttatcattgtgattctacttcctgccactaaaattgctggagaaacaaaataatgatggaacactatgaacaaaaaggagcatctgaactggtctggttatttagaatccaatgtgttcaaatccttttgttttcttattaagtcagatgctactgtaagtcagataaaattttgtttgcactctgcagtctttggctcaatgtatggaaatgtttgcacctatgtaaagtcacaagctaattacaaattgctacagaacaggagtaagctgaaaactgaatgccatgttttgtttataaggtggggaggggagggaaaataccaaaaaactctgttccaagtttggcatttgacattaatgtgaagcagtgggaccatgctgcctgctaaactactgtatgaatcgtaaatgttctgaagacgagcagctggaggctggaggatggcattccatacagcaaaggagaagcacccaccacttcatctgggaaaaggaaggaaattgcaggaggcctggagccatcatttgtaaaggggatgttgcggggtgtgatgctgttgaggagattcaccttcaattgcactgctccacagagccctcatataaggccaatcctaatgggctacctcggctt

SEQ ID NO: 107428 - DNA, 1031 bp, Homo sapiens
cttgggacactgaaattggaatcagaccaagatattttcttttacatatgggcatttatccatgtaaattacttttttggcttcctctttcactcccctgcccacacatccaatattccatatgtcttcttttatttttattttttatttatttttatttttttatttttttgagacggagtcttgctctgttgccaggctggagtgcagtggcgtgatctcggctcactgcaacctccaattcccgggttcaagcgattctccagcctcagcctcctgatagctgggactacaggcgcgtgccaccacgcccagctagtttttctatttttagtagaaacggggtttcaccatgttggccaggatagtctcgatctcttgacctcgtgatctgcccccacctaggcctcccaaagtgctgggattacaggcgtgagccaccataccctgcccatatgtctccttttaaaacacagttttctggtccaggtgtaggcttttccttttccgagttgcctttgtgtgacattctagcctgccaccaccactgcctgctcctcagccaaagatctattttagatagaatccgtctcagcttttgagcctactgcagagagcagcaacaccagtaattagtggtggcaagatgaagcaagtcataaattaactgatgaataatattttccggggaatagcagggcttcacccacattcaaaaggagggcagaaccaaccaagcggcaaaattccacagcaggcgggatgctgaaagatactccagtcactcagcagagaacagtttttccccgacagttcaccttgccctgctgaggagcactgtctgctgtcataattctccaagttttggaacagagccggagtttccaggattacactgctgcagatgagcagcactattcacacttcctagtacctcattttttttcctagtcaattttattttgaggttaaaactttttcattcgaatgttaaactcaaattagcttttcttaattttaccttctaaacg

SEQ ID NO: 107429 - DNA, 1171 bp, Homo sapiens
taagtgaccaccaaattgttatttgcactaacaaagctcaaaacacgataagtttactcctccatctcagtaataaaaattaagctgtaatcaaccttctaggtttctcttgtcttaaaatgggtattcaaaaatggggatctgtggtgtatgtatggaaacacatactccttaatttacctgttgttggaaactggagaaatgattgtcgggcaaccgtttattttttattgtattttatttggttgagggatttttttataaacagttttacttgtgtcatattttaaaattactaactgccatcacctgctggggtcctttgttaggtcattttcagtgactaatagggataatccaggtaactttgaagagatgagcagtgagtgaccaggcagtttttctgcctttagctttgacagttcttaattaagatcattgaagaccagctttctcataaatttctctttttgaaaaaaagaaagcatttgtactaagctcctctgtaagacaacatcttaaatcttaaaagtgttgttatcatgactggtgagagaagaaaacattttgtttttattaaatggagcattatttacaaaaagccattgttgagaattagatcccacatcgtataaatatctattaaccattctaaataaagagaactccagtgttgctatgtgcaagatcctctcttggagcttttttgcatagcaattaaaggtgtgctatttgtcagtagccatttttttgcagtgatttgaagaccaaagttgttttacagctgtgttaccgttaaaggtttttttttttatatgtattaaatcaatttatcactgtttaaagctttgaatatctgcaatctttgccaaggtacttttttatttaaaaaaaaacataactttgtaaatattaccctgtaatattatatatacttaataaaacattttaagctattttgttgggctatttctattgctgctacagcagaccacaagcacatttctgaaaaatttaatttattaatgtatttttaagttgcttatattctaggtaacaatgtaaagaatgatttaaaatattaattatgaattttttgagtataatacccaataagcttttaattagagcagagttttaattaaaagttttaaatcagtccaatgtgttt

SEQ ID NO: 107430 - DNA, 1611 bp, Homo sapiens
gtgatggactccgatttggagagtagtaagacgtgaaaggaatacacttgtgtttaagcaccatggccttgatgattcactgttggggagaagaaacaagaaaagtaactggttgtcacctatgagacccttacgtgattgttagttaagtttttattcaaagcagctgtaatttagttaataaaataattatgatctatgttgtttgcccaattgagatccagttttttgttgttatttttaatcaattaggggcaatagtagaatggacaatttccaagaatgatgcctttcaggtcctagggcctctggcctctaggtaaccagtttaaattggttcagggtgataactacttagcactgccctggtgattacccagagatatctatgaaaaccagtggcttccatcaaacctttgccaactcaggttcacagcagctttgggcagttatggcagtatggcattagctgagaggtgtctgccacttctgggtcaatggaataataaattaagtacaggcaggaatttggttgggagcatcttgtatgatctccgtatgatgtgatattgatggagatagtggtcctcattcttgggggttgccattcccacattcccccttcaacaaacagtgtaacaggtccttcccagatttagggtacttttattgatggatatgttttccttttattcacataaccccttgaaaccctgtcttgtcctcctgttacttgcttctgctgtacaagatgtagcaccttttctcctctttgaacatggtctagtgacacggtagcaccagttgcaggaaggagccagacttgttctcagagcactgtgttcacacttttcagcaaaaatagctatggttgtaacatatgtattcccttcctctgatttgaaggcaaaaatctacagtgtttcttcacttcttttctgatctggggcatgaaaaaagcaagattgaaatttgaactatgagtctcctgcatggcaacaaaatgtgtgtcaccatcaggccaacaggccagcccttgaatggggatttattactgttgtatctatgttgcatgataaacattcatcaccttcctcctgtagtcctgcctcgtactccccttcccctatgattgaaaagtaaacaaaacccacatttcctatcctggttagaagaaaattaatgttctgacagttgtgatcgcctggagtacttttagacttttagcattcgttttttacctgtttgtggatgtgtgtttgtatgtgcatacgtatgagataggcacatgcatcttctgtatggacaaaggtggggtacctacaggagagcaaaggttaattttgtgcttttagtaaaaacatttaaatacaaagttctttattgggtggaattatatttgatgcaaatatttgatcacttaaaacttttaaaacttctaggtaatttgccacgctttttgactgctcaccaataccctgtaaaaatacgtaattcttcctgtttgtgtaataagatattcatatttgtagttgcattaataatagttatttcttagtccatcagatgttcccgtgtgcctcttttatgccaaattgattgtcatatttc

SEQ ID NO: 107431 - DNA, 3039 bp, Homo sapiens
agaatattcagcatgtttgaatagactgtcagagctggaactctttcattaacatctctggcacctttagttttagccctgaacattttatcttaaaattaaacattaccaaatgccttagtttatttcatttattaaatttatattcttatttgttatttatatcagcttccaatcagaagactatacaacctcctagggtaagttaaagtttattaaatgaattgtgaatgatcatttgagggattagactgaggaacttggtaattgagatattttgctatctgttttgtctcacgtcaaattaagagaatgttgaagtcattgcatgacctttgcatgaatgggtccagttctattttaaaacctgtgtttggtcattttagtgtcaatgggatggaataaatgatttcttaagattgtactgacttctcacacccaaaactggaaagtaggaataatggctatattatctctgcaatcagaaggaagctgattccaatatatcacctcacctgttggattcattggatgtgcatacacagaatgacaatttcaggcttaaaaatgaggagaaatctatactaagttgacatcactgataattataatctataaaataaatgtaaatattgctgaaaacatctgttcggagttatgattcgatcctctcccatacaaatgttttataaacattttttcccttaaaactgtgcttaaggtttcattgtaccttagataccttattaagccatctgaggaaattgcaagaaaggagtaattttaggagggcataaatgaagagaaaagcatatttataaacatagacttatcacagtgacaggcccaagaggtatgttgtggacataagctctggaaaggattatattgtacttagcttcctataacggagtgatgatagatgtatctggaatgccaaagagagtcttctgtctgtggccggaggtagaggtcacatatgcttctaagtctgacaagcctcattgtgcctaaagggcaggtggggcgggtatgtgtgtctaccacaggggtatattctagaaagattggtgccatagctatgttggtcacaagaggccagcaacttaactggacctgtgaatcctaacacattttctttcccagttactgagttcaatttgcgatacttaaagatgattctgttttgcttccacctcttcactgtgttatttattctgttgttgctatttatgcttgcactttcatatttttagaagttagaatttcttgagctgagagtggtgaagtgggaaattctgtttagaaaaataatattaagagaataatacagttattattaaactattaacccgacttggcaagctttgctttaacatttacaggcttatttcgttgttttgttttttcttttttttttgactgtaggatttactgcttactacgtaatttaaatattagcatatataagttttactataaaatgacatgacataaattatatttttatgtaaatatattttaaatatttttcagaaagctgtagaggaaccccttaatggtatgtggttatttcactcttaatcctttaccagatcataatttgatctggcccgcaaaacagttagaatgccctgtctatgccttaggaagaatctaggtttttttcctctttttttctttccttggcatctctactcttgattattcatcaagaattatgggctgggtgcggtggctcacgcttgcgatcccggcaccttgggaggccaaggcgggcagatcacgaggtcaagagattgagaccatcctggccaacatgttgaaaccctgtctctactgaaaatacaaaaattacctgggcatggtggtgtgtatctgcagtcccagctactcgggaggctgaggcaggagaattgcttgaacccggaaggcagatgttgcagtgagttgagatcatgccaccgcactccagcctggtgacagagtgagactctgtctcaaaaaaaataaaaaagaattatgaatattacttttataatattctcaccactgggaaaaatgcactattctgtgtctaagtagctgcttaccttaaccaagtgatatttgggcaaggggatcgttgccttttgctactggttgagacgaagcatggcaccccctagtagagaaggatcccaattacttccaatttgtgatgtacacattttagaaagatacaggctattgccacagagatagaccaaaacatctcattttctttctttgtaaacctagatctgatttcccaactaagtctgtttcctttgtgaatgctgtgggtatgatccacagaaaggctacataatgaaatgatagctttacaattaatttggctgtagagttgtagactagttagcatatcattgcatatttgtttatttagaaatgatttccaattgtggaacctcactaactgcctgcttggcttgttactaatcctagcattcaaagaatcaaaaggaatgatgaatgatggtaagtataaaatgcacttaataattatagatcagttaaaacatggacattggaaaacaaaaaagcttcttgaaaatgtggctcttttttagtaaaagggacactgtcagatgataaaggttcacatttcttgatgtatacaacttaaatctactttgctaaaaattgcaaaactactactgtaaaaactgtagggtgtcacgaatcagactccagtcatatggctcccagcaaagagaaattaccactttttgtaaaatgtttttcagattccgtgtctggtgactgtaactttaagatgccttttataaggcacataaataatctggcacaaatctttatcattttgacagagtttcttttatgcttgtgttggtgattttgttgcatttaacccatggggacttaacatctctgcttttccaatcaggagcttggttctaaccttttgggagatgattaaagagagaggttgagagagagagagagagagagagagagagagagagagagagagag

SEQ ID NO: 107432 - DNA, 1020 bp, Homo sapiens
tgcagtatccatacaactctggtgaagtagtatgagatacctttggctgacgggcagcacgctcttattttttcctcactatctgggttgtcctcccttttactcccatgccaccccatgccttccatatctagcatagaatgatcttcagtacagttgccagcaggtctggtgacaatgtctcaagtggaactaagcattgtctatctgccacctccttaacttcactctcctgccttctccatcacttacgttcctccaagcctgtgaaaccactgtactgtacctgtcactgttctgacattaaaattaaaatgacttaaatcttgacaagtaccccaaattattttttctttgtcataggttagcatataagtatactatatgctaaaatttatgctatatgtttaaaatttagtgcaattttattgatagtgtcctaattttattgatagtatcctaaattaactttttaaatcaacttgtctgatgccagggttcagagggacacctacagtcagttgaaaggcaagaagagacaaggtacaggaaagttgctctttagataacatggtagactaggaggaacattaatatggtttgcttatataatctgactgtgtaaatctgaatctatgtaacattaaggttgcaaatttgagcgtttatattaggaagttaaaattttaagtgtctccaaaataatttttactcattgcacgtgttctgttttagaaaagcctaatgattgtgttttgatttaaatgcaataaaatcctcaaatagttaaaaatccaagctttctcttcaagaagaagttaatgtcgctatgagatttttaacttttataatttttattatttccaactttaaatttgtagccttaatttgctattttaaagagtaggcctttcactttctacaactttctgtgaaagtgactttcactttctattttttaactttttaaactgtgttgtattttttttcttttattggaagcattttaattttataaga

SEQ ID NO: 107433 - DNA, 1027 bp, Homo sapiens
tttaaaaagtatgtaggaaaatattttaaatgtttttatttattgacaggtgaatattcattaaagaatgctactggccttggtttaattgtgacttctacagggatattaatattacttcactactatgtgtttagtacaggtgagttttcattgttacagtatgattttgtctacctttttcatttacaaaacagcagttttggtgaaaatgctcatataaattttttacaactcaataagagtaggtttattaaaagatttttcatgctattcttagtgacattttcccattcatattaattttaaggttattctaggttagctgttttgtaaaaagtgactttcatatgtatttgatgccaatcagcataattttaaattatgccatataacttcttaatgattattttcatattctaatttcagttttttgaagttataagtggatgttaaacgcagtctttctcttcttttgctaagcttctgcttctgcattaagaagactggttctataaaatggaattatgaatcacaaatagtagaaacatatttgttttaattattagcaaaccttaatactgtagttttaagagatggtatggaaatccaaactataatcagtatcattttcactgcattttgaaagtagatcactaccatatttagttattactattaaagagtcacatttaacacttggtcttagagcctatctctggctcgttgtacattggaaaggtattagtttgttataaaatgacatctagagatagagagcatgatgtttacagtcaggtatttgcataatggttccctcagcaagagcaattccatgtgcatgtggagaagacattcataatagccattcatattgtaaaatgcacaagtgtggtaaaagcagcattgttctaagatttagggtaaaaacttccagtccagcttagctgactgtgaaaattaaaggctgccgaatgtgtgaatttggagctgactacttgtgtggaagggttagatcactgagtta

SEQ ID NO: 107434 - DNA, 1039 bp, Homo sapiens
agtgtgttgaagttgagactgaataaaatatttggtttggttttctgttcaaaattttaccttgataaggacaatatttttctacatatatcagtaggcagtaatgattacttcaaagcttccaaagccagatactacacctgcatgttccaacatagttgctgaatttattcccaagatgcatgtaatgtatactttgtattattgagaatgaataaagaaaagtcataatgatgccttccagctgtgcaagttaatattaaaatataatttgtttgcatatttcacctaataggtcttcttcattgctatactgtttacttaagtgaacaatggaaatgttgctgtttatcttaaggatttgtaacatgcctaagatcttacagtacagacttctataattaatgaaacatttttctttttcctttccaggatcagctcagctactatttaataaaacaaaatctgtagaattcacgttttgtaatgacactgtcgtcattccatgctttgttactaatatggaggcacaaaacactactgaagtatacgtaaagtggaaatttaaaggaagagatatttacacctttgatggagctctaaacaagtccactgtccccactgactttagtagtgcaaaaattgaagtctcacaattactaaaaggagatgcctctttgaagatggataagagtgatgctgtctcacacacaggaaactacacttgtgaagtaacagaattaaccagagaaggtgaaacgatcatcgagctaaaatatcgtgttggtaagacttctatgaaagcttctttttttatttgtcctggtgcaacctgatcctctttcgagaggaggccaaatggggataggtactcctttgaatcaaaaagcaggctgttattaataaatgttgatgtaatgtttagcaagtttaagattgtgatttctatcctatttgttaatctactcttcatggtaaaacacatttactatttaatttgtattacttgttaatttgtatattgtgtggttctcaaact

SEQ ID NO: 107435 - DNA, 1040 bp, Homo sapiens
ttcttttcataaaattaaaagtcactattattgtgattctggttataatgatgtgttaaaataattgtatagttggaaactctcaagtacagcttaatcccacaaggaagcaagtttaatttgtttactttcaagctaagtaaactctggaagtcagacatctcatttaaagtctaatagggattttttagattgcggttattgatttttgcattaataggagtaacttaagaatataaatgtaactgctaacacacactcttttacaaaactatgtgcaggtcaaattctataacagaccagtattgccatcatcaaaatcctgagtttttaaatcatcagtgtcctcctgatttggggaaaaattaatgagttgaaagttagacccttattctcatgccattctgtaggccttaatcttatgaggatataccctgtcaaattaattataaaattaagttttatggccagcattccaaaatatcagataaaggtttttttcattattttttagaatatgtagatatcattttgaatttagatctttgtggtaaaaactactgaccaaagtcatattcgattgcttttttagaattcttctttagatagtttgatctttgtgtctagtattttacaaacttctctttcttttaagtctttcagatatggcaattgggaaatacacctttagggtcaggtgaattctttatttagcttatttaaaaataaatgtatatactggcttgagaaaataaggagctaatgaaaagtttctcatgcctcagaaataaaaataaaccatctggttacatatgagctctcttctcacagactcattctcctccagaagaggtggactccagcatcgtggtcgaccctttccttctccactcctcactctatcaaaatcaaatagacacttggacacaggaaggggaacatcacacactggggcctgttgtggggtgggaggaggggggaaggatagcattaggagatatacctaatgtaaacgacgagttagtgggtgcagcaaacca

SEQ ID NO: 107436 - DNA, 2106 bp, Homo sapiens
ccatttctcatttgcagtaaaataaaaaagtctgttgtgaaaagggtgaatatggataaaggaatgtactgtttcttcagcaaattttttagaagatattaggatctcaaagcagcttgagtatcatttgttatgaggttttcataatgtattttctaaaatagttaagcagttattaaacagatactttgtgtcagcacctggtattttcaagtgtgcaaagaatacagaaaggggttaccagtacttgatgtcatatataggtagctgtataattttcactttaacaaatattatataatgtgttaataaatattttcaacttacaactgaagaaactgagtctgaggttacttactaaagtcacacagctaataagtgaatcaataggtatatattctgaatctgagtccggggttctttctatattaccatggttgcatagcttgagtggtagctatgaattgtactttctggcccgtttactaccaggaagatgagaacagactaggattaaagactgatctactactactactgagtaacagaagaggcataaaatttagtaccacatttacagtttttctggttctgctttaatgtgattatcttattagtaattttaatatgtagtgtgtagtattttctgcaaaatttcagctgctggcattaacttaagacaagttgaaagtgtattctcaatttgtattatattgtttaatgattattcattttaaacttaccatgtaattgaattaactgaagtataatatttatagtatgtcttgaaatggttgttgtacaataaaaaataaaagcatcttaaaatatatgtatagagaaaacattaaagttatttttcttctcaattcttcctcctcccccaaccccaattccttaggcttcctccctagaggttcaaaaggcacaattagaaggtcgtttggaagagaaagagtccttggtgaaacttcagcaagaggaattgaacaaacactcccacatgatagcaatgatccacagtttaagtggtggaaaaataaatccagaaactgtgaatctcagtatatagacattatggcattttggaatttgtaatctcatgatatttttgatgtatttatctattggagggggggtgggtaggggagttaatttgtgacttcgtaacaataagaagttattatctaatttagtaaagaccctgatctgttgcatgttttttatttgatagtttgaatagaaatttaattttctaagttttactttttgtttctggcttttatggcttaaggttttctttggttcttacattagaaaatcatttttaacctccattatcatttttctaaggttctttcctttttcttagttgctttctattctgttttgcctgtcttatttattctcatttgtgattatttagatcttaagaccaaactttcttggtataacagtcctaaagattacaaaataaaaatatagagagagtaaaagtaaaaagtaaagtaaaaagagagaaggtatgattttactgctagagaagtttgtctctgaagaagcacaaaagaaaatattagtgaatttaaaataatttttatactgctgtagcataatttctaaatttgaaaaaaatgcaatggtaataaaatgtataaaaattagaaaactgtcattgtgttaaactattacatttaaatgattacatttaacacaatagctgtctcataaaaaatctaagaacttgtagaattatttgtaaggtatatttagtgtttttttctcttttttcaaatgttgcatagtggtccagatcatctataattaattataagtttcttatgatttacataaggataatttggattctactcttgctgcatattcagaaaaatattatttactgttaattctgatatgaattgtatttaatttgttgtcctaatagtttttaattggttcatttaattttaaagcataggttaaatatctttattttttttaaaatacaagggtccttctgtacttttcatttgaatcatatcctctaactactctgtaagaaacgtttttacatcaatattttgattgattttattgctatac

SEQ ID NO: 107437 - DNA, 1026 bp, Homo sapiens
tgctttttaaaaatctttgtgcttagtgaaataaaaaagacattttatgcttatggtagttgagtatcaaagtattactttagaaaggatttttttctgtgtttaccttgcaggtaaaatacttaggactattagatgcagagttttaaagagacaaatgtagaaccctaaacttatttatagcaaattatgtaatgcaatatcatctgtaaaataaggctttatatccataaatatgagattaatgccccacacatttctatttcatagtaatttttaccacatcagtcaaccaaaacatgtatttactgccttttagagtagatgaaattctgtttatgtcctgcttgttcataacattccttctcttccagcatatgcaatttggttagaagagatagtaaagaaaacactgtgagcttcttttctccttcatatgttttcctccataatgatgccaactcattttcttgtcttttcagaaatgaaagtactgaaaagaagaataaagatttacagatcacatgtgattctctgaataaacaaattgagacagtgaaaaagttgaatgagtcactcaaggaacaaaatgaaaagtaaaatctctagttctatattctgaatatgtgggatttttcaaaaacaaaatgattccctttatatagaacattgttttttattgataaaattaatagaattgtcacttattttagatataagatatgtatttggtggaagttacaggcaattgctgttcttagaaattttgttttaaaggctgggcatggtagctcacgcctataatcccagcactttgggaggctgaggtgggtggagcgcatgaggtcaggagtttgagaccagcgtggccaacatggcgaaactctgtaaatactgaaaatacaaaaattagctgggtgttgtggcgggtgcctgtaatctccgctacccagaaggctgaggcaggagaatcacttgagcccgggaggcagaggttgcagtgagcacaagatcatgccactgcac

SEQ ID NO: 107438 - DNA, 1075 bp, Homo sapiens
agattttgttcttaattctcacctgaaatgagaatgctgatggtgtgcacacttagcagtttagtgttaatggctacctctgaggaccatacctttttaattgaatactgtatgtagcgcgaccttcatgttgctgcagttgtatccatttccattaatttgatcatagtgagattgtttttatcagataatgtattaagttaaaaaaatataacagtatccaacttattagaagtaaagtcctaagtatatgtgactaatacagctttgcatgacccaacagataccagcttattagatacttagtaaacttttaaattgtaggtatgtgttgagcatatgatatagatgatagtggtaaagtctatcttctttttttttttgaggcacggacacttgctagtatgttgagagaagttgagagaaaaaatgaagagcttagtgtgttgctgaaggcgcagcaagttgaatcagaaagagcgcagagtgatattgagcatctctttcaacataataggaagttagagtctgtggctgaagaacatgaaatactgacaaaatcctacatggaacttcttcagaggtaaataaagtaaaatcttctgtgtaaggttagaacctagaatgaacatgcagcatttcttttctgagacccgaaaatccttttgtaagcatttcatatattctgataacacatgaggtaagtaattagcaagaaacttaagtcattgtgaaatgaagtgttgcttcctcaaactcagtatcaatgttggaaacaaaatacaggtctttccagttgacttcttttatgtattcataacagtcagcagtcatttgggagataagctccacaaggacaagtttgtctgttttgatcactgacagatccctagggcctgtaggagtgcttgctgcatagttaggcacttcattaataatttttaaataaacttagttgtcaaattagtattaggttgaatggtcatttctgcagatcaaaagtagttgaatattggcaatttcatatcattctgcctaatagaatggaaatttaggtgtaagtgtttaactcatc

SEQ ID NO: 107439 - DNA, 1898 bp, Homo sapiens
aggaaaaggactaaggacgtaaaggccaggtgatatcacccatgataagaacattattctgaccagtaccaataactttgtacttattacagataatccacactcataaactagtcttacaatgcctccaaaccagaggtgaagctgtcattataaaaggttagaaacagaaaagtgggtgctctggaaaattcagaatatttcccaagacttcatttcatcatggtctccaagattatttgaagacttctattcaaaaaaaggacccattcttaaaaattccctaattctgcactaagtctgccttttcttctattttcgtataatttttttttcctttctttgactcccattcagacttggagaaagtatagcagcaaacaatgcctatagacaacaggaaacagaacatatacccagaaaaatgccctggcaatcatcaaatcacagttttccaacatcaataaagtgtttaactcctcatttgaaagatggtgttcctggattgaatattgaagaattaatagagaaacttcagtctggaatggtggtgagtgaaaaaatagcaattataacctggtacatattagctatatgtcagtcccaattataacgtgtatctaaacactgtcaggtacagatttcactattgaaaccttaatataagaaataacaatattctggaaaatttggaaataagaaaaatcagtcaaaatttcaacattttgccgggtgcggtggcttacgcctgtaatcccagcattttgggaggccaaggagggtagattgccagagctgaggagttcaagaccagcttgggcaatatggcgaaaccccgtctctattaaaaatacaaaaaattagctggacgtgttggctcatgcctgttgtctcagctactctgaaggctgaggcaggagaatcacttgaacccaggaggcagaggttgcagtgagccaagatcataccacttcactccaacctgggtgacagtgagacccatctcaaaaaaaaaaaagaaatatttgtgacttacctgatgtagcatttgtttttattttgttactcatcattaagttttaatgatttagttttgaagtaggcatttattttgtcattgtgtcaaaatattttattaaaattttaagtttttttactcttaaaatgtaggtaaaggatcagatttgtgatgtgagaatatctgacataatggatgtatatgaaatgaaactatccacattagctgtgagtataagcttattttaacaatgtgtaataagctttaatagatgtattcctaaaatgaaaattaatgatatgttttcttgtagtccaaagaaagcaggctacaagatcttttggaaacaaaagctctagcccttgcacaggctgatagactgattgctcagcatcgctgtcaaagaactcaagctgaaacagaggtgtgtagaatataaagacacatctgatttgtagaaaaattaataagtaaaacatgcaaaatattagttatgtatttgttactctaattgaagtaaattctccttagcatttgacatgcctccttccttcttcctgaaattctgtcctctttaattttggttacatcgttacctgatttttttttgctaccttgtattattttcctatgttatttattttgtacctttaagtgttggggactctgggacttatattctaaacctttttcctttagttatgtgttctgtggtttcaatggttaccaaaatagtaatgttcctaattttatatgtcaagcacagatcattttcctgagcactatgtgcctatgttgctccatttaaatatacagcaaataccacaaactcagcataaccaataatgaactaatcacccttccctttttaaaattattc

SEQ ID NO: 107440 - DNA, 2010 bp, Homo sapiens
tcgatctttaaatttaaatgttctaatttaatttgaattttactttttattttatagccttaatttggaagtgattggccatttttttcttttaaatgatagcttggaaaaaaacattaattctacacatcagtcagttgtgggttttttaatccacgaaaatatataaggcataatttttataggcacatttgaaagcattcaaaacctttgccagatttttttaaactgttcatattgattgcattgcagtgtaaacagctataacaaggtataatatattcaaactatatagactataatatattcaaacattagaaacattttagaatttgcctagaattaagatttacatatatttactcacctcctatctaaaagagctgacattgtttattctttctgctgcttcttttttggtttctgatttatttaggacccacgtttgattactcctttggcttttgctttaacgtcagataatagagaacaagtacagtctggactgagaatattattggaggctgctccactgccagattttcctgctttagtgtgagttgtaatcatttgcagtgtatctcttgtggtgttggaataccctgctatgtctctttagtcctcagtatagatacacaagcaaattagtgaattgaagacttcattgtaatagtaatttttcaagtgatttctaaaaatgtttgattcttataaatgaaaagttcagatgtatactcactcagggaaaagctagatccaggcagttaaatgttcttcaggtactatccctctatgtctctagccacttctttttaatgataacttctggacactcttaagcctacatcctcccagtttagttcctccatagaaagagcttttccttcctgactgtttaaggaaaaggtctaagcattagtcattgaccaggcctgggttatccatgagaacgatgtggactaaaagttagttgggataggagaataggagagttcctaaagaaaaaaatctgaacttttatcagaaagtggaaaaatgacaaccaggcaaaattttctactatactcgttactttcaagcaataagaatatttgcaattatgtttgaaaaaaaattcagatttcagggctctctgaactaaatgtctattaggagtctggtttaaaatttttttaagtcatttatatgtatgaatttgtaaaaatggtttgaataatttgaagtagttgataaacaggtaagatattccctgtataccgggatcagcaaactggccagtggacaggcatctgtttttgtaaatagttttattggaatatggccacacccactcatttttatactctgtctatgttgctttcactctataaaagcagaattgagtaattgtgacagagaccagataggtccttgagtctaaaatacttactatcttgacctataagaaaaagtgctggtccatgctatatgctattcactgatttagcgattccacttttcagaattagcaatttaggtcatcataccttaagagttaaagtatgggatgtaagacctagagaacatataaccaaaattcccttaattttataataaatatttttttaacagcaacaacaaaaatacacaggaagcttttcaagttacaagttaaaagtggtctgtaaagctgctctattttgtgatggcctgcttgcataaactggtaatctgacatgaaacaaaaccttaagagcttcaaaggggaatctgcagcctcactgaacatggaagtcttatcctctgcctctgtgtgtgaggccttcccaccattttgactgtgtcttggcattccctgtcttatttgtgttgtaaataattttctctttgggcattatctcagatgtccattttatgcttactatttaatgcccttatttgacattatcttgggcgtttaataaactgaatgtatattatggatgcattggtaggtagggtttttgtgtgtgtgtatttacttgtttgttt

SEQ ID NO: 107441 - DNA, 2571 bp, Homo sapiens
atgttggcttttttgtttgtgattgtttaaactacctggttgattctaacatgcagctaaagttgagaaccactgcagtagggatacatgattgcttgaccttggagatatttataattaataaagtggggccttctcattgaattggaccacaacttttaaaataatagctatttacattaatttataatatacaaatatgacaaaacaacttacccttattcaataaatatttattgaaccattgagattcttgctaacaaaaaacagacatccaatggaaagatatcctcgctgttttaaccattgagtcagaaacctttggtgccagtccatctcttaccacttgctagtcatttaaattgtgtgagtttcagtttccttgtttgtcattgagctaatttaacaataattatactggatgacagtgatgatataatttgtatgaaatcatcctgaatgttatcttttacacataaagtgagaatttttttgttgtatatcttaacaaaacttaacctctctgtggagatgatacactaaaaatgcatattgcaaaaatcttgacaactgtcaagtgtaccactcttatagaacaacaatttacatatggcaagattgacctgggatttggaacaaaggttgcagattctgaattatggtgagtatataaactctaatgacaaaatggcaaggcagtaaaaaatcgaaagatgtggtgattctcatccttttggaggaccatcctttggttataacttaagatataacagattaacaaacatattttcataatgaattttttgtaaattcattcaatttgtagattgtgtgctttttgaagaaaggtattaacatttgttgttttttattgtttaggtttgttttgtcttgttttaacttactataattatctaagggttctgaacatttctggagctcctttttgacattgcctcagtaatcaattttacttttttaaatgaaaagcatgaaaaaacagaagagtagttttattacaaggaaatcagtcactgctaaaggctttttaataacagacaactctccttccttggcaggtcaggaattatggttaaaggtggattttcactgatggtaataagatattactttataccccttccctcctcatgaattaagtccatctaatctttactgaggacctgctgagtggtagacactatgatttgtttctgtttccacagatgtcacaattgtcagtaattgtggacctttagagtaagaattatctgtttttatatttgtatactactttcaggtacaaaactcagaacatgacctagtgtaattcattcattacgtattagatattctatattgcctaaggttaccgtctgttgttgatattctagtgacaaagctaagaattaaatgaactgtgtttcgaaactactacttacttgaaacagaaagttgaagcaggttggtagtaaaagaaacactgtctaaactaaggctattaatgccagtttgttctctttggatcttgagttataagaatgttgattgagatttttacttctcaatagaaacaggactttatcatcttgaatttaaaaaacacaagtgttggtttttttcattttctttagaattttggacagaaacaagctctaagaaatttttcagttatctaatttaaatgtgatttatctttaaagcaaacttgctgctgatgtaattttgaaaactcttgatttgattaacaaacttaaaccattggttcctggtatggaagtaagcttctacaaaatacttcaggtgagtttaaactcttcaaacattgaagtttattcatacataaatggtcctaatataagtttctgttttaatattcttaatctttagaagataattctcttagaattggcaatgagaagaaagtttaaagttgttgtcttaagcagttataatagtctcactgcacagttattttatatactttcacaggaattgaacataagtgctcatgacactaatgtagagaatgttcacaatagtgctgcttcctcagccttttcctttcttgtgttgtatttgtatatttcttcatttgtttctgttggcattggaggaagagtgatatttgttttagggtttttgtttttggttagggttgatgtagggtattaaggggatagggagacagctggaagaaaaggattgtgataattagaagggctgtgcagaaaatagctaactcacaaatttcaatgataatagtagctgaatatgatctctagctgttatcaaaaggcaaagtacaacaaatttagttcaaagttctaactggcttttatttatgattctagaatttggcagcctcattctataaaatagaatgaatcattcccctgggctaagcagagaaggttgactttatagaccagaaaagggctgaagaaagcacaaatagggaactaaaagcagattggtcatttcaaagttacttttcctatagaattataataaagggggcttccttattatactaactcaggttgactgaaatctcctggttttttggaa

SEQ ID NO: 107442 - DNA, 1050 bp, Homo sapiens
tcacaaaattttctattttatcttggtcttgattatttaacaatcagttttaacatttaaaaagccctttgagggtcttgagggaaattatttgtggtcataaactattaagaccaatgtctattatttaattattgttattacttttagcagattcaggatatttgttttcagtagatacttttagtttagaataatttttaaatcacaaagtctgtttaaaaaagtcttatttgtaaaaccttactgtctaatttgagaaaaaagccatagccctcaaaactggttagaagtataaattttaaataaaaatttaaatattcacaggagacttaggtcaatggcatattgaaggaaatataaaaaatttaaagagagtgttacaattcagtgatgactttttctgtattgtatattccatctttgcttttaatcatttgtgatggataattctccaggatgtcatagatgctgctaactgttcctcggctgatcgttttgtgacccttctgctgcctacaatccttgatcaacttcagttcacagaacaaaatctagatgaggctttaacaagaaaaaaatgtgaaaggattgccaaggccattgaagttttgttaaatatcctttactgtcattaacgtgaaaactgtataactaaccattcttttttttctagtattgcattcactgcattttgtctttatttgtaatttgtcactttatgctcatatttatctagaattactgaactaaaatttgaactgtagaaaaaattctcaatgagtgaaaaagatccatgattttttttccttatttttctgtgtgaaacttttaagttaaagtacattttttaaaatgctgtttaagcttgattttgacacttgtatcacaatttgacatttggtggtaaattctaaaatgactattctgttactccatgttactgttttctgcttgatgctaattatttcccctggacggacgatcagtagtgccattttttggtgatgtgtattcgtggataaagaaatgctgatagagttgtcatga

SEQ ID NO: 107443 - DNA, 1077 bp, Homo sapiens
cagtgtggaaataaccatcctgaaggttttatattctatgctacagtatcctttatagcggttattgaattttaggattataacaagtattactaattctaattttattttttagggtttttttggtcatttataaacaaaacaggtttctgtttaaaaataatttaagtactatggaaggagtgggaggagtttaacgttggctgaagttgaccttccctctgaggttctcacagtcctgcttatcaggagtaaccaccattaataagtttattttataatcttctagaacctattcacacatttgaaaaataatattgaaagaaaaaacttaagttttgttttagaatattttctttaaaatatgtagcattttcagcttcatcatacacttgctttgtatattaaagttctgtgaaattgatgtttaatgaacactttatattgcacaggttttagaattacttcttgccttctgttcagtgactcagctgcgccatatgctcactcagatgatgtttgaacagtctccacctggcagcgccactctgggaagccatactaaatgtttagaacctactgtggctctactgcgctggttaagccaacctttggacggatcagaaaactgttctgttttagcattggagttgttcaaggaaatatttgaggtaataggatgactgacagattgacttttctacttttgtgactctcagttaacaatttgtcttcaaaaacattctttgtaaacttacagttcatacacttgaggaaaacatctcaattactaacagtcatactagactcgctaggtttttttctgccagtcatatatattagtgttttccttttttttcactgagtagtgtgtatgtatatatatatatagtgctcatttcagtgtaataagtaaagatattaaaaagatttatataatttgttgcctgactactggggatagttacattgtctctccattgcaatagatgccatctaccaagtttagtaggccattgaatggacaatagaggcatattggattcagtcagtgaaatggagtagagcatgccagat

SEQ ID NO: 107444 - DNA, 1050 bp, Homo sapiens
gctgaattttttttgcttccaccacaattatgagagttcctcattacagttcttttgttaacacaaatgctaacaaatgctacagttcttttgttaacacaaatcctgcagtatttaaggtagctcttttgtttccactctgcatgtgtccctttattagaattgacaccctgatttaccatcattgaattatttattctaaggtgacaaaactttggaaatatttatctccaactcgtttgcacgcatttaccaaattatttttttctgtaggtactctctttataacaatttttgaatttaaatttatctctgatctaaatttctcctgtagaacatttatcttttaaatgcaacaatcatttaatagagttgataatgatgtttaataaaagtttgcccactctgtgcaagatatactttttaaaccaaaacataaaatttataattctaatttattttttaacttttttttcctcagagtaatgtgaaatctttttatcgaactcttatcaccttgttggcccatagtagtttaactgtggttgtgtttgcactttcaatattatccagtttgacattaaatgaagaggtgggggaaaaggtaaatacaatttttcaaatttattctgaagtttatagtctgatattttaaaagtcattgagacttttttatttttaccttttaggatggtgtcaacttaattttttgtctaatatgctttttctaatttgtccttaagctattccatgctcgaaacattcatcagacttttcaactaatatttaatattctcataaacggtgatggcactctaactagaaagtattcagttgacctactgatggatctccttaagaatcctaaaattgctgattatctcaccaggtatgactcacttcagtcaattttagaacttttttatttttaaaccaagatgtgttggttataaacagaattgtcttcttaaaatataataaacttggattctactgattcacagtagactaaaatgttttgatgtgctttactcacactcttttttcttt

SEQ ID NO: 107445 - DNA, 1632 bp, Homo sapiens
gattttaatttgatactaaaataattagtatcaaagaaaaagcttgctacaaatgtgtaaacaagttttttctttgatactagtttattttacatagagaaatcatttgaatttctgaattggagggttatcataaagaaaataagaaaatagccatatcataccttttttaataataaattcatatgaaataaattctgtatgaattatctgcaaaaccttgtaagaaaatgatatattttgtgcttttattttaacttatagcagtagacattgaaaccagagattgtcttcagaatacatataatctgaatagtgtgctggcgggagtggtttgtcggagcagccacactgattcggtgtttttgcaggtatacagacccacacagtgtattcccctttccttactgtcagatcaaaattgatagtttctgtcataaactgctgacttacagtgtatatatgctatataataaatactacatgattaggcacagttcatctcattaaaagctggttgcacacatacaatttaaatgtttctagagaagagaagcttatccatttctatcaccactattgaagaaaaacaaatctacattataactgctttgacttataaacacagatgtctgtgttttgagacataagctatttatattaaaattgtaacgtgagttggcatctagtctcaatctgtggaggaaacgttctacaaaaattaaagctgtagatagagtctatttaatatagattcaaagctcttcatatttcattgactctaaaatgtcatcaattgtaagaaagaaaaacatcacaaattaaattgacatgcagttttagaggtgataaaatgtgaagaagggtatcttctaattgatggactacatgtgtgtttcaaactgcattcaagtttaagatgactaagtgaacaaggttgataaccatgctctgagacagaatacgtagaaatgtgtgaattgagagaagagccctaaggttcttacattactttacatgtgttttttaaaaaaattgttttaggaaatggaaaaggacatgctcagaatgtgcctgagagtccattattttaagcaggcaatgtttttatatctttatatttataactattttcttattctcagtgcattcaacttctacagaagttaacatataatgtcaaaattttctattctggtgccaatatagatgaattaattacgttcctgatagatcacatgtgagtatgcaatcaaacataaaaccaaatagtttatttgtttatttttaaattacaaccatgtggtagattaatttttcttagataacattttctaacatataaactgagtgagactccgattcttatttgttctgcccagatgattttaaggatcaaaagttgtaaaagtatgtgacctcattcattggtgaaaaaatgtaaaaaggaaaaaaaaattgtaaagcaactttaattttcataagaaaaatttatggactgaattgatttggccagaaaaaaattactgaaattgaaaattgtgtagttattcttgtaggaaaatatactgatgaaacagcacatggtccacgctgacagttacttccatgttttcatgatggaattgaata

SEQ ID NO: 107446 - DNA, 1103 bp, Homo sapiens
ccataactaccctctgggcttcatttttcattctcctccctcaaagtaagtagaatgtattagaatttatttgcatagtaaatatattggtactagagtgcagatttgtaggctatgccttcatcgcatgttcaatgtagtgtgaaggagaaatattgctaggaactcaaaagtttgctaacttaggaaatagaaatataatgtactataggatagcataataggccgaccgaactgagatggtataagaaactaagaaaagcttcctggtggaaattattttaaactgagatccaaatgattactttagctagggagggagggattaggtaattgatgggtactctaggcaggggtgaatttttcacagcatgtgtgaattttttaaattgggaaggtagcagtggcactttgagggaactgagttttttatttgaaatggagaagagatgaaaattgccatcgcttaaccaacacattttgattactattttataggtaatttctggacagaaactcacacgactatttacatcaaatcagatattaacaagtgaatgcttgagttgccttgtagagctacttgaagaccccaacataagtgcttcactgatcttaagtattatcggtttgctgtctcaactaggtaatgcatttaatttctcctttttagtttttggaagatgtatgaacaatattttaaagtgcaggcttagttatagaatctcttaaagaatgattcaccttcaaagacttctcagtctagtgtgcattgtgaatcttttgacactgaggaagtcatagctaccgatcaaagaatgatccttctgtaatagattacactgaatttagaactaaagggtaaaagtactgatgttgctttttctatcttttcccccatttctttagttcttaaatgttcatttagtggtcactactccaatttggggcagggcggtggggatatttctttgtgtgattataatagtaatatatgcatagtttaaaaaattctagtgatccagaagtattaacacagagcagcattgtccaataaaactttcttcagtgacagaatggttttaaaactgtgttatccaatg

SEQ ID NO: 107447 - DNA, 1034 bp, Homo sapiens
ggggcaagcgaccatttctcaggtagaggatgacgcacaaacgaaaaactggccatccaacatgaaggacgaggaagcgcacgaaatcagagcgcacagctgagtgaggaatcccccttctcctaaccgattcctctcccgagaaatcgcgagatttctcgccttcacgggatctcaggccgaaacctcgcggcctctcagacgagggtgggttagcgggggcagctcccaacccccgtcctggacccacaaatcacctcgacccctggcccaccccggccgtcaccgagaacggtcccctagggtgcctagggacttccggagcccgaccggatccggaagcttctgagagcgagggggtggggccgaaaatcaaaaaaagcgcggcgaaagctaaaggccggcgcacgctgggcggtggtggtccctaagccgggccgcggccggtgcaatggactccactgcctgcttgaagtccttgctcctgactgtcagtcagtacaaagccgtgaagtcagaggcgaacgccactcagcttttgcggcacttggaggtgagaggctctggggtagaggacagatggggcttcccctagcaattcttatttcacagtgaggccgaggagtggcggccccagcctgggaaagaaaggacagtccttcgatccctctgttgtcttttcgtactggtaaaggctagtgagtgtcggggttccgctggccgcagcgagaggcaagagcgctcactgaaggctctaggaaaagcgggagtggggcaaaaggttgggaagttcaggttgtttcgagtaggtaacggaaaaagctcggaactttatcttttcctttgcttctagttttggtttttctacgaaaccaagccctcaatacacaactattctcagtgacggaaagtcatgattaaaacttggttttgcccttcggtaatctataattgaatttgttgcttactgctcttacttgaactcgggttgaactcaaacttgaaaaacattatttcaacattaagaagcactt

SEQ ID NO: 107448 - DNA, 1054 bp, Homo sapiens
cgggggttgggagctgcccccgctaacccaccctcgtctgagaggccgcgaggtttcggcctgagatcccgtgaaggcgagaaatctcgcgatttctcgggagaggaatcggttaggagaagggggattcctcactcagctgtgcgctctgatttcgtgcgcttcctcgtccttcatgttggatggccagtttttcgtttgtgcgtcatcctctacctgagaaatggtcgcttgcccctagtctagacacggtgaggagctctgaggagaagaatcttgggccctagattttgaggcggcctgggaggggcctcgtttttaaatctctcctacacccgccccttctgcccggggatggtagtttctcagagtcaacctattggcattatgtggcaaattagtcatgccctgaccaaagtatttgtcacatttattcgagaagactacctcctgctgaccctgggccaggtattgctccggagggtgttactcgttagcgtcagtttttgtaagtgaaggtgtctgtttctctctggcatgattgattgttttataattctcgatgtctacgaaaatggcactattatttgcgttttttaaatcggagatagcttaatattattgcatgtgtatgtaatgaagcgagtcagttactggttttggagctttttgcttaatatttcctaacgtcgaataaagctttaaaaaccaggatgtagaaattgtaagaatagggtacatttccatttaattaaatcgtttatcagaaatcatgttttttcacttcaaaagaatttttttgaattactagatttttgaagacaggtttggtgttttggttttgttttttataaaagtttaaatctgaaagataaaaatgatttaaccagttgggacattcatgtaaaaatctttgggtagcttgtgtgttcatttatgctttcattcattccgtaaacaattatagagcgtgtaacatgggttagaaactgccagtcagggaacagagatgaagtagtatcccctgctgcgagggaactgtctagtaagggaa

SEQ ID NO: 107449 - DNA, 1048 bp, Homo sapiens
tgtagtcaggggatggaggaagggatggtataggcaacttaagactgtctttcctaccctcttcagtgcctctttccttaatatgatgttcaaaccaggtaatgtgatcactcacctgatttttgtttctatgaaggggcttttctatggggtatttgttcagtgtggtgttcctgtgttggtgacgattgttggagcttctatttggccatctttcttccatatcctttcctttgattaaattttaatgttttattttgagattattgactatcctctttcttcctgggtcaaattatcaaatatatctaaaatacattatcgttattattagatgactgataatgttttgataatttttacttgttttaataattattaattaagcttaggatatttaattaagcttgttgtactgaaaagtagcttagtctaaataaccaattaacatatttttttctttgtaggcacaccagattaatattggttattatttgacattactgtttttatatggagtagcactcactgaaagaggaaagaaagaggtatgtaacatgttatttgccctttataaatctttttacatcttggaataatcaggccaaagattataatatgaaactaaaaatattaaaaaaggaaacttaatattagcttataacttcatttcttttatttatcttttgaatgcttaccattcatgtaaaataaaaaattatttagcttctttcacttacataatacattttaatccattttctagtatagcttaatccctctggttttaatcgtatcccttttgtaaaatatgaattgtacctcaaattatttgtcaaacttaagtgcaaataagtacaaatctgggaattaactagataatttctaagggttctgttgaatttaacatttccttttttttctgatttttaatgatttctcatattttcttcatagctttgatatttctcttattttttcttcccaaatctgtatttctgacttcataaattaaatatataaatatgacttgttaattagaattaac

SEQ ID NO: 107450 - DNA, 1065 bp, Homo sapiens
taggaagaatgataaagaattgtgctctaacagttatcagaaaagcccttattttggctagtagtacttgccagttagatatgtatatgtatgtatttaaaagatggcgtctcactatgttgcccaagctggacttaactcctgggctcaagcaatcctcctgcttcagcctgctaaggagctgacactatcagtgtgcaccaccatgcctaattgccagttttagatacacaaatttttgttaccatcttaatattcactttgaaatattggttaaagaaggtcttaagtttatttataaataaatattttaaacactgactacatgatctttgtaatcacatgcagagatgccaggattcagaatgtgaataaatgaccagatgattgtattatttttaaagctgccctaatttctccagtttgagaagtaattgtttattgtaaaaaaaaaaaaaatgacttttacagtagccaaacctagttttatgttactacaggattatacagaagctgagaataaatttctggtgatgaagatgatgatccaagaaaatgaaatttgtgaaaactttatgtctttagtttattttggacgtggtttactgcgatgtgctcaaaagaggtaaggattttaattaacgggtagatgttgcctgtgaagtctcagcattgtgaaatggaagtaagtgtgcacagtatatcaggcattgtgacatttgtgctctactgttttatccttttcttctttgcctatttgtatagataatttctttaatgtagttgagaatattaaatagcaaacttaacaggccatagcaataagaagcagtctagcattaacattaggagcataggctttagagtctgatagacccgggttcagctacattttttatcacttatgctaagaaacttaatgttgttaagccttatatttttttcttatctctaaaatagaactaataatagtgtagggttcacttcatgaggattttgcaggtgattaacattgcctaggacacaaaaatgctgtacttaataaataaattatggttggagtta

SEQ ID NO: 107451 - DNA, 2604 bp, Homo sapiens
tctttgtaaggttgatatcctattctctggcttgcctgtttttttactagggtatccacaagacatctcacttcttgttcactgggtctgagcagcatgtgccatcaatatagtggggctagtgtgatgctttgtagaatgtcaaaatgatccaaatcccttcagtctatactgtgacaaagtaagagaattaacatagcctgagacaagaacaaagaatatatcctgctgtccttcctcagatgtgaaaactgttttattctctttactgatgagcattggagagaattcattttccagatcattgacactagaaagtccagttgtatggcagtatcattactttcatccctggcctatagaggacaaccaccactgagctcctcaaagacactggtgcccttcttactctgtagttcttattgtattaatgaatggggtatcctctgagcctttctaggaacactgaattagtggtgggttctgtgtttttatgtagtaagtcaattctaaccttctcacttccttgactcctttaatattcctcaagaaattttcagcatttcttcttaatttactatagaccattattgtgtccaagtttcaaggagtcttctcagcaccatattaggactggattcaggtgtcctttctaggaaagtaaatcttgaattacggaagagtttttccatatcagtgtacacttccccattcagccttgtgtttacccttggttcagcactttaaagatccactcccactcatgttcctgccagtacattctagtagggttctgcaattcttatgattaacaagctttttcgtcctgggcaagggctctgttttctcacttgggctctccacctgaccttagatttattgtctgaaggcaatgaggtaagggaagttttttttttttgagacggagtctcgctctgtcgccaggctagagtgctgtggcgcgatctcggctcactgcaacctccaactccctggttcaagggattctcctgcctctgcctcccaagtagctgggattacaggcatgcgccatcatgcctggctcatttttgtatttttagtagagatggggtttcactatgttggtcaggatggtcccgatctcctgatctcgtgatccgcccacctcggcctcccagagtgctgggattacaggcatgagccaccgcacccagccagtaggggaagatcttaagaaggaagggcatcatcttttgagacatgcgtctcagctgatatttttgcatggtctctaaataaaggtaggctgctctcctgtggcaaggaggaggtctttgccagtcaagagggttcatgggggaaatttaaggattcaatatttctaagcacattcacctaaatatccccattttagatcctagggtctactcattgcatatcaaagccctaattttagtgtagttctgttgaggctgtgttttgggtctcctttgcagctgttctacccttatggttaaatcctgagcttcattttcagcatagtctgccttatgtctagaggaggttcttttgatgttgccatagaagccttctagttttcagtgtcctgagttgatggtattagtcttgttgaggctgtgcattcaatatcagtttgtttcactttatgattaaatttgggccttattttcagcacggattatggccataggggatgagagtctctttcaattgcccccatagaggccttctggctttcacagtgtatcctgagttaatagttggctgacctgtgcctgtcattctctttcttcaaggcctccaagacagtttaaagccaaccaactctacagtccctttaattaccatggcccccatactgttcaagcttgagctactacataatctagtgcctccccttccacctgtatttcatgccaatctgccacaggtgagagtgctagtatttgtatttctatggcatgccagaggttatcaccaccctatttaccacaaaaaaagggttatttgttgtctcattggtaaaccatgcatctacacagtcccgttcaaactaaccttattttaaaatgcctttcagatataatggaggactgctagaatttcataaaagcttacaagaaattggagacaaaaatgaccattggtttgacatagatcctacagaagatgaagatttacctacaacttttaaagtaagaaattatttaagagtaacattttatttgtaactaatcagaataaccaactatatcatattcttacagcaagcatgttcttttattggcacataactttttatacaagaaacaacctttattgcattacctagtgcagaacgtatgattcaacaaggagggagaagtgaggtggcagtgttaacattttcaaataatgagaagattaataatgatactaggccagtaccctgcatggttagagtcaaatgtagctgttaactttttttcctaattatctttaccattattttgctgttgatttaaattacaaagtactaaatgcttagttcagaaaacatggaaaatataaaaatgcctaaagataaagatgaaattcatctatatttcttcttcaaatgga

SEQ ID NO: 107452 - DNA, 1050 bp, Homo sapiens
tttttatttttctaattatttgtattgatgttctactagcatctttattgtttttaatcagtaggtgttaaatgagttggggtttcttggaatagttattgccaaaaatattatatggtgaagagagggccagggaggacttccagatttgctatttttttgtttgcttgcttgctttttttgtcttacaatgcaaagctttctttccttttttttctgctaccacacagcctttttgcaaggaagtttgtaatgtgatagttttagtatgaaatctggcaatactgcttacttgataattccaatgaaagtgacagtgtagggttttcattgttggtgagctctatttgttcattattttttctccttcttgaattatttctaggagaagatgaaaatactcacttagccatgctcatactagaaatcttgactgactttggtattattttatttccactataacttaatttttttccttttgcagttatagaaagttgatatctctgaaaataactgatactgatataagaccgaagatcagtttaaaatttaatacaaaaggtattattttatttttatatgccttctgttgaaaagtatgttaaaatttttgacttctctgtcaactttcatgccattaacaaccacgtctttactgtgtttgtcattcactgagcttgggtttataccagcaagcagcgcttggtgtaggctggaaatcacagacaggaagatcagcacatctatggatctcacattaccttgacatcctatagagaggcatgctaggtctggtgcatagctgtgactataccgtgggattgtgttccagcagaggttttctaccaactgttccttcccttgctgcattccttcttaatagagcaagcattagagtacccttacatgaaaggaatgaacattttgagtttgaggccaagttttgaggctaagtaatctaaactaagctgccagcttcttaggagtgtgctaggaaatgtcctgcccagaacctggaggccttaattaagggaccctgggcccata

SEQ ID NO: 107453 - DNA, 1481 bp, Homo sapiens
tgatgctgctggtctctgggctaccctttgagtagcaaggagctagatcttttggcatttcttgatatagatctgagctatctagtatagcagtccctagctgtatgtggctacttaaatttaaattaattaaaattaaatttaaaattcagttccttagtcacccaaaccgcatttccaatgctcagtgagtattagtgcaaatataaaacattttatcacatgacgttccattgggcagtgctgattaggataaagtataattgtttaagtaaagtatagttagacattgacaattagcattcttggcaaatttcagaatttttaaagacctaatactgtgatgccatgttgttgctaaaggtcatttacttgaacaaaaccttggatgactgaaagacttctgtggtgattagtctttgttattacttttgcttgggaacatgttgtttttgtttaggttttttgacaggcagaaagcagcatgctaattgagcactggctgtggcaaagcactgtactatccttcattcttttggaatagtttttatcctacaggagcttaggatacaatgtgagagaccaaatagaaaatgagcattaatgtggaatgtcttgacttctcaaaatttattttcagatgaaatgcctatcttcaagcttgattataattatttctatcatctgcttcatataattattatttctggtactgacattgttcgacaaatatttgatgaggctatgccacctcctcttttgaaaaaagagcttcttatacacaagaatgtgctggaatcctactacaaccatctttggaccaatcatcctttgggtggatcatggcatctgctttatcctcctaacaaggagttaccgcaatccaaacagtttgacttatgcctcctgttagctcttataaaacatttaaatgtgttccctgcacccaaaaaaggatggaatatggaaccgccatcttctgacatctctaaatctgcagacatcctgagactgtgcaaatacagggatatcctccttagtgagattttgatgaatggtctcactgagtcacagttcaattcaatttggaaaaaagtttcagatattcttctgcgccttgggatgatgcaagaggatattgacaaagtgaaggagaatcccattgagaatatctcccttgattaccatcagctatctgtctacctaggcataccagtaccagaaatcatacagaggatgttatcctgctatcaacaaggtactaaatgattatttacttcagccaataaacttccattgattgaatgtctgctctgtgccaggcacagtgcaaagggcaagagattcagtgagctcatggttttgggaaaatggactcatcaggaaggtaatagaaattatagtgctagagatgtttccagaataccatgggaaatcctaggctaaagaagtccaaaaaagctttctggagagtatcatag

SEQ ID NO: 107454 - DNA, 1118 bp, Homo sapiens
tagaaagtaatactgtaatactcttagtttaatatgttaaatgccattgatactacctttatttggtatgttgcctttatagttttattttaatgaacataaaatttagggcttttaagatttttttcaaattgtgatcttcttaacacttctttttctgtgagattcttaacgtatcagtctgacttctccttatatataggttttcaagaacgcttgtagtgtagaaataaattggaattatatacattgtgtctaaaggtatatgaatacgtacagacacagccccaatactcacctctatcatctgaatcagtgattttcaagtcatgtttcaagactcagtagtagataataagaccaatttagtagatcacaactgccgttttaaaaaaaggaaataggaattaaaaaaatactagagttcatcacatacaatatgagtaagttttatttcatggaacttatatttcagttttatacttaggtataaaagtatatgcataagtgcatatgacatcatgatatatatttctttagttatgatcaaaaattttttgagaaacactgacctaaatgtaattatattactagtatgttgttttgatatagttgatatagattactaattcttatgttatttttcagaataaagactcaaaagaagaccaagtgtaagtattagtttatttaatttttaaatttttcttagtatttttaaggcatactttcctaatatgacacaggcttccttcctttgggaagttttctcactaagagaagaaggatagttccttgtcttaataattaacaagttgctgcttttttatagaaagtaacaaaaagttaaatgatcatttaacatttaattatcatttgctttggaagaatagaaccccttaccatttttctgtaaggctacttgagtcattttaaaatatagtctacattgtagttacactgtattttagtctagacattgtagtctagaccaaacctcaactaagacctaattttaaaggatgcatcactcctaggtttgtagcctaggagcagtaggttatgccatatagcctaggtgtgtagtaggctataccgtctagttttgttatgtccca

SEQ ID NO: 107455 - DNA, 1138 bp, Homo sapiens
attttatgatgctgttttcaactctctatttaaacatacattggacctaatcactgaagttgcttaaaccaacctacttgtcaagaaaattaagggggaacaaagaatgttatgatggtaaaataatgtagcagatgtggaaatgcttgccaatatttctgaaagtactgttttccaaagcaactgatgtaactagttataatttgtaaagtgaactctgtagtgtcataattcttgaaaacagtggcatgaacagaattaaacaggtaccttgattgagtgctactttaaatatgctaatattcattatgaatcttcaaaagaaagactcagtatgagcactatccaaacttcctttgatcatgaacccttctaatgctgagcatcttatgaaaccagtacaatactaactttggaagcaatagcttagatgaaaattactatacaattgtaaaagctcacattgattatgtcacgactacagcccatatgtggtagaaaaggaagagcagttgaggaaagaacaagcaaatccacactcagtcagtagacttataaaagatgatgcaagtgatgttcaagaggattctgcaatggaagacaagttctatagcctggatgaattgcatattctggacatgatagagcaggtaagcatgattagagagggtgcctgccttctcttattgttatctggtttttcctgtgactctttaaacagcatcaccctttgaaaagcccagtggtttatactgtttgtgaggagaaagagaaaagcataaaaggtaaggagggatatatgaaggaaaatagaataaggaaaaaaaagaacgcctaggagctggaaacttcactttagccctcaaaccatttcctggctttaattatagggcaaagttgattacaaatgcatttcttgcaaacgtttttcgaataccacaaaggaaaaaaaaagactagcataatcctactagattacatgtcatgagaaaaatagttttgtaatataaagctgctttcatttttaaaaattaaatatgattgttaccataaaatgtctacagaaaatattgatgtataatcatttttttttctggctccattcctggtagttgtcactgcttggaatgatgtacct

SEQ ID NO: 107456 - DNA, 1003 bp, Homo sapiens
taaaaaatgatgagttcatgtcctttttagggacatggaagaagctggaaaccatcattctcagcaaactatcgcaaggacaaaaaacgaaacaccacatgttctcactcataggtgggaattgaacaatgagaacacatggacacaggaaggggaacatcacacatcggggcctgttgtgaggtggagggagggggaagagatagcattatgagatatacctaatgttaaatgacgagttaatgggtgcagcacaccaacatggcacatgtatacatatgtaacaaacctgcacattgtgcacatgtaccctaaaacttaaagtataataattaaaaaaaaagaaatggtaagcatgccggtagtggtatccagcagcagcagcaacaggcaagtaactggtactgtttattaaatgctgtaattgaggggaggtgggtttatctaaattgagtgtttgacttgagacaaaaaacgtgaaaggagttagatggcaactttaaatccctttcaaataactaaaatttttttttgaggaaaataatacatgcatatttcctgtgctcaatagggctcagctggcaaagtaactacagactatggagaaactgaaaaggaaaggcttgctcgtcaaaggcagctttataaattgcactatcagtgtgaagtaagtatttttgccattagatctgatggaagtgagaagtatttcaaatattaaacttactggtgctttctgtttgaaaagaacttagtttgcttttttctttcaatttctggtgacttgaacataattatctgaaataatattttttattgatcaggatttcaaaagacagttgagaacagtgacttttcggtggcaagaaaaccaaatgcagattaaaaagaaagacaaaattatcgcatctcttaatcaacaagttgcttttggaatcaataaggtttccaagtaagtgtaaatcttttgataaagggaaattctgcgccgtaataaacagta

SEQ ID NO: 107457 - DNA, 1904 bp, Homo sapiens
taagctgaagcatgaagagctagagacatttttccaagtcattgcactgagatgcaagataacacttctcttttgctttctaatttactgaattagaacttagttcccctttctttgggaagtcagtaaatcagacatcagaaacaagatacatttcaaaaggaccaggtataggagttcagttgtattcaggctcaagatttgtggccccaaatggacatactttatctcctccacagctgtagttagagctcttctgactgtgttaatgagaaataatttctaacatcttttgactttcttgcttgtttgcttagattacagcgtcaaatccatgctaaagataatgaaatcaagaaccttaaagagcaactttctatgaaaaggtacaaacttagctttttctttgggtgcactctctctgaaactgtatttcactcaacactttctggctggcatattgatgtaatttatcattcaaaccggggtacttttgaggctgatattgaacagtactaataatacactgggacaaaaggtgtaaactgggagtatcttaggcaaatagggaggtatggtcactttagctctgactctagaaaactgctagaagaatctgtatcagcaaagttacagtcccagagcaaactactgccagagattagaccttaagagttaccccagtcagtactattagatgtgactgctttatgaaactggccaagttttattcttattcatctgttttgcctgtgggaaatttttttaataacacctttttgaaatccatttcatacagcataaaattatctctgttaaaatatacaatttattgatttagaatattcacagaggtttacagtcatcaccactatctatttccagaacatttttatcactccaaaaaagaaacccattagatgtcattccctattctcccctcctctagcttctggcaactgctaatttattttctgtctgtatggatttgcctcttttggacatttcatataaattggatcatataatatgtagcctcttgtgagtaacatttttcacttaacatagtttcaaaattcattcatgttgtagcatgtatcattactcatacctttttatggataaataatattccattccttggctataccttattttatttttcatcagttgatggacatttggcttgtttccattgtttggctattatgaatactgttatcaatatttatatacagatttgtggacatgtttttgtatttcttgggtatgtaccaaggagtagaattgcttggtgatcagtcaactttatgtttaactttttgaggaattgccaaactgttttccaagtagctgcaccattttataatcctataaacagtgtatgagggtttcaatttctccacattctgatcaacatttgttacacttgttagattacgtctttattttacccattgtattatgtgtgaagtagtatataaatgtggttttgatttgcattttcccactgattaattatgttgagcatcttttcatgtgcttattggccagttatttatcttcttggagaaatgtctattcaaatcctttgcccattttaaaaattagattgtctttttattgttgagttttaagagttcttgtcccttatcagatacaagtcccttatcggatacatgattttcaaatactctcattctttgggttgccttttcattttcttaatgtcatttaaagcacaaaacttaatttgatgaagtccgatttgtaatttttttcttttaggcaacttttacataatatttaatggtataataattaattccttttgtgttaatatatctgcttgaagattttatttttttctcctcaaaaaagtctagccttaatgatatttataa

SEQ ID NO: 107458 - DNA, 1033 bp, Homo sapiens
agattgtgagataaacacaatgtagaatttcataagtaatctctaaaatttttccttccgtttttaaaatgaacatttgcaagtagtttaactgcttgttacaaatatattttttcctgttttttagccagtataatatttatagcttcttgaatctttagtctctttttttatttgtatcagtggttcctattttagagctgaaaattttggaagcactgaggaattatcacaagaatctgtgaattatctgtgtctctgtttcttattaaccaataacgactcctaaaaatacaactgtttacatgtggggatggtctatagaatttttttttttttttggtcagaacctgtttttatattatttctgacaggttggcaaccactcttgtatgttgtattattcaaaactacatcagatattcccatatgctgtctctttaaagttggttgttctctaaagtatttttagtcttcttctaccagacacagtacaatgaacaaataaacaaagtcaagcaaggatttgccttgagtaccttgcctccagtccagcttcctcctccaccacccagtcctgagatactggtaagaaatacaacattttgaataattgcccttttcattttgacaaaatggtaagggctgtgaaacactgaatatgcagtatgtttaacgtgtgttcaaaatggaataggcacatattgtgagtatcacttgtaattatgaccataccttcgagtcaccagatgatataattagatgggtgaggcctatacaataggttgtatcactggattttagtgaagcatttgatatacatagagtaatattttctcattcaccctatttcacctaccttgtgggagctaaataatgaatactcagacttcccagtgtcctcatgttaccactagatcagaggtccccaacctctgggccacggaccagtgcacagcaggaggtgagcagtgggtgaagaagcaaaactttatctgtatgtacagctgctccccattgctcacattaccac

SEQ ID NO: 107459 - DNA, 1046 bp, Homo sapiens
aggaagaagaagagccttgtgtgatctgtcatgagaatctgtctccagaaaatctttcagttttgccttgcgctcacaaattccatgctcaggtaacactttaaattttcccattaatcagctaaatgagattcatactgccttacttattatcatatacatgtatcattatccattgttgtctcacaagttccactggatataactctgagcttttgggtaccacacagaaacatttatgcttttcccatacatagccatggattgcattgtgctctctcagatctccatccaccctacagaagaaggggacaatgttgagagtcagatggtacacagtaggcagttccttcgaatagaactgggacaaatgtcgattgacgtggtagtttagtggcagaactagcaacagcaccacttgaaattgacatgctataaataccacatagtgtcctttgtccataattaatgacagccccctttcataaagcataagatttatcagtctcttcaggcttctatatttgcttttgaaagatactcaggcttgagttttgatgttagaaaaatgtgaggcatggtggctcacacctgtaatcccagcactttaggaggctgaggtgggtggatcatgaggtcaggagatcgagaccatcctggctaacactgtgaaaccccatctctactaaaaatacagaaacaaaattagccgggcgtggtggcgggtgcctgtagtcccagctactcaggaggctgaggcaggagaatggtgtgaacccaggaggtggtgcttgcagtgagccgagatcgggcccctgcactccagcctgggtgatagagtgagactccatctcaaaaaaagaaaaagaaaaatatgaggttggcatgtcttttgttgattcttggcatttatatagattaaattctggtgttactgccacacagttgctattggtatataattaatgatccaagtcctctgttgcagagatgtaatttgacacaggaaaaggtagtcatagtaaagaaaggcttttcagggaagt

SEQ ID NO: 107460 - DNA, 1341 bp, Homo sapiens
gatttgtttttggagagtcagcattcaagcaagtgacttaacagatagttcatagccgaaaattactgtcattatcgccaaagaaaacaatctgagaagtgtattcatgatctagggattttaactgcaaacaccataagcatttcataccaggtactagtgacttttgtatcattagttatgactttttctggattataaatgagaacagtatatagtaaaccaaagaatatagcaagtttctccaatttccttgtcaggaaggattgctagtcatcttgaaaattgaggttgaaggaagcatttctagtagaataaactggctaaaaggtattgtgcagttaccacctattttgtttagcaaaccacagggaaggtgccatggttgcagcaattggtttgacgatccacagcgtaaggctttaaagatccaccagaagacatgttggttggtaaccctgatgcatagagtgacaactgcctctgctaggctacatctgagagactgacataaatctttttgctccttagtgcattagaccatggttgatgcaacaggggacatgtccaacgtgcagactccacgttttgctaccagaagaattccctggtcaccccagccggcagttgcccaagatctgatacaaggtcggggtgtctatgcaaaggaagctcagttttcttttattatgagctgcttgtttgagtggtgtaaaactatgtgctcttcaatatagtgctaaagaagccagctaattttatcaaagcagcagccaaagaagtcaggacaaatcttcaggacttgtgaaatgaactgaaagagcttgaagcagatggaattttaatagttacactatatatgctcttagtaggtttttttcttgtagtggaaacataactgttagcatatttcttaggatgttttttcttgtctttttaaattcttatttcactcatcctttactctcccctcaagtattctacactttaatttcctgaaataaatttaaggaaaagggaaatagtaaagaagtaggaatgggtgcagcacaccagcatggcacatgaatacacatgtaactaacctgcacattgtgcacatgtaccctaaaacttaaagtataataataataaaagaaaaaaaaaagaaagtaaaaaaaaaaaaagaagtggatattcacggagagctatgaggggataaaagggtatgatctaatggtaagaaactggaagaaacatagcaagtcatttgttcagattcttctctgtgtccctgtgtctccagagataaggatgtccttttcctccaggtatacagtgggtacctctagaatgagggtc

SEQ ID NO: 107461 - DNA, 1100 bp, Homo sapiens
gtgttcccagtgtcttgcccagtagatacaagataaatattgccagaatcagatatcaggaagtagtaagaaaaggagttaatatgcaaactaaatcactcgctcaattgaataattgagatcttctgttcatttgttccttggaccttaatcatttgcattttggagaaaattttttctgctttaaaagtctgtaatttcagtttttgtgtcggggagagggaaaaactatttgtctgtagttgctttttgtgacaaagtgaatacccactgggctaagtttcatatctaaagcttgtcactaagaattttcatttttaggggtcaaaaacctattttgaaaatagtgttgtgtgaatgctgtaagtgttgtacatgtctctggtttcagaattaaaagaattcagagttaccttgtgagataaatgttctttgcttcatattcacagtttcacctccatttaaatttatggggaagaataaatgtttcctgactcagaaacaattttgcctccatatttcagtgcaaatatattttgaagttacttttaaatatttatttaaaacctctgtttctgtaactgtatgttaaacgtattcttctgtaatgagaatagactggaacatgtgagggaaaaatatttaaaaaaagatggcagtcatctagacatgtaaaatgccaagaatgtcttagaattgcacaatttagaatttatagagcctttaatcaccttgtctagcaccttgtattagtccattttcatgctgctgataaagacatacctgagattgggcaatttacaaaagaaagaggtttaacggacttacagttccacatgactaaggaggcctcacaatcatggtggaaggcaaagaggagcaagtcacatcttacatggatggcagcagacaaggagagagagcttgtgcagggaaactcccatttttaaaaccatcagatctcatgaggcttactatcacgagaacagcatgggaaagacctgcccccgtgattaaattatttcccaccaggcccctcccacaacatggaataatgggagatacaagatatttgggtggagacacagagccaaaccata

SEQ ID NO: 107462 - DNA, 1031 bp, Homo sapiens
tatgtaaatcagaaaaatttccttctgggaaaaggtgtcattgccattctgtgataaatagatgcatagtcaatgagcagacattcatcaagacacagatttgaattcacgtttctatgtaccaagtaattagcgtcgtgtctaggaagtagttttgtaaggcaggaccctcccaaatggaagacttgcagcatgtgagttgagtttgctgccaacttgaccttcaaggtgctggagcaagatggctggaaactcagctggaggtatgggagcatcagccttgagggtgaaggaggggaaggggtgcttaaaggaagcaccacagacagaagaagaaaagacatacttttaatgtgtgtgtttcagggttgctatagaacttaatattattttccttatttagtcctcaaatcatggtgcaaggtaggagttatctacatcttaaagaaagaaaactaaagtgagaactcatctaagacttcaacctaggtcagtgtgactccaaagcccatgctctttctgctacacgacaatgttttcgcaaaagcacctgcacgtcagcataagtgaattatgtccctgtgataccagttttgctgagaccagattgcaactctcagcaattgtacctgccatctgcttcctgtgcccagccttgaatctgtaaagacatgacatcagaagtgttaatgctatatatagcttaaaaggctttaaaaaaattaaagaaaaattctctttaattgatgaaatcaaagtgtcaaatattcctcattcttagctacttgtatgaaataaaatcatgggtaaatgtcaaaacttgaaataattggccacagaaataaaataaatctgatagaaatatttttattacctaaatacttgtgaagtgagttggagggagatccacaacattctcttcataggctaactgagatattatacctaagaaagagcaataacatttttttaaaaaagagcaattaacttttacaaagctttcaacatttgcacatcactttcactaatac

SEQ ID NO: 107463 - DNA, 1033 bp, Homo sapiens
gtgacagaaaactaaggggccgtctatatgtgtgccatgggtacataaagaaaggggattctgagtccaaaactactaattcagaagcagttcttctgacttttagttacagtcctggttaaaaaaaaaaaagtcagccttggccgggcgcggtggctcatgcctgtaatcccaacactttgggaggctgaggctggtggatcacctgaggtcaggagtttgagatcaacctggccaacatggtgaaaccctgtctctactaaaaatacaaaaatgagccgggcatggtggcgggcgcctgtaatcccagcgactcgggtggctgaggcaggagaatctcttgaacccgggaggcggaggttgcagtgagagcatgccactgcactcccacctgggtgacagagcaagattccgtctcaaaaaaaaaaaaaaaaaaaaaaaaagccttgaagcaagtaatatattaacagttatataaccatccatcccaccatcaaattctgccattttctacattctcaactcacctcttctattcattaaggagcaaggatccaggctcttaaaagggaaatgaaacacttgtaggagaaaggctgattgaataagggtgaagctgggttttattttatctgttgcaatatcagtttaggaagacagatgcttataagaggaagcccataatgtctacctgaggaatttccttgcaaaaggctactgtgactgtagtcctaggtctgcagtaattaactatagtattcagaagtggtcaaacttggacaattgtcttgccttccccaaacccacatgagatgacttctgattcacagtggacctgctaagctggctgcattctgggggcagatggctagggctttctgatatccagaaaacctattaataatcaagagctcatttggtaaatattatgagaagtcatttgtctcagaaccccttgaattattacagtcatggtcaagtcaagaacaacagtgtgtgatctcagatctgcataaagatcacattatataac

SEQ ID NO: 107464 - DNA, 1006 bp, Homo sapiens
ccagcaacaggagagtgcaggcagcaccttgggaagaatcagaatgtctggcctcctgtccccactctgacccttacttggggtatgtaatcttggacaagaccattaacctctctgtgtctcaaatcgttcatttccaaaactgggacaagacctatgctgcctgcattatcgttgagctcatgtgaaataatgcagttgaaaacactttgaaaaaatgtgcaatccagtccacaaatgaatggaatgtttgtctgtaaaatgcagataactctgacctcagccctcacaggtttgataacagtgcagatttaacagtacttcttatcaagcttgtatttccaaacgaaaggtgtttctacaggtgcaggagttgctttcctgccatttcttgtttttaatttttcttaatgctttggacatttattcgtgctgttttgggcaacatttgccccttgcaatggctgccaatcatggcatgaaattcattaaatgagaatcatcttagtattttgactatcgtcttactataacccaggactcatgcttgggagccccagctctacttgaaattcagaagtgacctttggttatctgctctctagcttctttgtataggagcccttaaaaattggagcaggcaacatgccttttaacttgtgtcataatcactgctgttcattaacccgtggctaccctgcaacctataacgctgtactgggttttctggcctacaaggtgaccacaattaacggtttatattcataagatacatttactggaagcaaatgatcttatattacattgtaaatcattaagttgcaatctcttaagggttcagagctactagcatggaagctctcaggaagcatttgttgtgataataaagtacatcatatttgtttggcacttcataatttacaaagaattttcatatatactatcaagcacaacattttggttaagcttctcacagaattttacctgttaaagacatcaactttac

SEQ ID NO: 107465 - DNA, 1032 bp, Homo sapiens
ctgaatcctaaatggcttcaacctttgaaacttgagagctaagaatgaactcttgattcctgcttcattttctgctacagtgacctatctcttaggcaatgaatgtctttatgaatgtggggagacctggatgacaggagagattgccaggagcaaactcacatagttaacatctgtattattatctcactgcacttgcaaatatttactaagcacctggaggcatggaggagggaaggatgccacaaagatggataataattagtctctgtcctaaattgactttacaatctagtggggaagataggcacatcctcagaaaataaaaagaagtaaataaagaatcaaagcttgagagaggtttccctcacattgtactaactctgtggttccaaggttccaaatggacccatggtgttaagggctgcttttaaacctggtaatatggtgaagggtcccctaggggaattcttcaatcccatcccagcagggcaggtaagaatagaaaaattacattcaaatattagggttgtgtggggctaggggtgtgtgaataggtagaaaacatgattttctgttccctcgaataatttataacctaggtgaggaaaaaagttatatcgagattatataaccaatgaataaagcaagacagtataagcaggactgactgtgtgatccaaggttcatttgctgggatcagaagatgcagcagaggttgagcgatggacttagttaggaaaggctttctggagaagttgaggcatttggggatcttgaaagaagtgaaaaactttgattattactcataaaggctaacactcaacacttctgtgccagtcacccttttatgcattttatgtttattatttcatagaatccttacaacaatattatagagtagatactatttttctcatccgcatttacacatgaggaacctgaggcacagagaagttaagtaacttgccagaaactacacatcaggattagaatgctgactgcacccttgaattggtgtgttattccacc

SEQ ID NO: 107466 - DNA, 1025 bp, Homo sapiens
tgatgtcatatcccatgccagccgttaggttgctagcccagtatttgtgaacgcattgtacatgtcagtggttcacatgcaagagtgggaacatgtggaaaggagtcctgggtggaagcaaggatctgctgtcagatgaagcccactgtcaaggaagcagggacaatgtccaaacaggtgtgtgtgtgtccttggtgtgagagccctctcagtgtccaccacaggaatggcccgacccatcccaggagcttaatttagatggcttggaagttctgctgctattcatcaaagagattttatgtttgcttaggaaggaagtgagcctaagcagtaatgacaaatgccacaaaaggtgtggggatctcaatataaaatcaggtggtaaaatgacaagggtaaggattgttcattatcaagtgatactaagaaatgatgtgcaattatgcacaggaaaagtcatatatttaattagatgaattgataaaactagcaactgtccagaatccccaaagatttactatttctatgcagcttctctgcagttttctttttttctttgtgtttttataagttcgactttattttttaaattttatttttaaaatgaattttattgtgtatgtctaaggtatgcaacatgatgttatgagatacatatggataggaaaaagggttactgtaatgaagcaaattaacatccatcatctcacataattacccattttttggtctttgtggcaagagcagtaaaatctactcatttagcatgagttgcgtataagtataattttattactgtagtcctcatggtgtgtgatgaatctccagacttgttcctcctacatatctgctacttttatcctctgacctacatctccccatttcctcttctcccaccccactcctcgtaaccactctatttgattttttttttagattccacatgtaaatgagatcatgcaatatttttctttttcttttatgtgctatagatggaaattattttaaaatgcatttcatacttt

SEQ ID NO: 107467 - DNA, 1222 bp, Homo sapiens
gccagtggcatgtgtagatacttgagagaccagaaaaaggtaagaacagagggtgggggagagaaaggaagaacactgccagaagacacagcccaatatgttcctttatctgactactacatctgaagttcttcttactactatttaattctctttacctatttttctctcttatacatagacttctttttaataatactcaatgtatgattttttcatgtaaaatgttatctaaatatatcttcacaatactcaggtatgaaaaggcagaaacttttattactgttttacagatgaggaaacacgagaatgtaagtaatgtttcaatatagttaataagtggtagaacaaagcatagaatctaggcttcctgattgcaactcaaagttcctgccattagacccactgtaccactcaataatgtaggcaaaatttatggctaacaatataacaaggatcaccctctctaaaatattgcgtgttcccttcacaaaaaactatgtctctgcatgactgtaagcatgttagttaccaagtgccaagtgaccttggttttaaaactgggcagataagttaatctcactggctttctattcttatttagcttgttgctgtaagaggtttagagtagctttctgagggcatatgttagccttcagttttagtgaggagtaagggactaaatccagcaaaaacttaagtgaaaacaacctgaggaaaagctgtagactgtgagtcaagatggggaatggcaaatctatagctggtgatcagaaagcagttcctacacaagagacccatgtgtggtacagaacatttatgatggaatatccatccggcctgcaaacactacatgaatttaagacacttttgggtctgcaaggtctgaatcagaaggccaataaacatattgatcaagtttataatacctttgacacgaacaaggtaagatctttcatttttcatttcatttgaaaatgctgtggttctgcactcttcccttttttttttttttcctgtaaaatagccttaagtaaaatgtgtacatcccactgaatggagaggtcttcaggcaactcacagcttgtaggtaagtgagtcattaaatacttttagtactgacggcatgaaaataattgggaactagcctctcccaccctaggaagtgttctgcatgtagggagttattttaaaaccagattaaatctcggcatggaattct

SEQ ID NO: 107468 - DNA, 1405 bp, Homo sapiens
ggtttcaccatgttggtcaggctgctctcaaactcctgacctcaggtgatccgcccacctcggcctcccaaagtgctgggattacaggtgtgagccactgcgcttggccaattttctttaaagtagaatttatatgaagaaacagtttctggatctcaggtccttatattcttgatccatccaaagttttccttcctcaaaggattttcctgcctccttgaaaacttttactaccttcctctgccatcatctgtatccattttttctttaatttaaaaattagtgattaataaatgttaatggtgataaaaagtcagcacctctgagcatcctctggcagacatttagaaacagtcttaaaggggacttccccaaagaatgctttttgaaaattctagcaggatatttctctaattcctagctgaataatcccgaggctgagtcctcactgtctcccctttgtcctttttactgtccaaaaaagagtatcattcactttaatggtttcaagtaattctttcaaatgggttcaaatgggtgagttttacattctatgaccttattttcacctttttttttttttttttttttttttttttttttttttttttagacagagtctcactgtcgcccaggctggagtgcagtggcacaatctcagttcacttgcaacctctgcctccaggattcaactgattctcttgcctcagcctcccgagtagctgggattacaggcgtgcaccactatgcccggctaatttttgtatttttagtagaaatgggatttcaccagttgcccaagctggtctcgaactcctgacctcaagggatccacccaccttggcctcccaaagtgctgagatttcaggcatgagccactgtgcccagcccttttatttaactctaattatgacatcgaaatgtcccattgagagtctacattgatatgtttgaaacaaaattaaccatattcactgtaaccaccaccacttctggtcaaggcagttcatttaggccatgatggctacttcttaggaatcaagggtttcataataaacaggtaatcagtcaggactaaggaatagggacaaagacagagaccagatatatgagctgggccaaaatgaaaataaaagaaagaattgagtgaggttagaaaagagaactgtaggccaggtgtggtgacttgtgcctgtaatcccagcactttgggaggctgaggcggatcatgaggtcaggagatcgagaccatcctggctaacacggtgaaaccccatgtctactaaaaatacaaaaaattagctgggcgtggtggcgggcgcctgtagtcccagctactctggaggctgaggcaggagaatggcgtgaacccaggaggtggagcttgcagtgagctgagatcatg

SEQ ID NO: 107469 - DNA, 1043 bp, Homo sapiens
ggtgggtatttttcttattgatttgtaagaactatcttcgcattagggatattatcttttttatatgatatatattacagatattttctaacaaactttttatttttgtttttatggtgttttgagtcatctgggatttttttaaagattacgatttaatttccttttgtttatggcttctatggtcatatttagagaggactctcctattctaaaattataaaacaattttgctttgttttcttatagtgatttatattgttaaacctatgattcatctaaaatttattttggtgtaagaagtaagttagaaatcctttgtgtttatgtatgtgtgtatgtgcatttccacatagccatagctttgtcccagaattattaattgataatcagttctttcctactctcttaccataccacctttattgcatattaaattcttatttgtaattgagtctagttaaaaaagaatctatttatttttcattgagtgcttcatcttttctcatgccagattcatggtgtttttggtagggctatttaataattttatttttcaaaattttttgtgtattttttgtgcttgattctcagaattacattttgtagccaccaatatccctcaaattctattttttttttagatgggggtttgtggtgataatacagattaatatagagagaactgatatggtttttaatagtaagtctttctacccaagaccaagatacgcctttgcatatcctcaagtcttcattggaaccctacagtaccattttaaaattttcttcaaatacatcttgcacattcctagttatatttattgcagttagatttattttttagcctatcatgaatgaaggctttttcccatgatcttatgactggctaatgttctatacagcaagactcctgattttttaatacaatattgtattcaatataagaattctcattttacaaataattttaaagtttttttctgcatcagcaaatgatcattatgcaggttttctttttgtttcttttctctttttttttt

SEQ ID NO: 107470 - DNA, 1553 bp, Homo sapiens
tcaaatgtaaggtggcttttgttgcagcatgagtcatagggaagactgttaggaggctgcccaaattacaggaataagctctgcagcttctttccctggtgtgactgttgcttctcttttccagggtggtccagaaggtgacctggagcagactgacacttatttagaagctttgcttaaagaagataatcttctcttccagaacaatttaaataaagtaactatagatgcaagacatagactccctttagaaaaaaatgaaaagacttcggaaaattaagtcagagatggtattaccttttaaaaaatgctaataagaaaattggaagattcttttaaaaatttttcttttttgttgttgttactgtaaagtctattctgtttaacaataagaaataagaaataatttttttcaaataagaaaattgtgtactctagaaatggagaccgatttacaatttatgtattccctaatccaattatctaaatcttccttttctttcagaaatattaataatatctagagttctctaattttcatgtgagctactgaaaaaaatgaaaatgtcactcaagcttaacttttgttattccttaaaagattgttattgtaattttgttattccttaaaaacatttaaaagcagattttttcaaaatcgatatgtgaaggactacagaatcacctcctcttgaagatattgaaaaagaaagacattatgccctttctccactatagccaacactcagtcaagcagaaaatacaaatccccccaaaactttgagacatagcttatataattttattatttagtcatagtaaaagaataaatctcctaagcataatatgtatacatattacacatatgtaaaaattgttgttttacatttacatatacgtaaagaagtatgtttttacacttttcttgataagtgttttttttttgtttagaaatgtctgaaactttagacaaaaacagtaaaacatttaatattcatttgtgaaactgtataattttaatttatgtatatgcacatagcaaaagcctggaacatgggaaatggaatatggtaaactatttcatttttgtctttagccacttaggtactcttctcaagaggcatgtttttaccagttcctcgtaaatctgtccccaatcaatatctgtaaaaccatatatatcatgatatagctatagatatggatgtaatagcatccaaaagatgctgctgttgcttttttccactcaatataccttcaagatcattccatattgagaccagtacatgtaataatacatatgtatagagagctaatgagataacctctcgttatcttcaactgctccttattattttattcaatggaaatactaaatctgtttaaccatttccttatcaatgcatgtttaggtttttattgttcttttggatttacatatgcacaacatttgaatatccttataaatttgttcatttcacacatgtacaattatgtctgtcaaatgtctcagcaaacaaattgctggatcaaagggtatatacatttattat

SEQ ID NO: 107471 - DNA, 1025 bp, Homo sapiens
atcagctaccatcagaattggaagaacctgcattaagttgtgaggtaagctggttttttttggaactgtgagggaatgatagaatagcctgaatctcagtgaagaaaaatgtaaagtgtttccaataagaggacctagagtggcttaagtgaataaagatgagcatctttataccaaatggtgattcataattaaagctatatttgaaattattgtggctgtgagttaaacaaggtggaaaatatcttacagacagatagttgcagagatgaaaagaaacaggacatagtccctgacttctctctcccccaccaaaaacagagtttctgttccttagatacatctcctcagctgcttcttatgagcagctgagctgaggattgggtaggtcaggcacattaggtatccaaagcactaatcttaccgaaatcaccaagacatcactgagatagatgaagaaaattgtgtttaccaaatctcctctcaggaacagtaccagatgtgattggaaagaaaactttgaacagctgcttggggtgcaaagagtaagcctcacatctattggctatgcttaagtaacagtgagtagtctacaaagggctcccgcagggctgtggtgaagttgagtgaggtgcacatgcctgacaagctgctcagcagaagtggagggaagagctgcctagtgcaggagggtgggaggccttttctccacctccatgctcggtgttgcctgtggagatgatggatacacttggtattggtgaaaatagcacaaattatgaatgcaacagagggactatatgagtctgatcttgggcacaatccctaattttctagtctgtaatcattgtttctgcctctttaccctctactctcacctcatcctctcccgtggggcttctgattccacagctgaactatgactgttcttgtcagggccaccagtgacctcttgataagtgcagtgtcactcttacctgacctgtcagaggccttcaacctaggtgaccactttcaccttcttg

SEQ ID NO: 107472 - DNA, 1017 bp, Homo sapiens
tgcctattatcccagtactttgggaggccaaggtgggaggattgcttgaacaagcagttcgagatcagcctgggcaacatagcaagaccctgtctccataaaaataatagtaacaataatagctataacaataatagctatcaggtttgaacctttattatatttcaggcatccacccacttactttttataaattagtttctattctcacaaattcatgagaatggtgttatttttaaatattgtgtatggatgaggagactgaaacttggaggaactaacacattacaagtctcatggacaattacacaaatatgaaggatggggctggggtttaaggcaaggctttctgatttggaatcccatgctcttaatcatatatagcatataccctctcttcacactaggagacctagagagacctgtctgagtgtgttgcagcagagtttggatgcatagctacttaaatttctttttcagatagatcaactttctttttcaaattcattattttcctgattttttttcttggctaatttttatttgtctaagtgtaacatttctattaattttagtgagttacatgtgatcaaaaaggggataatctgattgagtgtactaagactttaaattgcatccacttctatcattaggcatcactagaaaattaaaatttcccagaaactctaatgaacaggcagactctttattgcttagaatcatcatactgttaccaactgagcactctgaaagctgaatgcgttaatatatcagctctattctgtaccagcttaaattttgtatggtgattattttattaaaaatattctatgataaaaaaatttggacagaacacaggatttaactgaaacaaaatgagctccttgtcataccagttttctcttttgctttcagcaacatgtagtatgttttctcaaatttcaccagtgaaaacagatttcttgttttctttgtaaggtattttgttgtttttcttgttgttgtttttgtagtatt

SEQ ID NO: 107473 - DNA, 1132 bp, Homo sapiens
ttttttggtttgttttagtcttggatactgaacttattgagggaaattgagttttacttgttttgttctgtgtagaatgttaacatttgtggacatggtatttgaggaatttaaatgtctgggtctcatttctcaaaggatggagacaaggagaggaaaaagttcatgattcagggtttttccaaatagagactgataatagatgggggccttaaaatcaagtcaaagaagtctatatacagacttgtgctctaaaataggtgccatatgggagggtgggaggtggggctggtagcaccactaaattaatgtacctcattggttttgttgggatccacagacttttgttgggttttaagggtcttgtgtggggtgagatgctcgggccagggaaaacaaacaacatgccctacctggaatggtatttttccttaggatagctacttgattttttcgtcagtgattgacatgatcttcctgaagatgagagttctcaaacagtagaagcaggtaggaagaaagagaaaggtggaggagaacacgtacatagggactgtagcctctactaaggcccaggctgtggtcctgtttatgagaggagactgctaaccccagtagacttgaactcaattccacagatgccatgggtgtggtgaaagtctttgtagcagcatccagagtgcagggctgtgattactacatgggcatgaagaccccacctgctgtctcatgcctaacaccagtcctgccccaggagggaggaagcactcctggttacatgtggaaggaccttgtagagggatctattttcactactgacactagggatccagagacaagttgttgatggagcaatgaatacagactgctacattccagaacaccaagttctgaccaccaaatatccctttcggtctggttggcagtcttccactagcctggaaatgggacaaaagcaggccagacctcagcatggttcaggcattataaggttgaaaaaggccttggccgggcgcagtggctcatgcctgtaatcccagcactttgggaggccgaggtgggcggatcatgaggtcaggagatcgagaccatcctggctaacacggtgaaaccccatctctactaaaaatac

SEQ ID NO: 107474 - DNA, 1042 bp, Homo sapiens
gaggcagtctcctggtggctgaaagttccactctggagcttctaagcataaagttacatgaacttgccctctagggagtttctggtgaaggggaggtaaaaggttataattgtatttctaaaggactatgtaggtaagtggggaatggggaaatggagaaaagagaaaataaaaaataatagtaactcattttctttttcctagaaaaatggggctacttggttacagtatgttttaatttgttgctttttaagtatatccattgtagatttttgccatatggttaccatgaggcttacaaaaaatattgtatagttgtttaacaggtttaaaaagtctctttcatcaagtgaaagacaagtagtatatgactactgttaaaaataaattatcaccaattccatttaattgtcactacctaaaaactttgaaaaaaatatgtgactggaataaatataaattcttctaattaagaatttgtttcatgtaactacagtggtggcagttttcggcattacacgcatgttcttgttctcatttgttgtatatgaacatttcactcatttttgtatattagtgtttctgaaattattaatacctaacatgatttctactttgaaatgacaaacctcagcttgctcaatgtgccgatggaagatgtgaatctaagttctggacacatagccagagtttctgtgagtggcagttgtaaagttgcttcttcgccagcgtcttctcaaagcacacctgtcaaggaaacagtgagaaaactgaagtctaagttaaggtaaagatatttactcacatatttccacatgctttgtttaactttctaagcagtgacaactcctgttgttttccctactgagttttaatgatactgaataaattcagtagagtgacattatgacttgtctcctaactatgctgatttagatatactatgggttaaatatcccttgtaatagaactggtaactgcctgttgttacatagtctggcagtatggtggacattagtcttctcttgaatgtaataaataa

SEQ ID NO: 107475 - DNA, 1164 bp, Homo sapiens
ttgaatgccctcagcaactcatatgccagtgtcagttaccctttcatttaagtctcagttcaagtgttcccttctttagggtctccttgactctcctcaccaaactcaggtattcacagagtcactgttgcaatgatgagattatattgtaatttgttccgtagttatttgttaaattctgtgatctgacatgcagtggtgagcagtgatcacagtcaagtgaagttatctgtttgaatctctgtcttcccattgcatacaggttcctaaaggatagaggccttcttgtcttcttcataattctaagcttttgaaaggtcttctctgacaactccatctaaagtagcccatctcatttctgacaagtcacacttttatcatcctgttttatttttttcaaagcgtgtattactattttaaagtatctcctttaccacctatttctttttaccattttttaattttagcttgcttattttctctatttttcactagatgccaatgcactccatgagagtagggactgtcttgcttatccctgtgtctctgatatccagaatgacactgactcatacttggcactcagtaatatttgttgattaaataagtgatgtaactttttttccccagtgctgttgccaggtcttctcatggccaatactttgacttagaattatttatgaaaatttgctttacaatttaagaatcatccaaaaactaaaacacatttgtgtgtatgcaggtgtgtgtatgcatgtatatattatttcatgtaatactttttggtctttatgagattgttttttttttggaatcactgttgacttgtaaatacaatatgaatgttagaaacagtccacgaaaaacaatctttttttttttgcatttaaaaaaaaaccaaaactagtatattcctttatgtgaatttcacgaagaagcaaaaataatccatggagatagaaatcagaatggtgattgccaaagtgggaatgggtgaggattgactggaaaggggccttaacgactttttgggctggtgaaaatgtcccataacttgatctgggtgatcgtttctttctttcttcttcttcttctttttttttttttttatactttaagttctagggtacatgtgcacaacgtgtgggtttgttacataggtat

SEQ ID NO: 107476 - DNA, 1281 bp, Homo sapiens
tcccaatcgcacaccagcacatatccatcctctctctccaggtgccagtaaccctcctggctccaacaatcaacacactaaggctctgcagcccctttcaggcaactggcctgggattctgtcagaagatgagatatcccatcccccagtattccaggtcaactccctttccccatcttcttatctattatgctttgggactacaggccccagccccaaactcttcaaagttttcattgcagggatgctgagctcctactctgtctgctttgcagcaaccagaggtaccctaagcttcctcaaaacgatagaggctcaatggttgttgctggtgaatcaaatacttgacccatttgttgtagacattgttacatcaatgtgtaatatcaatttttaaaatatctgcacaaatattagtagaaatacaaaaatccctttaaagaaatcaaatgagtaaacatgactatgataatgcaatcatccttgagatttatgcgattatcgttttgtacatgtaccatttgttccctttataaaaagtgcatagctttactgctgctaacattatgatttcttttctgctggggacactgcttttcaaggtcttttgtcaagtttataatatgtcctatgtttttgtacagttttaaataaagagcttgtttttcaggtttcagataaaagcaacactgatgtttcattgaaacaagaaaaaaaggaaattcctcttttaaaccaaggtaaaaaaaaatcagctcatgtatatatatatattagctataatgtttgagacattttcaatatggcttgacagcctgatatatagatcagaagtttgtcagcaacttggattttaaaaaattaagtttgttgttctagaagtgagaggagtagagagagggtgagctgccaaccttgtgtgttttgacggggcagagagacactttctggctgaggacagtgtccccagcactgccacactgcctgaaatttccatagacttatgccactctctgtcttgaattctccttctaattttgattaggattgatatcaggtcaataattttcaaaatctgttttgaaaattatgatgatgacagtccccgttttttcatcttttagtaactttctgcttttcgtgattcttctgaggtccctaaaagtagttcaacaaacacatttattagttttttcatgcccaggggatgtaatgtgtctcaggtaaaagactggaacttatttaaggcatgaagtttccatctgatagtattcaatccag

SEQ ID NO: 107477 - DNA, 1011 bp, Homo sapiens
tttaataggttccttgagaagttgagagtagacagaaaaaggatgaactacccagagagagttgagacatagaaggctatgaagatcaagagaggaaagaattccaagaaatatcttcatgcttccttaactgagtaaatgataccaccattcactgctactctggccaaaacctgggaatcatcctgaatttctctcctcctttctcatcctgcactcaacccatcaggcaatcttgctgaatcaacctttaaacatagaacatattctaccacctccatagctaccaccttggccaacacactgacatctcttacctggactacagcggtactcctataaatcatcttactgtttctcttggcctctacagtgtaaaaatctgagtatatcatccagaatatgtcatattatgtcattctcctactcagaacacttccatggcttctgctcatacttagaacaaaactcagtgactttgctgtggccctcaaggccctagatgtcctggcctgatgtcttttgaggctacagaccccactgctcattccttctcttagtctactgtagccaccctgaccattgttggcctccagtaccctaaggaatattaaataaataaaagtataaatatgtaatataatatcaggtcatataaattctgtgaagaaaaataatacagttgagagagagagagagagagagagagagagaaagagagaaacataaacctaagccttttcctttgtcgttcatatacctggactccactacccacaccacccccatcaccactgtcagcagcacacatgtattttcatgacttgatttttttttactttcttttattctgtgactatcttgaacatcagttactgtcctaaacaatagggatccagcaggggtaaaaacagacgatcctccctgcctttgcagagcttccattctagttgggggatcattcaatagacaagatgaataagtaaatatggtgtatggtagataatgaca

SEQ ID NO: 107478 - DNA, 1073 bp, Homo sapiens
aatgagactgaaaaggtgacaaagtaacctaaaagcagataaaaaagaaaaacaaaaacttgcaaaattagtccctaaatcaactgcattcaccctagatacacatcatttttctgactcccaacagaatgcctttttaaaatagaaaactgtacaggtagtacaataacataatttcagattactgaagttgccttaatttcaaaagcgggtgatttctcatcagctttgatgatgctaccattcctggttgatgatgctaccattacctctttatgaatctgtataatgctatgatcattgctaataatactagacatttcacgggaagccctcttacaaaatgcaaaccagagctgccctaagggctttgaaggaaagatcatctatactcatcctccacaggattgttcatcagttctccagcaaacgtacggagagacacaaaaacaatgtgtgatatagtccctgatctaaggaaaaaccttgtggatgacttataaggaatctaaatattcaagtgctaaagtctgaactaccagcaaccacgagccaattaatcaaaacaaatttattgaacaatactatgttagacatttttgagggacaccaaaaaagtcaagtatctgattgttgtgctgaaggaacaaaaaaattggttaagacagttttacaacaccatgaggtagtattatgttatggaaaggatacaggctgtacactctgacaggctgacccaggctcaaattcagacctccatgaggtttgtcagttgtgtcaaattttgatattctgttttcttgtatataaaacgagagtaataatgccatctattctcaaggttgttatgagaattatattcatgatagaatgaaaataattatttgcattataaaaagtattttttaaagccaccttctgtaattctgaagaagacaaattcagcctttattgggtgagctaggagaatgaaaattgacaaagtaaaatttctttgtggaaaaagagagcttaaagagtgagcttatgtggaagatagaagaggagaggggcactgccaaaagtgaaaatac

SEQ ID NO: 107479 - DNA, 1454 bp, Homo sapiens
actgccaggaagtaggcaccttgagccccagctgtttgactttgctcctccttttgtaatcactccccatatgacatctccctttacctcccaccttcataactgtcccctacatgaattcaatcaccccattccacttgggtcagttgaagtacataaatacactttactcaggcatgagagtttcaaggtccaccgatatatggcactggctaacattcagcattttggcttgtgtttccaaagttttttagatgggcatctccagccaagtgtcttgaatcaattttaaaagaccaatccatcatccatgccttgcccagcctaagctctctttagcccgtttccctccatattcaccctaaatctgacctaaacaatgtattaatagttcttttcttctaagacccagcttttgtccttctagtcaagctagagtccagtcatagtcatgaggctcatcttcttggggtctccactaattcctggcttctaaaaaaagaaagtatttttcttgtccaagattatcactctagtaatatggttgtggtcataactttaccaccaaccccttccatgagctgttgttgctttacctttggcctccagaaaatcttattattttctgtcttccatgctcaaaacacatgtcctgccctgttttttaatgaatagtgggtattctgaagtgtgttctgtctcaggcatttccaaacccatgtgtaaagttcaaatttgtcccagttaatcccggatgggaaggaagtggaattttttttaaatcacaccttttataggtatgctagcctttgtcaggaggatcagtgtctgagtagatgttgctatagttctgctgttattgcaagaacagtgtcctgtggtactgctgtaattaagggtttgtttagatatagttacaaactcctgtgcactgctgtgtgataaactggcagttcaactttactccaggcaaactccataccaccctggatctgggaatggatctggtattttccatgcccctcaaaagtgatgcactctgatcaggtgttactatacaatgcttcataaaaacgataaaagtacaaatgaaacaatgagattagataatcttacatcctatcaaagaagtaaacagctcatccaaattacatcaccaggtgagaggtaagaagtaaccacacagactaaacatcctaggggatctattctgaaaggtgactgggaagaataggttggcagaccacaatagatggccaggaaagcaaatgatcaatttgaaatgagccgcaaaactgaggaacaccaggggaataaaattaccgatgccagcagttggagaagttgaatagcaataatgtgctgaggctcaagacagagcgataaaagtactgactttatttaaaaaaaggcatgtacatgcctttttttcatcttggaggaacacactctcc

SEQ ID NO: 107480 - DNA, 1047 bp, Homo sapiens
tctcacggggatgacttcacattatccaaattcatgaaactgtggtattatagcataacatcagttcagtcatttaaaagataaatacagcttcagttcaactggaaggcacatattgacttaagctatgcgttctgtcccgttatgcccatctgcatgggctggccaattataatctgacagttgctggtgagctaggtgcctgaatatttaaaaggcgtccagctaagacagcctgctgtgtccacctccccaagagacatgacagagatgatgttaccaatgcaactataatactaaaagagcactgactcagcgaacctttgccctatgcctacctgtgctcctataactgtactttttttcaggctttcgggacaataactccattctgactggcagatttgtttttgctatgttaataaaatcaataaatgtctatcagtctgccttttgaaaggatttttttttccatattaaggcactttatttttctctgttccatgtttcaggcaacatctcactctggttcttgtactaatagttatgcaatttctagtgaaatgaaaaaaaaagtatttgttactttccagattcatatttaaccctaccattgctgattattttagccatctgatcattcattctccaaaattacctcactgctgtagctcactgttatgttttatttattttcctaacttccctccctacccccactgagtccctcaattcttgattgaatgctcttattgtttttattctaaggcctgtggtctgttgaagcaattttttatttttttattttaccttttaaatttttttgagacagagtctccctgtgtcacccaggctggagtgcagtggcacaatctccactcactgtaagcgattctcttgcctcagcctcccgagtagctggaattacatgcaccaccacatccagctaatttttgtatttttaatagagacagggtttttccatcttggcaaggctggcccaaactcctggcctcaagtgatccacccaccttggcctcccaaagt

SEQ ID NO: 107481 - DNA, 1387 bp, Homo sapiens
caaattattttcttactcatcctttttggagaagctgacatcatacttcctgatggaacagcatttgtggtttactaaacagacccggacagcactaatgattaaagggcatcagaacagcctggcattgtggcatagcatggtgcagggaactcaggatattctcagctcctggcttcataagcaactttattttgccatggggttgacactgaggaatgccatccattgttgtctactcctgggtttcacagaagtgaccaaatgctgtcgtcaaaggccaagaggagtttgagtccagagggaacacatttttcctcccagaaggacagcaatagctttgacagttgcaggcagtcttgccacattacatccctctgtttgcatgctagtcagtgattcctgttcacatcagcagagatggagagaggagtagaggttcagatgtgttgcctgaaatgattttcactgcagggaatactgatttgggttttaatgcaaatacacctatttgatctctaccctacaaaaactccttaagcatctaaactctaggtacaaccagtccccagttagtgtgcatgttaatcagggactatcagaggctgtctggcgtctggggtacacctcagggcctgttccctgactgtgctcagagtaagatacaagtctttggcttccttccgcagcaggctgctcgctgctcccctgtcaaggaagtctgtgcctccacgcctgtaccctctgggcaccagcccacctgagtcttcctctctcagcttgaatcctgtttttcaatttgcttgacccaatttccttcttacttaggacctaactttacattttgaattcagtttggggaattgtgtttcatgactgttgttctgattttgaacttaaaccttgtatcttgtacccctgattcaacctcattcaatccttgtcacctgaccatatttgtgatctgaatctgctcccttcctctgtctcaattcctggaggctggagtaaaattcatacctaatcttttttttttttgagacagagtctcactgtgtcgcccaggctggagtgcagtgacgcaaactcggctcactgcaagctctgcccccgggttcacaccattctcctgcctcagcctcccgagtagctgggaccacaggcacccgccaccacacccggctaattttttgtatttttagtagagacggggtttcaccgtgttagccaggatggtctcgatctcctgacctcgtgatccacccgcctcggcctcccaaagtgctgggattacaggctcatacttaatcttaactggggtctattttttaccttgtactttaccaacatgtgatttaacctctccactccttcagttagtcttccc

SEQ ID NO: 107482 - DNA, 2082 bp, Homo sapiens
atatgccatgtaattattatttgcccacctcctgttttctcttcctccatcccactcccaatgaccacttatccattgaccagacctgtgtagtgaatataaaaatgacctaaacctgcacaccctatctcttaactctcttgcatttcagctttaatggtagcaggcatcttgatctggaaaatgaaaggttgaccaggtaaatcaaaaatctttctggattttaggttctatgggtatctaatgattagatggtaagagagttatcctaattattagatgttgtcccataggagaaaatgaagtagctagatctaaaggtatcgtttccacatggtatcttatttaattcctacaacattccagctagttatatctattttaacaaagaggaaagtgaaatccaaaaaagttaaaaataattttaatcaaagcacgtaactttaaatggtgaagttggaatttatttcctttttgcccaattccagcaccatatttctcgcagtcttataggaaaaatacagacaaaaaggacataagaacatttacagtagcaacaaacttatatattgcaaatcatatttgttaagggaaatacctaagttcagtaaacctaataggagagctcaaattcaagatctgtcacctgtggtgcattttatagactaaaggggttgtcctccatgtaattgataagctatgtcaacaagccaagatccttgttataaattgtgcttctgaatacaacccatccccatctttatccttttgaatagatgaataagtaatctgtttctaactactttcagcttcattccacattacctgctgttttctataccgagtgacaagtgccacctgctggccaagtgatgaagcttttatttctattgtttcactggattgctcagttgtaattggcatattagctggataattgttattttttggtaaacctaggcaataatttaaaaaccataatgttataaaataaatttctctgtatttcaggacctctccgttctcaaatttgcctctttctcagatttaacttaaaatttctcttctaccttctattgtgtgacaaggatgattgtgtcattatcatgcacacagaatctagttttagttacactttattcaggattttatggtaccatctaaaatccacttaataccctcaatcattaaaagacagatcatacctttctccctgaattaagctaccctatatttacccctttatacctaagtaatgttaatgagtagtgtatttgcataatcaatatatttctgcaatgtgtgatgaattgcttatgtgtcccctaggtctttctgaattaatcttttgtatttactatacatttcttggcctacagcccaggctgtctataatctgacactagttgcctttctattaatataatagcattcgtttctttcactctgtatggtgctgctactgagcttctccatatttcttacaagtgttcacttccatgtggctctgcaggcctttgtttgtgcattcttgtctggagcagcctctggtccttctccagtccttcaagatccaaaactattgccaatccctgtatgatttacctacttagaaaagtatctccttcatttcatttacctacttggaaaagtatctccttcatttacctacttagaaaagtatctttcatttacctacttagaaaagtaccttcttccttccagttccctttgtcccatgtggtttttcttagagcatgttttacttctacctggtattatagtcactttatgtctaatattatagttacttatgtgtctcatctgtctgccatatcagactatatgctttttgaaataaaggactatttctcttcatctttgcattcccaatagtacctaggcctgcagctttcatgtaataggtatttagcaaacaatgaaggatggaaagaataatttgatttatgcagaattcctgaaaggtgaatattttatatttgattggattggttgactctacataggttaggctgaccaacttctgcatatattactgaagaccaaaatgttcttatacct

SEQ ID NO: 107483 - DNA, 1040 bp, Homo sapiens
gcccgccaccatgcctggctaattttttgtatttttagtagagatggggtttcactgtgttagccaggatggtctggatctcctgacctcgcgatccgcccgcctcagcctcccaaagtgctgggattacaagtatttcccttttttttttccccaggtgcttggtttaaagaggctcctgaacaattcattagattaatttaaatattaggaatctactgaataaagtattccatacatagctggcagtaaattaacctttcagtttttttctcacagatacttcttctagaaattgagaatttaattctgtgtgcattaatcccggattatcctattaatttaatgagcttattggttcttcatacaaaagtcttaagatatgtactcttttataattttgaaaattagctgtgtgctttcagccatctactctttgtagtagtaaactgaattttttaatcgacctatcttgaggatgttaaaataatttataattttggagttaatgaatttggggttatctgcatggctctttttataggtggatagaaatattttggttaatgttttttggaagagacattattccactttcattttatttcagacaacatattaatgaggcattttgtcaagaatagcagcaacgttggttgagggcttgttaggtgcaggatgccgacctacaagttgaagacatgcagaattataaagcacacttcctcctttggaaaagtgcagtgctcatggagaagtaacttttaaagaggaaaaatacgtgacaacagcaaacttaaatttctgcagggctcttttgtgttttttttctttttttttcattatgatgaaatacatataacatgaaatttaccatcttaaccacttttaagtgtacagttgagtaatgttaaggacatttaaatgctgtacaactgtcactaccatccatctctaaaactcttttcatcttgcacaactaaaatgctatacccatgaaacaatagctcccaattccccgcttttccatcctctgacaa

SEQ ID NO: 107484 - DNA, 1054 bp, Homo sapiens
aaagccatacctctcttttcttattttttccagtaagtggttttgagccctagtgtagaatcatacatttatccctcgtaaagtttatcgccttattaggcctcattctttcaggttgtaatgaccttttttttggaatctaatgctaacttctaactaatgtgttatattcccagatttacgtaaagtctggctagtattttctctatgacttcatgtaaaccctgttgcataggacaggaaaatcagaccctggccttctatcagtgatctccactgagtaaaagtgggtaccttgggacatgttttcctgattatgctatcacctaacccttgtcaattacccagtttgtgcataattttgaaagtgagaaataatatttgttacatgaatattttccttaaaacatagacaatgctgtagtacctggatgtagctagttgctcacaacagaattttgttttccatatgatgcaatttagtctctaagatctcagaaagggactaccaggaaaatgaatataacagctttgctaaggatacacgtcgagtgatgaagcaaatattaaaaggtgagaatatgagacaagtttatttgcagatgtagtctgagaaacagttcatatctttttaattcagtttttgaagttaaagattttatgtatgtacccgttttacttaaaaatattatcaatattatattttatattacttttaaatttattatggtgttataggctgaattgtattcctttcaaattcataagttgaagccctagctcccagtagctcgggctgtatttggagatagggcctttaagaaatagttaatttaaaatggagtcgtttgggtgggccctaatgcagtctgactagtgtcctcataagaagaggaaattcatacacaaagagacataccagggataggtgcacacaaagaaaaaaacatgtgaggacacagggagaaggtgaccatctgtaagcaaagtagggaagcctcagaagaaaccaagcctgccaataccttgatcttgggcttccagcctccagaat

SEQ ID NO: 107485 - DNA, 1226 bp, Homo sapiens
aattcatgtacattaaaaatatgtctctacccttgagtcaacttaaaatcttcacttgaagttgtaattttagaatattttctttccatttgtatccatcctgccgtacctaaaactttctcaccagcaaaacggaaaagcgtaggaactcagtgggaaattatgaaaggggaaatgaggttgaggggacagatttcctgccgaagctgagttttcatgtcatggtctaaaacatactcagagtgtgttctgtgcactaatattatcaacatcacctggaacttgttagaaatgcagaatcccaggccccacctgagacccactgaattaaaatctgcatttttacaagatctccaggtgatttatattcacaatcaaatttgagaagcactgctctgaagagtatacctatgtaatttttcctgggataggcatatctttttccacatgtatttttttttcagagacatgtatgaagttatgctaaacatgagactcattacattgtttggcaaggtttgcttaaagctgtagaaaacgtgtaaggtataaatatcaacataaacatagtgaggtttaactcaaacatctactctctggtctttaactgctagtatgacatggtacaaaaggaaaacattaagcatttgaaaatcatgaacctccccatactcctcttgtcttcgctgtaatccgttccttgtcttcatccttagaagaaagaattaagtcttcagaaagaggtaggcattagatttaaaggtcataaaaattatttccatctaggtcacacttaggagagtcatactcagtcctctttgtgggtggagctctctcgaagcccctttgcttggtgtgtgggtaccctcccaacagttgtactcccaactacagggtatcatttgctagcccccactccttacctaattccctgtccttatctaattgtttctcaccttctacctaattgtttctatctacctgtttcttaaccttttcaacagatataatagggtttgaaataaatatatttgtgtttttattattattgtttgataacatattgttttcccaattccatagttatctatgaattgatagagggctagaggatactgtcacaaaagatgttcctctagaaggaaggtagagagtagaggaaggatagcaggcatgtgtatttattcacatatttcacttcatcctcaaacttcattatcaaacta

SEQ ID NO: 107486 - DNA, 1008 bp, Homo sapiens
gaatttctcaatgtccaagagtataatcatctactaaaagtcatgggacagtacttggtccagtactgtaaggacaccggcatcagtgagtattcaatagtcatagtaggagatacttacagagggattactttctgtgatttctttaagctgacatgattatctgaattcagattaccagcaactgaaaactctgaaagggagctcctgctttaaaaacaggagtgagaagggagcccatttcagaatctttcccagactgtcgtgaaaaacaaagcagcagattagaaattgcaagggaatggcaatcagagaacagagtgaggtggcagctgaccatggtggaaggaagcagaagattgctccaaatagactgagaaaccctgctctgggcactgggactccactgtgtgagagcacatagtcccatgcagaccttagtagctcttataatgttgttatgtcataccatggagtaaaaactactgaccctgggtaattgtagatatgttaaacttttttttttttttttgagatggagtcttgttctgttgcccaggctggagtgcagtgatgcaatctcggctcactgcaacctctatctccctggttcaagcaattctctgcctcagcctcccgagtggctgggattacaggcacctgccaccacgcccgcctaatttttgtatttttagtagagacagagttttaccatcttggccaggctggtcttgaactcctgacctcgtgatccaccctcctcggcctcccaaagtgctgggattacaggcctgagccaccacgcctgggcagatatgttagactttgttttgcatagttaaaaattcttgagtatgttaattccagaaagatttcaattaaaaatttctaaaataaatacatctggaaacttaaaaagataaactttagttatctgaaaaatgtgatttatttagatcacctcactcctcagagacacctgaacaatgagattatgtgctgtgtatt

SEQ ID NO: 107487 - DNA, 1015 bp, Homo sapiens
aataccctaccctctctgcatttcctgtttctcagacctcctaagctcacttctgcattgagaccttgggacatgccatttccttggccttgaatcttctgttctcagattttcttactgctggccctaacatgccattcagccatgagcctaaagtattctccacaggaaggtcttccttgactgtctaattaaaactggtccatttccttccccaccacctgtcactcttcacatatcacagcacctgcattatgttcctcaccccacttatcaccatctgaaatgatcttgtatatttatctgtttattagcttcatgcctgccacccttcggtaaaagagaaacttcaaagccagggggaacctgtatttctggttctcaccatattcttagttcctggaacagggcttggtgctgagcttgaatgaatgaatgaatgttatgttagaggtgagcatccagtgcaaaaagagcatttaggaggggcagtagagcaaactggagaagtcaatttaggccttctagaagaatgaagcccaaatttagacttagagaatgaatagtgaaaggaaagcaaggtggaagagtgaagtggtaagaaaacactataggcagggaccccaaattgtgaggctttgacacatgtgccgtgcaaaaggcagtggggagccctaaaggcttagacagtggtatgctctttgccaaagcaggttatgtcaccaaccagatttccagtgagatcctcatggataagccaactctgtgattccttcatagaattcactgagcaccccaaggacctctgcaatgaagaggagaaatccaatctgttagatgaaatgcggagaaagaaaggggttctctggccactgtcatttagaagatcatgccctttattgcagtaaggcaccatggtttttaatgtcaaaaggccttgccttcccacccaccctcactctccacgtaaggcgatagatttgtaaaacgagtcgtattaactctgtaacattgt

SEQ ID NO: 107488 - DNA, 1039 bp, Homo sapiens
gtaaacttgctttattataataacttatttaccttgtattttggaaagggttagagaggaagccagagaatatcttttggcacattccaatctatgtaggatatctggagacttgagaacatgctgaaatttagaaatcacatctactgttagaaatacctaaaatttaaaatagccaagtcatcattttgtaaaaaatgctgcaatgtacctatacgacccgttaatatttcagaactcttttagcattttctagttcttgtaaatttaaattggcagatgtgtttttgaatcagtaaatcctttgtttgactggcatagttactggcatcacgtttatgcagaatacttggctatacagagacaactgagtgtgcctaccaggttttgcaaaatatttggatatatgcctttgacgttaaccttctagtttaattattagcagtttcctaaactgtgtatgtttatttaataaacaactttttaaactttttaaatgtaactctagagaattaaaaacagcaagaacgctctccctgttctatggagtgaacgtagaaaaccgaagccaagctggaatgttcatttacagtaataaccgtttgatcaaaatgcatgaaaaagtgggctcacagttgaaactgaagtccttgtgagtatgtttttgctttcagagatataagcagagaaagggatgttacagtaagattctgtctgtggagtgagatgagtgactaatcacaatgggagcaagtgtcatagtctctgttcacccttcctgttgaagtgcaggcattaatctgcctcattgatagtatcagtgaatctgcatgcatgctctaaggaaaaagcacactttgggaaatttttttcaatgcatttattgaacaacttgatgtggggccattccttgtgccacctctttgccataaatttttaatgctttaccaatttaaaaataatacgagcttattaaatacattttagaagagaaggaaaagaaaaatccatagtcttgtaaagcaaccctacatgtatg

SEQ ID NO: 107489 - DNA, 1052 bp, Homo sapiens
ttctgaatttatatttgtatatttatgtcctgtaaattgtcatacctaaatgaaaccccaatagaaggaaaatttaacatgtgtaaaagttataagaggaacatagggttttctcagatcatggtctgtatgcctttttcactggtcatgctacatgtatagaaaatactcacttaaaattgcttgaaataattttgctgtgttataactatttggcttctacttccagctgaatccatattgaaagaagcacaaatcaaagtaaaccagtgtgacagaacctctttatcttctgccaaggtacgacatgtaaagagagtagtcttattaaatggcaaattgtgtcatttgctttttcctgtgcatagttgtctcttatcatctacttcctaaacttttaagcacagataagctcagaagattaagttgattttaactcaggtaaacagaatagatgagttcagagaaaggagaggaaactcagcaagtcggggcaaggctgaggcagagagaaaagatgaacagaacatggggtgaatttgaaatggtggggaacagcatcacaacccatttctttaaaatggaaaggaaagtaacaggagaaagggaaaaaataatgaaaagccagcagaagaaaaaactagcctatcgagtctccttgaaaatatctattcaaattagagctccctgtggacctaaataaatggggaaaggaaggaaaggtctaacaagcaatccttctttctagtgctaggaattatatactgtaattatgaatattaataagaatgcttccagcttacaaagctcttttattatgagtttctccacacagttcataaacattctttgtaattcttaacaatatgcccatgagtaagataagttaaaaagaactattattaattataatgcattgcaactaagagaaaaagaatattgctacaagacatgtaagtttgctaacttttaccaaaaatatggtatgaagctttaaatgatggtgaatgattaagcaacatatttatttgcttacatacaaagggataagt

SEQ ID NO: 107490 - DNA, 1119 bp, Homo sapiens
gtcacaaaagaaacactttcattactttgtgtagcttataacttttttaaaaaaattacctcttcgagttgacatttctcataggtttaatctaccctaatattaaatttggttacccccttcaaagttcagaatttaaactagttaaaaatctttatgcacttgtttatattcaagataatacaaaccctgttaatttcaacttcaaaaagtcttcagagattttgtaaggacttgagtaatttagaaaacaattttggttatgtaatattttcacgaataaaaatatggcacttctgagatattgcaaaagggacctaatgtagtctgcagtttagagtcattttctcaatccaggaaaagtagcccagttgttgggctagatgggggtctgttgtctgtgtgcccagtgtgaataatggaggagttgtatttctcagctcgtgtctaggtccaaacacctgtgagagactgttctcctcccctctttgtggcaacctgccttacatactaccctgtccactaggtcaggtaggcagtggtgtccaatcaaagtggcagaatcaaaggaatcacctgggtagctttaaaaacctcacgtttccagactccagccacagagaatctgaatcagcagataaggagctatggccttagccacagaacattagtttctggctccttcactgcccttaacacagtttgatgactgcaacacattgatccacccatgatgcatggcacatggagcagcatttaaaacagcagcagaatactgtggacagattgggagaagcaagaggccacacagaaagcacagccacaggtaggggctaaattagagactgttaagaatacccagtgctgagcaggggacaaaagcattgattctactccatgccctcctattatatccacagactatgaagccagtttctgccttgaaatactctcctctttccccacatctgtcctgtgactgtgtgtgtgtgtgtgtgtatgtgtgtgtgtgtgtgtgtgtgtgtgtgtgttgagggagattgttctgtctcttcctttcttcagtttcttatcgtagccagttacatagaaaatgagagagaaagatagagatatgga

SEQ ID NO: 107491 - DNA, 1038 bp, Homo sapiens
cattgctgctttcatgcttcagtggcagagctacattgtgaatagttgcaacagagaccgtatggcctgcaaagcctaaaatatttactatctggccctttatggaaaaaatttaccagcacctgctatagtgtatgaaaacaatatttcttatttgtacaatgtttaaaaacccttctttgtttttatgtgtgttaaattcagtactaccaatgagagctttacctataacacaagcttggctcaggctcttaacaaatttcataatgcaaattatgaaaagagtgccaaagtttaaaaatccacattgaaagacttgtaatgaattgaattataataagaggcaccatactgtagaaactcagcactctttggcagggagtgaaacttgctagaagacatatcttggcttagccaaagagttagccaaacatactatttactgaagtacaaaagaaaattttatagcagactcagttccatagatgaaatgatagcacaatgactagcatttagtgtatttaaaatactgacaagtcaaacatctatttttctaccaggtactttgctggttatttataacttgaagcttctgcttaatggagaaccagagttggatgttaaaactgacaaagaagatatactgatggctggagctctggaggagtatgtgtgtgtttgacagaatgtttttcaacaatggtggtgagctagagttaggagccctgcatcctggctccaggtctgaggtcactgggttttagcactgggacaattcatcttaccctagttactagtaaagttgggctaggtcagtggtttccaaactttaagcttcagagtgccctgggatgtttcttgagaagtacagggtctggggcctcatcttgacctgctgagtcagaatgtccagataccaagcctaggaatcagtctttttcaaatgttccccagatgattcagaggtgccagcatatttagggaccactggaatataagacttctaaagctttctaataccttgactcctaatttgta

SEQ ID NO: 107492 - DNA, 1065 bp, Homo sapiens
taactcctgccatcagtccctgagaattacagtgtaggaattctgaattgcaagtcaggctggctctgctttctggcttgggctttagattgcttttcttgcgtgtgctgtcatctgcttttcaacttttaaaatgctgattctgttgtttcctctgccattctacccttcaagagggagttgaagtacactccatctgttcccatattccacaatggagtattttaaaatacaatcctgtctatacacatttgttatgtgtctcttatacaactagattataggaggaaaatgaacttttaacttagtgttttgtaatttgtctagatgaagagtggaatgaaatagataagacaaaagaataatgttttttgtgtatttcatagtaaattgatgtgtttttttttaaataggttgtagttccaatgccctcatggttaataagaaccagagaatctgtcacagatgatccccagaaatttgcaatggaattatctataatttataaatactccccatttaaaactgaagcagaattgatgcagcagtttgatgtgatctatggaaaatgtggtaagatcatcaaaactctgacaatttgatggaagtatttgttttcagtgtcttatcaaagacactgtacatatgttttcattttttttgttcttataatctcatgtggattcacactggggacagtcatttattttatccatatgagctttgtcttaagagcatccaaacaaattactgtaaatccctgacactgggagaaggatgtgtacttgcatgagcttggtgaaactgggtaagaagaggatgatacaggctatgaccacagggactccacagtcgctgcactagatagcaaagttaggagacacttattgcatcatttgagatagagtgataacaggtatgtaagagagttagcaacttataaaataacgaattaatgtctctgtggcaaagagttagcaaaagtattgcagacattcttctccagattaacagatcttttccccattctttccacctccaccaactttctgttcaacacgtcga

SEQ ID NO: 107493 - DNA, 1373 bp, Homo sapiens
ttgtgttggaatctccatatacaaaactgactttttttttttgagacagattctcactctgtcaccctggctggagtgcagtggtgcgatcttggctcactgcaacctccgcctcctgggttcaagtgattctcctgcctcagcctcctgggcagctgggattacaggcatgagccaccatgctcagctaatttttgtatttttgtagagacagagtttcaccatgttggccaggctagtctcgaactcctgacctcaagtaatcagcccgcctcggcctcccaaagtactggaattacaggcatgagccaccacgcccggcccataactgacttttatctttacaacattttaggttaattctcccaaataataaaataaatcctctttcaaagattcctgaagcggtacccctgtactttagtgctttgttgcatctctatgttctgttgtttcccaaagcatattttaacctaggtgctgtgtctgcagctctttgttttagtatgctgcattgaaaggtcaggacatgaggctcacttgtacggctcctacctgagacagatgattgttcttttgagccctgaatggaccctttcccctgcagccaaacctcaagcaagagtgtggagctggcttagttcaaattcttctgctttactttgaaaaaaaaaaaattgtaccctcttgatgacgggtcagcagaacagagtgttggaaagaacatcctgttacagtacacggtgataacagtctgcctgtttcttcctttttagtatttgaggtgtaaaacatgatgttcttcatttttaatatagtgggtccatgagaattggaaaagactttattctttttacgaagaaggaagaaacgatgacctgtgtgtttttttctcagacattctgtgaagaagaaagtcttagtgaggtaagagttgaagttttccttctgttcccatagcaatgatgttgctttcatttactctctcaggaggtgaagtcttgtcatgggttctttctgatattatttagaaacttaggaatatgtttgggaaatggagagaaggtatcaagacattctggggacatcaaagacctgtcctcttgaccctttcctgagaacttcattttcattatccatgtgctcaaatctcccaaagtaagaggctcccttagacatgatgagctttttagaagaaacctgcaaaatctttccaccatatatgccataaattgattatcattttaaaaataaataaaatattggagtcaaagacttggaatacaaaatgtaaagaaattaatgcaaaatagacttaaaactgtaactctggtgaccataatttcaactccatttgctgatccagaggcatt

SEQ ID NO: 107494 - DNA, 1366 bp, Homo sapiens
tcagtcagaaatgatcttatttattagtttactttcaatctgtttctcctaccatgacatagtgttgtccaaggcaggagccatgcctggcctgttcagtggtttattcccatgctcagaaccgggtaaccatgcacgtgagttcatgtagtgtgtaatgaacacatgggatttggttcagagctataccatgtctgtaccaagacttagaactttgggttataatcctagctgtaccctctatcagctctgtgaccttgggcaggtttttaaaactccttagacttacatttgctcatctgtgacatgcaggtcatagtaataatacctttcttgttttgttataaatattaaataagctgtgcatgtaagtataaacatagtacctagcatatactaaacaatcaataagtgttagctaagattgtcattatggatatccttacctaatgcctaacccctcataggaacatatcataggaggtccagttagtttcagagaagcagaatgtttggtggcttttacacacctcataccatgtgccactgaactatagcatatctgtacccagactgacagagggtcctcaggacaattcttcagcatgtattcaggtaggccaacaagaagaacattcttggttctggagattggtattaatatattctgaagtccagaggattactgtctagaattccagaatacctggagaggtcgggagaatgatttggaacgtctgaaatggttagccttctttcccaggtagtatcagagcagaggtcatcctgcccctcttagtctcacatgggcctggttaagggctaaattcgtggggaaattactagtggtacaagtaattataacacttgtaatttggtaacacccaccaagtgccaagttttgtgttcaggatttcacaaatacatcatctcatttcatttgtttcatttatcttcatcagcaacaccgtgatataagtattacgtagttgcctcttacaccacatggaaattaaggctcagacttttaaactctacctaaggccacatggttaggtctgtctcatctctttcagtatacagttgtttcttagtatctgtagggaatggattccaggacctttctaggataccaaaagctgtggaaagaagatggcacggtatttccgtataacctatatatatcctcctgtatactttaaatcttttccaggttccttataatacccaatgcagtgtaaatgctattaaatagttgttatactttgttgtttagagaataatgacaaaaaaaaagtctgtacgtggtcagtccagacgcaatttatttttttctgaatattttcagtccaagattagttgagtc

SEQ ID NO: 107495 - DNA, 2149 bp, Homo sapiens
tgaggcacgcaagggcttcctgccagttcctttgcctgcacatggagccttatggccttttagtaggcaaggattttgatcagtattcttcagaaatatcttgtctttaaataatacaattttaatgaaaaatcctctgggaaaaacctcacttgaaaacatgcttataaagtaatattaaaaggtcaaagtttatttcaatgatagatactaaggcccttaaatttttattttattagaagtggacaggatattttggcaaaagtgtttttaaccctcgcttcataatggagggtatctagttccgaatcttgaccgtgctgagagagttgtttctagagtaacttcttaattcactagatgtctggaactggagaacgtttgtctgcaagaatcttaaagcttttacattgattacacacctggtttaactttttgttttctctttatttcttcatcagcaccactcacagtttcctttttggagcactggctgaattgctggacaatgcaaggtaaggtttatctgtaaacaacagttactgagggaatttcatgacataactcttgtctaattacatgggaagataaaaagatcatgtcatattttcccatctggaatgttttgtgacttgatttcctataaaatcaaggtgttctaggaaaaaggatagttgagagaaataattattcacctttatttaattttaatttatgatcaaacttgaagtctgtttttatgttaataaccatttaattgtacatattcatttagatattttttgaattatatgtcagtgtatacttgtcttgagaatttacacatgtatttgggcatttattgaagtctgcgtagaagcaaattgtatagttaagaaaatagctaacttattgatctcttactatatatcagacatacataagcactttatatatgagcattatgtcatgcatccttatatctacactctgagatgggaattaatatcctagttctacatgtgtggaaattgatgcatagagagattagatgatttattcaaagtcacataattcatatttggcagagctggcattcaaatttgggcagtctggctgcagaacctcactgtcgtattttactgtctctaataaatgtattaatgattaaggaacccgttaaacagtttaagttctgctcagtagtgtatttgtgggagcttgtgaggggcttcatttttttttttttcagttaaattgaataaagcatttgacgtgttttatattggtattccccataacagaagattttttcctaccttttgcttagaaagcaaagtccatccaggaagtaatgtgcagttgttagatcaaggatctcagtaggagcctaaattccctgccactggttgataacagtgttttagctttttttgcatttgttccccattttttgccttagatgggagatgacccttctgagagtgtgaccacaaagtgtagtcaattaaccagccatccagaaattcctgccctgcactaagtagaaagtcgttatctcctccttttaggaaactctctctgttgagctaatggaatcataaaaagggagggaagtagagaaaaagaataaagtcttgttcagagccatgaactcagcttggaaggagctaataaggatgaagccaagaaagataaacacttttgattagcttccctaaaggagcttagggttgctactgttgctgctgctcaaagcttggaagcaaggctcctcctatgtcatcggtcctgcctcctactgaatgggcccactttcagcaacttgacatctgcaagtctgaaagaacacatttatctatttttccaactgtcttttctcctttgaagttgtttctttcattcattcaacaaaggaggacaagtaaaatcagaatgtggaagaagtagaataaaagaaacattttatgtagtagaggttgattgggaaagaaagattgacttcagactcaggggactgagagaaatgtgatcgataaactaattcttagagcagcatttgtaagctggcagccccttgaccaggtccagcctgtcttatgtgtgtttggcttatagtgaaagtttgcacagtgtttataaagaaaaggaagggagaaaaaaggaattg

SEQ ID NO: 107496 - DNA, 1019 bp, Homo sapiens
gtaagtgctaggattacaggacagagcactcttacctctggttctatgtaacacaatggacaagcaaagagaactacccactcaccttccccgcactgtcctgccttgccgcccacgttcccccaccatcttgtgtgaatgtgtaatcatttcgaatcaaattttaataccagttttgggctccattttccagctggggagtgattgagaggagcagggtggggaacaaccgtctgaaaaagttacataaacctcaattccaggagactctaactcagatacgtcattctcaaattgtggctccaagaccaagcaacaaacctcgcgagacaactgagtcgacgacgcagtgggagcttcgcggtcccgccgcaagggggagcacgtgtttgctgaacccgccctctgcgcgtgagcgtgggcgtgggagtgggcgcgggcgcaggcgaacggctgccggtcaggtgtccttgtccccttgagttgcgcgggtcgtgttcgagggcatggacgacaggtaccctgcgcttcagcgggcccagctgcgtctggatttcatccacgccaactcgtgagtgccgaggtggggtcggggtcggggagggtctctgcgcccgccatgaagaaaggttttgcccgtcccctgaggaatactcagcaagtgaacttgatttatggatttatttatttatttgagctgtataggctttttttaaaacgatgaaagcataataaagatatattctgggccaggctgaaccctttaggtgctcttcagtgaacaccaagtggttggaaggccctacatttatcatttaacacaactgtttaattgttggtcagcagaactgtgattctaccaatcctgcctaaccttagtctgcctaacacactgacaatttaaacattaaagttgcccttcaaacagagtaatttgcatatattgatttcaaactctatggcctcctgagtcttttcaaaaatgtaacctctctaaggataggaatctcaccttttag

SEQ ID NO: 107497 - DNA, 1029 bp, Homo sapiens
ctaattttgtttccttatgtagaggcaaggtttcactatgttgttgctcaggctggtatccagttactggactcaagcaatcctcttgcctaggcctcctatagcactcagactacaggcgtgagcctacctaagcgctttttcccctcaaggcagagctgttttcttctactcttgtttgtatctgtcttttcatgtgctttcaaactggcttcctccctttttttccatcattgtttcccagtcttgtaaatgaaactgagtattaagatgatacccagaggagaatccacactgccagtggagtccagtaactgcgttggtgccttagaagtgagttatcttgaggcaggtagtgtatgtgtggtttggacactagaggaatgactgaccagctcctctgttccccagtggacctccacagagaagtcgagggaagaggatcagcaggcttctaatcaaccaaattcaattgctttgccaggaacatcagcaaagagaaccaaagaaaaaatgtctatcaaaggcagtaaaggtaagaggtcttcaaattctcaaatcccaccttctcgggtcttagaagccagaggaatttttctgaagaagaaaaaccagggaagaaatttccatcatgtattgtgcaaatcctgcacttcatggaagccaagcttaaactgttaccttcctgaagcatcttttggtcaccactgctctaactgatcccttcctatcttcagacttccacagcatatttggttctgctgatcattttttccttcacttgctacttggagttaaggatttcagtgtgcaatgatttgggaacagacagctgtaaatttgaagatccattcttgaaaccggacttcctattctaaaaataagttaggacaatatctacctttattaagcggtgggaatggagtgttaaaatttacatagagtagttaagtgaagcacttagactatgcctgagaagtaatatgtacagagtaaaccctactattagtgtcattacaggctggtttt

SEQ ID NO: 107498 - DNA, 1068 bp, Homo sapiens
tttagttaatagagttataatgatgttcatagtactgcttacaaggtttggcatgtaattaatatttgcgtggagccagttttagagttgaaaagatttttaagctttaaaaatatgactgtagctgatgatttgttgatgagaatgctttacttgttttatgacatatagatttttccttttgctgctatttttgatattttgatatgtttgatatatagcgtggccttaactttatcgtgttaatttaactgttaaaaatatccatcaaaactggtggacctgatattctgaaggctataaaaatgtttatatcagacttgctggccgtttgttttgggggtgtgcattatcttatttggagaactgaacttttaaaatgagagttttacaggttgtcaaattgccagattttttttttgtttttaagcctaagagattcctaggtataagtgtcaaggggactgggcttacgtcatcatctgacttgataaacgtcatttaattatgaaattcgaagtttctttatgatggcaataatcaattcatagatgattagatttatctcacttttacttcccaccgtttttttttcaggggacatagagaatattatcatgggtatggtaatgatgaataacaagatagactgacctttgtaaggtcccatttggctctgagattctatgcctctttccattttcagcaaggcttcatcttaagatgaatgtttaaaagagcacagaaaagaagatctgatatgatatggaacttttaaaagcactttgactacttgataggcacttggggacataacacacgcataagacagagtcctggcttcaagatgcttgtaactttgggttcgacctaaaggaaacatgattgtagaacagtttggtgtttgtgaggtattttgatttgcccggaaatgggacacctaacccattaggtaaagacttatgaatgtgcaatgaaaaaaacagtcatttttaaaacatcatttgggtcagatcttattgagatgtcttcttccttccctgtccttccctcccttcctctctttct

SEQ ID NO: 107499 - DNA, 1040 bp, Homo sapiens
gaaaaaaatattaatgaaatgctagtattggtaaactgtagtaaaatcagtttaatatagtaactgtgaattattcatgatagacatgattgctattactgaaaatcttaggccctagttttgaagattattaataaaatttctaatttagttgtagctagattcttaaagtactcagcaattatggtggctattttgaaactgtgcattgtttatcaagcttgtttttcatgtaaaaggatctgggcattgatatattttcattatatttgtagttaatagtaaaaatgtttaaatgtcctttcattatagactcagattccctactaatttgatttagagataatcattcatggctatacatttaatttaatactaagcctgacaataaactgcctagtttttaaaacctgcttagagataccatacctactttattttaaatgcaaaataaaaaagtccttctccattcctttaattttttggaagagaatcaagtggaagaaggcatatagctaacagttctatacttctctttaagggcacaggactaaaacatgatagcagcatttctcacttaatcataagcctgcttatgttaatggctactgcagtcactctaaaactctgcatttctgcttgttaaatttaaaggaagtaaaaaattactgccaacacaatctttgagaaacatgcaaataatacagttgtatttaatgtcaacttatatagtagcttccccattcctataaacacttctgaggttatatgattatcttgatgcagtttttctgcctagttcatattaaaagcagagtgaacttcaatattgaaataacagtaagggaatttctgttctttttcaaggtgttgcattgtttattgttgtatactagtacagtgccaaaggatttataatttttttcttttaaactggtatagaccctacagttgactgattttgaataacaaaaaggcatatcaagtttataattagtaatactaattagcaggaaataagactatctagattattgaca

SEQ ID NO: 107500 - DNA, 1043 bp, Homo sapiens
ctgggggtgatgggagatagtgacagatcatcaggcattagattcttgtaaggagtgcacaacatagatcccccacatgtgcagttctcagtagggttcgtgctcctgtgagaatctaatactgctgctgatctgatagcaggcagagctcaggtggtaatacaagcgatggggagcagttgtaaatacggatgagagatggggagtggctggtgaatacagatgaagcttcacttgcttgcccaccactcactttctgctgtgcggtccagttcctgacaggccacagactcgtacgggggttggagacccctgtcttcaaggattaagaaatcatgggatagtgaaggagagtagggacaactcttgggaaagaaaggaaagagaaaaaagagtaatttgtgagggaacaagactatgtcagttgttatggactgaaagtttgtgttccccttctcccccaaatccatatgttgagctcgcaaccctcaatgtgatggtgttagggggcatagggcctttgggaagtaattaggtttagatgaggtcaggagggtagagcctcatgatgtgattagtgtccttataagaagaggaagacactagagctgtttctctccatcatgcaaggatgtagcagaaaagcaggcatctgcatgccaggaagagggctgtcaccaggaacctgataatgctggcacccttgtctcagactttcatgctccagagctgtaacaaagagtgtaagccagctagtctatggtattttgttaaagcagcccaagccgagacatcagtcaaggttttattcacaaacatcagaaacttgaccccgtggttaaaagacagttttttgaaagatattggatgcttcaggcatggaaaacaagaactgaaagaaggtaggcaactagaactatatccagaaccatagctaagatactatattgaggggcagtttgttaaggtcattacctgctgtctcctggacgctggatgatatagccttgtctctgatactggctttgctgctcatagaaact

SEQ ID NO: 107501 - DNA, 1045 bp, Homo sapiens
agaatatagaaacctttaattccagaattatcatttctaattatgacatgagatgaagttagagattctttgataatatttgtttgcagtttatagtgttatttatttgcagtttatatgttatttaattcacctggctttattcttacatggttatttctgtttgagtattgtttggagattttattgaaaaacctttttgttatattttcagagttgacatgacttacctatcagtttaaaacaaatcaggttaattactgaatgtgctggtgataaatttgattcttccaaaatgtgttttgttgaagtatgatgaaatttttgaggacaactatatgctattaccttgctagtttgttaatgtatattttattagttgcctctaaattattctaaattttgaggagtctgaaaggattcatatcttagagattttcaaaggtggtgtttagttgaacacagactaaaataaatgtttcttttatagcatatttgcatacccattgtgtagatcttaacatttgaaagatcctgggaactgaaatgtccaatatgcatgccattactgtaggctgagaagtgaaatgtggtaaaagatagtatcagagttttaaaaagtgtagtgtcaaaagtttgtgatggtttctgtttcttcttggttcatttctgagagtcagggaggaaagaaagggaatggttgcaattttattcatattttaatttcaaacacttttagtgtgtgtgatctgtaatatggatctcccttcatttttttttaaaaaacccatagtagttatatacgtcattacattttcttttctgtcacaagcatcttcttgaatgtgtgtatttccaaatgttttgtatctcccaggcactctgtaaatattgactgaatgactattcaaagacacatgaagactccaaagagttgtgttttcatggttgtagtgtttttgtggagctacagataggggaataaatgctgtctctttctctgaaagaataataaattcaatttaattaattagctaatgataca

SEQ ID NO: 107502 - DNA, 1037 bp, Homo sapiens
ctatatacatatgtacaggcaataattttttacttttaggtcttcagtccatctagggtttttttttctttttctttcagtgtttagtataaaagagggatctgtatttttccaagtattttgctcatgctctttcagcatttcttgactaatatattattttcccactcaaaatcttagttttgttgtatagcacatcctattatatataggtctgtttgtgtactttcaattattttatgttcctaataccaaacttttattatttttactttaatattttccctcttcagtagtctgttagtgttttgaaatatttttggcagttatttctaccctgtttttaaaaaaattttatcagggttttcactataattgcattgcatttgtgtattaatatggggagaattgacatgtaaataagttttcctacctaggaatatggcatagcttctattttttcaagtcaggtttataagttttttacagttttattcatgagtgttttaaatattaatgtttacaaattaaacccttttctgcaataaatctgtaaagatatcaccctttgtaacatactgattatatagttcatatacattttgcatatgtttataagcaactacattattggttctaatagcccttcatttcatcttcttggattttgcaggtaatagatttttcaaataataattatttcttttccttcctaatatttatcctttcctttttcatattacactggattgaatttccagtctcagttgaacaatgatagtgcaccatcttgtcttggtctttttttaatacccatgcctctttctgtttagtgttgataatggccactgatttgagaagaatctactttattaagaatccttttcttagttagattttctttttaaatcagatagtaaatggtaagttttattaaatacctttttaacatcgaataagaaagtcatgtgagcttttaatgtgatgagcagtctaaaaatatccttttgttcttagaatagtcctacttggctgtg

SEQ ID NO: 107503 - DNA, 1099 bp, Homo sapiens
catttattttgttagagaacatatgtgagttgtagacctccaaggacttgttatacatattctgatatacttgtcaatgagcagcatcgtgcttgactatagtagtcatgaatgttagctttatatccctcaaaacattgtaagttttgctctattgcttttaggaaggaaaaacgtattatattgaagaagtttgatgtcattttaacttttgcttgtgaaattttttttcttaaccctgaaatggaaaaacaaaattattttacatttatataagcatttcttcattaacattttctgacaattgatctgtctttaatgacttttcagtagagatacttgacatagggaccctccaaaagaagatacttcagtattatatttggtttgggagatcctacatgcataagttatctattgccatgtaaaaaatttaccccaaaacataatggctttaaaacaatatccatttattatctctcagtttctgtgtgccaggaatccaggcatgatgtaactgaatcttctacctcagtctttctcacaaggctgcagtcaaagtgtcagccagagctgggaactcatgtgaaggcttgattgaggaaggattgtacttccaagtcaacttggtcctaatctagtgcttttttcactgcaacacatattggcgtattgttaatttatttgacagtcacatttggatctcatatcaagcccagaaaacacctagttcatttctttttgttactcagttgtacgttttgtgtgtggtgcgtgtgagtgcatgtgtgtgtgtgtgcatgtgtgtgtgtgtgtgtgtgtgtgtgtgtgtgtgtagctagagatagttacacagggggtcaggaagggaggagagtgttgaccacttttttctattttaaaaattgtagtacttttttttcctccataggtgccttagctggaccaattattgtggagccacatgtcacagcagtatggggaaagaatgtttcattaaagtgtttaattgaagtaaatgaaaccataacacagatttcatgggagaagatacatggcaaaagttcacagactgttgcagttcaccatccccaatatg

SEQ ID NO: 107504 - DNA, 1496 bp, Homo sapiens
acatcatgggttagagctgtgtgggtccctttatacatggatttttttttcaactaactgcaaatagagaatagagtatttgtaggatgtgaaacctgcatatatgaagggccaacttttcctgtacacaggttccatagggctaacggcaggacttaagtatgcacggatttgggtatactcagggacactggaaccaaccctcaccccaccgcagaatactacgggaccactatacattaagggaaagttttcttaaccccagtattgttgaaatttgggggcagaattctttgttgtagtgagctgtactattcattgtagacagcatccgtggcctctaaacactatgccagtaaatgccaatagcattcctcagttgttaaactcataatgtctccagacactgccaagtgtcctcaagaggggagcaggagttagtggggaatcaccccctgttgagagccctgcattagtggaacactgaataagtaatttattgattgttcaaaggatttatatgaagtacaagaattaaagtttagaattatagagtaggaccacgttaaagtaacttaaatgctaggatagggaatttgagctctatattactggaaattcatatttgtattcagtagttgtgctgcctctcacctgtcttctattctcagccccttgctgtttaaaatatagttcttggaccagcagcattggcatcacttgggaacttgttagaaatacagaatttcagatccctcttaggcttattgaatgatagtctgcattttagcaagattcccaagtgacttatgtacacagtaaagtttgagaaacactgctttgatcacatcacatagaggaatgcctaactcacggctgacctgatttagagagtactgtgatgacacttgtgattaggaagatgggtctggtgtttttgatcaattgaaatgaagaggtccttaaatcataatgtctcagccatgaggccatgaagacttgcaattaattttgtaatttctgccacatgaatgaagacaagaactattacagaggaataattagcagaattttgtaactgattggatataagaagtaaggaaagtttgaacagtaatagcttttgaaagtttgtgattaaattctgttactgctagttaaatgggcacatctgaataaaaacaggtgttggtgattgggaggataaaataattttggtgttaggtttattgagtttgaggatctgtaggtggaaataaccaggtgtaggtagttagaagctgaagcatcaagccttgtattaaaattggggaaagttcagaatcatctgggtagtagtgtttatcagataaaagtttttaagtgagatacaaaagtaattgcaggcccagggctgattatttatttaaaggaaggggttagaaaaaataggaagagctctcagagagagttataagaagaactcaggcagagtaatatcatatcaagaaaagata

SEQ ID NO: 107505 - DNA, 2490 bp, Homo sapiens
cgttacagtgaatgactttagaattctcatagtgggactctacatggtttagagtaatatggatactaggtataggacctcttagccaaattagtgtaaatactgttttaaagagttattattgataccaagtggtgtcttggtttttattgtcacagatgcccaccttacaagtgaaattattttataggaagacccattttgctgttttagaaactatctttggatagagcacagtgtctatttgcattagcattaaatgatgctctataaatatgttatagagggtgctaaaacattacatatttaagtgagatgactttgcatgaagaaaattgtagatatgtcatgaatggatctctgattcaatgagaattttatttgatattgtatgtatgtcttcaaataatatatttttctaacttccagttttctgaataaaatttttttaattatattttttctctgcttttctcccgttttattatgttggcagagccactcttacatggactgctattttggaagaatgggtgttcttaatggcctttattcattcatctttattaaaatgaaaatttgttactttttttttatactttcagtgaattttgtctgagatgcttttttattttgactaacatctcaaacatataatgcctcattttaactagctgtcaataaatatagtctgaagatatttaaaataattttatgcattttaaaatctaggttggatggacaatggcctgatggtttattggcttcagacaatactcttcattttgtccatccattgactttcaattattctggtgtttatatctgtaaagtgaccaattcccttggtcaaagaagtgaccaaaaagtcatctacatttcaggtaagttactatctgcttgcaaaatgagttatttaaaatatttctgaataatcatagtaacaatatgatcctaagcaataatttgtacttgtaaagatacagattcctcagtgtgaagtttttccaaataatctaaaaggaatatgataaaataatcctatcctgagataggtatgtaatgtggcatcctttattgaaatgtcaaagtgtctgtgcaacaagtttatttactttttgatgcctgtacatatagttaatttttcagttcaacagtactatttctttaatacatagtatgactttctagattcttttatctttacactaagaacaaatagtgatttttttcttttgctttgatggccactttgtacacagttgtctggtaaataaaatggaatattaaatttgatggcttgttaaatagcgttgtttcccacttaatatgggactataccatattgtgttactgagaggtgaaataggaatgctactgaaaatgtgttaatgaaataaaatttgtgatgttttttattgtctttaaactactaatagcttagatttttcacattctgtttcactttgaatatttttgttaatttggctgagtataaattttggcattcgtaaaatagagagctaaaaatacatcttttcctggttgtggctgcaagtaataaattatcaatagaatgcttatttataaaaattcaataaaatattttgagcatctccttactgattacaagaatgtagcaatcttcctgtctaacaaatggaaaattaagaggtaaaaggaagagaacctaagaaactcaggtttgtatggtaattatggaataaatagttaagggttttatctttgttcagatctaaaactagataaattagaggttttggtgaaattttgtgcttgcttaagtgttatattctcagtccttgtgtgatcagtccaagaaaagtaccacgtattatattgtcttagagcactcaccacagtttttagttgtatgctcatttctttgcttattatttatcttcacaattcagcaatttgtgcttgctttattcacgactgtatactcagcagtgagcattgtgcctggcacatgatagaggtgcaaactttctttttttttttttttttttgcatgagtctagaaagaagcttagagctgtatacatccctagccctttctgccagtatcagtactttggtggaaatctgtatttttttttcttttgagacgtggtctcgctgtgtcacccaggctggagtgagtgcagtggtgtgatttcagctcactgcaacctctgcctcccgggctcaagcaatcctcccacctcagccttcagtagctgagactacaggtatgcaccaccatgcccagctaatttttgtattttttgtagagacaggggtggtctctctatgttgtccaggctggtcgtgaacttctgagctcaagtgatctgcccacctcaacctcctaaagtgctgggattacaagcgtgagctactgtgcctggctggaaatctgaatgaggttacatattagtatattactctctctttagttagagaataagccagggaaatgcatag

SEQ ID NO: 107506 - DNA, 1543 bp, Homo sapiens
taacacagcatactatcctgagattagttaactcatctaacaactgcttggagtatgtcaggtatcctaggtataatgctgcctttccagaatgactatttagtaaaacctagtaggcttttacaagagtgagaagccataattcacaaaataaatgaccagttaatctttttcattgttacatgtactcattttcctctaggaaaaaaatgttacctcagtattaaaatagatatttaaaaatttgagaaattatttttaatatatgtaaaataaatgcatcttaggactagagatgaaaagttctgctcagaacagaataagcaactctgagggaaattgttcttaattttgttacacattttcccacattgataaatgtaagattttggataacaggtttttgatttaggattgcaatattcaacctcagttattaaattgtactctattatataatagtaatactctcaagaggtatagtagctctttgactagtacttactgactactggaaattgtgtttttctggtttgcttttgatgtatatttttcccttaactaatacctgtttcttatctttaaatttagaaaagcaaattttgatatgtcaaataagtgcccctatgtctaaaactcttattcctgtgcacagcttgaatttcaggtcatattgattttaggatccaagtgtagtttcaaacttaagaatctgcttacttagcaatccttaaacattaaaatgcattatttcatatatttaaacacctatatgaagtctaaaagaaaaataagccaattaatttttatgacactaaaaatataccttagaagactaaaatatgccttttacggggcattacatgactattttatggtttggcagaactcattagaaaaggaaacttaaagttcttcatttgggtgagaagaactataaaagtcattatatccattatatactcatttatcacacagtcagcaaagagtatgaaaaataatatctaactgaaaaatgaggaatacttttgggaaggatttaaaatcatgatatggtgatgaaaaatagtcctaccttataataattgtgactgtcattgtaaattagaaaacagagaaaatattttgcacgcattgtcatatttccattgcttaaaatgcaaaataatgaagtattaaatggcctctctttcatggaatgatattactagtgaggctcagttatttttaacactgattaaggagtgggatggtaggttgaaacatttctagaaccatcaacaaaaataagattttaaagtaacccttttggttagatttttctcaaagccatattttgttaaatctgagtgaaatggacaatagatgaccatttgtgttcatataaagaaatttgcaaatagaagtaataaatgtcagggtttcattatttaggatacttggtaaaaatgtgtcttatttggtgagagctcaaatatagtcactgttctgaaaaaaactagcatataaagaaccatgaaaaactttaaaactctactggcag

SEQ ID NO: 107507 - DNA, 2582 bp, Homo sapiens
gtgacattaaattttgcagatatagttgaagtttttaaatttctgaatgtttagataacttgcccatagggtgttagacatggtgatgacatttttattactttataacatatttttactttgtctattagtttcctttggtaatagcctatcaggctaacataagtttaaacatatgcttttttatttttttaaattactaaataatagtgtttactatatatctccttccaaaaattttgagcttttttatttaaagaaaatatttttgagagaattattaaaccaacagcttatactatgcccacttaacaagagtctatagtttttcattcttttaaagatacgctcagctcttataaaaataaaccatattattaataggtaaaatggatattaagaaaaactttaatttttttattctttttattttcttgagctactggctaagaaaatgtacatttgaattacttgatttacttttttgttatagtaattattaagcttgctatgtaataggacacttaagtaatactcttcattaaaaaaataaggacctcttttctggagtacaatatcactcataaacttggaatggaagaattacaacataggtttacaccataggttttattcctttctctttattggtgactgactaaatgtcagtgttgttttctttttaaatagatgagtaccactacattctaatcttaatcaaattaagaatgaaaaactattgttactatgaatatatattcattaactgtgctgtcttgtcaacttgctgctgaatcagcctgcattgacattctttgcctttctgtgtcttctctatctttactgtttccattagatcctcctactactaccacccttcagcctacaattcagtggcatccctcaactgctgacatcgaggatctagcaacagaacctaaaaaattgcccttcccattgtcaactttggcaacaattaaggatgacacaattgccacgatcattgctagtgtagtgggtggggctctcttcatagtacttgtaagtgttttggctggaatattctgctataggagaagacggacgtttcgtggagactactttgccaagaactacattccaccatcagatatgcaaaaagaatcacaaatagatgttcttcaacaagatgagcttgattcttacccagacagtgtaaaaaaagaaaacaaaaatccagtgaacaatctaatacgtaaagactatttagaagagcctgaaaaaactcagtggaacaatgtagaaaatctcaataggtttgaaagaccaatggattattatgaagatctaaaaatgggaatgaagtttgtcagtgatgaacattatgatgaaaacgaagatgacttagtttcacatgtagatggttccgtaatttccaggagggagtggtatgtttagcaaccactgaatgtgacttaactatgtacaatgttcattcacactagttgatcattttcagattgttcatactttttcttgaggaagaataagctttttcaagttgattttcaagcttactttttatattctaatctgacaaatgaaaatgtaaaatctgagttcagtgtatctaagctgctttacaattttttttcaatgctgtactactgtctcaagatttaaattttaatgcagagtactttattggtgtgaggcacacaggtaagaagaaatgtcaacattaaatgtatgacttacttggtacaaaaattttttaaaaagggaactaccttgacattgtgtattaaatgtttacctaagactataatctcaagtatgatgtttgtttaacatatacctctcaaaatttatcaccactcaatgacactgcatcaaaattgactataaaactaattcaagaaatatttatatatattttttaatatacaaaaaatatttagcctgatggaatggctttccttttcaaacattattttctaagtttctatacaaatgaaatctttacctctgcatattaatgagccttgccataattactgtagagtggcttttcaaagatattttgttgcactaaaactgtggtagtaaactcagtgaacatgatgtgtggaagagcataattagctggtcaatatttttgtccaaaatacctgcaagagtaataaaatacatacctttcaaacatgataattattagtttttttttttcctttctggaacatggattttggtacattagcagtagccttattttaatgctttatgtcctaaacatactaatagaaatgaaaagacgcagagagagcatttcggaatactgaagtactagttttagaaatgagactttcagccaacaatctatagaaagaattttatggaccatcttgttttagttatttaatgttgatgttgttcaaatgggtaaatgtacagaaagaaaattttagagtaaacttggaactttggatataactagaaaaaactagattatagaattagtcggtaacacttgctaatggacattggcattcatctcctttttcctcctaagtgtatgtatgtgttttaagatttctgttttt

SEQ ID NO: 107508 - DNA, 1247 bp, Homo sapiens
tattagaactttatgtatatttactgtacatagagacttgtttgaaaacatgaatagtcattaaataaagacattgttaaattagtttttgaataccagtgatattcataactacttgacaggtatatatgaaaattctactatcgtgaaaaaaaatgaatatttgtactatttttggccatatttatatttatttctttcatatggtttgaactgttttagcattttgtaaattcacttgagagttttctttcatactggttaaaatatttcaatgatataatgaagatgaatgcaactcttatttttctgccattttttattaaaatacattgaaactaaagtaggctcggggttaactttaaaagtgatatttgagaagtgctttagagttgaaagatttagtattttaccacgtgcctagtagggttctatttgctaactctaatattgaggaaactattaaggttttcagtagtaagtgttgcttctaatagccatatacaggaaagttttataagataacccacggctaaatattttgcattaaggagctgtaggagtacagtgtataagtacagaaattgagagaaatgtagtcattttatatgtgaaaacatctgatttgagtttttgataaatactgctaaaacacagtatatgaacaagtaagaagtttatgtatgaaagtaatcaatgtaaaatataagaaaggaataaatggtacccattttgaatttttaattctaataggagagtagattgtagattgaattgtctttcctgtttacttgttaattagaaaatgcatccttcataaacagctcctttctcaaattttttgtatattgtgtttgtgtttgggttttagtttgtacccgcgctaagttttggttttgttgtgtttggtgttttttgttttgttttgttttgttttgttttttcttttttaaccaacctgtgtattaggtgttagccccaatagccatgcatgaaatctttaaataaaagttaaaaaagttctttagaggcatatttctgtaataagttcattgctctatgttaccatctttgtcctcgtatttactaaagtgtgtgtgtatgtgcgtgtgtaacctagtttattttaattatcaaaatgtaattaatgatttgtgggaatcagaaacctgttttcctaaaacaagactgtaatatcagattgaggatagttggcatgttggccactgtaaaattttttccttttt

SEQ ID NO: 107509 - DNA, 1569 bp, Homo sapiens
ttcaaaacacgattaatagttttagagcctcatttccttatgtgcataatattgctacatagacatgatatgcaagttgtacagtctcaattaagagaaatatcccagggaaaacctaattgtaaagtgacagttctatctaaaagccaaaggtaggatctaggtgactgggcctttcttaaaaaacaacaacaacaaaaagcttcttattatggaaaattatacaaaaaataggacagaataatgaaatggacctccatgtactagcttcagttatcatcagttcctggtcagtcttattcaatttagacccctacctacataatccttcttgatattatttcatctgtaaataaatcagtatatagctttgaaaaataaaagacctttttagaaagtaaccacagtatcattattacaccaaaattaataataattccctaacattctgtcaagtgagcattcaaatttctaattgtatgtattttgcagttttaatcaggctttccaaatatgatccattcatgtgattgctagaaatagcttttactctgtttacccccaccccattttcccttgcaatttatttcttaaagaaactgcttcatttgttctaaatttttccagtttaaattctgccatttgcatcccacacacatgcctctgtattttctgtaaattgatagtgagatctagagccttggttagattgaggtttaatttgagggcaagattacatcacacataagtggtgctatgtctttccatcagaaagtacatgcctacttttttgtgtgtgatattagctgccatttggtgctcgatgcctagatctattaaccctgttcttttaccatatcatatacctagatgtctgaataattgtcatgctgcttcctatcaactttatctatcataacctcacatcttcttctggtttttatttctcttctccagatcagtaaaaactcctttaagtgtacctcccagttcaaaattagtctgtactcctattatacatgtgctactacagcagtttgctaacatgcattataaaatattcaaaaatggaaattttagctatctgataatatatttaacatgttaattttttctcactaaaactaagacttggggaaacaatatgattgcatttcattttaaaagttaacttttttattactaaaacatttttggtaaaactacatgattaaatgttcttcatgcattttttattttcaattttatactttctgattcagtgattgaaaggtctgatatcatggtcagtgcatgttgatatttggtttttagatgtgataactaaaatgccacctctcaaaaacaaatagattcaaatggaagaagtagattgtttggatgttaacagttttcatcccaaccactatttttagagtttatctttatgttctagatatttggttgttcaatgtcttgctaatcaataacttctccttcacattagctactgtttcagcacattataggtttagtgtgaggtttattgttaatgagtaaatgtaaatatattttaactggtctgctgat

SEQ ID NO: 107510 - DNA, 1096 bp, Homo sapiens
ttctgtacagttgggcaaacatgataggtcttctttagcaaaagaaaaatttccaagagaggaagacctttagaataattggtgtggagtaaataacgtacttgacaattagtattttttatttgtgccactgactagagatgtatgaccttggtcaaattgcataaccttaatagtttcaactggcctactattaaggattgagtaggaccatctactttatggctgtgttcagtggtcaaagttataatctatatggtggggaaaaggataatatagattatccgtaagtcatcccaaatctctctcacatttacaagtgcagaatgatatttggctgtactgggtttcaatattttttttaatctagtacatattcaaatggagatagattagaaaattgagcaacaatagataaaccaggctggtattagaaaatgaaggtcaccatgaatgacagagttataatgtttcagaatctattcattggaaacgttattgaaatgagtgacttggacttactggttgtaagatttttatttcaaaatgagctaaacaaaatgagccattaataaacttaggattgttagtattctaaagacatttttataatttgaaagaaagtaaaacattctttttggcaatctaaactatgttacccacatttaaacaaaaacaattggaaaatacttataaatatgtatttatatgggaatactatcatggtaagtagatgaaacatatttcaaaaccaatagtgctagttctgtaactttgccgtgtctgggtcccaacaattattgcagttatttaagagtatatgtgaagattatgtcaatttaagtaaaactgagacctcttcattagtcggcgttatatatgttaacaaaaacattcttctcttccaacaaggggtaatagtggaggcttctaccctgctccaacctaactttatttctctctgtgttctctactattcattgattgaatggtcttggcagattatttaacttcagagctgcaatatctttatttatagaatattatctcagtatctttttttattggtaagaaagacaaaaacaaaatcagatgt

SEQ ID NO: 107511 - DNA, 1033 bp, Homo sapiens
tagtttaaatgaataacatgataaatatagatagctgttattcctgtaagtgaaagtgcttggggtcctcaagatgtaaaagatcataaaggggtcgtggggccaaaaatttgagaactgctgttgtaaactgtaagcagtatgaaggcaggggtcatgtcactattgtttagtaccatattcttagtgcataacacagtgcttggcacatataagtacctgataatttttttaatttgacagatcaaaattgtatatttttatgatatacagcatgcagcgtgatgttttaatatatgtggaataactaaatcaagcaaataaacatatgcattaccttatgtattccgataaacaggttttgaatgagtaggtaaaggaatcaagcccttttttatattctcttcagtttataatctgttaaaatttctgcatcatttataatatccatatcacagatactatatttcagtatatttaatgtcagtgtctataatatcactgtatcaagtatgagatatcaatatataatgtatgaaaaagaacagagaaaaagagactatagaaatatttttaaatgttagcagttatctttgtaatagacttctcagtgaatattatttttgttatattttctgtagtttctgttttttctgcagtgcctttccccacctctgtaagtagccttttagcataagaaaatagagatctattgaacacctgagtcactggcctggaatgttaagctggtcatactggttatgcagtgtgtcagcactgttaactatctgagaaaactgaatttctttccaataatttactatagtatattgcattctttagtaaatgtttgtaaatattcatgacagtgttagtagagaaagaatgtttttacatttttttagtgtatggataatacatacaaaacaatataaagaggtgttttctaaggtctcattcctatacctatttaccctacccccatctacagataaccacttttattaatttatgtcttggcactgtttcttta

SEQ ID NO: 107512 - DNA, 1010 bp, Homo sapiens
tttttcccacttttttgttctatcatggtcagtacattttaattgaatgctggacactgtgaatgttatgttttcaattgtttgaattttgttcttatttcttaataagaattcagttattttctggaagtcagttaatttacttcaagatcaacctgatcttctggaacctgatcttctggaagtttgtttttaagttttgttaggatggttatagagtagcctatcttctagagctactttagccttctaaggtgtgaacctgggtctctgctggatgtctcacatgttcagtgaggattttctacttcagctggttggatcaataagtatcactcaattctaatcaagttctggtaattgttaagataacagctccctagcaaattttctttctccaacagttattctttgctctgtgcatgcccagcctagtatgctgcccagggaactctcatgcagatttctggagctttttttatgtgtgtctttgtcttcttcaggaccctgttccacagatttcagtcacctcaactttcctaaatgccgaactctgtctccccagttcagcaagatcctgtgctcttcttgaatttttctcttcttacgtcaccagaaaaaaacagagttatcaaaagataacacatgtgcgtgtgtgtgtgcgagtgtgtgtggatggatattttgtgtatatgtatttttccatgatctgggatcccagtcctatacaacacagttgttcagtgtctgaaaactgttgttttatatattttgtccaattttttattagtttatgataggaaggttagtctggtattagttctccatcatggctggaaagcagaagtaaaaatgtatcacttgtcagtataaggaagaagcattagggcaagatatatcaatcaaatgaaacttttacagtgccttgtggagttataagcagaagagagggaaaatgccaacagatagatgcagagcaccttgtagagaataaacaaaaggaagaagta

SEQ ID NO: 107513 - DNA, 1839 bp, Homo sapiens
tcgaggtttcttttgtttggttggcttaattctctgtatgtctcatatgttcatttcaagcttgagccttgcttaagagacttctgaggtttataaccctgttcttctccagtttaccttaactgatagcaactccaaattttaaaatgtgaaactgatcccagtccccattagtcacaattttgtatttaggagctactactattcttattcagggtattgtaagcgacaaatgactggaaaatataagttgttgaactttaccttgccattcaatagtttttggcataatgaatcagggacactaaactgtagtgaattctattcttgcctgtttttaccagtgctagaaaaatgcaaacagctgctctgctaatgtaagcaatgtttgaatttttagaatggactaaatagcaggagttttgactatgaagatgagaatccagttggggaagatggcattcagcagatgtaccccctttacaatcaaatgtgctaccaagaccggagccctggcaaacatcatcaaaataacgaccctaagagagtctacatcgacccacgagaacattatgtgtgatttttctctttttccaatgggcgttctaacaaatgtttattcttagattggggagagaagctaaggccaatagttattttactgtctctcatataagaacagtcccactctaagggtattggaagtcttaatgaatgacgtaaagccaatagcaaatttcttttcttcattaagcgtttcttaaccaccagctgtgtttgtgaacttgactatagctttgtgtgtttctgtgatgatggtatttaactgctaacatttggcctacaatggcattttcatttaacagtacagcatctgcctgtgataactgcagtgattctccagaaagaaaggccccagctgatactattaacctcgttgggtctcaggcatgctagcctgttcatctgtaattcacacaggcataaaaatgagttcagaatctatttcactaattatttagctgggatttggatttccctgacatgcttaatacaattacaatacctgtgtacaaacagaggcctgaggaaagaggcaaaatttgcttttcatccaaacagcaacaaaaggcagttgaaaccttcaagcctgttggttgcttttaaacctttgtgttattatgatatatattctttgttgagcactgaggtcctgagggatacatatctcttgctgttttctgcctacttttgactagctgtatgtaacaaaggctctacttttgctctgtcactgttcctacagtcctgttctttactagctagattagcctattttgcacctattaaattctaaaaaccttgtttaaatggtgtacagcctttaaccttgttcctcttttctctagtattgtacatgacaggctcagctttcacttctgaaatttctttcaaactaatcccagccacacagtcttcacctccccttctgcattcttcagactacttatcatccatgttttatctacctcagaaaagcctgctggaaagtcaccatgaaataacttctgctcttaaaagccaggtgaaaatttagaaaacttaaaagaaaaggcacttcaatatggcacgtatgttaaactgacatgttttttatcccttctcccctactttacctggtcaccaagagtcaagagatgctaaaaagtaaataatataatgacttatctactagggtatcccgcaacactttagtgtctgtaaatgtgtcttgagttttctcatctccctttgccagctttccatccctgagattgacagtagtaattacagtgagat

SEQ ID NO: 107514 - DNA, 1048 bp, Homo sapiens
agaacatcagatttgctatgctggcttagaactgtgtcctatcctactacagatgtgtctgtcagccatgaagagatgttttaggtgtctcttccagaagttgatttccgctaataacccacagtggatctatgaataccagagttgtacgtgattttccaagtgaataggcgccattgttttggttttaaataccctttccagtaatgactggtattttttaaaaacctaccctagcatgttgatcaggctaaattaagttcctctctcaagccttattgatggctcagtgcccattatattttaactacaggtaacagcagtttgtcctaaatgcattagtttgcacttgtccaggttgtagctcttttatgcctctgctttttcccacatggtcttatgagaacatattgcatatattcccttcagctgagcatttcaatacccagacaagtgtttgtcattttaggcctcatcacatacttgaaattccaagtcctttttaaaagaaatgttaagtagctggtgttgctactagatccctggattattccacttgtccatccataaaagttcctgtttattctctaccttctgtttctatttctaagccaatgctttaagacataacatctgctccagcctgttcactatccatgtggttttaaactcttaactttacttcttagcttcatccctgtaagtaagtgctctctacctcacaggggtcttatgagggggaaaaaataagatgtttaagggttgttttaagagagagatccttcttttaaagtgattttatcaaagccccttgggttagaaatgaaaaactctatagctatttttttcctattctcgttttgctatttttatttctgaaaagtgatctgtctgaaaagagccttatatctggttttaacttctcctcattgacccttttcacagtgaaatctctactttatccatgctctgaactttttatttatggagcccaaactaattttcccacaacaaatctcacatacttttactcctatcattaaacaaa

SEQ ID NO: 107515 - DNA, 1047 bp, Homo sapiens
ggctgcacttctgtgtgtctttcaggaagccacagggcagggggcgtctgtgcagagaagcgggggagtgagtagcaggcaggcccagcttgtgtaccagcccagtgacatatatagaaacataaatcaggctagagccggcgcgcccgggcgcgcacctgtgtatggacccgcaggcatgtctgtacactgggtgggcacctgtcttgtgagtggctccgggtgtggctgctcctcggactttcagtttatgtaagatttatctctaggggcctaccttcccccatctccagaggggaacataagaagtttaacggagctgggactgagcagattaagggagtggagcggaggctgggccggagagagtggggactgtgagtgctagtgggtaaggatccatctgtttgccccgtcccccagccagaaaggcattttggaaagactggcgtggcaagcgtcgccctgaaacgtccacagagcccaagaagtgatgatcactgagtgagtggcactgggctgagactggccagtttgttaacaacagggatgctagcagttaggaaggccaggaggaaactcaggatggggaccatctgctcccccaaccccagcgggacaaagacatcatcggaggtctgcaatgccgactggatggcctcgctcccccctcacctccacaacctccccctttccaatctggcaatcccaggtattcgtctattcctacttgttcccactgtgtttaattctgccattttagtgttgttaaggggttgggttgcttttctattgtgctgagaaattaattgtcagtgacccctttttatttccaaaccaaaaacttaacactgaagcagctgctttaaagagattgcagtacactgcatcattggtaaaaggactcatgaaaacagaagcatcattgtttttgtttgtggtttttttgtttgtttgcttatatttgctagccccattctaagaatattatccttcttactgttgttatgtgtatgtgaggggtgcattgtcttaaatcacttgaag

SEQ ID NO: 107516 - DNA, 1587 bp, Homo sapiens
cttacagatgataccaataggcccttaagtggttaggggactgctcacctgttgtcttgcgtagagacgctggaagcccctcctgctagcattgcgaggaatgcagagctcacatgctgggcttgggtaactttctcttcccatgctctagggacaaagaaagacgtggctgctcccatggtggtttgtgcttgatcttgagctgaagcaaataggcaaaatatccttgagaagtgagcagaagaggggttatagtagaaaagttaagtgataagatagctagtttttttagtgaatatattctaggctctctagctcgcttatatgggaatcttgctttcacatgggctctctggagtgttctcaggcacccgatctggctgctacagtattacttttggaaatttgtagctgttgcaaatgtatctctagggtggtcagttgagaatatccccaaaggtgaaacacttctgagctttggtttgtgtccttagttggatatggaatgtgctcttttggatggagaacagaaatctgaaacaactgaacttatgaaggagaaggagattttggatcatctaaaccggaaaatagctgaactggaaaagaacattgttggtgaaaagaccaaggtaaaagaaaattatatttcaatgcagtttttatgggcaaagtggtggtcccagttgattgaatttaaatgttgaatgcattactggggttttggatttgtgtgtcatgttcctggaggcagtggcactagagaaaaatcctaagatcatacattgtcagaaaccaagaactgccaggtactgggcagctgatgctgagagagcagagttcatataatttgtgagccgatattcctggcagctttatcctacttgagatgagtgcgttgtttgtttgctttttttcattggcctttctgcttttctgattccattgtgttttttaagtaatttctttagtatactgaagttctttaccactgctgccctgtagggatggcttaagcaaattcaaatagggttgcctcatttcttttatttcttttcatttttctgtttattaaacagatgaatgagaaccactcatctcacctgctttgccttgctattgttttcaatgcaagtgcactgctttttgacaaatgtattggagtttctaaaattttcttcttggggtagtcctcacacactgccaagagaaagctatctgtgaaacacagttgacacttatcttggaaaaggttctgtgtatacattttggatcacaacctgaatggtggctgatatctattagggaaagtatgaaaaatcacttgcaaattttagaattcaggatggtagttgggtttgtctgtttatgtgtttttttcctctgggaaatatacattactctcctctcccattctgagttagttagagcagaactaaaaataaaattccaataaaactgaaaataaaattccaatttgagaaagaaaaagcaaataagctttaacacattcttccttactcaacatgttctccactaagctgagaaaaagaaaaaatttttagtttgagtaagttctagtggtaa

SEQ ID NO: 107517 - DNA, 1068 bp, Homo sapiens
gcagtgacacgatctcggctcactgcaagctctgcctcctgggttcacgccattctcctacctcagcctcccgagtagctgggactacagacacctgccaccatgcccagctaatttttttttttttttagtagagacggggtttcaccgtgttagccaggatggtctcgatcttctgacccgtgatccgcctgcctcggcctcccaaagtgctgggattacaggcatgaaagatttttttttattagttgttgatttgagtttattattaacaatacaaacatttgagagcatcaggagtacttttgttatttcttcagatttgagacctgtgttttaggccagtggctttctgtattatcaaatatcatatcagtgttttctgtcaaagataactttaaattttagggctttatacatgtgctattaaattataatgagtagtcttcttttttaaattactttttagctttccatttggaggtagagttgctgcaaactctggtgatgcagtacctagaaatagaactcttgggataaaattattttgctgtgtaaatagggcaatctttgatgcacacacataggagagaacaccttttcttagccagaggacaacagatattctgtatggctggttttattaaggaaaaaaaaaattctgaaactaaagactaaatctaacggtgctagtatattcagtttaactatggattagcacacgtgggcatcctttgttctgttaataatgccattgctttctccaactcttgcacaattggtgtgtacagtgagcaaacttaccattgaagatcgaagaaattttcgttgttgtctgttaaacttttaagttgttacagaaccatgttagattggtatgtgaagtaggggtctcaggtttatgatttctgaatttaattattttaagaaaattacatttctaaagccaaatatacatttctaaatttaagtgaaaaatggagactcaagtgaactggtattgatatcatgtagttttagatttgaaccataacatcttttatacggaatctatgtgtttatgtagga

SEQ ID NO: 107518 - DNA, 1028 bp, Homo sapiens
aatttttaaaaaaaagactttattttttagagcagttttatattttcagcaaaacccagcagaacttacagacatttgccatattccttctgcccctgcacatgcgtaggctcccctcattatcaacattctccaccagagcagtacaattgttacaattgctaaacctccaccgacacatcgtcatcacctagagcccatgtccaaaagttttttgattgcttatccctttaataaaattattagagcatgcatttcctttgtagatatatgatatataatccatattattataaatatatatagtgtgcatgcccaaagaatgtatatatttaaaatcgtgtatacatactatgctacttgtgtatacattagaaaacatatgttgagaaactgaaaaagaaaataaacaattaaaaacgagtatgaaaggggtctaatttttttctgcacagtccagcagattgtgttgtgtaccatctgggatacatgtatccctattagacacctctggtctgtacgtgtgccaacttttgactctttaatctccacattagtcttgttttctatgaaaaattgaagaaaagaagagcttcctttcctttcctttcctttctttctttttttatttttatctttatttttattttttgacagagtttcacccttgtcgcccagggtggagtgcaatggcacaatctcggctcactgcaacctccatctcaagcaattctcctgtctcagcctcccaagtagctgggactacaggtgcccaccaccacgcccagctaacttttgtatttttagtagagacggggtttcaccatgttggccaggctggtctcaaactcctgacctcaggtgatcccccctcctcagcctcccaaagtgctgggattacatgcatgagccacccaccacgcctggccaagaagaattttcttgtaacgctatgttacacctttggactgcagattatgtttaggttatttactgagttgtttttgtacttccttctccattttaaa

SEQ ID NO: 107519 - DNA, 1381 bp, Homo sapiens
gagtgtaaaatatacagtcctttcacagaactttatagaagtttattttaacatccatctatgacccagcaactccacttctagatatttacacaatataaatgaaaacatgtcttcatataaaacttcttcaagactgtttaaagtagttttttccataatagtaaacaaaacaaaacaaaactagaaaacctaaatatccatcaataggagcatggataagcaaattgttaggtatatttatataatacaggactcctcaacaataaaaaacagtgaactactgatgcctgtaacatggagtgaaagagggctgacacaaaagaatgcatattgtatgattccatttatataaagtggttacattttataagtaggcaaacactttataacacaggcaaaactagtgttaaggccgtggaaatcagaacaatgcttgctcataagggtggaagttgacaggtaggggcatgaggaaatgattggggtgacagaaatgctctttatcttgtctaggatattattccatttgttcaaactcataaatttatatacttaagatctatgcatttcactgaatgcacttttttttttaattaaaaatattttagccccagccatggcaaggacacatatacaaattatagcacaataaaaaagtgacccataaatgttgcttaataccaaattaattcaagatgaatcatagacaaatgtaaaagctaacaccataaagttcccaaaagaaaatatatcactgggttgtgatattacatcatcagatattatgtcatcaacaacatcatgtgatattacatcatcaacaattatgtgttatttggaaggattaaaagaaaaagacattagaaaataatttttgttggttttttttttgtttgttttgttttttcttagacagaatcttgctctgtctcccaggctgcagtgcagtggcgcgatctcggctcactgcaacctccgcctcatgccattctcctgcctcagcctcctgagtagctgggactacaggtgcctgccaccacgcctggctaatttttttgtatttttagtagagacaaggtttcaccatgttagccaggatggtctcaatctcgacctcatgatctgcccgcctcagcctcccaaagtgctggggattacaggcgtgagccatcacacctggctgaaaataatgtttttaaaattttattttaaacacatttttaaatgactctataaaatttattaggaattaaaggttatattgctaagtatgtttggaaacaactcatgcagcatatcagctagcagaagatgacctctagtatacagatttgaaattttgactgagtatgatgagaggaaatagaaatgggggaaa

SEQ ID NO: 107520 - DNA, 1107 bp, Homo sapiens
atttttaaaaaatgctaaaaccattagggtgttaatagatttcttcagtttcaacccaccgcataacaggggataaataaaaatgggtgcatttgtaacaagagtagctcttccctgttcttttgcatggtgcgcatgcattcttggccctgcatctgccctctgctccttatgcatgaagaactttcagccattctttcaggtgattttggacagtgtcttccccagctgtcttcacttttggaattgctgctgttggaggaagtgctttgatattgcgactaccctggaacttctcgggagggccagtaactggcctttaccacttagcatcaacaaatgaaatgcaaagacttaccttctctgccctgtacacttagataggagctttggaaacagggatgtggccatttcctaaaggtccattcagcctgcagcttgcctgaagtactccctcctgcttcccgcaggcccatctgcccctaggacagagtaacagctgtggaagtgtgctccctccctcactggcagccatggccaaagactcagaatctcggaggatgctcagaggtacgtaccttttaaatcaagtgtcatggccttttgttaagcattagaattcttcagggggaggaagtgagaacaggggtagggatgattagaggagggatcaaccaaaggcctaattttactcttaatgtgttctctttcgggagggatatataacttttcctatttatacatatagctggtatattttaaacattcccgttgtactttatagatttgatagaactctgaaaccagaaagacccctagagaattactaaccttcccattcgattaatagaaagaaaagagagaccagtgagatccaaggagattaccagggcacttaaccaagatcactcacctgggttgtgtctgagccactatgtcgaatgaaccttgtgctaaagaatcattgagctgacacagcaaatatagcattagtggcccagaacagaattcttataggccttttaatgtagatttgagcttttatacttcatagttgttatgtttcaggtagactttgactctcagcatttttttttgtagtaatac

SEQ ID NO: 107521 - DNA, 1005 bp, Homo sapiens
gaggattcagggcctttgattgtgtttctgtttggtttcttttgtgtttgtgtgttgctggttgtgctgagatgtaggaatgccataggaaagtgtcaagtgatcctgctgaggggtaagagactcagcagaccacttcattcaaactgttgcttgcactgagcacggtgctctttctttgatcttcttggcttcaaaacaaattagaccaaggcccaagcttcataggcagatgtttctggttgctggcttgtgtctgtagatgtttaagattcaaagactgaaaaatgaggcaaactaacatatttatggctccttccttaggttataatcaccaacagatgagtgaaggacacaggcagaaatctgaattttataaccgcacagcatctgaatcaaatgtctacttgaatagtttccattatccagatcacagctacaaggaccaggcctttgatactctgagcctcgatagctctgatagcatggagaccagcatctctgcttgctcaccagacaacatctctaggtaagatttatttatgggtaaggtttctggtttggaaaagagcctactgctcacaaaaagtaaagccatcaatttgggaactgtatatgcacaagcccaaatttttgagacataaagggtctgtaatgcagaagagggttggtatcatgatggcctttgaaagtagtttctcttatcttgtgtaacttagctagtcaggcatcatataatctgtttccacctttatcctgtttttctccacttgagctcaaatttacactgtgctttaaaattgatttccttctgttggttagctctaagcttcacttacactgcttttgatttaaaaaagagggcccaggcacagtggcgcatgcctgtaatcccagctactttgggaggccaaggtgagtggatcacctgaggtcaggagttcaagaccagccagaccaacatggtgaaaccctgtctctactaaatacaaaaaattagctggg

SEQ ID NO: 107522 - DNA, 1999 bp, Homo sapiens
gacgtttcccatctaggaccgttggatagggttcctttctgagcttccagctctgtagtatctatcagcccgctgatagggcagcctcccgacgccactcaaaacatcttaaaggccccaagccaaaccccgctactagtagaaccaacagtctaaacgaaagagccacgacgctctgcgcatgtgcgctcttcgcaagctgaaaatcttgcggggagctctttagcaagttccgccttccagcctgaagcgcatgcgcagcctcggttccgttgcgtagcgtgtccctcagtgggacactgcagggtgcggggacaactacgaagatggcggttgcgcgcttggcagctgtggcggcctgggtaccttgtcggagctggggctgggcagccgtccccttcggtccccaccgtggcctcagcgtgctgcttgcacggatacctcagcgggcgccacggtggctcccaggtcagtgtccgaaaggcgggagtaggatgcgttctttcgaacgcctcgggttccgtcagttaccgtgcctgtgcagtgcgtctttggcgcccggttcaaaaatgctcctccccctttctcaacaccccagttctaggcgctttgtagacttctggtgaaggctgtgaggagagctctgccgcggccctgcggcattctgggcaccccgggccctcgctggcgttttacactgtgcagtttaaagagctcctgctccttacctgcctcccctgcattaaaggccaacactagaaaaaattaaaatgtgcatttaatgcattattattagttacttctaggaatttgtagattgtgactcctaaaatgcttagactgactctcctttgagtttagggaacctaacaatgcgaggcatgttctttgtaaaagtgtagacgccctcataagcctaatttctagttctgctttcttgctgcacccactcagtgaaagaaccataatcattattgcacaaaggaaactagaatttgggctaaaaatcagagaacctcttatatgtatatatagtctttgaattagatccttttatttttttggctttgtgtgtggttcacaccattgccacgtagctgtcagatgatgcatggtgcttggagtggtaattaatgtcacggcagagatcttttgtatggagatttttgtatccagtttttaaacttttataatcagattaacttgcatttaattgtgcgcaaccaaaaggcatgttacacatgcaaatactcctagtaaaatgtagtatgtcaattcattaaccagagtataatattatttcatctagttagcacttattcattgagcacttatgcaccaggctttgaattaatccttatgttcaaagatgatttatgaatataattatatgaatctgtctacttagaacttacattaaataaattataatcatctcggggaaattatgttttaagaggtgatttctggaagaggatagtgagaattttttttagtgctcagctgagtagatgggaaatgaacatgagtggatcagcataactggtccttaccaaaagttttaaatttggcatatttctctatactttgaaacaagcttttatgtaaaaaggataactttaaggccttcagttacatctttaaaaaatcaacttcttaattacaaaatggggaaaactttagcagcacacatggattctcttctcaagactgagaagttttcaaagtggaggacggcttcatttaatataaaaaaagaaaatgtattagtccaaagactctaaggaagtacacaaaactagtgtctttggaaagaagaggtgggattataaatgactcttttaaaaaaatatctacttgtttcttaagagcaagtatagattttataatgggggaaaatttgaaaaagatgaagtaggataatcttatgaagttcaccaattgtactgttgtacttaaattacactaaaatctctgtgtaccatttacagaaagccaa

SEQ ID NO: 107523 - DNA, 1073 bp, Homo sapiens
catagtttactttttgtgtactttgtttagcttgtagacaaaagacgtcactctcattccttaatcgaccagaccttccaaacctggcttataagaagctaaaaggcaaaagtccaggaattatcttcatccctggctatctttcttatatgaatggtacaaaagcgttggcgattgaggagttttgcaaatctctaggtcacgcctgcataaggtaggaacaacacattactgagaaaatattgctactgttagcattacagtggagaattacttctgttctaatcagttgaagtaaatgccagcatttttatacattattttaatggtctgtaaacttgcatcttgtgatttagggtaattttaaaagcaacctttaaaagaccttttttaaaggcctttgtgccacgctgacaaccctggcagaaaaggacatcttaagggaaatattggtaactaagctctttagaggcaataatgtatgtgacaacaaacagatatactagttggctttcatacagtctcttatattatcattttccactggggacttaaggactttatttgatcactgtttatctaaaagtaatacatgtatttaaaagtatcataatgcaaatttctgctgagttttctcttccctctcctgtaatctgaatatgtataagcataaatagggataagtggtacttaactcaagcttgattttataattcctaatttttcacactgagagttattttagtaaataactttatgttattataaggtctacctgtagcagttatatgtttagtatccactgtccagaagagatggtatgatttcgtaaaaagaagattagcctggaattcaagaaacatgagttctagaataaattcgagcaataactatgacaagacaagtaagttaataaacattggacctaagtttgtcatcaaaagaaggaggttggactagagataacttctgagttattttctagcactaacagcctaaaaatctatccatctaaatttttagaagagtgactcacaaacattcattcaataattctagaaaatacagctgta

SEQ ID NO: 107524 - DNA, 1224 bp, Homo sapiens
gaagaaaatgaagcagagtaaagaattagagaatgatgaaagcagcacagttttaataattgaatggtcatgggaggcttttctgaggatgtaatatttgagccaaaggcctgaatgaagtgtgggagcaatctaaatggctatctggaggagagtatgccatgtggagagaaaagctgatgagatgggagcttcaagaagcaaagcgaagatacagttgggagggagggagggagagagagaaaacaatgagaaatgagatcagagaggtgatcaggcaccaaagtatggtaagggctctggatttaaagattatagaaagcctttggagggtttgcaagacatggttttgttttaaaaggatcactctactatatagggaaagacaatgagtgtgaaaatgcaaacaggagactttttaggagactattgcattcagttaggttgagagacagtgtgactagcaacaggctggtagcagtggaggaggtgagaaagtgattggacacaggaggtatttgaaagttaataagccaatagaatttgctaaaatacatattgattgtgatgtttcactataagcattatagtaatgaggaaggtgctatctttcttaaaaattaaagaagcagatatatagatatttagatatagatttttttcccctttttccaggtttgattactcaggagttggaagttcagatggtaactcagaggaaagcacactggggaaatggagaaaagatgttctttctataattgatgacttagctgatgggccacaggtgactgttttgttaagtatgatgataattactgtaacctcgtatttaagctgtttgttttgttttgttttgttttttgagatggagtctcgtgctgtcacccagcctggagtgcagtggcgcaatcttggctcactgcaagctctgcctcccgggttcacggcatcctcctgcctcagcctcccaggtagctgggactacaggcacccgccaccacgcccggctaattgttcgtatttttagtagagatggggtttcaccgtgttggccaggatggtctcgatctcctgacctcgtgatccgcccgcctgggcctcccaaagtgctgggattacaggcgtgagccaccacacccggcctaagctgtttctttagatatgaaaatgtttttatttaatttaaatgtttaatccattttgatatttgatttaaaatga

SEQ ID NO: 107525 - DNA, 1093 bp, Homo sapiens
ctagtatgtcataaagtaggaatcatacagtatgtatgcttttcagattccaccagctcttagataaccagactctatctcatttttgctatccctccatccagaaaattcccgacacttagttgatccttctttgaggaatgtttttctgttcttggaagaatggcctggagcagtggctttcaagctcacttgaggagccccagccatctaccaaagcatccagggtggctgtcagggagcaaagccattccaagctgcagggctctgggctgacttccaacttggaacagagcttttctaattatcgcttttacttttgactttgtggaggatatctctgaagaaaggagttattgcttaacaaatattacttagtacttaccacatggcagacatggggatgtttttaaacattgaaaaccaaagctttagagtagtatctgcttgtccatctggctgcctcacaatcatcccaggagactgccccagaatctgaatatttaagattcttgggtaatcctgaagatcagtttagcttgcaaatcaccaggcaacacctataactctcaaacttgcctgaagatatgaatcacccaggaagcttattaaaaatatggactcccagaatttaccaaatcattctctcaggagaatgacctcaaaatgcatattttaaaagagatgcccccctgcaaactcccataaataatccaagaagcttgggaaagcaggctgtgtatggccattttttatacttgcacaattttgaaggctttgtcattaggcagatatgacacttggttgtgatacgactagttttcttttcttgtttataaatttatttcatttatcttattgttatttagagacaggggttccctctgttgcccaggctggagtgcagtggtgcaatcataggtcactgcagcctgaaactcctgggctcaagcagtcttcctgcctcagcctcccaaagtgttgaaattaccgttgtgagccactgtgcccagccttttgttgttttatacttcgtgcacatcacagagcttccttaacctcagcgcttttttatgcacttaaatttttgacc

SEQ ID NO: 107526 - DNA, 1122 bp, Homo sapiens
atcctgagctggacttcctctgaaggccttaattgtttattttattacagttcatactccattctcactttccatctgcctttcccctgtaattctgtattccccagagactgagctgcagcagctgggccaaaaaactgcagacggttcaccaggtctaaagagagccttaatatttgcccttaactttcacagttccccgccaggttagatgctgccttcccttttaaccctatgctttttagcttttgtattccacactggtgccttgcatggacttttggtctgattctaaattgcaggccaccccctcagtagcatcttctcagtttaggacaggtcagtcaactggaagagaagaaaggagaaagaatgggaggaaaggctgagttgtaaggcccagttgctttctccatgggttaatggtcactgggctgcttaggtaacagggctccccatcccactgtgcaggggccacactgcacatccctctcccttgctctcctctctgtcacacacaagccagttgtttattgtctccatttagctgttttcaagcggcacaaaataaaggccctatcacttgtgtcacattgagtgctttctgtgttgatttgctgttcttcatttgccaggcctctggcccaaagagcaaagtgaatactcaatttgatgcacatggatgattttatttatacagcaactatgaacggattagaaacttggtatctctggtatgtaccatatagagaataattaaccaggttactttttgttcctttctgagaagtttgggtatggttgtcttagggccactttgggaggtgtttgatagcactgctcccttgaatctggtcacctgcagccttctatcagaacttccctcctgggtgtccagccgtatccttccagcattccttggctctgacacgtgcttggctttaagctctttgttggcttccagggaaggacatggcagctgtgcagaggaccctgatggctttaggcagcgttgcagtcaccaaggatgatggctgctatcggggagagccatcctggtttcacaggtaaaagcctcttccttgccccctggaccacaaggcgattttaaccagagggagg

SEQ ID NO: 107527 - DNA, 1050 bp, Homo sapiens
tagccacttatcataatagggagaagtgggtcctaagtagcagaaagacacttatcagtttctgaagagctgacctctcctctggttaggcaaagatgaaagtgtcacctcccgctgctaagtgccttctatgccagcagtgcagaaccttgttcacattagatagatgatttggacttacatcctgtcttcacaatgtgctagtctcagcacagggatggaaggttgaaacatctaaagtgttttcgtgtgttgaattcatgtattgattatgtgtttgctcccaataatcactgctaaatgcaatggagaaatatctctcctttgatctagatcactgtacactatctgcttagaaagccagctttcagacacctaccctgcttctcttagcacaggggcctttgctccagggaagaaatagaaatctctccaccgtcttctaaactgcttatgatggaaaacatcagcatgtacccggccattgcgattgtctttggtcatatgctctgggattgaaaggactctgtaccagaacttccataccagtaaaaaacaacaaggagatcaatgcatacttgctcaccaagcttgttgcaagcttgcttatcttacatcccagctttctttgccatcatcactcaaaaccagtgacttatctagtgtatttgactctcagagatgatcattttcccctcaacattttattaagaaaaatttcaaacaagcagttgaaataattttatagtgtaaatgcatatacccacacctagattctaccattaacattttgctgtagttgctttatcatataactgctcacttacagtagatcatttctttctatattttgtgttgtatcacttggtcaagatttatttcaaggcctgaagacattcagactaatcaaaatggtactacagtaatttattataatacataaataatataaaattttgaaaaatgctgacacaattcttaaacaaggataccctttgattttcaaaagtgagggctatttaacaaaatgcaagatgacaataaaacatc

SEQ ID NO: 107528 - DNA, 1037 bp, Homo sapiens
agttttagttttgaattatgtaatctaaaaagttttcagtttttagagttattctcttgattcctcttatggtttaaggtcttaggatggtgcttatcaaactgaagcgtatctctctgaggtataaactttactcagttgggggaaaaataactggtaattatgttaaacattttaataaaatagatgactgtattgtggaatgggatataagtatttcaaaaaatctgagtgcctataaaataaaacttcaaggacattttagaccattccatgggctgcctcagattgtgccttcaaatcctctggaatcatacatttactctcatattctaagttgactgtctctgtcatgaagattatagtcgtaaaaactgaagcagcattatttaagccaaggtatgttaaaaagactgtttctttaaaaattatctttttcttggtttctgtgcctagatactaactttgatatcactcttttctatagtacaggagagagaacagttagccatgaaaagatgtatagataggacaaaaacttcatataaataaatacctttcttcttataagccaaaaaatttatttttacatagaattggataaattttagaatacctattaggacaaagaaacaaatacaaacctctcaactctaaccaattagcttttcttaaaccctctcagttttggcttattctcagctaaataaacagcccagatcacaagattatagatacctctttgcttttttgtccaactgataccatgtgtctttttttttttttttttaatttgcctgatatgactcttgtttcttagagcaaacagctatcattccacattttctcctggaatgatttcctcatctctggttttctgccttccttgtctctcccaattatcagaacactaactaatgccatggtgtctgctgtgactaccatagctttttaagattatgccctcccctggtaaaactgttggcatggcataacaatctgttatcttttgtgtttcggaagtggaggggagatat

SEQ ID NO: 107529 - DNA, 1050 bp, Homo sapiens
tatcttgtgcattttaataactgtaaagtctgataacttgcctaattcagctaagatattgttaacaaattagaatgtaatagtgtttgatttatattttagcttatatttgatttacagatatgtgcactttttccccttataagtgcacaagttaatataattttgaactgattttctaatactaatgaattgattaaccaaaaatactgttttattggaagtgcaactggcaattatttttaaatagcttagatgactcttactgctcccataataacctttgttatttttcagtcacagcacttagcacgttacttttaatgactgatatatgaattcattatcttcattggagtttaaggtttttgtggacaagaactgccttgtcattcttattttcacagtggttaccactgtgctagcacatgggtgttcagtgttcaaattaatgtatatacttaagtgattttaaatataattaatttcaaaggacaatataaggcttcaagattgctcagcactatgtgaagaggaagaagatgaagatgaaggagaagctgcagatatggaaggtattcctgttctagatttgcttcagttccactagaatattgatttagaatatttgtaatttatgtggattaagaattcttcattgagttgtaagtttagcatttagcagcctagtgagtgttttatatatgtttagttcataaatttcattagtgtaaaacttatcttgatcttggactcttctattttactccaaacatagtcttggacaatatcatttttattggaataactattagtcataaatatttaatactggatacggctgcaagatattaattcctaactgaattatttcagagcagaacaaagtttgcttattatgcattttgtattttcttttccctctttgatagcatctttctattaaaacctgaagatagtgagtttcaatggggccttttttttttctttttttgagacggagtctcactctcgccaggctggagtgcagtggtgcgatctctgctcact

SEQ ID NO: 107530 - DNA, 1082 bp, Homo sapiens
aacttagaactgaattataccccacttcagtgtccacacttttggctaaattcctgggccaaaggaaaaattcattttaaatcagcactagagccaggttatttccatgcttatgccttcacgtgcacaagtgctatcatgaccttattttaactctttcctcagaacttcgggtgttgccatgacattgttgaatttgacacttgggactagtcaaaagaagtctagaaggccgtcaaataatattagggcatttcctgactttaccttgtgcccagatctatggtttgaactttagactgaagcttgaaaagacagctgaactccaaatttatggccatatgtttgtgaaaggcaccacataccactccacctctcaccgttttcagatgacccacaaattcttaagaagaggtgccagagcagctcagaaatgttgtagatagttggctctgacccacagagggagcagtgtttaagagtaggagccctgaagtcacttggctttgacccttgctctcccaccaagttttgtgatcataagcaacttgatctgtttaatctttagtttacttaactataaaatgggatatttatatgttctactgtttagagttatgaagactaattgaaaataacatgttggagacttaaattctatactcaataagcactcaataaaaggttttttgttttcaagaattattaatattgtcattttatgattcagagcatcttttatctcttaattctgattttaatccagtgataggaacagggattttgccagccacctacagtgttacataatgtcatgcagcttttttttctgccttttcttgttctcaagatgagcagcagtactttaggattaaaaatgtgagagattatacagtgggctacaactcactgaggagcagcatattttattgttgtttagaggcaaacataatagttgcttaatagttctatattattctaccttttttgtctaatatttaatccaaattctcttgggtctatctgcatctcttagtatgtttcacttagattattgttgtgcttttctccatgccctgaca

SEQ ID NO: 107531 - DNA, 1049 bp, Homo sapiens
tgtacggtaaatggcttttaggtttttcttgcttttttcctcctataatcttttttaaggtataaagtacgtgattagttacacacacacattcggcatattcttatgtgcttgttttcctagccagtctgctgtaatagctttctttcattttctaattccctctactttcttctcaacgacgcagtctctgccaatatctaagataccctttcttcaaaatcacccccactttgtctcaccatatctggccatggtaaacctttccaccaaccctaatgttcactatccctgtgtatgtgcgtgcacgaacgcacacacacccctttcattgagttggaacccttccatgagacttcactaggtcttttcttgctcctcacttcataaaatgattctctggctccatcgctaatgattcttcccattacttaaccctcccatccttactcctgccccgcctcaccaaataaatcagccaaatgatcacttctaagtagagtgatctccttccttttgtgagaggacaatggaggaaatgtattcttgacattcccaatctgtaattctaaaatcattttcctgtagacaaataaactgactgggaacttaaaatcaccatttataaaaatctttcctttgataatatttgttctaagatccaaacaattgacttaactttaaaaattgcctatcttgccgggcacagtggctcatgcctgtaatcccagcactttggggaggccgaggctggccaatcacctgaggttgggagttcgagaccagcctgaccaacatggagaaaccccatttccactaaaaatacaaaattagccaggcgcggtggtgcattcctgtaattccagctaatcgggaggctgaggcaagagaatcgcttgaacccaggaggtggaggttgcggtgagctgagattgcaccattgcactccagcctggacaacaagagtgaaactctgtctcaaaaaaaaaaaaaaaaaagttgcctatcataatcttatcttttctgattaatatctgttctatggacac

SEQ ID NO: 107532 - DNA, 1030 bp, Homo sapiens
tgtccatagaacagatattaatcagaaaagataagattatgataggcaacttttttttttttttttttgagacagagtttcactcttgttgtccaggctggagtgcaatggtgcaatctcagctcaccgcaacctccacctcctgggttcaagcgattctcttgcctcagcctcccgattagctggaattacaggaatgcaccaccgcgcctggctaattttgtatttttagtggaaatggggtttctccatgttggtcaggctggtctcgaactcccaacctcaggtgattggccagcctcggcctccccaaagtgctgggattacaggcatgagccactgtgcccggcaagataggcaatttttaaagttaagtcaattgtttggatcttagaacaaatattatcaaaggaaagatttttataaatggtgattttaagttcccagtcagtttatttgtctacaggaaaatgattttagaattacagattgggaatgtcaagaatacatttcctccattgtcctctcacaaaaggaaggagatcactctacttagaagtgatcatttggctgatttatttggtgaggcggggcaggagtaaggatgggagggttaagtaatgggaagaatcattagcgatggagccagagaatcattttatgaagtgaggagcaagaaaagacctagtgaagtctcatggaagggttccaactcaatgaaaggggtgtgtgtgcgttcgtgcacgcacatacacagggatagtgaacattagggttggtggaaaggtttaccatggccagatatggtgagacaaagtgggggtgattttgaagaaagggtatcttagatattggcagagactgcgtcgttgagaagaaagtagagggaattagaaaatgaaagaaagctattacagcagactggctaggaaaacaagcacataagaatatgccgaatgtgtgtgtgtaactaatcacgtactttataccttaaaaaagattataggaggaaaaaagcaagaaaaaccta

SEQ ID NO: 107533 - DNA, 1303 bp, Homo sapiens
tgtctcaaaaaccaccaccaccaccaaaaaaaactgtagtatatccatacctgagaaacattttggctgatctccatacggacggacagacggacgcacagatggatataggaagacagatagataaataatatgtacaataatggtgatggtaatttttttaaaacctaaaaagtctaacaaggtaattgaatatttattacaaaaagaacaaactaaagagatcaagacttattctggaaaacaaagcaaaatagaagatatagtgaaatttttggaatcatgaaggaaatggatcagataatattgatcatcagattttagaatactacaagacgcggctgggggaagagaagaaagctagaacacattaaaagatgttctgctttcatatatgaaatcataagaatttgtaaatttttttaagttgatgaattcagatgttatatctgaggaaaggaagaaaattatttctcttttcttttcacagtgctgtgaccttttctggaatccacctgttgagatgctttatagccagtgtaacaggaagtcttgactaatggttcccggtttagctgaagattcaaaaaaaaaaaaaaaagctttatgctaactggagttaaatacctagaagaatttcaacattgttttaaatgttgtgcatctgtaacttcaggaggatcacttgagctttaaaacctgtgccttctcgaaacaagaatttgtgcctgaggtgaaaaaagtttgtaagttattgaattatggtgttcattagaacagctactagctgattcccctattttaacaaactgacaagagcacatccataaaatgaaaacctgttacaactatgtacagaagggtttgacgttttattgggcttttgtcttttaaagaatatgtctactatgggtattttttttttaaatgttaaaatgggctaggtaaaagggggctgcttttctgttaagcatcgataggtaagttgatggataaaagttactatgtaagcctatttttttgagtccttatttgaatattgaaaacattcttgataaaatgtgttagtccatgttggaaacaaccgaaagaacagaattcaagttctagttctgatgtttattatatatgttggatcttgggcaacttacttgatttctcggaaattcatttgttactgtaaacgtgaaagctattaagattcaaatgaatggttttacagcaggtaacatgtgagaagacagctacatatttgtaaagccaaaccaacaaagaaatatagcaaaattcacaggtagattta

SEQ ID NO: 107534 - DNA, 1799 bp, Homo sapiens
tgtgtatctgggccagaagccctgtcttcatattgttttataaacccctcttagcctttattcctttttccttgttcatttcctgccacagcatgaagctgattatccagattcggattaatacgtactggcagattttttcatttgtgatgtttcctcatgtccactcattacattatgaacagattagcagttatgagggaaaagctctgacactaaagtatagggtatctcgccattcagctaattgctaggcggctgtacttttgagagtttgaaagcaaaatggggacacattcgtctacacttcaatcagagggcatttgtgctctcaaaaaacagacttggggtgaaatttttcgatgtggttctgggattgtacacaggcataggacttgtagataagttgtgtatttttcttttcagttggtaaattaaaagtgcttgagaatgtttttctcatcttaagcccagatttttcctctctctgtcttttaaagtttgccaaagaaactagagtgcataaaaacgtctatttgcaaccaccttcttcgtggctcaggtatcaaaacttcaaagcatcatctgagacagagaagatcacagaataaatttttacggagacaaaggaaaccacagagaaagttgcagtcgactcttttaagggaaattcagcagttctctcaagggactcggaagagtgctacagataccagtgctaagtggagactctcacactgtactgtgcatagaactgatctctaccctaacagtaagcagctcttgaatagtggagtttcaatgcctgtcatacaaactaaggagaaaatgattcatgaaaatcttagaggcatccatgaaaatgaaactgattcgtggacggtgatgcaaataaataaaaacagtacatcaggaaccattaaggagacagatgacattgatgatatttttgctttaatgggagtttagatgttcgttcatatgtgagacttttaagtgattaacaaggctagttcagtgttctaagtagaactgctaagatctggaagtaccacctggactcacagaggagctgctttagtgcagcattgcacaggagttcatttcagttcagtctacatttaaagtagcattgtgtcatttcatcaacaagtatttcttttttggcttcaactacatgtcaggtgttaatatgaaaaatctgccacagcctacccttgagaagcagatgtaattccttgagtgaggctagtaagtctctgaaaaactgaataattttatgacttactaggcaatttaataatcgtttgcaaaaaccattgtgtcttgaggtaaatgaggagcgggggtgggagatagcaaggaaacacctgaaaggtcaatttggtcttattggctccattatacataggtccgcctctgaatactaaagtttgtagctcctgacatttatgttttcttgtttatatgttggaattgatcaacaaggtttgccactgcttgtattaccagggactggttacaaccattatttctcttcatttgcttggcttatctcatattaaagtgagtttggagttctccaaaacgttttaattttatttatttgggtaccagtgattgattccaaataaacctttttacaaaaaggcaataaggtggtttatggttacatatgaaatataataggataacaggtagatgagaaagtaaaatgaaaaaatgaggttaggagatacaaagtagacccaggaatgaggctagaacatttataatttggtgttgatgctgtcatctga

SEQ ID NO: 107535 - DNA, 1143 bp, Homo sapiens
taattcagctgcagatgggacctgtcctggtacagagggggaacaaaacaacttgtatttggagcagtggagaaaaattcagtttttaaagacataaggaaagcttagtgagcaaaaaaatttccttacagactgattttttttttttaatttttaggttttgtgggtacgtagcaggtatatatatttatggggtacgtattttgttataagcatatagtgcataataaccacagggtaaatggggtatccatcacttcaagcatttagggactgataattctaatttttaaattttgattgtgagctagctttccttgttgtcatataattacaagtcagtaacatgtccaatatatttttctcatctttccacgtttcaggagaccagttttgattttaaatgttctcaatccagactaaagacaaccaagtattcttctcagaaagtgataggaactcctcatgccaaaagttttgtgcaaagattccgagaggctgagtccttcacacaactttctgaagaaatccagatggcagttgtatggtgcaggagcaaaaaactcaaggctcaggccatttttctgggtaacaaacttcttaaaagcaaccggcttaaacatctggaagctcaaggtactaggtaggtatattgcaaaaattatgttactttactttttctgttgttgttatgagtaaaagtattcaggtcacttttctttaaaatgtgatgtccagcagccgcagcggggctaaattgggatgtactcaaactgcaattgcatttgctgcttttattgtaagagcaaagctgtatcattggaggaagaagataaacaagttaattggacttcagtccccgttatgctcttcatcatttccatcagctcattcaggaaccattaagagtgtctagtgtgctgagcctgaggatacaactgcataaagacgtgacttggtcttcagggagctcagggtcttctgggaaaggcagcccttctgcagacagcttcagtgcagtgcagtgggataagggcatgagagcagaagcagaaggtgcctgccttccatgaggcccacacaagactgctggggtgttgtactgttgctacttgctactgtttgtagcagctggactctatc

SEQ ID NO: 107536 - DNA, 1050 bp, Homo sapiens
ggctcagcacactagacactcttaatggttcctgaatgagctgatggaaatgatgaagagcataacggggactgaagtccaattaacttgtttatcttcttcctccaatgatacagctttgctcttacaataaaagcagcaaatgcaattgcagtttgagtacatcccaatttagccccgctgcggctgctggacatcacattttaaagaaaagtgacctgaatacttttactcataacaacaacagaaaaagtaaagtaacataatttttgcaatatacctacctagtaccttgagcttccagatgtttaagccggttgcttttaagaagtttgttacccagaaaaatggcctgagccttgagttttttgctcctgcaccatacaactgccatctggatttcttcagaaagttgtgtgaaggactcagcctctcggaatctttgcacaaaacttttggcatgaggagttcctatcactttctgagaagaatacttggttgtctttagtctggattgagaacatttaaaatcaaaactggtctcctgaaacgtggaaagatgagaaaaatatattggacatgttactgacttgtaattatatgacaacaaggaaagctagctcacaatcaaaatttaaaaattagaattatcagtccctaaatgcttgaagtgatggataccccatttaccctgtggttattatgcactatatgcttataacaaaatacgtaccccataaatatatatacctgctacgtacccacaaaacctaaaaattaaaaaaaaaaaatcagtctgtaaggaaatttttttgctcactaagctttccttatgtctttaaaaactgaatttttctccactgctccaaatacaagttgttttgttccccctctgtaccaggacaggtcccatctgcagctgaattagattgacataggaaagttaacataaatatcctaacacacatatctcacatacacaataaaaaaaccccacatgattaaatactggtcaaagcctaattgcagagggttgggggatcactgaaa

SEQ ID NO: 107537 - DNA, 1855 bp, Homo sapiens
atttttaattttttttaaaaaaagtaagagccatgcatggtacaaaatgctgtaggaattctgtagtcctcaggaataacacacaaagggcagcatgggactgcatctagacagatacaaaaatttggatgggcattgatactggcaacaagagtatcttgccagagctgcaaatatacttctagaaattgaaccaaggttatggattctgttttaacagcggttttcaagaataatggagggaacaatccttaaattctttagggtcagctcctatctttttcagttttcaagtctggacaccatcctttgagggaggtattgacaaacccagatggtaaagcacttggaaaacatagtaagtgaactgcggttcaaaagagaaaaaaaacccaagagagagaagggagaaagagagaagatgcagaggaacataagaacaagcttcatctaatcaaagaatatatttgttcagtgattaaagccaatcgttttcctcatctctgtggtactttatagactgttgaaatttagtagttaataattttctatcttgttttaatagtttcactattaaaaatcatgttgtcggccaggcgcggtggctcatgcctgtaatcccagcactttgggaggccgaggtgggcggatcacaaggtccagatcgagaccatcctggcaaacacggtgaaaccccgtctctactaaaaatacaaaaaattagcctggcgtggtggcgggtgcctgtagtcccagctgcttggaaggctgaggcaggagaatggtgtgaacccaggaggtggagcttgcagtgagccgagatcacgccactgcactgcagcctgggcgacagagtgagactccatctgaaaaaaaaaaaaaaaatcttgtcttagcaaaattataatcttgagaataacctatactcgttttggtcccttttatgacatcaagctcattgtggcatatactaatttcttaggagtcacctgattttaaaaatgtgtttggctggataaattccaaatttgtaactagaagcaattgcttgcgctttggatttctctaccctgaaaaaaaataaggtattctgtgatatttagcatatttccatactttgaaaatctagaagtctttgctttcctggtcataatcagtgaccctgtctgcattacatacacatgaatttgaactgctcttcttctttcaggttgagcaatgtttaaagcgtttgaaaaacatgaatttggagggctcaattcaagacctgtttgagttgttttcttccaagtaagtaagtggtccagttgctttgtgatgtggtgggctgggaactcaatgtcttgtgatctccctttggatttctctatgcttgctgttggaatataaccaattatacctcagctgtataaattttgttttaatgtggggtacctggtgtttgtggtaatcttctgacattgatctatgggagtgactggtgtgacattgaaatctgggtcatggtagattatattaaaacatcagtgggctgttattgtgcttaactacctcaagttgagcttaaagcaagtcttcacttgaaaactgctatagaaatgctttatatttaaaaatgaaagtaatgggagcttgcacatagctgaaaatgtgaagggtcgcccagggaggacatggaagctctgtgcttcttctgccataccttgccctatgcatctctttgtttcaatcctttgtcatatcctttataataaactggtaaatgtaaaaaaaaaaaaaacaaaaaaaaaaccctttttttttaagtgaaagtaatgtactttttctatttttttcaagtgaaaatcagccctta

SEQ ID NO: 107538 - DNA, 1033 bp, Homo sapiens
agactgtgaatttattcattctgtcttgctttcgggcatagcgacatggggagttagagagttattacacatgttgtgacatgtgccctaccttcaaggtgggggttaagtgtacacatgaggcgtaagtgtacaccaaatgactgacagcaaagtattcatatgaaagattattaaaccatgataaaatgcaatgcaaagatacagcttcttgttttacagatgttctcttaatgatttcctggactttatatcatctgttaccattttccaacttctcttatacttagaatccttacgttcttacagttgagactgattacattagtttttgattcctttaaaacaaataaggaaagatgctttttttagtgtgtttttaatataatatacttactgtagaaatacatactaaatcttattagatgtctctgcttcagacctttgcattgcagctgtaattaaagaatgccatctcgtcatactgtcgctgaagagccaaaccttagatgcagaaacagatgtgttatgtgcagtcctttacagcaatcacaacagaatgggccgccacaaaccccatttggccctcaaacaggtgaggaagcccggtaggtgagacccaacctgttcacttgaaaatgtagatcacactgccacttactatattgctatttatggaaatctcgtggaaatctcagtaaattacttgtgttttataggcctatagcccacagttacatgtgcactttctttttttttcctaaaagcatttcagcatttcaaaaagtaatttttgttagaaaagaagtatgtttagattctttcccagtcttgtttctaataggcaagtaaacattttcttcattatatacaatctataacaacagtgcctttgcccagctcaaagataaagtgatttgagcaagacaaaatgttggacattaagaaacagttccctgggcataatcagaatgctaaaattatttttaaaaaaacttgtctacttattatggggtacataatctaattggtg

SEQ ID NO: 107539 - DNA, 1019 bp, Homo sapiens
cttagggattctcacacggttccacggctccaggcccggcggcaccgcagccatcatgcgaggcggggggacttacgaaaggcggagctacgcgagagcacgtccagcgaccggaggtggggcgatgggacccagtccgggccggaagggagcagggggtggggctcgggcggggccaggagcccggcgggaggctgccttcatcgagtaaacgcgtgggactgggaaggacccagtcatctgtatattggttaccaacacgtggccgcgtagaatcatgggggaaaaaaggccccatcccaatactaaccaacagaatctctgagaatgcgatgaggaatctgcgttttgtttaaacttagcgcaggggattcggaagcacaaccaagtttggaactgttaaatacttctaggcattttacaaatatggaaaatgaggcccagaattgagttggtgcttttacccccaactctgcctcagacattaggggaaaaaggaagaaatgaaatgaagaggtttgtgcaaggtgtggaatttgtagcgaagaagcagtgatttgctttgagtggtaaaggaaggctcctttatgtcttgaaccacagcaaaaccgagatcacatcaaagaaacttggaagacacctgtcagtcattcccacttttgtcagtctccaagacaagatcatattccaagctctagtgatccttacctcattaatatctttctaataattcatttatcctcagccatgctaatgcccccttaagttcttaacactcccacagtaacgtattagaaaaacagtgagttttggaaacagactgccaaggttctagttctagctttgctgtttactagctcggtgatctcaggaaatttacttacctcctcctccagaccttagtatccctgtgggtaaaatgaagatgataataatagtatcaatctcacagacttgtaaaatgccaaggcactcctggcatacaaacaatgaacatttaccatagttaatattgttga

SEQ ID NO: 107540 - DNA, 1042 bp, Homo sapiens
gttcctggttccttttgtatcgatgaagtaatattttcataggctgcgatatatttaattcctacagacactgtgatcaattagcctccactaaagttccttgctagtcaaaacaatctggttaccattttgttcctattgtccattatagtaaatgcatcaactgtctcttgtaattaatcattgctcattggtctttaccattctgggatcccattgaaatcaaggggccaatttcaatgatggtatcttctatcatcactctgacctacagaagacagccattgcagaactttgtaaagaaactgatagcacctcattaatgtatttctcaaggccttagtggagggtgtgacctctgagctctctcagaagacacagtcggggtggggtggatgtgcagaccacagattatatatccattccaacattccaattttcctaagtctttggatccctccttttacattaatccagggaaattctggcatcttaacctcgttgaatgtaggttatagctggattcaattttcaatcatcaaagaaaactgttagatacacttctcgctgcaagactctctagaaactgatatgatgactcatattgatacatttggtttagtccagtgcttgatattccatcctctatggtctaataacgttaaaatccaacactacttcagtttctgtcactaaaaattagcaacattttgcaactattttgaaatctaaactatttctttccatattagactttgtacttgtccccctggagctaactgagatctgattttagttatagctctagaagtgatgagaagtggtttggtgggtcttgaggttatcatagggtcttcatacaagtctcctcagacacaggaaggcagactgctccaagattctcagcttttcctgagttcaactaattccgaggctcagagtccttcttgctgccaatcaatgctctaactttcacagatgagatttgtgagtctatgaattcagtttaggttgtaattctgcaacccacagaactgaattt

SEQ ID NO: 107541 - DNA, 1021 bp, Homo sapiens
tcagtaagatccctttgctgtggctgccagcaagtctgtgcctgatttgacgagattctgaaaaggtaccagtgcctcctccctccaaggcctctcgtggaacataacaccctagaactatgccaagagacagagccaagccacatttcagtgtctgctgctgcaccaagctctgagcagaggccatcttttctgctcaagaagttgttactgaattctttcaagtgcttgctttggggacaaaaatgatcaagaaagatagtctctgtacaaccaacatttccaggaaacccattatttgtgcattatctgtatactcacaaacacacataagcacatgcacacatgccaagacacaaaaagttttcagttaagagagtcatgttcctaaaagctttatcttttacaccagtatttattgctgtctatcttcataaggtctactgtgggagatgctggcatagaaagaactttgcctcaggaatatacgagaaaacataatcagggcagaaagcagaggtattcaaataacaaggtcctaaagtgtgttgcagctgatacatgaactcacatctaactcaggtcaactctgggataaaaatgagcatcgaacagtctcctcccacaagtatgtaggcaccatgagaacagcaatgtttagtttcttgttccatcctaagtgcccggaacatttctgatgctcaattaatgtttgccaaataacaaaaacacttagggaatgtaccatatcagagacaaacataccgtctctcagtaagtccctccagcattaacacagattgtgatttctttaggttgacactagctgaagtagttggcttggatttaggggccatgttgtatgcatcgttaacaacaatcatatctaaaggagcaagaagctcacccaggagaagtgtgtgggcacagatactggtggaatgaatggaagactcccatctaacgctctctcaggagggttgctggatttagcaaataaaaatacaaggtattcagttac

SEQ ID NO: 107542 - DNA, 1039 bp, Homo sapiens
tcaccccaaatcccttccatgtaagcctgactgattttatatgaggcctgtttataatgtgttcttaagaaatagttgatgactattgatgaaaatggactgctgaacataaaggtaatggttttgtaaagtacaatcattgttcttaatccgttgttcatttcagcagggagccaggaaactggacatttcgggaggcctatggtcttagaaaaatcgcttttctactgttttcttatttataaaatgtattgataaggacttactatggtttatatcaatgcaccttgtaaaaagcaaatacttcagaactgtttattttgttcaaaagatgagataattctctttttcctcagtttcagaacaagcttcctggaacccatgacccatgaagtcttgtcgacatttataccgtctgagggtagcagctcgaaagtagaagaagtgggtgaggttttctcttcagtctgatagctctggcctattaggtcagccatttgttcatgttttgtgttaccacttagagatagtttttctcatcctcaagtattgggagtccaactttgagtggaatctggactaaacttcaggttagttctagctcggttcatatgctcttttagtcaaagcctgtgatggctatgtgaacccccttgctctgtggcaagctctgtcagacatgttagatacaaaccgtttactatgggatttggagtccaagcttgctgtgaaaaagtcccgcgtaggtttgggtgaggaaagccatgtgtttatgtctctgtcagtggtatcacagcaaatgccttgtggtctgatgtactgggcaatgtttatctcacaaaaatcagcgggattgtgattcttcccatcttctgaaataaagttaggaaataatttctcttttcctaatagtgaatttggccttctcttcaaagaaggcctttgatgtttgggacaggattattgggcagtaagaggaaatcagagcagaaagacacagttaacctaattcagttgccagagaaaatgttgaggaaag

SEQ ID NO: 107543 - DNA, 1061 bp, Homo sapiens
tctcacctcagaagcccaaggccattggcttctgtgcttacccaagttgagttaggagatgagaaattgtagggaactggccagaggttagagtctggggacaagggattcatctgcttctgtggttctgtttttatttctcagggcaggagcctggattagaggcattttggtcgtgttgtcagagaccctcctggatccctccagacaagctgcctttcccagccttgtgggatcgggcaatgtagggtctcaggtccaggaggaattgagagaggaaaaggactcgtggccaaataattctggttaacattcttttttgagagaggaaggaacagaaggcatctgtgaagtttccggagttcccatctgagacaacagaagtcaggaatgaatcttattagaagaagggtggagtgctgggaaagatggctgtgttgcaggaaggagccatatttctggagccacttccaagtttgagattgtgcagcatcctggttgaggggaggctttggaaccagacaagcctgggtttcagttctggctttgccagtcgataggtatgtgaccctaggcaaattacgtagacactgagaaccagtttcttagggttattgcaaagaagaggcaagataattcacataaagcacacgaaatgcgttgggagcagtctgtagaaggtagctgttattattagggaaggaaagaggaacagagtgaaaggagggttgctggtaggattgggcagctagaaggatgagcaggtgggagagcccactgatagagtcctcactggctcagggtttacggagagaaagaaatgtgaggatggagagatagaggaacacatggaggggcaaggccctgcctcaggtgcaccgttcgatgccagtccttggtcctggtcactgggtagataaaccccccatgccttcccctctgcttcttccccaactcagtgtatcccattctaccaggtgtgccaaaaatcttggagtcatccttgactatgttctttctctcatcctccactttaaattggccagtaatattggccttac

SEQ ID NO: 107544 - DNA, 1048 bp, Homo sapiens
cttctcagaaaagaaacatttcaaatgttaagggcaggtttttttctccctaaattgtggtgggggacattgcttttttgatcattggacttactttatgtcagtcattggtctccagacttttctgatgactgtataagtaaaaaaaatgaaaatggagcccctccccatacaataaatgtatatgtatttataaattgtatttatgaactattatgtatcttgtacaataggaaacatccacaaaaacagaaattaaatagaatgagataaaaataaatagaaatagaaactctgacattttcaatttataccccaatagatgattttgttgatcatctggggtgcatgcatcccatgttggagaccaccaatttctgccttaatctgctcactttccctcttaggtactcttgtctagagcaacatcacttaacttcattcatgttcagaaatatttttgatgtattatttctcctcttgcaaacaggaaatgatttggaaaactttcaggttttctaggacatggagaatgtgctttagaaatactatagttagcagtttcattgctttaaagcactgaaactttctttaatttgttgaagtcatgaccaaaaaagactcccaccattctgtcaaagacattccatgctgatgggctgcttttcatgcagaaaataaaagggagatgaggacatgtcttctgggctcttattcacaaaactttataactctggagtcatagaaatgactgaagagtgatgtggatcataacttggcagaaagaaaataatatgcattcctgagttgcaaactgggatcatgcacttaatcacagcccaacaaagcagattctgctcatgctttacttcctcccaagatgccttcattcaccatctttagatgtatgtttattgagtcttgtcaccatttcacaacacggggctttctacaggtgaaaattgtggcaactaatctgaatgcagcagaggaggccctggaggcttatcagcgagagaagcagcagcggctgaatgaactgctagtt

SEQ ID NO: 107545 - DNA, 1057 bp, Homo sapiens
cgcccggccaaatgactccattttgattctgacagctttcacagtacatacccctaaaggcagtcattttctgcctgtaatgtcctttgctcagttcctattacatatgtaatcatttaaaaattttacttcctcagagaggcctttcctggttatctgctgtttaaattgggtacttatacccacttcctcattccccaagattcccagatgtgagttaatatatgcgttaaaatgtgaacttgacagatggtttttcacaagggtactaacaaatgctttaaggaatgtaaaaagtctctgtacttgattacgaggggcggcattgctggtgtgttctctgctgaaaatagtttaagcattcagaagccaaacccttctactgaaatacttttctaactaccatggtgggctaatgaaatgagtatagtgccaatctatgggaaaataatacatatttgttatttttaaattcttatctatagtattgagaaggactgttcaaactcgtcctgctccacgacttcctccaactgtggaaataattgagaaggaacaaaattgggaagagaagaccttacctattgatacagacattcagaattcaagtgaagagaatcgtctcttcactcagagatggagagtctctcacatgggagaagatttggagaacaaaactcaggctccttttgttaacctctcacagcccctctgcaattcccattccaacactcaacagtcaagaagccccacattctcagaagagctcccagtactgggagatgggcagcagctgagaacaaatgagtcattaatacaaagaaaggacataatgacacgaattgctgatttgacattgcagaattcagctatcaaggcacatatgaataatattattgagcccagaggagagcaaggggatggactccgggagttgaacaaacaagaaagtgcaagtgacatgacttctgtgagtaccatttaaggattgattagggacatataggaatttaaataggaactttagcttgggcaacttaagaaacttcttttcaga

SEQ ID NO: 107546 - DNA, 1027 bp, Homo sapiens
tgggtgacagagtgagactctgtgtgaaaaaaaggaaaaatggaaaagacaaactctggaatgccacataggattttttaggagtccctaactggctcgcttttcatggctttgaggccttagtgattttctcaaaaatagtaacttctcagtactagccccccaggagcctgcccatgaatgattggcagaggaggatacagcctagaaagtgaaggctccaggagctatgttgattcatgtggattttgcactctactgagatgcatttaagaataaatacctgaaatgtgctcatagtttctttttgttcctattgtactaatatcctctcatcttcttcagagcgtccagttgtaaatgccaatgtctcagtgccattgatgttcagagaggaagtggctgaattcccacaggaagagttgcccgttaaactgtctcaggtgccagaccctccagataacatgaatctggccaagaattttccagcacatatttttgagccagctgtgttgttaacaccacccaggcagaagagcaacttaaaattctctcctcttcaggacggtaagtcttcttctaaagttacatgaaagttgttttttaatgtttcatttgtgcaatgtattactttcaccattacatgaaaaacagaattgaaaaagacactgattaccacacatagcctttaagctgaaggaagaattttcatgctatgtgtatcatacctgtggtcatgtgtgacatttaattaattttattgtatatctattttattaaacattgtaagtattaaactcagatcaaaagatcagagtccttagcattaagatgcagagtaaggggaatcccttttgtccctatggtccaggagcatttcaaagagttagaagcaggagattatactccaaagagtaatgaaagttagactaaggaaaggtgaaaactgtgactttaagggtcttgtaagtgacatctggtcattatattcacctctttctcatcaaaagttttcagctcagttagt

SEQ ID NO: 107547 - DNA, 1122 bp, Homo sapiens
gtaggatgcagttacaaatgagatgggccatgcctgtctgaggaagtgacatttgagccaagacctggaagaggcgaggagtgagcatgtgggtagctgagagaagagcagtctgggcagaggaaaagcaagtgcgaaggtcttgcggtgggagtgtgactggtgagcttagagtcatcaaggagatcagtgtggcaagagtagagtatgaggaagaggaagagagagaggcaggagacaagatcaggtaagcccaattacatagcgccttgcatgatggttaaagatatgggcttttatgctgagtgagatgggaaaccactaaagagaagagacgtgatttgtcttgggtttaagaggatcactctgggctgtgttgaaactagatcagagattggtgccctttcttgggtcgcgtgcccttagtgtcttataacaaaacagttctactaggccaaaaacagttctacttactaagttgttgagtccaaacaactatgtcctaacaactgaggggctgtttgagaaaaagtaatactttctcttaaataactacaattatttactaatgggttatatgtaccttttgagcactgtaccacttctcaaagcttggaatcatgtgggacacaatcattcttatttcctgttccacactgattttcctccagaacttgtttttttaacctagcaactgctgaaaacccagccatgagaagatttgacatcctcaaaaggaatgtaatggaatctgacattgaaattgtgaactgtcctgagctaatagttcaccagtgtctgatagatggcaggcatcactatttcccttgaagatttaaattttccccggtgcccctgtaagttcactttagtgccctgaggtgcctcagcaaacagtttgggaacagtatgggactagagtaggtggccaaaaagcagaatattacatgaggagttattggaatagttcaggtgagacatggcagcttggtctagggtggaagtgggagagggtgtgaaaagtgatcaagttatgaatatattttgaaggctgaccaatgcagtctgctaatttattggatgtggagtgaagtagaggatattggaaaagagtcaagggta

SEQ ID NO: 107548 - DNA, 1034 bp, Homo sapiens
tgccttggcctcccaatgtgctgggattacaggtgtgagccaccacgcccgaccagaagcgtgtacttttaagctaatcacttgttttacaaagttaaaccatttaaagttgtagtcatttactttaaattatattttaacaagcttaatttttgaattggcaatatagtcacatattatgaaattcaaagataacagcagattgtactaactctcatgactaacttccagctagcctgtttgcttatttatagccaactatcattccagataccagtgtatctttctagagatggtcagtgtatattcaaataatatgtatatgtatatccctctactttctttttacaaaaaatgtagttacttaattttatatagcatttagttcattttattctatttaaagaagggaagaggataaagaagcacattttctttaattaaatataataaaccttttaataaaactcttcatcattactgtcacataatatatgcttctttgtaaatatcttctttgccagctttgagtgcaaacttttagttttcaacatgtgatgctattggtggaagtttatttgatatttttttgtagagtgagatccagctacgtaaagaagtagagacaaggcaacaactggaacaagtattaggtgatcatcgagagctcattgatgctctgacagctgaaattcttcgtcttagagaagaaaacgctgctacacaggtactcagatgagatcccaatttttatgtgttcagtggtataaaacatctttaaacatgtactggattctcttagagttgcttttggtttaactgtatcgatgtgattacttatcagtcatttttatcatcagtggcaggtattattgaacatttattacatggaagtactatagtagaagcttggaagtagtatatggactgtcttcctgtcttcaagagacttactatttagtgggaagacagagtctacatttaaattataactacaagtgttacagtagttaatccaaaatgtgaaatgagtg

SEQ ID NO: 107549 - DNA, 1050 bp, Homo sapiens
cactaaggtgataggcatttttgctatctacctgtcttatcagttatagtgaatagtgttttttctttgactatgaattactaaaagctccttcaaatcaaacatgtaactatttgaacagtttaaatgatagcacctattttttatataaattaatataatatacatataaattagatataaatataatttaatttatataattaaattataaattaaattacatgtaatatagaatatattttataattatgtgtaattattatataattatatataattaattatataatttaattataaattataattaaatttatatgcatatttatatataaaattaaatttataattatataaatataaattataataatatagataatgtaaatataaattaaatgcctgctatcatttaatttatatttatattatattaatttatattataattctcatgtagcttattgtcctgtaatttataggtttctccaacaactaacagaagagaattttgagttaattagtaagttgtggactgacattcagcagaaaatagcaacccagtcacaaataactcctccaggaacgccatcatctgctctttcatcaggggagcaaagaggtttgtttcccttttgcattatttctaggtgcctgctttattaggttcattcttgaatgcagtaatttttgaaggaatgttatttgagttttgactgcctttgcctaattgactaaaatactgatggatctgtcaattgaaatactttcttaagaagtttgttcacttgagatacttttggaaatgttcttccttttagctgctctgaatgctaccaatgctgtcaagagactccaaaccaggcttcagcctgaagaatctactgagactctagactcaagctacgttgtgggacacgtgctgaactcaaggaagcaaaaacagctgttaaataaaggttcagtcccttaatttacaaagatgaatattaaacatgtaacttgatacagctgtcttaatctcttagtcaatgtttttctccctta

SEQ ID NO: 107550 - DNA, 1109 bp, Homo sapiens
ttggtagtagtgtgatgatcatgaaatgagtgtgtctttgccaaagatgactcggtggattttgtaccttttacattgtgctcagttagtgtgtgtatatgtgtgtatgtgtatgttaaaaaaaaatgctggttttgacccatgaattgattttatcatccattaagtgagtcccaacctgtggtttgaaaaacactagtttgctggatagtcttgcagaaaagtagtagaaattattatttctttctgtacatcttttaggtaggtttaccagttctatatactgctttctttaagatcatttttgaaaatttaggggactgaaaattttggctatgaatatatataaacatgcacatattggaccagaaaaagtttaaaaagtgatgaactagagtaggtgatctcatcatctgaataggcaacttctttgtgtctgaaacattcctttatgtacttttctcttctgtataggtacgccgtcatgaaatacacaaatcgaagaatagagcattagtacactgggaactccaagaaaaagctttgaagagaaaatggaggaagcagaaaccagaaactttaaatcttgagaaaagaagattgtctatcatgaaggaggtaatgctaaactgcattagagttagaaagaaaaaaaggagataaatagggttctttgtttttcttcaatttgattcacgttggagagactctagtaatcactgcattcttattcaataatctacatgtggacttcaaaaaaagcaacagagtggtgactggagtctggtttggtggtttgaattcctgttctactacttaccagctgtgtgaccctaagtaaattatttaacttttcagcctgaattttctcatatttaaaattattatttgcttgtattgctatgagatttcagtgatataatacttacaaagtgaatagcacaatctttgcttattcctctttttgtatataagctgctataataatttttctcagtaaagtgattagcacaatcttttcttattcctctttttatatataagctgctataattatttttctcagtttaacagcagtgctgttaggttactttgaaaaaaaaatgatg

SEQ ID NO: 107551 - DNA, 2841 bp, Homo sapiens
tggtaacagagcaagactccgtctcaaaaaaaaaaaaaaaaaaaaaagaaagcttttcagtgcaaaggtggggtcagagtttttgtaattaataaaacttggaggtagaactaaggattagtaaatacaggtgctaaagtgtaccttttcatgaagctggatggcaagagaagggcaaagatgggatagcagcttaactatacctgtgttatcctactgtacacaggtagtaaattaccacagatttagtggcctaaaacaattactatttatcatttcacaatttctgtgggttgtgagtttggacatggcttagttagattctttgcttagggtcttccaaagctgtaatcaagtcgttggccagtatgcattctcatctggagttttagcttctgaataagtaaaatattctaaatgtaacttgaaatacttttccccccatttttaagagtaacataggtccattatagaaaatttgggaaatataaaagcaaacagaggtaacccaattctggcaaagttttccagcatgtgctttacagtcagtcagacctggtcttgagtgtcagctcttggctctgcctgttattatttgtataactttgagctatatactttctctaagcctcatttttcattttttttgaattttaatattcttaatatttttaaattttgtttcaagttctagggtacacgtgcggtatgtgcaggtttgtttcataggtaaacgtgtgccatagtggtttgctgcatctatcaacccatcacctaggtattaaatctagcgtgcattagctatttttcctgatgctctgtctccctgcatccccctgccatctgacaggccccagtgtgtgttgctcccctccctgtgtccatgtgttctcattgttcagcacccacttataagtgagtacatgtggtgtttgattttctgttcctgcattcgtttgccaagtgtaatggcttccagttccatccatgcccctgcaaaggacatgatctcattcctttttatggctttatagtattccatggtttatatgtaccacatttctttattcagtctatcaatgatgggcatttgggttgattccatctctttgctattgtgaatagtgctgcagtgaacatatatgtgtgtgtatctttataattgaatgatttattttcctttgggtatatatgcagaaatgtgattgctgggtcaaatggtatttctggttctaggtctttgaggaatcgccacactgtcttccacaatggttgaactaatttgcatttccaccaacagtgtaaaattgttcctatttctccacagtcttgccagcatgtgttgtttcttgactttttaataatcgccattctgactggcatgagatggtatctcactgtagttttgatttgcatttctctaacgatcagtgatgttgactttttttcatacgtttgttggctgcataaatgtcttcttttgagaagtttgtgttcatgtcctttgcccacttattaatggggttgtttgtttttttgtcaatttaagttccttgtagactctggatattagccctttgtcagatggagagattgcaaaatttttctctcattttgtaggttgtctgtttgctctgatgataatttcttttgctgtgcagaagctctttagtttaattggattccatttgttaagttttgctttcgttacaattgcttttgacattttcatcatgaaatctttgcctgtgtgtatgtgctgaatggtattgcttagattttcttctagggtttttatagttttgggttttacatttaagcctttaattatcctgagttgatttttgtctatggtgtaaggaaggggtcccgtttcaattttctgcatatggctcaccagttctcccaacactattaagtagggaatcctttccccattgcttgtttttgtcaggtttgttgatgatcagatggttgtagatgtgcagtcttatttttgagttctccattctgttccgttggtctatatgtctgcttttgtagcagtaccatgctgttttggttactgtagccttgtagtatagtttgaagtagggtagcatgatgcctccaactttgttctttttgtttaggattgtcttggccatatgggctcttttttggttccatatgaattttaaaatagttttttctaattctgtgaagatgttaatggtagtttaataggcatagtattgaatctataaattacttaaaaatgccagtatggctattttcactgtattgattcttccagtctcatttttcttatttgggaaaagggttaattgttgtcactgacatcattatcctcaacatttaaatacaattttgtatgctaggcaggtgtattagttcattctcatgctgctataaagaaatactcgagactgggtaatttataaagaaaagaggtttaattgactcacagttttgcaggcctcaggaaacttacaattatggcagaaggccaaacagaagcaggtacctttttcacaaggtggcaggagagaaagtgagtgcaaacaggggaaatgccagacacttataaacccatcagatctcatgagaattcactatcatgaaaacagcaagagggaaactgctccccatgatccaatcacttcccactgggtccctctcatgacacatggggattatagggattacaattcgagatgagatttgggtggggactcagccaaaccatatcagcaggggttctaagcacttatatatttaattagttctgttttatagttagtgaaaaagctgggatgtgaacccagacagtgattccag

SEQ ID NO: 107552 - DNA, 1351 bp, Homo sapiens
gggatgattactcctttgccttgaaacatttattgggcccaccatgtatggatcagcatgtggtggtaagtcatactcccaaatcagtgattcccaagtcttggctttgggaaccagtatgcctcgtattctcttaaagagcaacaagaatttcttgaaacaaaattagttcagaattgatttaaattttttaacttctggaaatacacgaagttatgtctgagtcatgagtgacagtcattgattaaatcatttctctgtctcttttttagcattattgatcacagagtccgttataaaaagtggttgattcctttcaacatttaacaataacttctaatgaagggtaaaattccagattctcttcatgcgtaaacatttaatgtgtcaatcatagatgaaaggaatctagtttgatgttgtttctttctttcttttttttggaaaacacaagttgctctgggatggcttatatgttgttttataccggttcaggaaatttatttttgtttttattgtaagaccttttgcggtaccagagatggcaccttttttctaggtaaggtgtaggaattcctcaatggtcttgcttcgtaaaatttaacatatcagaactggggaaagagaaaggagggggttatttttttgcagcattttccagtcacatatcagggttatactgaactgcaacaaagatcaacttttaaaaattagccttcttaaaatacaaaatgatttaagtattttaaagataatttatttgccttgctcttgccttctaacattagccatttcatggagaggctaaaacttatactccaaaaaatgtggaagcacattttaatgggagtaaaattaaaaaattttgagaaagggtaaaatcttatgaatatgcatcttcttagctttatcttccctttgataggtaggcacttatgctcttccatctgctccatgtcaaatagggctcagggaagccagtcatttccttagcgagatgattactcctttgccttgaaacatttattgggcccaccatgtatggatcagtgtgtggtagtgagtcatactcccaaatcagtgattcccaagtcttggctttgggaaccagtatgccttgtattctcttaaaaagcaacaataatttcttgaaacaaaattagttcagaattgatttaaaatatttcagtgtgccatatagctctgtcccttggtttggttggccttgttttttcctgtgaagaatgaaagggcaaaggtgataccaaaatgaaacagctttggagtgatatctttaggagcctggaagccatttttgtaattttgttgtctatataaatgctacctttgc

SEQ ID NO: 107553 - DNA, 1036 bp, Homo sapiens
cacatattttaaagtatgaattggtcctttaaaaacaggcctgccatctgaaaatgggaaattgagacctgagacctgctaaagcatagaagaacttgatataggtagggttttttttttttttttttttttaatagatggagtctggctctgttgcccaggctggagtgcagtggcgtgatctcagctcactgcaagctccacctcccgggttcaagtgattctcctgcctcagcctcctgtgtagctgggactacaggcacgtgccaccacacctggctaatttttggtacttttagtagagacggggtttcaccgtgttagccaggatggtcttgatctcctgacctcgtgatccacctgcctcggcctcccaaagtgccaggattacaggcatgagccaccgtgcttggcctaggtacaggtttttaaaagccccacagaagtttataatacgtttaaaaacccatattaaaatttgaaaacttaaaaaaaaaactaagaaaacaatggcatatattccttttcttaaacctgtgaagtccattactttttgttcttgttatattctgccaaaaatgggatggggtgggagagatgcatagaaattgttttatctgccttgttaacaaagtgaactcaaggaccagcttttcttttctttcttcttttcttttttttttgagactctgtcacccaggctggagtgtcgttaggtgcaactaacaccaggaacagcaccttgaatattcctttttcaagttcctcttcctcaggagatattcaaggtcactttgtcacccaggctggagtctacaatggcaggatcttggctcactgcagcctctgcctcctgggttcaagcaaattcttgagcctcagcctcccgagtagctgagattacaggtctgtgccactacacctggctaatttttatatttttagtagagacggggtttcaccatcttggccaggctggtcttgaactcctgatgtcaggtgatccacccacctcggcctcccaaagtactggaat

SEQ ID NO: 107554 - DNA, 1285 bp, Homo sapiens
gacagagaagagctgtgaaaacccttcaactagtcggaaccatcataaccatccccagaaccatctcaatcaagatattatgcaccaacagcaggatgttggaagcagacagcaaggttcaggggtttcatctgaacatgtatctggccataatccaatgcagaggcttttgacatcaagaggcttagagcagcaaatggtgtcccaaccaagtattgtgactagatcttcagacatgacctgtactccacacaggccagagagaaatagagtttcaagttattctgctgaggcactcattggaaagacatcttctaattcagagcagagaatggggatatcaattcagggttccagagtttcagatcagcttgaaatgagaagctatcttgatgttcccagaaataagagtttggctattcataatatgcagggtcgtgtggaccatactgtggcctcagatatccgcctttctgattgtcagacgtttaaaccaagtggagctagtcaacagccccagagtaattttgaagtacaatcttcaagaaacaatgaaataggtaaccctgtatcatcattgcggagtatgcagtcccaggcttttcgaattagtcaaaacactggccccccaccaattgaccgtcaaaagagattatcttacccaccagttcagagcatcccaacaggaaatggtattccatcaagggacagtgaaaatacttgtcaccaaagtttcatgcagagcttacttgcccctcacctcagtgatcaggtcattgggagccagaggtcactctcagaacatcagaggaatacacagtgtggtccatcctctgcaattgaatataattgtcccccaactcatgaaaatgtccatattagaagagagagtgagagtcagaatagggaaagttgtgacatgtcgttaggtgcaattaacaccaggaacagcaccttgaatattcctttttcaagttcctcttcctcaggagatattcaaggtcgaaacacaagccccaatgtttctgtacagaaatccaatcccatgaggattactgagagtcatgccaccaagggccacatgaaccctccagtcacaaccaacatgcatggggttgcaaggccagcgttgccacatccatctgtgtctcatggaaatggcgatcaaggccctgctgtacgtcaagctaattcttcagttccccagagatcaaggcatcccctgcaagacagcagtggttccaaaattcgtcagcctgaaaggaatcgttctggaaaccaaagg

SEQ ID NO: 107555 - DNA, 2232 bp, Homo sapiens
ccagcctcaatcaaagcatatcacagatggctgggcaaagctgtgtacaattgtctattagccagcctgccaattctcaaactgctgcaaatagtcaaaccactacagctaactgtgtttcattaacaacaactgcagcacctcctgtgacaacagatagttcagccacactagctagtacttataatctagtgagtacttcctcaatgaacactgttgcttgtttgcctaacatgaaatctaaaaggttgaataagaagccaggtggcaggaaacacttagcagcaaacaagtcagcgtgtcccctgaattcagtcagagatgtgagcaagttagactgccccaacactgaaggctcagcagagccaccctgtaatgatggactgctagaaagcttccctgctgtgttaccatctgtctctgtgtctcaggcaaatagtgtgagtgtttctgcttcacattctttgggtgttctaagctctgaatcattaatacctgagtctgtatcgaaatctaagtcagcagaaaagtccagcccaccctcccaagaatctgtaacaagtgaacattttgcaatggccgcagcaaaatccaaagattctacccctaatctacaacaagagacatctcaggataaaccaccaagtagtttagcattatcagatgctgccaaaccctgcgcttcagccaatgtattgattccatctccaagtgatcctcacattttggtttctcaggttcctggtttgtcatctacaacaagcactacaagtactgactgtgtttctgaggtagaaatcattgctgaaccttgcagagttgagcaagattcatcagatacaatgcaaaccacaggtctcttaaaggggcaaggtttaactacattgctatctgatcttgctaaaaaaaaaaaccctcagaaatcatctctttctgatcagatggatcatcctgacttttcttcagaaaatcctaaaatagttgattcaagtgtgaatttacatcccaaacaggaactattactgatgaacaatgatgatagagatcctccacagcatcattcctgcctccctgatcaagaggttattaatggttctttgatcaacggtagacaggccgactctcccatgtcaaccagctctggcagtagtcgtagtttctcagttgcatccatgcttcctgaaacaacaagagaagatgtgaccagcaatgcaacaactaatacatgtgacagctgtacctttgtagagcaaactgatatagtagctcttgcagcaagagctatttttgaccaggagaaccttgagaaggggagagttggcctccaggctgatataagggaagttgcttcaaagccttctgaagcatcattgttagagggagacccacccttcaaatcacagatacctaaagagagtggcacaggacaggcagaagcaacaccaaatgaatttaattctcagggttcaattgaagcaactatggagaggccccttgagaaaccaagttgttctctaggaattaaaacatcaaatgcatctttacaggattcaacttctcagccaccaagcatcaccagtttaagtgtgaataatcttatccatcagagcagcatcagccatcctctggccagctgtgcgggtttatccccaacttcagagcaaacaactgtgcctgcaacggttaatctgaccgtttcatctagctcctatggcagtcaacctcctggaccatctctgatgactgaatattcccaagaacagctaaatactatgactagtaccataccaaattcacagattcaagagccactcttaaagccaagccatgaaagccgtaaggattctgctaagcgtgctgtccaagatgaccttttactgtcttcagctaaacgtcaaaagcactgtcagccagcccccctcaggcttgaaagtatgtccctgatgagcagaactccagacaccatttctgaccaaactcaaatgatggtcagtcagatccctcctaattcttcaaactcagttgtgcctgttagcaacccagctcatggagatggccttacacgattatttccacctagtaacaactttgtgactcctgcattgaggcaaactgaagttcagtgtggttctcagccttcagttgctgaacagcagcaaacccaggcaagtcagcatctacaggccctgcagcagcatgttccagctcaaggtgtatctcaccttcatagta

SEQ ID NO: 107556 - DNA, 1024 bp, Homo sapiens
agtttggaacttcctggagacttgttgaatgattttgaccaaaatgctgatagtgatgtggacaatgaagtccaggctgaggtggtctccgatggagattaggaacttcttgaagactagagcaaaggtgactcttgctatgctttagtgaagagactggaagcattttgccctgccctagagctgtggaactttgaacttgagagagagaatttaggttatccggtggaagaaatttctaagcagcaaaatgttcaagaggtgacagagcaccatgattgtaagtttccagaggcattctccagcactgtggagctgtgactcaattaaacctctttcctttaaaaattacccagtctcatgtatttctttatagcagcatgagaacggactaatacagttgtcaatctctgggatataaaagcatcacagctttcattatgaaatttttgaaagtcagagaagagaatgaaatcaccaaaatatcactacccttacttaactatgattaatatattaatgtatttgctttctggccttttccatatatgtatatattttccaatagtgcatgtattatttagtagcctgataattgaaatatatatagaattttcatacccagattttaatgacagtcaaatgataatatgagacttctagcagtttgaagttaatgcccaacaaatgagtgagtgaatgaatgcttgctttcatgtatggaatattacatgtttgtgctcttgtcacatttgttttttttgtgttcagagtagggaaccattgttttagtttaaattctgtataacacttcacatgaacaaatagcatactctcccaactcaactatgctctacctatctttccagctcttgctcaaattcacatcccctttaagcttttcttgatttccaagcctgcagtgatctttttctactcaaattttctcaagcagtttctggctatacctcacatttgatattcaccattttctacatttgctaattatagtacttttatgcta

SEQ ID NO: 107557 - DNA, 1439 bp, Homo sapiens
ctacctctgtgtcatttgagggaccagtttctctttggttataaacaatagagattgaatttggctaagcagcaaatggatactggataaactcacagaaagaaagggagatagaataatgaaggcttgggaaggccaggaaaacagaagctcccaggatcataaggatccatggggctaactcagcctcagcaagatattctccttgtgcagggagtcttattagttagccccatgcccaccccagaggtgagcctgtgtttgatggtcctatcagatttcaggaatgggacagagaagatctccgaaggaaaggcaggatattattgtcagaaggccaaaacaacagatttattacaaagttcatcggatttggcagtgtggaagtcttttgttgagcttggtttaagcagttttaggaataaaagtcaggtaacagctggttgaagagtgaataagaagtgaggaagagggggtagtaagtgtaaacaacttgttcaagaagactggtggttgggaggaagaatggggacacctgtggggagttgcaaggtcaggagaaaaatcagtttaggtttttacatggaaaaagttgaataaggatttatttttatttttgttgagatgggatctcactctgtctcccaggctggagtgcagtggtgcgatcttggctcactggaaccttcgcctcctgggctcaagccatcctcctacctcaggctcctgattagctgggattacaggtttgcagcaccacacctggctaattttttgtatttttggtagagatggggttttgccttgtttcccaggctggtctcaaactcctgagctcaagtgagccacctcccttggcctctcaaagtgctgggattacaggtgtgagccaccgtgcctggccctgaataaggatatttttaatggaaaggcactaagagagaaggagggattaataatatatgagagaaaagggacattatgtaagaagtttactaagtagcgagagtgatagagtccagagtataggtagagggtttagttttgctagaaatattagggaagattttatataggaggatagacttgcaccggactttaaagggttggtaggatttggataaacagagcaaagtggaaaggtcatttcagtgggaaaatagcatgaatttagcataaagtgaagtagctgataaggcgcacagggataaacctgtctgaattgaagaggagggaagggtagatggcataattagctagaaaacctgcttttatgtgtgttgtactaggtggaagggggtaggtgagacctgccagtgaagaaggtacagtcatgaatgccaagacctggagtttggatatgatgcagttgattgtgggaaatagtactgtagagtctgcagcaggagaggacatggtaaatatggtgaactgaaaag

SEQ ID NO: 107558 - DNA, 4395 bp, Homo sapiens
gattgaattatacagtgttattttgggagtaattgagaaagcttgcgtttttaatttttaaaacataccatgtattttatcaatcagaaggaagatatatcttcaagctttgagaccctagttttttatttttcatcattttttttctgtgtgttaatagggccttttaataatttatcctcttacagtgaaaaaattttgatagctgtggtacttttccctttgttgactacaagaataaacactgagccttctaatctcagccagctgtcttacaaatgtaaaaattagattaaaagtgtaaaattgtcatcaaaaggttttaggtaagcatgcctaacccttgttgattactggtagttgtaaagagaatgtaacagatgtttggagctatctgtggagaatgcttaaaacttgatgaaaccttaattttaattttttttctgatactctcttatatctcaggcatgtccagatcagcaatgagtcggcaattgacttctacaggaagtttggctttgagattattgagacaaagaagaactactataagaggatagagcccgcagatgctcatgtgctgcagaaaaacctcaaagttccttctggtcagaatgcagatgtgcaaaagacagacaactgaacaaattacaaatgaactttcttgcacttgcttgtcgccaaataaaagagaggcccattgattcctcccccaccccaacacttttcttttaaagcttttctccctccttgttcttgtttttctttcttcctttccttttctctgagagttttaatactttcaaggactttaaaaaaataatcatgtttgaattgttttctcttatttttgtgaggtggtttgaaggaaggacaaggtagatctgtttagttttgcagttgaagttagatggtcctaaacatttaattgtcaaataatttcaaatttaatgtcctgctttcacattgaagggcagagcctacaaaacattgtatatttcaaaagacaaaaagaagcagcagcagtatcttgttctctaattcatagacaagttgagtgtgtttgtggtactttgggtttttaaacactttgggatactaatccctagacattgccttcactccacctttagtccttctgagcactctctcgggagttggaacattgttatccttgtaagaaatactaagcttatgttgatttttaagtaattatatcttctcttcttgctggtgggtggggcagtttggtttagtgttatactttggtctaagtatttgagttaaactgcttttttgctaatgagtgggctggttgttagcaggtttgtttttcctgctgttgattgttactagtggcattaacttttagaatttgggctggtgagattaattttttttaatatcccagctagagatatggcctttaactgacctaaagaggtgtgttgtgatttaattttttcccgttcctttttcttcagtaaacccaacaatagtctaaccttaaaaattgagttgatgtccttataggtcactacccctaaataaacctgaagcaggtgttttctcttggacatactaaaaaatacctaaaaggaagcttagatgggctgtgacacaaaaaattcaattactgtcatctaatgccagctgttaaaagtgtggccactgagcatttgattttataggaaaaaatagtatttttgagaataacatagctgtgctattgcacatctgttggaggacatcccagatttgcttatactcagtgcctgtgatattgagtttaaggatttgaggcaggggtaattattaaacatattgcttctattcttggaaaaatagaagtgtaaaatgttaataatacaaatgtcactgtgacctcctccactgagaggactggtttatgccagatcattttccggcacacacggagtggctttgacagattgataactttgtaagatgggagacatctgaaatattcatgttttccttttgtagtcccatctccactatttagaaatgttctcagactttaaaataatgcacagggcttgagctttctgtcatttgactttaaaaggaagtttcattcatatttatcctcttatgtaaaattgcggtataaagtctcatttccaaatatgttaaatgacaaaattattttataaaatgtttatgcacactttataaccttaagtttttatttgagaatgtgaaagtacaaagtgcagtagacttcaacaatcttgagtgccaagaataatacagaaaaagaagacagttgatgaatgagtttatagggttctaatcttaagatggtaaaaatgtagaaagaccttgctggttttttgggggtattcgtttcttaaacaatccaaatctaagcttagaagaaaagtttagcgttaagcacctttatcttcatgaataagcttcagcttgctcttggcaagagaagagtgcttgagttacagaaggcataagtagtttgaagaatgcagcagcctttttgtaaacttcccagatatcaaaatagactttgatatataaatggttttctgagatgacactgcctctatttctataaccatttcacctggactatctaatcagtcctatgaatgtatccctaaatgtggttattgaaaacctaatagctgcctcatgacaagtacatgttatttaaggaggaaaaaatattaaattttgaattgagtgtgtaggctccctatcattatatatagagtttctttttccacggtagtcagtgacttaacctgaattgtaaatgtttgtaaagggttaattgtcctacatcaaacttagttaaataattccatccacttatggaggaggaggagaatgtggaagaggtaaaaagctgggcacaagttcatatgcctatgagtcagtaaagactgaagtaatgtcctatgttgagctggttattttgatatatgataataattatctttgaagtagaacaattctgttaactggaaaatcacaggatatatccatcatatttttcaggacagatagtttttactgtggggcaaataggttaaaattacactatgttagttgcatttaggttttaaagcaaagaatctgtagagaaatctatgcaatatatagtttgtccagattagctttcatttggggaatgaagttctgaaatatctaaagcagtttactcatcaattgaaaagtcctccaaaaagagaactattgggaaaccatggtgtggtggtggaaaagaaaagctccctcagttttttggagggaataacttaaaaaaatacttaaatggctaagtttacttggtgcagttaagaattaaacttgtcaattttaacattgctgttacatctgaaataaacttatgtgatgttctggtagtgatctgtgatatctgtaaatgtcaaaactgtattgttgaattctgcagccagcaaccgtacatactcattgtgtagtgtttcccttactgcttttatttactttcacatttaagatctaattttaaaatcattaaaataggccaagtgtaattaaggcatcctaattcagatcttctgtgacttgctaggtacagtgcccaatatctacaattcagttccaatgagagggaaaaagtaagatccaaggaactgtcttgctgctgtatttttaatgtaattattagaaatacttgacactttaggctgcaatctagttagtaatgtttattggctacagacaacatattcaggtgttttgtttttcttccttgtaaggaaggagtacggtagttcaatgagttgggaattggcttttaagctttttatcaaacatgaatttaagattttttctttaacagaattcagtatttaatatttctagtcaaaattgttataattagatttttgcttttttcatttaagaagcaatgagtgatccttgtctagtgtgtctcagttattactgtagtttaaaacaacaaacaagtattaccttccacagttctggatcaggaatctaggagctgcttaactgggtggttctgtcttgagatctcagaaggttgcagtcaagctgttagccaggactgtaccatcttgaagcttgacaaggctagaggagccatttccaagatgtcttgcttacgtggctcttgggcttctgttcctcactgtgtgggtatcacacacagtgcctgatgctcacgtggctcttgggcttcagttccttgggcaccagttgcctggtggacaactggtatgtggcttcccctagagcaggtgatataagaaagtgagcagaaaccatacttttttatgacgtagcctcaggtgacattatttctgccatattccatgagtcacacagaccaaccattgaatc

SEQ ID NO: 107559 - DNA, 2323 bp, Homo sapiens
ttcgccgggtccctctcacaacatgggaattatgggaactacaagatgaaatttggatggggacacagccaaaccatatcactcctgttgctttcttaatggatagttttcatcctggggtgattttcaagatggtggattcctttgtttcgtttccagcaactctggttctgaaaatggggtatgtgtatccaggaatgtgaattttgcatatcacctctgtgactctgatgtaggtagttcatagaccacggttttcatgaatagaatgtgcatggtattgcatacctccattgttttcttagaataaattactagaagtaataagatacttgggcaaaggaactgtaattttaccagaaataggtgtatctaaatttttctgaactatgaactacaaggaaaattttgacacttgcagaatgttattctggcctttgtagtagtcgttgtgtaccatatttgtccctgaatgtatgtaattatatgaaagctatgagtagaatttgtattgaatgactgtcaaaatttgcttataaatgataatttgcttataaatcaactctgaaagagttggatttatcaatcatgtaaaaaagacttggtacccctttcatatgttcatattaacaaatggggctaattatgttttattgagtacattttgatttgttccagtagccggatcgagctgggagatgtgacaccacacaatattaaacagttgaaaagattgaatcaggtcatctttccagtcagctacaatgacaagttctacaaggatgtgctggaggttggcgagctagcaaaacttggtataatatagttttttttttgtcctcccttcttttctttctttttgttcttgaaccctagttttttatagagcagaagaagttaactaatttagtttgtttattttataagtgaggaaatgggagtggtctaggttgtgagaaaaatctcagagaaatcagttgaataaaacagttgaattttaaaaagaaatgcttagtgttcttagtgtatacctgtgtgttttcactttaagctatactctagaggaggcttaaacttcctaagatggcataagagctttgagatcattgatattcatgaaatagttgatgaaatttaatgttgataggaacagtgtagtcctttaaaagggaaaaagattaaatgtgttattctgtctgttcaacattatatctttatgttttccttggcagcctatttcaatgatattgctgtaggtgcagtatgctgtagggtggatcattcacagaatcagaagagactttacatcatgacactaggatgtctggcaccttaccgaaggctaggaataggtaaaaaattgtggtttttttacttcttcagagaagcataaacatattatttgttaatgtgtctgacctagtaagttaatttgggtctttttaaggaatactgagaaagggttactgaattatgtaaaatatggtgaaaaataactagtgtttattaacataattctattggaagccctacatagatttgctgtttacgtccccttctgctttttctgtttttcttctacccggaagtgcttgtttaaaaaggttagtcttctgctaacagttttaaacatacgtagctattgtagagagagaacacaactttggaaaataaggatatctagtgtatacctcataaattcttttaggactcaataagtagttcagatggcaagtggatagatacataatttaaaggttgatttatgaagtcacgtgtttgttatttattttattaacaggaactaaaatgttaaatcatgtcttaaacatctgtgaaaaagatggtacttttgacaacatttatctgtaagtaaaataatatttaatgttcttatcaaaggggtttaattggcaggagaaatctttactagaaactttaaaatctggtcacttattgtgcctttggaaacactgtggaagtagttgttacaaagtattcgagtagttgttagttttgtttagttttgttttattaataatagtagattaggaacctgagatagaacacattgctttattatattaggatgagagcaccaaagtcacagggatgaaatcaggattaaaactcaggccttcagaattcaagactattaatactacttttctcatgcaaaaccttgtgtgttttgttcaaggctatgttgatagctttgaacattgtagtagatcatttgtagtagagtttaataatcaaaatcagagattacctagctgagattgtacttgaatctcaagaggctgtagataaagagttatga

SEQ ID NO: 107560 - DNA, 1013 bp, Homo sapiens
gtaggagagttctggcacccagtgggtaaaatctagggatgctgctgagtattctgcagtgtaccagaaaggccctttacaacaaagaataatgtagccccaaatgctaatgttgagattgagaaaccctgctgtaaaatctaggtaagatggaacttactaaaagtaatttagtaattccctgaaataatctgagatcctgccctaagtcttatagttttatagaagaggtaagatacaagaataaatgtttgtagcagggcagaggtgccttgtaaggacagaaacggtaatatagttcatatgaggtagaaatctcagtgggtgacaggttaagacctcatgagcagttagtgttgaaactgtgtgataaattctgaatgggcttactttcaggttgaaggaatttattttccagaggaatcactctttcatgtaatttactacagggtaagagtttagaaacattactgctagcaaagaaaaaattacctcccttctaaccccttgacatttttaaatcaaaggaccatttgatcctaactaaaagatgctttgagttttatgcaaatgcacctttatcagtatacgtcagaaaaatgtttaccaatagatctctctccctttttttaaaaagtgaccttgaggggtaaaggtcattcctttgacagaaattgttgtgactgatcttgtgctacaatggaaattaagagacataggcttgattctggctttatccataactgtctgtataactataggtacatttgtctcttgggggtttagtttcatcatctgtaaaatgaagggggagtagatccagtccagatcaaatactctgcacaacaaatgaacaggcagttaaaattatgtgccaaggtactcttaatactcactaaaagtataaacaggctttaagctttctctatacttcattttcactttttgttatataacttaaaaagtcacactttgagcctggtgtggtgatgtggtgcctgttgtcccaatag

SEQ ID NO: 107561 - DNA, 1095 bp, Homo sapiens
aataaaaaaaatttttaaggtaaaataagttttattttgactacatgttgaaatgatttcttccccttgtaaatgtggatgctaaacttgaatgaaaaaaaacttctaagggaaaataagttttattttgactacatgtttaaatgatttctccctcttgtaaatgtggatactaaacttgaatgaaaaagtttttaaggtaaaataagttttattttgattacatgttgaaatgatttcttccccttgtaaatgtgaatactaaacttttttttgttatatcaaggaagtcttcccaagatattaaacattttaaaattttgtatgtcacttgtatatctgttggacggtcctgtgctaaacccataaaaaagccaaagttgtataaaacaggatcttttcccttagaatctacttcccatcccagatggtagatatttctaaatgtttcaacttgtgggccaacagaaagtttatggctgtttatacctctgtgttgaaggattttgaggcgaatctggttttttggttaaagtgttgccattcagtcacttggtctgctgtgaaagggtagggaagagataattggaagtattcatctttcttgagctagtgcaagctatattctgcctctgtcagaaacttgttctccaactccagaggcttcttacctcagtcccctatagtgctgtagtgaatgcttgttcataaaactacctgacacacatccttaattacttcttttggataatttcctaagaatgaattttctggatcaaaaggtactgacatttttaaagctctggtgtttcttgccagttgacctccaaaaagatagtagcaatttattctgtcagcaatgtatgagaatgtccttctctttccaagggctaacgaaagggaagggcacgtggaaaaacctcaggaaaacatattgtggctgacatttcagccatgaatggtataaattttctttgcgatgcgttcaatacatttaaatacattaaaatgatagaaataactaatagcttccttacaagttgtctttgagtaaatattcacattttgctttaactctacttttactttgctgat

SEQ ID NO: 107562 - DNA, 2312 bp, Homo sapiens
ggcaacagcgtttgaaggtcactctggagaccacaaactgggaagaacggggctgagaaaaactatcttgcggatatgggacaagagagggaggggtggaaaaatctggattttaccgccagggcctaccgagccagccccacaagcagtgtcgtaagcgggtgggagggaggagcatgaccccagaaggcccagtccaggagaaagatggaggttccggagtggagggggcagggtgcgcggaggcgagcagtgcggctgcgcgtgaggcggcggcgcgccggcgcgcgaggggcggggtgaaaggtcacagcgcggcagcgggtctggctggcggcagcggcgggagggagccgagagacccgagtgcacgtgtggagaagcggcggcacaagcgcggcggcgggagacactcccgcccccaccagactcaagccctcactcgactctcgcggccttcgttgctcgcacagctccctgcccaggctaggaggccggcttgcggggttgagtggcccgagctaagggtgcggagacctaagggcggcgactacgacggcgttgatatcggtggtaacgacggcctcagcaggcggggaagatgaaagggtgaggaagggcagccgggcagggcccggccggtggggtagaagggtccgggcccatgtagagggggagagccgcaaaggcgaggagagattcagggcgaagacgggcggagggagatttctctgcttctcagttccctcggctcccggagggggcggaggcgaggctcgggctgttggcgggctgaagggccagcggaggcaagacccggggggcttcagggtttcggttcggagacgagtgtgggttgttgagtggggagaagcgaccgagtggggcaacatggaaaggctattgtgaagcgcccggggcctccttcccgggagcggaccgctgagccacgccggcccgcagctccaggtggagtggtttggttgtcttccacctccagactcaactctggaactgcggtgtttgacacctttcagtttaattcacgcttgggagctgtgcagaaccttctggaggaagaagaaattggaataaagagcacggggatgagtattaagagctagtgactcaactagatttgggttgggtcacagcgagtggaggagggggagagagcgcgatcactgtagacttggggtgccaacatatttaaggaagtatagggtggatcagtaggtggagctgttgcttcagtagttcactattgcccctgagtgctgaggcggtcctgggtagttctaccacgctgctcctttcaggtgattggcaaagttaatgttcggtctttcaccgtttgcctcttacgtaaaattaggaattattttggatcgactggttaagtttttatgaaatgtctccttaccattaagttgtatagttttaatgtattaattacgtaacatttttccgaagcattgtctcaagccgttttggagcttgtctttaccctcaaagagatgaagctcataaacgttaaaaagctctctgcgatgccatagtttgttgttgtaagtcgattaagaagtcgtaactatgttttaagttaacgaagtcattccaactattcaatagcacttttgaggatgaaataaaagtcactttcaacgtaatctcatactgccccaaacaaggacctaaatattacctctgtgtatcggtatttgaggttcctgaagagattccaagaaagtttaatttggtcttaggtctgtaacatgtttccttactttaattttcctttaaatactggatatttattctaatgttgaattgtatgttttgtactaataatctttaaagtttaagaaccatgaactattcacagtacctgcattgtttcacatcaagttgtaaagagttccagttagggaaatataattgacgggtataggaagtatttgctccacttgaatcatgatcttggaagtttggctatttcagatacaatccaacatatttggagaatgttgtttttctgctatactgcactccttttgttttgttcttttcatttttttttttttaatgaggcagggtctggctctgttgcccaggctggagtgcagtggcgctatctcggcccactgcaacctttgcctccccagctcaagcaatcctcccgcctcagccttccgagtcggtgggacctcaggcgcgcaccaccacgccttgctaattttttgtatattttgtagagacgggggtctgactatgttggccaggctggtctcaaactcctgagctcaagcgat

SEQ ID NO: 107563 - DNA, 1083 bp, Homo sapiens
taccctccagcacgcctcaagttttaagatcacgtgattggcccaaacctcagagcctggaattttaccggcggactccagagggacggaacgccaccgccatttcctgtccctcgattgtggcgtgaacgtcacttccttagcaatgcgctttaactcttgctgtccacattttccacattgtactttataacatactctttgtgaaaatttatcttttatttctttaatccaagaaaattaatattcaagggatccgtaaaaattcaggccccccgagatgtagagcgctgggatggaggaggcagggcggagctcgacgtcatgtgactggttgggcccgcccccccccccccccccaacctgtgcagctgaggacttcccctccgtggtgacagcctctgggtcctcggtcggtacagtctctgcacctcgcgccccagcaggtgagcggcgaccggtaactggcgagtggtggggatagagggggtggaaggaggcagaggaaggagagaagggagagtgtgaacggcgacttttctgcctgaggcttcctccccgctgtcaccctgcaccggcaaggagctcatttctccttaacccccgctcccccaagtgtggtcgttcccgctacttggggattcagatgtccacctttcccagggttggaagtgagtgcggccattatggttccctactcagagcctttggggcttcgggtagcagattgtttcagccatttcacagggtctgcagtagacattaggtcccattccttaaagcccattctttggcaaaggtcctcactgtccttaccctcagctcagggctgaggagcggggaggtagcaaaaaccctggaggcagaggcgtctccggtgagacaggcttgggagggactgtcactgatacggccctcactgcagagtcactgtgaagcttccctccgaatgtgctttctcagtgattctaaggattttatctgacatacctgcagggaaggttccgtagatgttcacgtgcttcggatgggactagaaaagtaaaagaagggcttttactttttcttctctgcagagaggac

SEQ ID NO: 107564 - DNA, 1042 bp, Homo sapiens
tatttgccagctgggtgcagtggctcacacctgtaatcccagcactttgggaggccgatgcaggcggattgcttgagcccaggaattgaagggcaacatggcaaaaccatgtctgtacaaaaaaaaaaaaaaaaaaaattagccaggcgtggtggcacacacatctagttcccgctattcgggaggctgaggtgggaggattgcttgagcctgggaggcagaggttgcagtgagctgagatcgtgccactgcagaccctgggtgacagagccagaccctgtctcagaaaaatatatatgtaataataatatgtgctattatttgctcagtcaattaggtgcaatatataatagttttacttggctcagttgttttaacattcatttactcatccaacaatatttttaattcagttgaatgggtaatacatgtacaaatatggtaaaatttatatattcatacaagtgtgttttctctcccctcatccttattcttttcttcccccatatatttatccacaaatggtagcacctcttcgtattattctggaccttacatttttcgcttgagtattacgttggagatcttttcacattgatacagttaaaactgcctcattctttttaatgatagtttagtattcaattgtattaatataccctcatcatcatatgtaacatttattgagagcttactcctgatccaaatgctttcttaatactttagttttattaactcatggaagcctcataacaacctatgagataggcactatttttctatatttaacaaatgaggaaaactaggcacgggatgattaaatgtccaacagtcacacagtttataagtggtagggctcaggattagagcccagggagtcactttccagagattgctgccataataccgctaaacatgtagcctgtcatagtattacaaggtatttaaccagcctccatattaatggacattccaatcttttgcttaagaaacagtgctatagttaatattttgttaatagaacattttgtacatctacaat

SEQ ID NO: 107565 - DNA, 1050 bp, Homo sapiens
cttatttccaaagcagtcgagggaactggaattacaataataggcttaacaaattttgaacaaagttggcttttggttggcaaggaaaaatcaggaaactaaatatacatagtgaaataaatctgccacataagccattctaataggattgctaggtaggtggattgaaggagatgaatagagagtgtcacaaaatgactagcactatactctaaaagtatgatcaggtaatgttatttgttggaattccacctgttctataactttctgaccaaacataaaaatattaaacagatttaagatacctttctctaaaaagattaacagtgtgtgaaaataagtaattggttataatccattagattcttctgaatcttttttaaaaaaaatctgtgatttccagagatagtctttaatcaattagatagaatgtattttttcattacactctaatgtaacaagtgttacatcaaaataatgcttcattatcaatgaagtgccccaggattttgtatgtgagtaaatattaccttggaatcttagtgtttaacttttatatatcacctcccctttgcccccaacagccatatcatccaagactttggtaataaaaagaataatttctgaaataatgaaattaccagttgcattaaccagcagcaatttggagtggactttataggaaaaaaattttttcctctggtgttatttgccactgcagtgttctgcagtgcctgttggggagaggctgatgactcattaactcagatcagttgcctatgctgcctttctggatttttcctcttctaccacagggttttggtttttgtttaaatctttcacaaattgggtagggaggggcactgctataatttgtaaccaaagaatcttagttgtaagttgcatttactttttatccttaaacacagttgaagtcaaaacagctaaaggcaacatttttatataatcattgatttgatttttctatgagtgcatctgtgtataccacactgctttcatcaaagtatgtaataagtattcctgctttta

SEQ ID NO: 107566 - DNA, 3288 bp, Homo sapiens
gggaggcagaggttgcagtgagcagagatccttccactgcactccagcctgggtggtggagttagactctgtctcaaaaaaacaaacaaacaaacaaacaaaaaactagttgggcatggtggtacacacctgtagtcatagctacttgggaggctgaggcaggaggatcgctagagtccaggagtctgaggctgcagtgagctatgactgtaccaccacactccagcctgggtgacagagagcctcttaaaaattttttttaaattaagaaaaggaatttttttattctactttgaagaagtataataactcaagaatacaccaaagatgagagtggtctcatcttagtggactacctatattttgggtcttttgctttacggtttataattataacttatttatttatttatttactataggtaaactaacattatggatttttccaagctacccaaaatactcgatgaagataaagaaagcacatttggttatgtgcatggggtctcaggacctggtaagtaatacatcataatctcaaaataaggatatctaactttgattaatgtcttttcaaaatattttacatagaaatatacaactttctgtttacctgcataaattctgtttgtccttaggcgatctcatagtgactataagaccgaagtagaatctctgtcataagggctcatctagcattgattatctaaattttataattattgaggtactactttgtgatatcctgtttataattatgtaaatgttcaaccagtgttcagttttatatgtcttaattttttgttaaatttgaggtaaataaactatgaagtttatagcttttaatatgtaataccttgcatatagcaggcattcagtaaatgttaatttgctttgaactttaataattcaaacgctcagagcatttctcagcaatattagcttttgccctttgcatttatgaaactttttgaatggttattttaagtgtcacattattaactacctgtgggaaagaagtcttaggacccaaactttatgtccattctgccaaaacatggagtgctgctttttaaataataaatcttacgccagtatttgttttgttattgaatactcccactacacaatgtgattcacagtcacagtttctctaagtaaaacctggtcagtgatgtattatccttaaaacctcatgctatatagtctttttcttgttctagttagagtagtggtgatgacagttttttgatgtttacgcaaatgaagactgtcagtcactgtgcctcttttttctcccccaagaacttggtgtttgagcttgatttcattggcaggtcattaaaaggttatcagtatcttttgccatgcagagaaataattgtcctctcaatgatcataagggtcttcaggatggacagactaaacccaagaacctttagagaaaaggcaaaagaacatcagagagtttaggaaaaaatattctgtgaaactgtgtagtaaactgctcctggaaacaatttttattttattttaaaaatttttttaaattttactttaagttctgggatacatgtgcagaaagtgtaggtgtgttacataggtatacatgtgccatggtggcttgctgcacctatcaacctgttacctaggttttaagccccacgtgcgttaggtatttgtcctaatgctctccctccccttgcctcctgcaatttttaattcttaagtacttaataaggtaatggaacaatggcatccttttttggcttatgaaatatgatttttaaatttcattatctctggtatttcagtgcatcttaattcttaagtagtcggcatagaggtaaatatttatagaatgaataagtcttcattgtttttacacaggttaattaactcataaagctttaatagtttccactgaagtattacctataacatagttctaatcagttgtatcagaaggctaaatattaaaaattggtttattcttacacgtgtctaaaaatatggcaaccttccttccctgctagaaaagtaatttttgcttactagaccacatggtccaaaatagtaagttcagtaaatggaattccattgacaatttcttacccaatggtggtgactgattataaatatccttacggcctatgaaaaaaattttgtagatgtgtgtgtgagtttttctagtagagctattattagtttttgaaaagggtccatgtcccagaagagttttaagaactactgctataagttattagaaagtaaacatgttgctttaggtctgtctctcaaaggaaatggtaacagcacagcgaagtgataattgtgtggcattctaccatactactagccaaaccatttattccaatttctacttttaaaagttttttttattgttccaaagccttcactccatgtatcatagcaactctcagaacatacctgaatcctaccaggtaagtttgccatgcagaacttgaaatgtttgaaaagttttcatgtatattatgtaaataaataatctttggcttacctctttatattatacactaaaatatatatctatgtgaaactaccagtatgttccatagtaggtttttatccttcttatgaatatatgagagaggcacaatactgggtttattgggtgttttaattatttgtgactattcacagagcactagagtcttaagtcatcaaaatagtcttttgttctcttcagtggttacagcctgtgacatggcgggtgcagccatgtatgagctggtgagagtgggccacagcgaattggttggagagattattcgattggagggtgacatggctactattcaggtgtatgaagaaacttgtatcctttttggctcaatttcctgccactttctatatttcaaaatttaaggatttaggccaggcatagtgcctcacacaaagtaatcccagcactttgggaggcaggcaggtggatcacctgaggtcaggaatttgagaccagcctggccaacatggtgaaactccatctctaataaaaatacaaaaatcagctgggtatagtggcaggcgcctgtaatcccagccgcttgggaggctgaggcaggggaatcgcttgcaccctggaggtgggaggttgcagtgagcagagatcgcaccactgcactccagcctgggcaacagagtgagactccatctcagaaaagaaaaaaaaaattgaggatttaagccaaaggtggaagcagcaaagcagcaacaactaatgatattagaagcatgaaatgctgg

SEQ ID NO: 107567 - DNA, 1055 bp, Homo sapiens
ctggtctcaagggatcctctcatctcagcctcccaagtagctgaggctacagacatgagccaccatgcctggctaatttttttattttctgtagagatgggggtctcactatgttgcccaggatgggcaacttctagcctcaagagatcctcctgccttggcctcccaaagtcctgggattataggcatgaaccaccatgcttggcctctttgtacatttcttagggtaatttcttagaagcaaaattcctgccaatacagctgctaattattattttacattctgatagcccttcaaaagggctaactgtggacaagagtttctgcttctcaacatcttcaccaatgctagttttttcaacacgttcttatgataattatcaaagatacggaaaagttgaaagaatgttacagtgaataccatgtacccagcacttagatttgacaattgaaattttaactattcttgctttattagatacctgttcaatctgtatttaacaatgaactagcatctttcttgtgtgtatgaaccatttaaaaactgccttgtgttcattttccttttggatgatagttgtttttcatactgatttctagaaactctttttggttttttgttgtttttttttgtttgtttgttggttttgagacaaagtctcactcagtcacccaggctggaatgcagtggtgcgatcttggctcactgcagcctctgcctcctggattcaagcagttctacaacctcagcctcccgagtagctgggattacaggcatgcaccaccaccacacctggctaatttttgtatttttagtagagatggggtttcaccatgttggccaggctggtctcgaactcctgacctcgggggatctgcccaccttggcctcccaaagtgctgggattacaggcttgagccaccgcgcctggccagaaactctttgattaatgaataaattcgtcctttatctgtcatgagttgcaaatatgtcccagcttgtttatctcttgattttgtctgaggcatatttttcttgtaggcactgatacctg

SEQ ID NO: 107568 - DNA, 1204 bp, Homo sapiens
tgtgacatttcatcacagatttaaaacacagcatgcttgtataagaaagaatctgttcttattagattggaatatgtggtaattattgtgttgttgaagccttaatattgataagtaatgtttcctaaagactttcttcatgagaccattttatggatgcctgaacagtcagtattttttattctgaaagatgcaatatgataaataggaaagtactgaattttccactaattatgttaattttacttatataaacctctgtttctttaccagtaaaataaaaaaaccaaggcattataaaagttccaaaatcttttggaacttttataatataactatatatttttcctaatatcttagtgtttcatagcgctttgtactttttagatgacatttatttaattcacttcatctgccatatatacaagtatatagggcaggcgttattccatttttaataggttaggaagccacactgggaaatcaagttattttgctaaggttaatgacagaataggaactagaacccaacactcgtttctgtatattagctgcttataagtggtttactgtctaaatttacaggataggacctgatctgcatagcagaataatctggacaattaagatattactcattttaataacatttgctacttttgaaaagtaaccacccaagctgattggttaagggttacttttgcatgcatacatgtttgtgtgtgtgtatgtgatatatagagagaagctacatttgaaaattaatttcagacttaattatttcaacaaagaatagagaaagtcatttcctgctttctaaaatgtgcattatattagggccagctaggctatggcatcaaataattccaaatatatatttgctcaatataatagatgtttatttcaagtgttcagggcactctttactctgtcattctgagccatgatccagcctgaaatgagctctaccattttcaacacatggcttccaagactactgggagttctttccatttcagtaggccagaaggaagaaagagtatggaagagcgtgtgacttgcctgaccgtagaacacattattttgacttgagttttgttagccagagatcagttacatggccatatctaagtgcacaggatgctaggaaacaattcagtgtgtgcccagaaaaagaggaagagcagctttgagggagccacta

SEQ ID NO: 107569 - DNA, 1088 bp, Homo sapiens
ctgtatatcagtaagccccagaaatctgctctactgggaacttaacgaagcttctaggaaccacctacacaaagataacaagggaaaaattctttggaaaaggtgtaataggagtatccgtgaaattatgtatgcaaaggtgtttaaacatatccaaaagttgtacgaatgtatgtgactgaagttgaatatttgttcacgtgtctgttatttaaaagtatgggcaaatgaaaacaaacacattaagaaaaaaggggctactactaacttcaggaacttgcagtttcctgctttcctattactcattaaacctaatccactatcacaagggagtctttacaactcagttattttaccatttgggttacttatttaactgcattgtacaaaaacaaaccctcagagagtcattagattatagtaatactgtttcattgtttctcccacttgatgatgttaacagagaaaagtaaaatttacccttaaaataaatacaagaatatatatcttcttctatcccatatcctgagacatctctgtccaaaaactctggttaagtagttgttggtcttttcactattatttttttattccttaggtatcatctaataaataagcaatctgcatacttagataaagaaactaatgctctagtagttttatataaagtatgaacctgttttggagtttatttttgttaattttttggaccttcatttattctaggttctgcccattctacaagacagtagggatgctgtccaacatgattgcattttatgatatggctcgtagagctgttgaaaccactgcccagagtgacaataaaatcacatggtccattattcgtgagcacatgggagacatcctctataaactttcctccatgaaattcaaggtatattttgtttctgctgtaactttttttatttggaaatgcttctttttttcttttttttttagacagagtctcactctgttgcgaggctggagtgcagtggcatgatcttgtctcactgcaacctctgcctcctgggttcaaacgattctcctgcatcagcctcctgaatagctgggacgacaggtgc

SEQ ID NO: 107570 - DNA, 3493 bp, Homo sapiens
tcacgcctgtaatcccagcactttgggaggccgaggcaagtggatcacttgagatcaggagttcaagaccagcctggccaacatggtgaaacctgtctctactaaaaatatgaaaaaaaaaattagctgggcgtgatggtgggcgcctgtaatcccaactacttgggaggctgaggcaggagaatcacttgaagccaggaggtggaggttgcagtgagccaagatcgtgccactgcactccagcctgggtgacagagcaagactctgcctccaaaaaaaaaaaagtaacttaacatacgtaatgaaaattattttccaaatgcgagttgaatttgtaatgtcttctttcaggatccactgaaagatggtgaggcaaagatcaaaagcgactatgcacaacttcttgaagacatgcagaatgcattccgtagccttgaagattagaagccttgaagattacaactgtgatttccttttcctcagcaagctcctatgtgtatattttcctgaatttctcatctcaaaccctttgcttctttattgtgcagctttgagactagtgcctatgtgtgttatttgtttccctgtttttttggtaggtcttatataaaacaaacattcctttgttctagtgttgtgaagggcctccctcttcctttatctgaagtggtgaatatagtaaatatacattctggttacactactgtaaacttgtatgtagggtgatgaccctctttgtcctaggtgtaccctttcctcatctctattaaattgtaaacaggactactgcatgtactctctttgcagtgaatttggaatggaaggccaggtttctataacttttgaacaggtactttgtgaaatgactcaatttctattgtggtaagctcattggcagcttagcattttgcaaaggaattgctttgcaggaaatatttaattttcaaaaacataatgattaatgttccaattatgcatcacttcccccagtataaatcaggaatgtttgtgagaaaccattgggaactatactctttttatttttattttttattttttttattattttttttttggggacggagtgtccctcttgttgcccaggctggagtgcaatggcgtgatcttggctcactgcagccttcgcctcccgggttcaagtgattctcctgcctcagcctcccgagtagctgggattacaggcatgctccaccatgcccagctaattttgtatttttagtagaaacggggtttcaccatattggtcaggctggtctcgaactccagacctcaggtgatccgcccacctcggcctcccaaactgctgggattacaggcgtgagccaccgcgcctggccagggactatactctttttaaaatagacatttgtggggctcacacaatatatgaaatagtaccctctaaaaaagagaaaaaaaaaatcaggcggtcaaacttagagcaacattgtcttattaaagcatagtttatttcactagaaaaaatttaatatcaaggactattacatacttcattactaggaagttctttttaaaatgacacttaaaacaatcactgaaaacttgatccacatcacaccctgtttattttccttaaacatcttggaagcctaagcttctgagaatcatgtggcaagtgtgatgggcagtaaaataccagagaagatgtttagtagcaattaaaggctgtttgcacctttaaggaccagctgggctgtagtgattcctggggccagagtggcattatgtttttacaaaataatgacatatgtcacatgtttgcatgtttgtttgcttgttgaatttttgaacagccagttgaccaatcatagaaagtattactttctttcatatggtttttggttcactggcttaagaggtttctcagaatatctatggccacagcagcataccagtttccatcctaataggaatgaaattaattttgtatctactgataacagaatctgggtcacatgaaaaaaaatcattttatccgtcttttaagtatatgtttaaaataataatttatgtgtctgcatattgcagaacagctctgagagcaacagtttcccattaactctttctgaccaatagtgctggcaccgttgcttcctctttgggaagaggaaagggtgtgtgaacatggctaacaatcttcaaatacccaaattgtgatagcataaataaagtatttattttatgcctcagtatattattatttaattttttaggtaatgcctatctcttggtctattaaggaaagaagcaatcagtagagaattcaggatagttttgtttaaattcttgcagattacatgtttttacagtggcctgctattgaggaaaggtattcttctatacaacttgttttaacctttgagaacattgacagaaattatgcaatggtttgttgagatacggacttgatggtgctgtttaatcagtttgcttccaaagtggcctactcaagaggccctaagactggtagaaattaaaaggatttcaaaaactttctattcctttcttaaacctaccagcaaactaggattgtgatagcaatgaatggtatgatgaagaaagtttgaccaaatttgtttttttgttgttgttgttgttttgaatttgaaatcattcttattccctttaagaatgtttatgtatgagtgtgaagatgctagcgaacctatgctcagatattcatcgtaagtctcccttcacctgttacagagtttcagatcggtcactgatagtatgtatttctttagtaagaatgtgttaaaattacaatgatcttttaaaaagatgatgcagttctgtatttattgtgctgtgtctggtcctaagtggagccaattaaacaagtttcatatgtatttttccagtgttgaatctcacacactgtactttgaaaatttccttccatcctgaataacgaatagaagaggccatatatattgcctccttatccttgagatttcactacctttatgttaaaagttgtgtataattgttaaaatctgtgaaagaataaaaagtggatttaaattaacatttttttctttttctcttttttatggcacaatctgctagaaaatatgtaccttgtatcttgacttaatgttttggtatgaccttttaaaattttttccttccttttttatagattgttacttaagattatgaaattgaattggagccctcattatagcctgcaaaaagtcccataactgtatcacactatgttttggaaatataatctacagaatcccatcccattctgaattttactttgagaaagtgaatggtttctataaattcacttctaagtgcaaggaaatcagtggtactcttcagtttttaacaagtaaactaaagccttgtaatttatgattttgcaagccaatttaaagtccaatataacaatgtgcaacatcctttgtagcaattcattatggtacgtaggatatat

SEQ ID NO: 107571 - DNA, 1050 bp, Homo sapiens
tcctcccttttccctagccacctcccccgctgccccctcccccaattatccttccccttccctcctggtctcggaggaccccatcctagcccgacctgtctcggcccgcaacttccccgaaggcgtcggtgccactcccagtccatgtgggcccccgcgggctgcccacgcctgtcccccagctccccattccgctgggctttcccctcgccaggggtggctttctgagccgcccgctccgtgcccctctctgcattctctcctgccacttggggcccccgttccccctcccttcggcgggggttgcccccggggggctggcggagctgggccgtgggggcctccggggccggcggtgccggggtcatccggatggtgcggacgcagtgtctgctgggactgcgcacgttcgtggccttcgctgccaagctctggagcttcttcatttaccttttgcgggggcagatccgcacggtaattcagtaccaaactgttcgatatgatatcctccccttatctcctgtgtcccggaattggctagcccaggtgaggaggaagatcctggtgctggatctggatgagacacttattcactcccaccatgatggggtcctgaggccgcagtccggcctgttaggcctcctgacttcatcctcaaggtggtaatagacaaacattctgtccggttttttgtacgtaagaggccccatgtggatttcttcctggaagtggtgagccagtggtacgagctggtggtgtttacagaaagcatggagatctatggctttgctgtggcaggtaaactggacaatagcagaagcatccttaagaggagatattacagacagcactgcactttgcagttgagcagctacatcaaggacctctctgtggtccacagtgacctctccagcattgtgatcctggataactccctaggggcttacaggagccatccagacaatgccatccccatcaaatcctggttcagtgaccccagcgacacagcccttctcaacctgctcccgatgctggatgccctcaggttca

SEQ ID NO: 107572 - DNA, 1128 bp, Homo sapiens
caaagtgctgggattacaggtgtcagccactgcacctggcctgaatgctttctttttttcttttctttctttcttttttttttggagatggagtctcactctgtcaccaggctggagtgcagtggcgtgatcttggctcactgcaacctctgcctccgggttcaagcgagtcttctgcctcagcctcccaagtagctgagacttcaggtgcgtgccaccacgcccagctaatttttgcatttttttttttttttagtagagacggcatttcaccatgttggccaggatggtctcgatctcttgacctcatgatcagctcacctcagcctcccaaagtgttgggattacaggcatgagccatcatgcccggtcggcctgaatgctttctaagaaagtgtgtggcaggatcctcattctctcttctacttcttttcctgttcttcagtctctgaaagaagcatatctgtttcaaacctttatttcctcggttcttccatcttcttcctctttatttgcaatctctccttccttcttcctcctcctttcctctctgtttttccacatctcacctccatcctgttgagcattggaaattagatcagttgtgctcccattgtatttaataggttttcctttctttttgctccttgagaaagggaaagcagatcccaggacatttattatagtcttggccatatgatcatttgacagctgtttcttaaaccttgttcttagggctgggaagagtgaggaggcaggagtggccaatgggcttaggctcagacatcttgagcgtccacttctgggagggcttcgccatttcagctgagactgagtcagaaggaaggagatataaaactgccttcttgtgcgatctagtatctaactcaaacatctactctgtacctgtccaagctttgtggttgtacacaaatgaaatttaaaggagcaattttcatttgattagttactgttacggccatttgtactttgttaattttttaatgtttttgagatttatagaatcccatgtgagtgtatcttgttttcagaaatgatatcaacttgcatgtaatttaagaagatagccttgttataagtaaacatttatttgctatattacagtag

SEQ ID NO: 107573 - DNA, 1050 bp, Homo sapiens
ccactgtactcatatgtgacttttatctctccattttctttccatttccctgttaggtcttgagagatgggtgagttttcttccttgagatgatggggcaggcactggctggggaagctaactgggtttggttcttctcccttgtctaccccaaagaatggattgttctattatttttgtcctttgtcccctttcccttctccataagtgatttacatgatctgtgaagctcttttatatggtgtttttcataaacttgtttattattgtgtaggatgactttagaatggtatatattatttattcatattttacggaccgacatttaatagcatgggaaatgtgatgcaagtataacaaacaaaatgctgtaaatattcttcaaagctcaatatttcaaagtatctttaatattaaagttctcactgcaaaatctaagctaaacctgtgttttattttgaaactggattgtttaccttttagggattaggcaaagaggagtcccaaaatgagaaacagaccaaaaagagtctcttaccaactttggaaaagaagttaactagagtgccatcaaagtcactggacttgaataaaaatgaatatctttctctggacaaaagcagcacttcagattctgttgatgaaggtaaataatttcttataaattttattaaatttcagttatgtctttttatgtttatctttgtaataggggtgtgcagattgagaatttagttttattagacacagtctcaccctataaagaaacaaaaaaagaatgggagcttatagaaaataggagaaagaggctgttaaatctaacgtatcccactgtcttcagaagcctggaatctgaaaagcttctttgcatttagcttctaaatgtggtgttaataaaaacatatatgcccattctatataccaggcagtgtgatatgctcacacgtcataggtagagtgacatattatttcatttaggctatccctcattttcctggtagggaaaataagacctacaggagctaaatctaaagtcacacagctagttaa

SEQ ID NO: 107574 - DNA, 1054 bp, Homo sapiens
acagagccgtcatgagggtcacgtgagggaagatggatgtggaaagcactaaaaaacaactcaagagccatggaaatacaaagtattaggaaaatattatgatggaagaaaaacgtttatagtctagaatattgaagccaatattattagggtaatcagttttcagcatataccttgttgtacagttatgagaatttctccttcttattagacatgaactactcaaacagagaagatgaccagatggattgatgctaagttgtctcatcttgaaaagacagttgacaacagttataaagataattattgctagtgtaatgtagtgtggccatgagtttaggtgatgagttcttctatttatattttataaattctgcttgggtttcttataaataactccaacaggcattcatgtgtttttcctcttcccatgtttcaccaggtaaggtgctagcacacttgtgactgtggctggaagaggagaacagacactcctgtggggatgctttactctcttttctggtaggaaggctgagtaacatcacgggctcgattattttcttcatgtatttcaaatgctgtcagttatagcactaaattgtgaaaatcagccttctggcattcacattattctggtatgaactttgaggagttgagtgacatcttcccacttaacttgcacattaattctcaattacccctccctaaataacagtatctcactaagagagaagaaacagggtatatgtggtttccactattaatggattactgttcttccctggctcttccgacaataacaagttgtttctttaatcatatcttaaaaccgaaaatgtataaaagattaaatatttatgtacaatgggttgttctactatagaattaagatgagggaatttcagatgaggaaaatacccttttgaaatgttagttttgaacatgtactgttgtgcaatcccaaagataattcatgactccttaaatttgccttggcttatagcttaatatagggaaaatattgccagcgttttcagtcattctgtgcatgctg

SEQ ID NO: 107575 - DNA, 1448 bp, Homo sapiens
ttggtagtcgtgcttttgaatgtcagctgtagagccaactctgattatctagccattgatcatacaaattgatagaaacattagtcagtaattttagcttcttgccaaattgttcacaacatctaaatgtaatgtgatgtgatgaagataagtagtacaaagagaccaaaataatttgggagaattaggaatgatgacaattttttttaacaacttacctctaatagggttacttggatgagccaactccgcttccttcccatggataggaagggactctgtgtattattcaggtttattggcacgaagatacttgttttaagttccttgagaacccatgatggacagttgacagaatgcttaaacctgtcaaaagatgagtgatcttgtgtgggaaaagccttcccaggcgtctgtaccgaaaggagcagcaaacaaggggctaatccatgagcagtgttctgtaggctctgtgacatctttggtttataggattttggagccttttatgatctggaactatttgaggggtttcattataggccttggttctctccaggggccagatgagtttattgtggaatctttgaaaggacaaggcctctgtgaatgaatcagtcccagggaagcatttggtggtggcggcagtggaggattgcccggtgaacctataaatcagcagtctcttgggcagaggagcaagcccctcgaacatgatttcaaacaagcaggtcctcttctctcatctcacgtccttagtctctgttaatgaacatactggatgtggagtttaataaattacctactatcatctggccacttagattattatcacaccactgtggactgttcctggggggagaagaacagaccgatttgaaagattcaagggagaaagattaaggatcaggattgcatgaaagaagaaaatccttcaatatttaaaatgtttcttacaatacccacggagcacttttatggttccagccgagcgttcctgaaatgaactgaccattaacagcgcctctttgataggttaccctgatgctgctaaagtaaagccttaagtgtgtttttgggacaacgtgctgcttattccacctcagccacatatgtgtttgtgtttaggatattgtaaatctttgctaagtagtgttttccttggtgaatgaagtcattgttgtcttcaagtgtaccatctgcctagcaaaaaattgctacaaactttctcttatgcaatagtccttggtacttctaatatttttagcaagagacaattttctgtactagaatcttccactgccagaaaacacagtgccagtaaggttctacataccactgaccatctgcttaatagacatgtatttcctttgagtaggacattagcttttgattataaagctcaactagtataagcaaaaatataacatctagaagcacagttttag

SEQ ID NO: 107576 - DNA, 1157 bp, Homo sapiens
caacatcaggtccacatggagcagcccctgggctggcttatttcctagcttaaatttgtagttgttagggataaaacaaaacatctttgagcctcaaataagagcccaagtttctcaaaagccacgtaagatggtttcagttgtgcttgagacatactcattgcatgtggtaaatggtaggataagatgtggtgacacctatggatttgaagcattaggatgggagtcacagtacctgactcactgtgtagactcatgccgatcacacaacctttccatacctcattacacatatttatggagtggatataatatgtagttatctcagagagtagggattcattaaggtctgtaaaaggctttgagcatctcaggtcaaaggagtttgaaggaaactggttagtagtctaaattcctttcctttattttttccctagttcacctgttgcttcccctgggactgaaggcagaagtgactcccgaaattctctttctggactcagaaggaaaccaaagcaattgatgacaccgcatcccatactaaaaggcagggctgtctcggtggtggccttggtggttgttatcttctctcctagagtagaatgtgtacactgggactgaattctggcaactcttgaggttttgagacttggcagaacctgacatcaaaaatctcagaatggtagacatgtgaggagtggagtacaccagagagccccactacttttttcctgccccttttgccaacctttttggcattcccagccaacacacacacaaaaaaacatagctgaaaggtatatcatttttctgtaatttgagatttggattgtgaaaaaaaaaggaataattacacaaatgagaaaactctgagtaactgccaaggacaaacactgataaaggacacctgtcattgtactttgttaatgttcaaatttgatcagtttacagtaatccaagataagttattattttataatattataacttgttgataggattttagtaataaaacctacaaaccagatatgttaatttgataacatttttgatgcatctagaaacatttatttatttggtacaggcagggtcttcctgtgttgcccaggctggtctcaaactcctggcctcaaggagtcctcccacctcaacatccc

SEQ ID NO: 107577 - DNA, 1727 bp, Homo sapiens
ccttaggaaggtgtagaaaataaatgagttccatgagaccaggggccttgcctttgccctttacacatctagtgcttagcaagtaccttcttggggcagacatgcattcagttcaagggtttggtaaatgagtccttctctttagcagtcctttccctgaccagttcttctttcacaagatcaaccctcagtgttactttgatttttgtaagccttttacttaaattattgacaatttaacttgttaagtgttataattttgttgctttctctttctcctaaacctgtctttttaaaattttcgtgcatagctgaacctctgtctccctcatgcattcatctttttaaagtcattacttgtgtacctcttctttttgctctttcccctccaaaagctttcagaaactatggtaatcaaaaacatgtaacatgcccttgtgacatgagaacagaacagttcctctttcttcttgaaggtaatctgttgaagtgctgacaccttctatgaggagatcctttgcactggggaatttataaagcaatttcatttagcttaatataaaatgttaagcgagagctaagatggagcatttctagaacccttttggacttatgtttcatttatattatcaattaacaaactgtaaatggcttctttattttaatggaagtgctttgttgcttagaaaacaacaactggccactgagtataaccggaaacaagttctccgacactgctttacagaatggcagcattggcatggcgccgagctcctgaagagagagctggctctcacaaaagaggaaactaggaagaagatggatgcactgctgcaggcagcatcactggggaaactcagtgccaatgggttatcaggcatcagtctacctgaggaggcaacagccatggtgggtccaccagtaaaaaatggacaggtacgttgtttttcctgcttagtaaacacttgcatttgaggtttgtgcttttatagctggtatgtcagtcattgtcagattgctttgtctaggctatcagaagattagagctgcctcaatgcactacctttcaggcagtgtttatttccttgaattgaatcttctttttataatcatatataaactttggcatcattggaagttagtagggatttaatatcgaaagggcatttaaaacaactaagtaaaatattcgtttaggaaaagacaggtaaagcactgtctataactcttgaactcccctttttgatcatcagacatttcctttctaaatgagtttgtgacttacaagaggggaaatttaaaatttttctttttctaataagaaaagtcatatgtactaattgtagcaatttgatagaagatcacagagaaaaactcctataattctgtcatctatagataatcactaataacatgttaaagtatagccatctagtctttaagcatatgcaaatttatctcttaatattttatttagcttttaaattttctttagtcaggccattgaggaactcgtctgccaaaattcaggaaaaggaaggccatgtttttttttccttcttaatactaatacttactgttcttctaaaaaaaaaattacgttttcacaatataacatgagcattttctgtcattacatacacttctgcaatagtagttctcaactgagagtatacctcagaatcacatctactaaaacagaatttttgggtgtggggcagctcttt

SEQ ID NO: 107578 - DNA, 1458 bp, Homo sapiens
agctttagagcaaaaaaaatcccagagcaggaaggcacctcaaggatcatctgatccagcccctcattttacagatgataaaagtaaggcccagagacagtaaatgactcaaggtcacaaagcaaagagcagcctcaatggacaccaaatccatacttgttgaataataagcaagtcagggaacaaatgaagaactcagttgcttcctctcctgcaatttaacttgatagggttttgaagcattctttctaaatagacagctcagggataggagagagcatttattatcgtggttactcactatagaaacttagctctgaccagattgacaaaacacaggtaattctgtggttcactcacctggacattgaaattacttattatgttcgttatttaaatgtcagttgttttcctcatcctctagctcccctcgctgacgtgtgtgtttgccacctcgatttccgctcactggcctgtccgccatgaagggcccagacttgtgggcttttttcttttgccccttttctttctgttcttcccactttctctctgaagcaaccacaaatctctctctttttattcgtaatttagcaaccatctttccttgttgagcctgtgctgagtctcacttgcagtccaaggagtcatccacttatttcttctaaaaatgcatcttgcttttcctaataggaattgtggttactctgtttttgttcatgtttattattttaaaagaagttatggcaataatgttacaaaatgtccttacaatattgtgatgcagcttcaacatgaacaaatatttccaaaccctgaggattcatttagtaatacaacaaaattctagtatacacactaaattagaccatttgacatggtggtattgaaatttgaactgtatattcaatttccttagtgtgttcatttttgaaagttggttccagatcttccattcctcctctccccctttctgtctgcatttacagctagccccagacaaaattgggaagaaacatggtttgttttcaacatctgcaccaaaatctcataaatcactacttaaaaacttactcatgtaagtgaataccacctctaccccaataactatggataaattaaaataaaaattttagaaaaatcttctgccagtccttcctgagccctgcttcccagatttctcaattctttcctgggccgcatctctgcccttctctgtattaacctccacagtctttaatcctgccttctcttgcaccagtgctctgggcctttcctggaacatgcttttacctcttccctttgtccctcaagcccttcgttctttgttactgtaattctcacttgatatgttatccctcccgggacattttttttttattttaacaggcactgtctggaaacagtgcccaaagtgggagtgacagagatttgagggtactgtggcaggccagtgaaaaa

SEQ ID NO: 107579 - DNA, 1062 bp, Homo sapiens
ggttatgaaaagcaatggcaaaaaccgcaattacttttgcaccaacgtaatatgaacataggaaactatgaaatggcatggttggtgtcaaggccaaaagctgaaagtaatttgatctagaaggaatgtaaagtttgctgaaaagagagaagatataagcaaggactaggtctcagtgattttcttagactaggatcatgagttaagtactgctttggggacatccttaggatcagtagaccttgtctaatttgctgtcaagtgcatgtagtggaagattataggcagcctgaacatctagtctttctagactcaccaaagccctaaagtggtcagtggtagtagcccagctgattttgttgtttatagctgtcttattctcagggaccagagactccatcctatcttcatggaatctcccccgttcacttgtgtggacactagtgtgtcagaaacggtagtgaattaaatggttggtattttgagctccaagacacctggcagggggagtcatgttggaaacaagttttcaagcttctcaaacaagccccttggttcatgtcatagatgtgacttattccagctccccatgggactggtggcttacaatgacaatgaagtattttagtttaagttgtgaggctgagaatgcctcatttgcatgattgaatattccttgtcattattagcataaaggaattgtgctttgtctcttcctttccattaagacaacagttcctgtatttgtttttaaaagtgtgaggggaaaatctgaggagagggctgtcagtgttagatattagaaacactagcgctgatgggtggtgattttcctaatatttccgctgcagtgtcaaaaacggtatttcgctgcctggcacaagctgattcttgatcataggattaagctggggaaagctgggaccctgtctgactggaagattcagctgaaggtcctgcgggcctggagagactacacaagattccagaagttggagcgggagactcaagccttggaaaatgatcttagggaagaaaacaggtatcattatttgtattgtg

SEQ ID NO: 107580 - DNA, 1069 bp, Homo sapiens
ttcaacgtgtctattgggaaacctatcaagttggctcctttgttctttcaacatgcttccatcctattttggacactttcttttttgttggcaccacaagatactttatgcttatcttgtgttttacctgtcctcaccctagaatcaaccacttctacatggaactttgattccttttgttggaaaaacggtctttggaaactaagatctaggcactaagtgtgttcactgctactggagtgtcatttttttctaggccgcctcagcagacagagctaaaatatatataaaatatatatagatatatacatagatatatgtgtgtatgtatgtatgtatactaacatacatatacacacacattatatttatttctgtgtctatctgtatacatattaaaatccatgagttcagcaacacaagggtcatgttattctccttttccttatttgtaactgacttctgtatctatgaatctacatatatatgtatatataaatatatataaaataactgtgaatttataataatattgtcaaggataatccagcaccacaggtttcagtgtagtctttccatctcgctcacttgtaatttctttctctgacactgagaaacctggctctcattatctctattatatttacttattagggtaatcctagtacactataaaaatagttttagaggccgggcacggtggctcaagcctgtaattccagcactttgggaggccaaagcgggcggatcacgaggtcaggagatcgagaccatcctggctaacacggtgaaaccccatctctactaaatatacaaaaaattagccaggcatggtggcgggcgcctgtagtcccagctactcgggaggctgaggcaggagaatggcgtgaacccaggaggcagagcttgcagtgagccgagatcatgccgctgcactccagcctgggcgacagagcgagactccgtctcgataaaaaaaaaaaaaaaaaaaaaaaaatttttagaattgctaacccataccacagtgggaataaattcactaaagcaaaatattgtacggttatttttg

SEQ ID NO: 107581 - DNA, 2615 bp, Homo sapiens
taatagaaatgaataaagggttgtggtgttcctaaaggcaataaatcactgttctatcattcacagtgtggcttccaaaaaagttctgttctttcttaaattagaatgcagacatgacctaagtataataaaagcagtaatgtacaccttggacaatcttacaagtgagaaatcattcctaaatgagaatccagaacttggggtctgactcattagattctcaacttttctgtgatgtggatcattcccagattatttgagtcatcttcatctgacttcatctaaaatgttatattcatctttacccagtaaacagatgaattcctcctttcctaccaataaacagtggagttctgggccagcatatttcaaactggttgtattctgaacttcaaaatgtattgtaaggcttttcatatccctttctacttgaaaggccacacttcatctttattatatttgctttaaggtaaaagaaaatcgcttaagacgtgagaaagaactggagtaccagagaatagaaaagaccctgaaaaaatcggccttcttggaggctcagtgtctggtgcaagaagagaagaaaaggaaggctctggaggccaagaaagaggaagaggagattcaaagggagatggtgaagctgcggagggagataattgagaggagacgcactgtgaaagcagcatggaaaatgtaagccagtgtgataagcactgtggggtttctctgtttaagcagtcattttagaaatgctctgaagtttttgaagtgcacaaacattcaataacaaaacatagaagagaaatcactcactattccaccatcttaacaaattaactaatttcatatttccatgttcctcctgacgtggtccctttccatacttaattatacaaccataaagtacatttaatttgtaattctgcttgttgtaattaacacattgcctggagtcctgggatgtgtataatactccattgagttcctataccataatttatgtaatgaccacctccccatactggtaaatgtttcagctattttggatttttcaccattataagattgcaatgagcatctttaagcatagagttttttcactcttttgtattatattcttagaataaattcttagcataatttctgagttaaatgacacaggtctttttctgactcttgaaacattgccaaattgctttcaaaatgggttgttttgctgatgatacttgtttactgtatcatcagcagcaggccagtttatcatactcttctcagccttagggagtatcatcattttcaatatttttacacttttaataggtattacattgattagtttgcatttctttggttagataatatttttaaggttgaacatgttcagtaattgtgtcttatcctgttgtgaattgtgtgtcttattttctgataaacatatggaaagtcaccactgccttactaccactgataaagaaaaagaatatctgacataagaggaagatgaaaatagtcctcacaggatgtagtactattatccatcctcatgcagaaaatgagcttcataagtgaaataactaatgtatttattctgagaaacagcactgatgcaggaactgcaaaagccttggaacagcatgactgaagtgtctgactactcgaactgagaggccacaaagacctattagataatcccttccacccccatcagcctacacagctttcccccctgtgctcttgattgctcttattctacccagtttaaaacagctcagcagtggacatgtgctttacttcttcaagtgccaggctgaggcttcctccagatgccattcctttcagaaagcaatcactggtgttttagtgagttctttctaaggtcagccttgcttttcatattgctcccaagccctggaaaaactaggttgacctaaaataaattgtgaaaacaagtaacgtttaatggtagtaggatgctctgctcacagtgggcactcaacaaatgttcactgaccagtcatttattttaaaagttaagatcttatccatggttacagtgagataggtaatatgttctacttctgggtggatgaactgatttaaactttccagaaagcaatttggcagtaaacaacaagagccgtaaaatagtattatcccttgacctaggaattacagccttaggaaaactgccctaagaaaattatcagaaatccagacaaagatttgtgcagaaagataatttaaacaacattatttataataacagactttcgtaaatattggagaaattgctaagtcatggctgtacaatgaaacaggactgactttttttctgggtagaaatatggatggcttttatgggcgtggtggcacacacctgtaaccccagctactcgggaggctgaggcaggagaatcgcctgaacccaggaggcagaggttgcagtgagccgagatcatgccactgcactccagcctgagtgacagagtgagtgagactccatcgcaaacagaaaataaaaaaaaaaaaaagaaatatggatgacttttatacttctccagtttttcacaatgagcatatatttcttttaaaatagatatatattctaatgttat

SEQ ID NO: 107582 - DNA, 1040 bp, Homo sapiens
ctcatctcctgctgtctcctcctcacttctctctgaccacactggcctccttgctgtttttccaacactgtagatactcctgcacaggacctctgcatttgctttccctctgcagagaataatattaccttatagatcctcacttctctatctttcttcccttctttgctcaaatatctttttctcagtgaagctttcttttacctcccaatttaaagctacaacacccatcttccatgtcttcctgtccctgccttttctcttatttacttattgtctctcttccccaattggaatgtaagtttcatgatgctagggcttattttttcagttttgttcactgttgtattccagtatctagaacagtacttgacacgataggtactcaattaatatttattgaataaatgaaaacagtgaataaagaaaatctctgaagtaactgaaatacttaacatgtttttgttttattgtagctcaggagctggtcaatgactggttagacaccaaacttaagcaagaattagcaagtgaggaagaaggtgatgctaaaaacactgtgtcaagtgtcactattatgccggaagccaatggccatttgaaatatgacaagtttgatggtaagaacttacctgattgttctaagttttaacatctaatgaatgtgtctaagaagtcttttaattgttttgaataacaaatgatacatatttaagttttctgtgttttttttagtttttattattggttttaatttatcatggttaaatgtaaatttcttatgctatatcttcagtaaattcatggtgttttaaaaattaaaatattctattacagttatccctaactaactgtgaggaattagttccaggaccccctggcccccacagataccaaactcctcagatgttctagtcttgtgcgtatcctctcgcatactttaaatcatctctagacaacttacaatacctaatacagtataaattctatgtaaatagttgttatactgtattttaaaatgtttattattttttattgtt

SEQ ID NO: 107583 - DNA, 1040 bp, Homo sapiens
ttaaggatgtaatgttttaacacaaacaaatatagagattatgtatagtccttagtatcatccagtagttctttctcctcaaatcttcattttaagtgatatcccaaacacttgccttgttaaagccaagcaaacatttgtctttatttccttgtcagtaccagcctctatccttctttatccttcagtctttctcctcttctctcccaacctctctaccctcctctgttaagaacctgtacaaattccaactcaggtaggatgacacataacacataattatttctttcactcaaggcctgaggaactaagtcaagtctacgaatctgtttttgttgctaattttttgtttgtggatttttaaaacactaaagttgatcaatttatttgtacgttatttacatatgtgcatatacgaacacatacagtatatgcaaaattcatctttctgtctcagaatttaggagcctaaaggaaagaccatgtgccaaccatgaatctaatacatgacgtatgctaccaacataaacttgcatgcatcagaggctatcagaaataatatgggaaaataggtctctaccaagtgacttcataaggagtgaatgatattttcttgactctaactctaatgagatcatgttttcttctggctcatgtctttgcctgtatgttctgttttctacatctttttcaaattacccttcacttttcagctttattcctctgcttctgtctgacttaaagctaatgtatgaaacgcacaagaatttggatggaaaagcccatggcaagttttggcagaggttccaccagtctttccataaagggcaggaggaaaagtcattttcagaataggtcaggtgacaatataaatatcggaaagtacagcttttctgaataaagttttcatgtattcattcctttaacaaatatttattggacacctgttgagtgccaagcactgttcttggtgccaggttctccttgagaagaagataagaattcctgccaacattctacctgagggagacaataagtga

SEQ ID NO: 107584 - DNA, 1468 bp, Homo sapiens
agccactgctcccggccaaaacacacctgcatttttggcaaagaagataactctatttgttaagtgactattagagggaattctccaagcttctaggagttacagagagtgaagaaaggaaatgccctgatggttttacttctaatttcagattaatacctgactgatctgggtggaaatttatattttctgctttgtaaaacagtagaagtcagattttttaaccttcagtttttattgggccaaacaagatccctgatctgggtaagatgagaaagcctcttgctacaggctacttatgaaaggagtaaggagaggaacacacccttctttaagctaaagattacttggataatctggctaattaatcagtgctttttttttttaatgagtagctttatatttagcatttctatatcttgactcttaaccctaaggaggtttaaaaaaatagcagtgccagggtcctatcccagaccaattaaatcacaatatcaaggtggacctagacaagaaataaaaacaatcagtgtcccaggaaggcttcatgttttctcctcatactgctattctgtgtcttttattgctaatcatgctgaactttctaatgaaatgctttggggaaataataaaggacactgttccatatgctttagtcagaaggatagatttaaatggcaaagttgataaagatattgctgcgtattgatatcatatatatgttatctacagcctacttttggtcctgacagtgtggaacactggataaaggtaaggatatttcaaatttagaataaaaagagtattaagagtcaagcataatcagatggaaaagaaatatgaatagatctccactttgcacatactctgctatttttattcccgtgtgactatgtaagttgccttaattttatactttttagtattttttttcataattctgttgcctctcatgataccatttaagtaggaatgacaagaaaacaggtgtgtagacttcgtttcaaatgccatgagtatcacatgaagaggattaaaggagttgtgaaaagaagccttgggagaggatatggtggccttcctcagatgttggaaagactgcactgtagttacaatgacctagggactaatgggtgaaaactacgtgtgcatcacaaataagaattttctaatgactagtccatccaaaagtggactgggtgttcttatagagatgtgttttctaccactgaagctattttaatggactctaactggtcacttaatgttaggctaatgaacaatatgtttgaggattcagtgaaggggagattgtgttagataacctctgacatctcttccaggcctgagatatgtatttttgagtctgagtaccatttaatttgaaagtgccattaaatcatttcaggtgtgtgcttctgcgtgtcagtttagcaacttgccatattcaattcatcgtgtaccacat

SEQ ID NO: 107585 - DNA, 1039 bp, Homo sapiens
ggctctgcactggaggcagtgattttggggcagagaattttgcaacacgtggtagtgaactgtgaggagtttgaggggtctgaagactgaaagagtcgaatggtttgttggcaggtaagtgcccctttgccctgctggtgtgggagctgctagagatggatgagtcacgtcgcgtccagacgcttcctggttgtgttgcagtaacggtgattgtactcccgccatgtctcctctgcttcccttttcagggtgtcctggtggattggtttctgtaagttcagattctcataaatcgtgtgagcgtcgccgacacctctgagataaaagggcccctttcgactagcctctgctgaaaggtagagttttcaggaagtttttattccgaactgcccatgggagggtgggaccgtcttcaatctctgagccaggtgcctagggaggtctggggccatggagatggcccatggagcaaagataaatccaggcttattggcttagccgaggtgtttccagagacagcccatttaggggtgataaatgggcttataaagcagagtaaagatttagaacaggagttttgaattcaactactttgtggctatatgaccctaggcaacttgtttaataactcagagaccctgttttctcatgcaaaatggggacgataatacctgaatcactggagtgttgtaatgattaaaaataaatgtatgtgaagcattctgccaggaaatgtaaactaaagttgatttgaaattggtgaaaatgaagttagggaagctatgccctcggactgttgcagcgatcctaggaccagctctgtaactggtctgtctgaaaggcggttgaataaattgtgctcatacaaactatgcagtaccacgaagtagtttttttcaaaagggtaagttagctttatgtctcttcttcaggaaagacgtctaatgtttattcttgagagaaaagcaaattgcagagaagtgcatatattatagtataatatgtttccatttttgtaaaagcaaaccctgaccaaaac

SEQ ID NO: 107586 - DNA, 1048 bp, Homo sapiens
tgctcttttcttcacttaacagcattattaggaaaaaattgctatattgcttagccttccctcaaattggagaaagaaaaaagtggattatatcaataatcagtatggcctaagcagtgttactgttctctgtatacattttcaaggctgagagagccttggcttcatggcattctttccatgattagtctttctaattctgttctttcatttgtttggttttcatcagctcagacaaaaattccatgactaaatttaaaattagttgatgccaatatgtggttctgggaccttagggaagatgtcttattctctttatgtcttttcccattcccccgttcctgatatctatgaaaatatttagactggaagcagtaataagcatgctatcattcattttcctgaagattttttttttttgcaaaatgcttggcctctaggtgttgtgaagctccttctatacttaatgctcttttcttgacaggacctagaagaatcccttaggatgaagctgagtcttaccaaggtagttaatggctgtcgcctaggaaaaataaaaaacctgggcaaaacaggggaccacaccatggatattccaggctgccttctgtataccaagactggctccgccccacacctcacccatcacacgctgcataatatccacggggttcctgccatggctcagcttacgctgtcatccctgtaagtgttagaaccaatgattcaagtatcaactgtggcagcagcttagttaccttaggtgcaaaaaagagaaatatttttttttgttcatatatataaattgtcgattttcataatgaaatcagaagagaggtttcaaatattatacatcttctggccctaatctggaagccacaggccagacctatatgttagatctgcttcacttttcctccaaacctacagtcccatactgccatgtcgccactgctcccaggggtgacagggcggggaatgttctgtgagagctgcatttggagttcaggagctgttatcatgcaccagcctcaaagttttttctgcc

SEQ ID NO: 107587 - DNA, 1382 bp, Homo sapiens
cggccttacttatgcatatttattggtcaaacgtgtagtccctctccataccctttattattgtcttgacatgattattaatagtgcccccccattcttccattttagataataaattatatgatcgtgcttcttacacccaggaaagggagtttcccgaatagtcatgctagtcgtataagcaggcaggcctatgtaactctctgctttgtgtttctgcatacatcttttcccatgattccctccctgtcttattgactggctcctcttattctgaatgcccttcaatattgaagctctccaagattcggtttttggctttcttttcttctccatatattacctgggttagggatggcgaatggtttcaaccgaggtggtcgggtgcagcaagaagagagtcatctgttagtcacatctgctgtggaatcaggagtagagagtggtagcatcatgccaagtgtctgccattctagcctgggcaatcatgtttgtatcacacatagccttatctttaggttcatttaggttcagtggctgaattaagattgccatttggacatcctgctgattcctcaaattcagaacacacagaacagagtaatcatcttgcttcatccactgtttttctaggagtccctgccttttgctcttatcaccatctacctgtacttgcaaaacaggagccaggagtcatttgagactttgtctttatcctctccttggacaactaatcagtcaagttatgttgatcctacttcctgataggtttcaagttttatctttcctcttcatccacactgccactgccttagtccggatcatctcatctttcacctggatcattaaagttgtctgctattccattctttaatcgtactcacccttaatttatttttcacacggcagccaaagtgttctttctagaggaatagtctgattatgtccctcctgcttaaactaaagagtgagattctctcttcacagtgttccaggcctcctctccatccctttcttctactggagagccattgttgatttgtgtattttcttgcaaaacttattttttgcaattacatacacataattaatacatagatatacatggctgtattacatcagtatgatcatatattcagcaatttgcttgtttttcatttagcaatatcctgaaactctttctctataaatgcatatattgctattatctactgcattctttttaaacagctgcgtaggaagccatactgtgtatatattatgatctacgtaagcctttactctatggataaacatttaggttgtttccagtttttcattattctaaacatctttgtaaataaaccttggcacatgtgaatgagtataggagagattgttag

SEQ ID NO: 107588 - DNA, 1032 bp, Homo sapiens
cctgattggtaaagtatgtttttcaaagtatgttcctcagagccttaaaggttcttagggaggagggagcaccatcccctttaatgcttcaactacagcagcttcactgaggtctcttctatacattggacttccatgtaaggttcatttaaacaaaggtctcatactgaaaatggttaaaaacatatcatccttcttacctcaggttcttcagaagagtgtgatcattggagtgattgaaggtggagatgtgatggaagagaggctgaggtcagcacgagagacagccaagcggcctgtgggtggcttccttctggatggttttcaaggaaatccaacaaccctggaggctagactacgcttgctgtcatcagtcactgcagagctgccggaggacaagccaaggccagtgttcggttaggacacaggctggcctcaagggatgcagggaaggagtgctggccgattgtatattaaatagtgtctgtgcataggcatgcctttgatgttttgtttatgtcctttctgggctgagtctgctgaggtgctgaggcagactgtaaggggagtttccatcaaggctgtcctggccttgatttcagaatgtagagtagaggataattgccatttgaattatgttatttgatcctcctaagtgagagcaagtattatactgtttcccctcattcttgtgccaattacaaatattgttgttataatatggtacctggagaccaagtgtaaagtcacatggaatgctggtttaaattgaggaaagttgaggacagatctgggatgactagtgagaagatgagctccaccaacaagaacttaagaagctcttagatttgaggctggtagtgagtggtgtcaatttttgaaattgaggggactgacaacactagtaggattggttcttatgtttccataaattgcaggattcaccttgtgctgataagaaaagacgatctgcaagatttgaagctacaaattctgagtttctgaatgcagctgatatcgtattaggctacc

SEQ ID NO: 107589 - DNA, 1208 bp, Homo sapiens
gggtctccctgactcattgtgttctttgttaacttttttttttcttttttgagatggagtctcgctctgttgcccaggctggagtgcagtggtgcgatcttggctcaccacaacctctgccccctgggttcaagcgattctcctgcctcagcctcccgagtagctgggactacaggcacgcgccaccatgcctggctaatttttgtatttttagtacagacggggtttcgccatattggccaggctggtcttgaactcctgacctcgtgatccgcctgccccggcctcccaaaatgctgggattacaggcatgagccaccacacccggccctttgttaacttttaaccatattgccattttaagcaggtgcacagcactgaacatttgccagtgatgttattaaccactggtaactttaccagcagaatagatagctgaggttgtggatttcttgtattccgtactttctggaatgtcactgtgacttctttcttaggtaccaggaggactttaacccgctggtgagaggatgttcctgttactgctgtaagaatcacactcgggcatacatccaccatctgctggtgaccaatgagctgctggccggagtcctgcttatgatgcacaactttgaacactactttgggtttttccattacatccgggaagcactaaaaagtgacaaactggcacagttgaaagagctcatccacaggcaagcatcttgagatcttgcaaatacaagtctcactcttcacactgagcctgtaccactgttgtaacatgggaagacgtgaagaagaaataatctgagctttaattatttatatttggatataaggtctgcttaaataaagaatctttgtaccaaactgcccacatgagggtgaagagatttcctcaaaagacttaaatgacctggattgatcagagagaattgaactgtgacctttaagacttctagactaattcttttagttgatagagattcatttagtcaaagacaaaagctttaactgtgagggcacagccttgaagtgggagtgatgagattctgagggacccatgaattggattgaggcttgaggggaaatggtgtgagacgaatgggctctggacatatgcctgttgatttgagaagaaatctggctggtttgagggtttcctttagttcaccctcatactctcaggagactcttctggatac

SEQ ID NO: 107590 - DNA, 1016 bp, Homo sapiens
tcctgctcagatatgactcctgggcaattcacttaacttctccatggctgcttcctgctgaataaatagggacaggcataatggataggaatgaatgaacttttaagatactgtctagctctaaaattggaagaacaaaaagttttagattagagtcatagccttaatagccctagttgtcatcctgggagacaggcaacagtagagatatttgagagcctaaagagaggtttggcctgtgggtttttaagtggttattgaattggtatcaggagatcctgaggctggtaggggaaggtaattctttctaagttacctctgtatttttcaagttttctataaggaatacacatacacccacatgcacacaccatagtttttatacaaacagcaataacaaaaccaaaaagatgcccctttttttgtagggataagaaatacatttgttttatacttctatgctatattttgctattcaaaatttagtgggcattacttaacattgtttctaattattttgtggctgctgtatgttttatgtgttgggagcccattgtattaggccgttcttggattgctataaagaaatacctgagactgggtaatttggttttttggttttttggggttttttttgagacggagccttgctctgtcgcccaggctggagtgcagtggcgcgatctcggctctatgcaacctccacctcctgggttcatgccattctcctgcctcagcctcccgagtagctgggactacaggcgcccgccaccatgcctggctaattttttatatttttagtagagatggggtttcaccgtatgagccaggatggtctcgatctcctgacctcatgatccacaagactgggtaatctgtaaagaaaagaggtttaattggctcatggctctgcaggctttacaggaagcatggtactggcatctgcttggtttctggggaggcctccggaagcttatagtcatgacagaaggtgaagggggagcaggcacatcaca

SEQ ID NO: 107591 - DNA, 1066 bp, Homo sapiens
ggaaataaccccagccttcctcataccactggatttccacatcaccttttaacttatgcttgagctcccttttgagaaaaaatatttaaaaacaaattggctatgtaacaaatttgtgtgtgtgtgtgtatatatatatgtatatgcttatatatatatatatatgtatatgcttgagaaagtggtttttcaagatgtatgtgtacagtacacacatggacacgcttcagtcctctgacttcccatgtgctacctcatgtgtttctcttctcatgaggatttgcaatggatagttgtacaacctggggactgtcagtgactcattggtatcagcatatgctaaagaagctcttgaatccaatcttgaaacctgatctcccttcgtcaacattccccaataccaaactggcccgtttacccatacaaatgcacagtaaagggaagaacagcggtatttttcctagccaactgactctatcatttgtttaatgtttgctggtttttttctggttttgttttgttttagagcaggggtgggagtggctgtaacttcacaatcctaatacagtaaatgttttgcatcttccatgttttatgcaaaaacagacatttaaatcaataaataattgtgccctagactgaaggttaatgtttaggagaggaaaaaaattgttggaattttttctacatttttttgtgaagaatcttttttggaaaggaaggatacatatttttgttgtgtaatattttctatttttgaatgcattttattggtacaagactgtttttttggtgaagacattatttaaaaaaaaaaaaagaaaaaaactaatcgaaaagtttgcccttaaggatatgctgcagttttgaggttaaaaaaaaattactgattcaagatgcgtgttaaaagttgggattatattgttgttttttgtaattgttacaagaagaagtttgtacccactgctgtttattttgtttcagatgagtaagtaaagggattgttcttgttttattctttttttagagaaaaaaagctatttatgaaatgtcaaaaacactggac

SEQ ID NO: 107592 - DNA, 1055 bp, Homo sapiens
tatgagcctcctgtctttccaagctgacacctgtcaggagcatcaatagccctaacagtaactaatgcatcaaaataatagacagaaacactatagtatatattcgtgaggataggaagatttttttttcttcttttctccaggaaaagcttgctttgctcccctctccctctgcaacacacacacatacaatgcatttcagaaagtctgcatcttattttacagatatgtagctctagaatttacaaatatagcttaggaaatgttctgagattgaggctggtagcaaacaagtttattttctgcactggacttcaggataagtgtgcatagatgcaattccttcaaagaaagtgaaacatggtagagcaaagggataatactttcacacattcaaacagttgtttgctatctataaaccttgatttaagcataattattactttttagaaatctgaaactggaggaatgtgtattttagtaaggtttttttgttgatttatttgtttccctttctttcttctcaagatagtaaaggatttttatttcttaatttgttactgtccatggacagtcaaataactgctcacccttactgtattattttccccttagaaagaaaagccttccatcctaccatgaaggaatttttcctccaaaaaatcttatcttccatttcaaatagcactcatgagcttttaagagagaaattctctctttactttgaggatagaacagttaaaacaaaaacctgttccttgagaaagaaaccgtatttacctaaactaacaggtctggggccaaagaatagatttttttattgattgcagatgaagaccatgcattttgtactacaaatccttattgcctcctcaaatcctttttggaataaggctgggaataaattagtttaattaaattctttgggtatttctaattaatatctactgcaagatacccaggaaagaaaaggaaggggtgctgccgaaatgccaaaatcaattgatctgttgatttttatcattgtagttgttgcttttctagccatttcaaga

SEQ ID NO: 107593 - DNA, 1034 bp, Homo sapiens
aacagtactagtgactttgtgaaagaatatgagttactatttaggtatgcttacttaactacaatacactacattgcagtatttctgaaacctaggacatacacattatatataacaactctatattgaaatatatattacattatattcattttaacttttgaatctgcctatgatcatgagttgattgaaatattatgtctttgcttatatcacccatcaccaacctgctgcagttaatctggtgcatctagtaataatcattagtgctctaatttgctttttatattatcagcttcagtattgtctttagaggattttagaattttttaaagctcagacttagcaaatgtaggaaagtgaaaactttttttgaaacttttttgttggtgtgactaatacaaagaggttcatattcaaagtgatcttgtttagctgacccactcaatatctgaagaacaaaagaggtgcatatgaatgtatctgtgattttcccctgtaggactgtcactgtctatatttgcttttaaaaatatgaccaaggggctacttaagtgccacatgatctgaccaacaataacaggctgcgtttcaaagggccagtcttctgaaaagcgtaagacagtgaattacctagttgtccccactgtattctcaaacattcattttaatactggatctttacactttcttttttcaatacgcttagaattattttaactagtcttcaacctttccctggaggcagcttggcaatatagtgttcattttcctgggagttgttttttttttttttttttttttttttttccaaaaaaagtaaaaccagagtttcaggaactctttatccacagaggctaatagaaatagaatttggaaatatctatctgagacatttttaaatctgaggaatccgtaaaatggtggctcttgggtatccagccctcaggatctccatttacctgttaaagtgaggatttggtgcctttcttctttagttgggccatcaagaaaacttcagaaatcaggcattc

SEQ ID NO: 107594 - DNA, 2073 bp, Homo sapiens
ttaaacctttacaagaaaaaaggctgtggtgactcagtgttcctataaattcagaatgtggaaactactaatccaaagcatcatttctagcactgagtatcaagacgatcagcctgaccaaaatattgcaaagagttttctaagtctctgaagatttttttctccttgaacactgagtctatagcagtcagcaatgtaccttagccgatccctgggaatggttatggaacagtagggcttgtttccatcctttttagagtgaagagatagaaaattagggctacctagtgtgggttctttttcagaactatgtattttctcctcactgcatgatgggtaaaaatgccctgggttgaaacaagaaacattatctttccacaccactgactaaaacacctgccagtggtttctttaggctccaccttttgctccgtaaactgtagactttcagactgaaatctaatcttaagtgacctcaattaaggtattttcacaaaaggctacttatagtgtagcattattgccttaaatcagaaagccctgggaagaggataaaagatatagaaatgagaaggctctgaagttataggcatttcttgctgtttaatagttacattatcacaaaaacaagccctattcatgattgaggactatggaaatagtgacttcttgaggaggcaccaaactttcctagaactgggtactctcagatagtggctgctatttcctattctatttcagtgacgtaggttggggctgaatgtaaaatagacatcatattactaaatagaatcctataaaatgcaatcacaggtgcccgggagtactagttttaaacatttccttaacaaggagaacaatccagcaaaaagctttctttctctatacagtgtatatctctaaactttttttcctcagttttagagaacatctgttttatctggtggttctttgtttgaatgcaaactcataactttcaagtctccggtgcaagagcataatctacagatcatgggcaaaatctagccacagtcctgagagtccaggcttctgggatgcccagctgggtataaaagtccctactaaccctgtttcaaattcagaggtttctttggtttagaatgcctcaatgagattttgatacatccaagagagaaaaaaaaaaaaaaaaaaaaaaaaaccttgggggcatctgtttctactagtgttgcaacagttgtttttacccagcaaactcattgcaatttatatgtagattctaataatgaaagagtcttaacccatccagtatgtcaccgctgctgtccaaaatgtctataaatgagtatacattatttatacatgtgcacacacagtgtgagcttccctcagcacaaaactgtttcacattcatattgcccagtgacaacaagatacatttttgaacttctggttagaagtcgaaggtctgacatatctcacgtatctgcttatgctttgttgccttagttgggtgcatcagtatctgtgatgagactttagggcattctgaaggagcccaaccatcagtaatttctatgtatccgtttcatgagaaacttgaatatgcttatgtggagtagagtgcatttaacaaactctacagttctattggatttattgacatgtgtgcacatgtgtgtgtttgtgtatatacttattgtcatctggaagtgtgtgtgccccccaaaggaagcacacacaggcagaggtcctcgtgcatagatacagttgcctcttcccaccattgtgtttaagacttgtggctcccttcccaggaagcagtcacctgcccactctgttgctttttgtaatgtttcagaattgggagaaacaaatgcagcttgttgaatccacagcaaacccacagggacaggctgttttcctccataataaggtataacagaagtcttcaactggtgagcagacaagagggagcagcagtccagggcgtctccccaggtctcctggaggtggcaggggtggggaccaatgccaggcaggcaaagcccacacaaactttggcctgagccatcccatagctcaaaggtcttc

SEQ ID NO: 107595 - DNA, 1050 bp, Homo sapiens
atttagatatggtttataaaaaaataatattttctaccactaaaaacactggtattatctcagcatcatgggcaatttttccttattacatgccaatatttgtacaaaaaaggcccccaaatgtgtgaaatataatcctaaaaaagaaaataattggaacacatggatctgttacaattctacacagggggaaacaagctaagcaaagaaaaaaaatctgaaatgaaaatctctgtatcaaaatggtttcctgtatcttttaattgagaggtaaactttagctcctaataacagttttatagaccgttctcttcccaaattcctaatgctttgaatctatttgtgccatgattaagtgtgctggataatttcctgctcatattctagcctcagttcattcctagtcatcttagagatcatagtagctcttggccttagaaagacttgggtttgctgtgtttaaaagtcataagggttttattttgtatcatcaaaatattctataaggtcccaaatactctttttcaacccatgaacagtaagaatttgtgaattctgataatgaaaaaagttttcctccaggtatgtttgtttcacattcagtcctaaagccttgagctatgtgtacttccctcacacaggaacaccagctgtcctgtctgtgctctgcctgcgcccaaaactcaatattttctctcagcacagaagtcaaaaatgagatatgccccttataaaaccccttcgattcctgagaaaacataataaagccatatgttgcttccttgttggggctcctccacaatgctcccaacacctgtgacccctaggaagacagggagcaaggtggatctggccaggagtcacaggatatacacccattctggagctttcctctgttgttctagaagatgttatttgattagttggggctgggagcaggggatatatgattttgtggaaaaggtatcagataatcaaatcaggtctgcctctgctatagccagtgtgctgctgcattaaaagggaacaaaaggaaggtgcaacgtaaga

SEQ ID NO: 107596 - DNA, 1013 bp, Homo sapiens
taaacttgggtggttaactgactattaagtgtaacctattgtgatttctaagaggagtcctgccaagaactgtatgtccaaaactgatctgttttaacagttagtgaggaacagcttccgagataaagtaagttcatttttctattgctaattttgctttttaaaatagcagtgttgtaagactaatatttccacttaccaccaatagagggagcattaattaactatgtcatggaattgttttgatattttggaaaacaagtgattccacccataaaatgaaaagagaagattgaccttaagaaaaaaactcttaaagctaggagacaatgacatgaaatcactcaatacatgttacaaatgaaagaaggccaaaagccactttaaaatattttaaactgtttcacagtagatttgaaagtgtctttgttcaaatttagcaaagtaggaagaattttcactaataccgcctgaaaagttgatcttaggtgccattatgggccacgtgtagctttctgtttctcaaatctgagagagacccatttgccttaatgctgatttgccatgtaaaatgctaagcaattgggttagaatccaccttttcttttggtagaacatgtagagaaaaagctgcaggtgacttgaaaccctgaggagtctatcatcctttccctgtaaaggaagtgtctcttaaaaaaaagggagtgggggaggaggtggaggatccctaaagaattcttaatgaggtgatataatcattgtagtccatgacaaaatggaccagccaggtttgcatagcagtagacatattcctactgtacatttatccttcccaaatatgtcacattctaaaatagttgacaaattattttgtggaaagaggaagaagctggattggagtgggagatctaatctggaggagcaaagaggtagttgtttattgctatgttcctggcccatcaaatggccactttccaaactgacccacattttaggaaataaaccaatctgga

SEQ ID NO: 107597 - DNA, 1136 bp, Homo sapiens
ggtcattcactgacaaggccaggactagagtcctcaggggttgcagtccaccacggactcaggaccactaaatccacaaaggaccatgtgcaactgcctggtccaactcttcacatacagaaaatgaaataaacccagagaaatgaaaacacttaaaaagcccagggtcacatggataattaatggtagaaccaatactacatgcacacaaacaacatacctatatatgctatagagagaaacatgacaactatgaggaatcaatttatagacagattagaagagtgtgaaaataaagtcttcatcagtgaccttgcctcgaggaaaaacacacagaaggtgaaagtttcaaacagcagagcattttaacataggtgaagtttcaacttcttagcagccaaaataccatctggaatttaaggcacgcttcccataaaaggtgacaggtggacatgttttaaatgatagttggccagcctatcatagcctctataaatcgtctgaaagcatgaggatagcaaagaccagctgacttccaggcatgtttacagctgacagaaatgtttcagctaaaaacatgcatgactgtctctcttagggaatctcttacttcaaaaaaaaaaaaggtaccaatgtaaacactatgcatagactgaagtcttcagcaaattgagattattagcaatgaggcttccctaacctttcctgttttaatctaaaagtaaaattatcttctaaccatgtgatcttacgcagcatactgtctggtcagtgtgcttcaaaacatatctgtttatgtttgaaaacacaataacaacaaattcctgatgagagaaagtttaataaaatggatcatgaacatacagcacttaataccaaccctgctacatagtcagcacttaataccaaccttgcttcatagtaagcactcaatacatggtgattgttttcattgctgctattaccataatacatcaaagctctcctatttcataatgggaaaaaatgaaaaacagtcaaggcatatattttaagtggaagttagctcaaattttaaaagacttcttaccttgatgcatagtccaaatgttgaaatattatcctaaggagtttcagaggctttcagttttagtttg

SEQ ID NO: 107598 - DNA, 1031 bp, Homo sapiens
cacgggagcatgctgcgcgcacaccgctgcgtgctggcagccggcagccccttcttccaggacaaactgctgcttggctacagcgacatcgagatcccgtcggtggtgtcagtgcagtcagtgcaaaagctcattgacttcatgtacagcggcgtgctacgggtctcgcagtcggaagctctgcagatcctcacggccgccagcatcctgcagatcaaaacagtcatcgacgagtgcacgcgcatcgtgtcacagaacgtgggcgatgtgttcccggggatccaggactcgggccaggacacgccgcggggcactcccgagtcaggcacgtcaggccagagcagcgacacggagtcgggctacctgcagagccacccacagcacagcgtggacaggatctactcggcactctacgcgtgctccatgcagaatggcagcggcgagcgctctttttacagcggcgcagtggtcagccaccacgagactgcgctcggcctgccccgcgaccaccacatggaagaccccagctggatcacacgcatccatgagcgctcgcagcagatggagcgctacctgtccaccacccccgagaccacgcactgccgcaagcagccccggcctgtgcgcatccagaccctagtgggcaacatccacatcaagcaggagatggaggacgattacgactactacgggcagcaaagggtgcagatcctggaacgcaacgaatccgaggagtgcacggaagacacagaccaggccgagggcaccgagagtgagcccaaaggtgaaagcttcgactcgggcgtcagctcctccataggcaccgagcctgactcggtggagcagcagtttgggcctggggcggcgcgggacagccaggctgaacccacccaacccgagcaggctgcagaagcccccgctgagggtggtccgcagacaaaccagctagaaacaggtgcttcctctccggagagaagcaatgaagtggagatggacagcactgttatcactgtcagcaacagctccgacaa

SEQ ID NO: 107599 - DNA, 1022 bp, Homo sapiens
agagaacttgtcttatataagtaaaaacgatggaatctgtagcctaatacaatattttaggcacataacagacctgatagagtcagaacgagaaagaatgctcttatacaaattagtgcaaattgtattattgaacatttattaagttaagctcataccatgtgagggtgattgagtgaagcaaggtagaaacgctcattgaactcagagtttcctgaacaagtcttctatcgcaaggtagagcggaaagagtttgaggaggtaggccttcttcctatctgcaggctgttacctctcaggtggcttctcacaagacagagagatttgggtccaggccaacaatcagtgcttgggccatttggttttgaaagcccacttatttcactttcccaagctgattgttcagttgtaaaggcaagaatggggaatctgattgaagaattatttggagggggattctctagagccatctgagagatgagctagaaaaatagaaaagccctaagatctactgctgtagccacctgttttctttctcattctgaatccaaatcttatcaatagtatcccttgccataacagcctacgttatagggtggcgctgggtcaggctatccgcagcctccacatagctgttgccttcctcctgggagctgtttaatacttccctgtggcaagtacataaagcaccctattacccaaggagatcatatatcccacttctggcttactcctgctatcctggcctaattattaacaatgctctctttcactcttgaaagtgccctgtttgcataataaatatgatcaccaatgtactgtagtctcctgggtcagaactgccatctctgacctttttaacattcctccttcattaagcctcagaaaattcagaaaaccttccatatcacatgcaaccaccctagaaagtgctcaaacaggttgtcagagatgacaagaagaatgagtagatacagaaagcagccatggagtgcccctttagctagcagattgctttctgt

SEQ ID NO: 107600 - DNA, 1114 bp, Homo sapiens
tacaaaaacctggccattcattcctacaggtggaggaaaggggagataccttctcattaagaaagttttctaattcagtgagaacaagccaaaaatgaatgtcttagtttattacctcaccaaccagtggaaaccaagaaaagtgaactctagtaatcacagaaggcttcacagaaaaggaaaaagtttgaataaggttcatggggatgataagaattggtgaggagagaaaccacaataacttcagaactgcggaaaattcagcagaagagaagtaaaaatgaatgtaatccacacacaggaaagcaaaatggccaaccttttggattagcacagagattttattttagagaaaatcaaatccaaccaaatcagtgaagtgaaatcagataatttgaatgttagctatagctataggagacttctatagctcaatgtcttttttgacaatatgtaaataatataataaatattatacaaaagactatataaagaatatcataaagataaaatgcctacttgtgattaaaataattataaagtatgccttctactttacttatttaccagaacctcccaaggttttgagttctatctgacagcacttattcttcatctcagtatgagccaaaaaggaacttaggtcctattcttttttttaatgatttcccgtgcctggttctataccctaggtgcgcagatgaatttcagctactctcttaacctagcccacacaaatcatctcagtgcttccattttaaccagtcatccaacaaaacagatttacttttttccttggcttttccctgttgctttgggatagaaggtctttactcctcagtgaacttatctatcatggctcaagtccatagagaaattggccgggcacagtggctcacgcctgtaatcccagcactttgggaggccaaggtgggcagatcacaaggtaaggagttcgagaccagcctgaccaacttagtgaaaaccgtctctactaaaaataccaaaaaaaaaaaaaaattagccgagtttggtagcacgcttgtaatcccagctactcaggaggctgaggcaggagaatcacttgaacccaggaggcagaggttgcagtgag

SEQ ID NO: 107601 - DNA, 1020 bp, Homo sapiens
atatacatgtgatagacgcgaccagaacttttacttgcatatttcttccattttgttttcccccaaataaggctcccattgaaagaagtgattttcctccctgtggccgtcctccctacttctgctgtagatccacctattctgatgtctttcttttgttggaagctgatatccatggtgacttaccttcccatgttttataccggcctcatcagactgtctcattttttgtgtctttgccaagatgcacttacgcatgaacagtttttatttatttttcattgaacctttacacatttccaaactgttgtgtgggtgggtttaactttagctccgtaggtagcatcattctgctggggctggacactcacagaggccaatgggctcttccttttccaactcttgccatccaccttccttggcctccccctcccaaccatttgcttcacccgcccaagtctgtgtgattaaaatttttagtacacttggctcattttgaacttttaagcaattttttagagaacaaaacagaagatttttatggcaaactccattaatgccacattaaggctgacattttaattaccccaaagtcaggaaatgcaaagttcaggttcccacagcaacagaaactgtccccttgagtgctggcatcacagcagattctttcattccctgattacacaacactgggtgtggggacattgtttttatccacgtatgtggaaaggagcacagcttttatcctttgatttttttcctgtaactacagttgaggatatgggtctttagcttccctcccaaaaccatctatacgtattatcctggaacggaagactattatagctctacatgtgcacacggacagaattaaagttgctgtgggaacattaactctgatttccggacttccgtgccagtcacatttaaaccataatgttgtaatttttggcatgtaataaatgtgcatttcatgtacacagacagaaagaagcataaaatgtattttaaagagcaatt

SEQ ID NO: 107602 - DNA, 1047 bp, Homo sapiens
gagagccagttagtaaacaatcagctagataaaaagcagtaggtgattgcagtgaaattggaatggaaacacagatgtgagaaaaaatatgaaggaagcagaactgtaagaacttactgatgaattggctttaaggcagaggaaggtgtatagtgaccctgaggtttccaacctggtggtagacaacagtgatagagatatggaccttagagaaagcattggttttaataaaggagttgggctttagcaactttgatcttggctacatctttaaactgaaaatcagaataccagctccttcagggtccatgtagacactcaagatttgggggttactcccatagtcaccattcaaaaatcaattgataaggtcttataatttgttgcttctcttgtattggcttcctccatactgaaaaagatgtctgaaagcctcacctctattctaatctttgccatgccatctctgcctcctgccctctgaagaaacagattttatttcacaacctgttggactgaaaacacagcatactaatcataacaccatattctgcgagggcagatttaactacccagcacaacaaatttaaatacaaaatattctgcataacaagtacattaccatgctcacagaaacaagggaaacatggaaacaaatctacttacaacaaattctgtaccacacatagtcttctacaaataaaataaatgctttttctggtcatgtccacataatgatagaaaaagacacaaatccaagggaattggagaaatgttcaggaactattactaataaaccagtttggctgtggtctagggtctgtgtagtataagctaagtatttgttaatttcatatcagttgcattgtcctggggagaggagacctgagctgactgatagctgtgctgttttacttcctattcctgaccccatataacaattagtaacaattactttctaattcccttcacccttctcttcctcatgtcccaaacacacaatcacaccctaaactccaggacgatgcaccaaatcaaaaatcttag

SEQ ID NO: 107603 - DNA, 1049 bp, Homo sapiens
ccagtgtttctacttggcatgtagggtttttttttttaatctgctcagcaatttggaagtttgcttggaacacagatgagttaagataaaaagctgttttttaaaaaaaaatgcctctagtaagtaaaaatgaagatactatatctgaatgaatgtgaaaagttgtccctttgtatatttttaaagcttcctaaactatccccagttctcagccaaatgcagcctacccagattgtctttaggaaagtagcaattcacagagatttgcagttagccatgtatcaaactacactctctttagtccctgcttacagctccaccattttagaatatggtgagatatgccagagccctaccatctgtttaatgggctaattatgtttaccacatgcctacttcacaggaataccatgagtgaggttgccaaacatcatacaaatatatatgtttgtatatattgatatataaatatacacataaataaaattgtatacatatataaaagcattcagcatttctgagtttcattccatcttttactctcaagatatatcatggcccatcccttaaacccagccaggtgttgtcagagtttgtgaagctgttgatgataagaccgtcagactgagagggatcctctaactgagagatttggaggaagtgaaactcaaattgtatacacattcctatgtcttcgccatttagctatgccccatgttctctctactaaaatgtagacattttagcttcataattaatgcaattaaactttatgacactgtatgttgctatatccaatgactaaacttcttttaagaaacagaggatctcttctcctttattggaaaaaaaaagtcagactgttttaacacaattcctcccgtacatggctacaacttttctcttacataccacagcttctatattgggcttgttcttaaagctaggattttttttttcctcctatgaggacactgcaacccttgaaagtttttctctggtattctctgagtgcttcctagatacctggtttcagtgactccagttat

SEQ ID NO: 107604 - DNA, 1096 bp, Homo sapiens
atcaagaatggatttctggacaaccctgtttaaaataagaagccttgcaataaaagtgcataaatgtttcactctgtgttacacaataatacctcaaaatccactttctggtagttcagatctctgagttacaaccctgagcaaagaagtaactgaagaccttcaagtgtccaaatgagtttcccccaaatcttctaccaaaccctgcattcaagcagtattgtctctacagttcttatttatttgattttctaatccaaagcacattagaaaatacatttagcagagaggatttagaggcgatgggtctgaaaaactgggacagtgacgccagttggctatggcagtggctagtgggctatagctcagtctgtggccgttaggctgagccaagggatgaggccagttctcaccacaagtaagaaaagtgtattcctgtaaaacaggaacaatgaatagtcacaaggatgaccctgtatcatagaaaaaaattaaattacatcaacatactgtgtttaagaaaacaaagatatgtaaaagttttctatgaaaaacatgtgtagaatatattttactgcttaaaaaggcaagtttatgtcattaaaaaacattttaaaatatatggaacattttattcctcaatatagcttgcttttttatatcctttttcagtttgaaaaaatatagggattgttttgtagtagtgactctacaaacctgtctagccaaaactactcagtacaaacaccttagaaggagtacaaacaccttagaaggaaggatgtttattcttgaatattttaagtccaggtctcttaaaataaagatgttctttttcattgatcttagttatataatgtatgttgtcatctcgagtaaggcgcagttgctcatatttagctggtttactttgtaatgcgtcattataagtgaccaaaaacatggtacaggaagttgtttgtgtgttttttcattgcttatgcaacttccaagcagaaaatgttcttgagaccagatggtaaagaacagtcaattgcaagttctattctccagatgtattgatgtttcatgtcttcctgaagccagttcaaacaca

SEQ ID NO: 107605 - DNA, 1108 bp, Homo sapiens
tcccagctacattttttatgagtcaaagccatgttttaagagcttgttatcatccaaactaaaaccctcactaactcgatgtgtccctggatgactccctagtttatttcttcccttccctccactaagtcagttgtctccctatgcaccccaggagtagccattttccacagcggccaccacctctcctccagaaaatgggcggctcaaaatggagcccttcctctcctccggacctcaaatctgccacctgtctgctccattcatcattagttagctatagagcctgatttttctccaaactgtatgtatttaatccctgatttcttcctcacccccacgatgtgacatcctttcagcattttacctgctggaaccagcgctctcttgtttcttttactgtggtcacttgctagagtttgaaggaaaactttttgatgtgaacacatttcagtttttttccaatttacactggagagaggaatgaaggggagagggggctctggccctgttacttcctgtttgtttttgttctggagaatgcagaccatctgtgtctctcagaagctattcttctacagccaccgtgctgaggctgatatttaatttcttagtttttccctcgtttctctctaatgtccttttcctcttccaaaaactcctaagcccctcattaaatctttcttcctgaattttcttatcttaatagtacctctggatacggttctgtccccattaaggccagaatttcaaattaagtaaatgataattggagagagaaaacaggagagaagggaacaaggaatcagtaagcaaacagaaaaaaaaaaagtgggttgactttttaaacatggagttcgctgattctcagagccacttcccatgtcctggcatccattgttcagctgatgtctcacctgttagatggaccttgtctttctcagaagaaacatctgctggatgttgggtctctctctgagttgcctgagaaggtccctccctaatttatttttcctgccacccagacttcgataaaggctatactttctcatgataatcaagatggttattttctagaactagtagagatattctccctcttctgaga

SEQ ID NO: 107606 - DNA, 1059 bp, Homo sapiens
acatgatttgatgacaagaagctactgcacacacagtttagatatcaaggcaaatgaagagcaagacttcatatcgctttaacaggttaaattagtcatcttaagctgttaatacatcaggctactgggcagaaaacagcagcagtgtggtagcagagcttcagaagtagataatcctaaattcaaatcccaaatctgccatttaccagctgtgtgacctttgttaatttacttttcgtctctgaacttccctgatccttacttctctcatctgtaatatggagatgataatagttgctgcagagaaggagtggcataatacagcttaggtaatgtgacatatgtgactgcaggttcaagaatttgtgcaccttctggccccagcaggcttaatatcagcactatagttagtccctactttcttacaagcatgtgattataagaaaagcccctctggttcaggcttatggtcctttcagttcagcattcattttctgatcacagggacaggaaactgttatataagacacaattgtccttgttgctaacttaaagaattagagttattttcctccagatagcctagtttctctgaataacccactatggacttatccatgaatttagctaaacctttgtgatactatttatgtcatcgacctttaatgaattttataagttgattgcctactgtgtaaagtagttctttagtttgtcataaattgtttcttttgaaaagtagtaagatgacttccagttcacgtatactagaatttgaaaaagaaatccatagtcagtttcccagaccttttgtttctttatagacatttaccatatccttgcctggattttatcattataaatagaaatcttcatcttatgtcatgattattttaattaatactgaacgttctcctattctttttatttatttattttttgaagtacttcatccagaaagtatcccacccatgagttgccgttaccttttactagagctgatcgtaatttaactctccccttcctctatcaaaattacactctatgctctgggctcaa

SEQ ID NO: 107607 - DNA, 1052 bp, Homo sapiens
aaggaaccctgcaggatcgtctcagtcagtattcaaattttgtgtattgggaaaaggagacctagaagacagatgtggtcgaagtaagcagagacaacgtgtagaagaaataggacttcaagtgccccttcacctctgctatgctgcctcagtgggggacttgtccagtcatctcttgcaaatgtcatgatttaagcaaagaacagctaaatttgtagagggccaggctgacacaaactggcttttgtaaatccattgccaagagtaagggagaaggcgatattaaaatctctatcactgcttcagctgtaaacagggtggtcagctgaagaattaatggtttttcaaatttcagagcgacaccttgttgcctactaagtatcagaatcacgtgcataagagggcattcagatacacagctacacaattatgtaatggttttcaacttggtccttaatatggagggaaaattctagggatgtctgccaaattaaaataattaaaattgaacctagacttaattgatttaaaaaaagaaagaaagaaagaaactgaagaatccttcactctgtcctaaactgagaggccggtttgctttacaccttgaccagctttcttcagaatgacagtaaaaggacttggtcaatgccatggtacaaaagatgtgccatgccttgcttactagatatttttaaattgcttcttttctttaggaagacctcctaagtttcacctaagtaaagaccgtaaacttgagcccatgcaaactacaactgtaagatcgtgcaggggatggaggttctgtgcaattgtgacacgttaaacggggctcccctgcataatgtgatccctgtctttaggaatagcgctttgctcccatgttaatacattctggaaattgctcaagaggcagctttggcattagaatagcaactttcaaagcagtgaacgtcagcacttctatttctccttctttttggcgtgcattacatgaagctggaaggactaattggctaaatgaagggactcagtgtcgcagagttgaaatcctg

SEQ ID NO: 107608 - DNA, 1088 bp, Homo sapiens
aataacttgagacatgtaagggtagagatataacattaaatgtatgggtttagcaagcagagcaacatacaaagtggactctgagtatgtatggatcttgccagtccttcaaggtttcagtggatagcaagaaaacgaaaaagaggtagatcacatgaacatggcagaagagagactgacagcagggtgtgctcaagtcagaaggaatgttacattttaatcagccagaagttccatttatttgagaataagctggtatttgtgaggggaacaaggtcacatttagtagaactgataattcaataaaggattttgactttgccagagtaatggtgttggcatcaagagaagaaagttttgcagatttctgtgtgtgcacttgctgttactggtgttcctggtgggtggctgaatcatcctgatggcattcaacaggaaccagctgctgagaatattaaaatgcaagcatttattcctctagagagacagtagcatctgcaaagttttcctatcttgatagtacagataatcccagggagcattctctagtagttttcactctctattcatttatacattttctttttatcattagcattaatatctcaagttctaaatgaagagaagagtgcctgagtcctgagtccacaacaggctgtagagatggatagttaacacttggccaagaacttggtattgcctcttgggctttaccttgaattgttatctaaaagggggaaactgacatttccctcccttggcctgtcttcaaagcaaagagtcatccatactcctagtcttcagcgagctccatcagtgtaaatcctgcccccaacaacccccaccaaacacgagctttggagcttttcactttacttataaaatttgtaaatttgttgctttccttgtgtgtttgtattttatttgtttgtttggtttattttgttttgttggtggttttttttgttttggttttggtttggattttttgagctaccatcaacagttaggggaaagggagttacaaaaaggaggtttggactctgtaatcttccaggtctttccatctctaatatttatgaataatg

SEQ ID NO: 107609 - DNA, 1053 bp, Homo sapiens
gaagtggaagaaaccagaccctcagggtttctatttctatgccagtaacctcacctcggatgtggcagggacaaatatgtgtgatgaggataaggcattctgaggaatgaaggaaaatgcacccaaatgcattgtactccctagagactctggagttaacactgctgcccagacctccatagccttgtatctcacattttttctccctctatcgccaccaaaaaataaataacaagaaaagttttgagaaattgtagtcagaagatcttttggaaagaagtatttctttgtagaaatattcctgtacagattggtatattttactatcttatcaaagtatgagttctaatgagacattgatgattcaacaggtttataacattacaaactggaacaatccttgtttcctaagcacacaccacattttcccatccatgttccttttctcctagtattcccaaatagaaacacattctgcctcctttatttctacaacactttgtatcttttaatgagccttgccatatttcattttatatgcaagctatttatgtatttatttgtaatgtaaagaacaggtctacataattttaggcaatgtacttaattttactgggcctcacgttccacgtctgtaaagagaaaaacgatatctgccttcctaggatactataagaattccatgaaatgtagtatataaagtgcttagcagaatgactagctcaaggttatcactcatcattgttgttattgttattgctactattacttattaatattcccctgcctctgattctttcccatttatatacttctcgaggtcatagattgacctaattcattgtcttctcatgcaatgaacacaatgatttttgtgtaacaggaacctaataaaaatatattgaatctttttataaaagtccatattggacctattatttccctacaaagatccttaaatcctgtcctggaagtttaaaatagtggtggttatggccagtgcctgacccacatacattgtaaaatgcagtggtgttgcttgctgtggactgt

SEQ ID NO: 107610 - DNA, 1008 bp, Homo sapiens
aagtagtgtgttagtaaggtgcctttgtggaagccaaaatattttcagcaataactgaaaatagatttccagtatctgttttaatgggggaagagctacttgtttatttctttttaaattaattgaaatgaataattgccacagaatttttgtcagtgttacattgttttcagtaccaatagaataagtttgatcatgtctcttcctggtaccaagtggagaaatatatgtacactgtatgtaataaattatcttccttagtggaatgtcttctcacagattggagatattactgaatatctcttgttaaatcttgataagatcatttggccaaagtagaactggtcttggctttagtaccaaaagaaatagcatttttaaaagacttggatttcctttgcataccacgtgtctgagtttgatacagtccaggaaaatagagaggatgagatgaaattattcctaagcagccgccgtaggccaaacactgaaacagtgccaacctggaccaatcaggccggcttctcagaagatacatgcttttgtcaaacacttacatgaagaaagagagagaggaagttcgtgaaactgtatttgtatgaatattcttcactgatttcaataaagtccagggtaataaattcgatgatttttattcttttgtaaagcagaaaatctgagtttttctgggcagctaaggttctctaaatgttgtactgtgacatcttttaaacaaaactatcctttcgaatttaagcagtgcaaaacttctcacaaagagcaaagagtaaaattgatggaaactcagaatcaattccaaacccatttctggcatgatgagaataacatttgtgctgtgtttaaagtagtttaaaacaagaaaatgataaaatgatcaatatacttaaagccaaaaataaccaggagagaacaatctgtaatccattctcagtctgaaaccccacactacttatttattgaacatgaaaataaacaactatatatttt

SEQ ID NO: 107611 - DNA, 1062 bp, Homo sapiens
tgatttgtatgatctttcgcagaggcaccttctgtgagtctactcagttttccagaagggaaaaaggcgagagctgagtttagacctggacacctttctaaatatcatagagcaaaagtaaattgccccattaaggcttgcacattacacttagggtaagtactgttcaactttccttttttataggagttgcctgccttaacttttcagcttaatacgagcagcgtaaattaagaaaaaaaattaactcaatcagttatttcactgaaatagaaaatttgcagattttaaagggtatctattgtgcataaatttggggatacgagaatttgccagtgaaatgatagcagctctgtgcttacagagcaaagatgtgctagtctgaacatgcctgatctcatctggaatcgaaagctaaatctaggtgggcctgtaataataccagaaaaggaacacatgtatcttttgtgcaacctttttttttttttttttttaaagctaggcttccaaagggaatgacaaagaagcaggttctcctcttgcttaataagtagtcatagtttgcctctggagatatgtatttccagttgttttagttgttttgttttgttttgttttgttgttgtcatcgctatcgaagaatattctttcctgtcagtgattattaacactttccgtttttcagaatgctttaactctgtttgatgtttcctcacttggttacctttctcaagtctgcgatgaccctctcaggctttgccattcttatcgattcttaccagaatgtacttactcattagctgttttgttatagttatggtggagataatcttgtttttcaggcttttataactaaccaaacaaattaccttttgaggtgaaatttctcatagttatccttgacacagaactgaacttgtcttgaaaaggcttgaagaaaatccaattagccgttttttgagaactgaatattctaataaatgcaaatggattattttacaaaatacttattgatgtgcaatgcttttctaatctgtttttcttttcgtgctttaaaacaga

SEQ ID NO: 107612 - DNA, 1042 bp, Homo sapiens
gatctcacaagtttttgcatccatctgtttaaaaggtaccacttgtgtcacttgtcagttattaagaaaaggtagtaagggagcagatatttgtattttatttttgtttctaattatgtaaatgacaaaacccccagagagatttcttgccccttctatgatacactagttcatgcaaaatatagtctagatggagattttgtcaacgattctgattgccacgtagctttgtgttctccatttcaatttttgcctatgcatgtatatttttaccatgaatttgtgttgtagcaaacatttcagaatgcttatcattttcaaattaatgctccaacaaaagcaaaaagaaatcagatgtgagctgtatgtgtaaaatgtagtaaacaattttatcttttatatatgctgtacatttatatctttatgctaatatcctggatttgtaaacccaagataatgttttctttcttaaagttctcctcttaatgcatttatatgttgattgtcacttagaaatctttttaaggtacattatagacacgaaactaaacaaggggaacaattctcaagctctacaaaaatccttaaatatatattatgtaccattcctaactacagataactgttttgctaagtagaaaacagctacaacagttgtttcaagaatcagaaactcttttctttttttttctattaactgaaaataaaatctattcatatccctggggagggaaaatgtaggggaaaatatagatatatacattttccataattatagaatgcatttatgtaactgcttcttaagggtgtaatacatatcagggcagagtgtgatgctcatcaaaaaaccctcctggctgggaggtgtgagtgccttatgtttgaagtaacttgataacaaggagtcttttcgggaaaccttactatgtatgtgttgcctcagtaatgatcctcagataaaaaacaagtactaggtggccagtgttagcacttgaactcactgaaagatattagaagtaggggaacttttggcaaatccaga

SEQ ID NO: 107613 - DNA, 1064 bp, Homo sapiens
ctagttatttaccatctctaagcctctgttttctcacacgcaaaatgggagtagtgtaaaaattaaatatgatatatagataggatgaagaatattaagagttcaatgcatggagttattattgttaatattatttattatctttactcccctcaacaacttcaattgggattctcccctgattctaccttggagaacctttcttgagtgttgtatgctggtcaggactagtttcctggatgtgaccttttcagcattttatacacaaaataatgtcagacactacatattttctgaacaaagacttaggacataattttataaatacatgcatatttatggggataataaaagacaagatttgaaaccaggtctgctccaggagatcagagacttaatctcctatatctaaccttaggatgtgaattctatacactggacaaagatgaattttagagtcgtaaggtaatactgataattaagaatatgatagctctgataaccaattgtattaagaaaggatggtcaattacacaaagaaaagatgttagtatttcaggaaggagtttttttcttctaaaggagaaagcagagccgttggagtcatatctgggtttgcatgcaaattctaccacttaaaatccatggacaaaaagacactaactaaatcaccttggtaaaagcattaaatttatttgagtttcaatttccttatcagtaacagattaatgacacccaacttgtagacttattatgaagattagaaataatgcataaaattctggtatattgttaggtctaaataaatatatttcctggaaattgagagccaggtttctcttcaagatgaaaaaggagctgaaattatgcctgtcttccacatataaccaagatctatatttaaaagcaaataaaaaactaactactataaaacatggaaataaacattttccacatttacatttttaaccctaatttttccactaagtatattcagataggcaggttaaatataaattaagtactttttcaacatcagtttctaaaacagaaactttcaaagg

SEQ ID NO: 107614 - DNA, 1083 bp, Homo sapiens
gaatgttattttatggtttccaagcttctcaattaaccatttggtccttattctataagattatttgcttctgtgtttctttaccctctgactgctatatctttagttctcatgccttcttttcgtagtttttatttttcttctttagctattaagttactttctgttgtgcaagtctctaagatcctcattccttctctgatgcattatttctaatcttctttagacaataaaacaaaaaaacatgttttgattgtgtgtaaagtacatacatgaactcattcacttgacaaatattgtgagtcgtgcacttgtatacttggcactggagaggatacacagataagacatgtcttgccctagaagttttaatctagcaacggagctgagacatgtgtctactttgctagaattaatagtgaaaagtgaaatgctctataaaagtagtacagataaggtattcttggagctcagaggagggctaactgagggcttcatcagaaaagatgacactggatttgggctttgaaaaacaagcaggatttgagcatacagagatagaaggaaagaacattactctatcatgagaaaagcatggaagaatcaaagggtaaagattctgcaaagaagtaattgagtttaacttgagcatggaatgtgtgaagataagtagtgggaaataaagcggtaaaagtatattgggaccagaaagtgaaaggacttgattattagggcaaggaatttggactttattcaggagacagtggggagctattgaaagtttttagtaggagagtaacataatcagagctgtgcctcaggaagattaatctggcaacagtgagtaaaatggattggagtagggagagaccagaggacacaagatcaggcaggagactattacaatagtccaggtgaaaggcaatgaaggcactaactagggcaggggcagagggaatgaacagagatggcaaactgatttatgaaatgtggcgggagaattaatccattatatttggggagcaagggagaggaagacaccaaacacatctctatgattttgaaccttagtagagtcataaa

SEQ ID NO: 107615 - DNA, 1036 bp, Homo sapiens
ccttgcatctggctttctcctgtaaaccttttgccaaatagaaaatagagaattaaaaactcccaaattcaagatgcatgaaatgtcattaaatctagtacaaatttttttgaatctgtcagataaaggaaatcatgtatccagagtaaagatggaatatcagttgacaggcacttaattttgagagacatataaatctaaaaatctaatagtgcctcatcctttgaaaacactggaaaccagaaaggtattaggaaaatcaataaggtaaaaatcatcatcctactatttggaatgactcccacataagaattaattaacgcaatacttctagaacgttaaagggatgttaaaacattatctctaccgatagaaaacaaacatataaacccatctaacttttagacagagtagttaaggaaaaaagattggaaatattaattaagattggaaataagaggtcatttctgtcctgttgtcacaccatttaccctcttcagctagaaggataagtgtcaaacttcagttcatccaaattcctcagctctgtcatcagtgcagtgacacattctaattttctgactcatttgtgatgaataatctctcccttttctattcacaatgctgaaagtaaccaattttggtgtgagttatgattacttattttccctttttttcaattgcactattattgttttctcttagcagaatttgtctcactctttatcacccagtgtgaatctcatgttcagaaaagcccatggacagtaatagtgcctaggcttggagttagtcaagaggaatgagagtctgacgacccagattctgtttttaacccagccagatacctcagctggcaagtggttcagcttcctcaccataaaatgggtataataatagctttcgcttaccactgtgaaatatttagaatgcaaatcaagccaaacctgtctgcttccaaagagaagcttaaactagcctgcgtaatcctgaatgagcccagattcaaggggaaacataaagtgggaaactccta

SEQ ID NO: 107616 - DNA, 1115 bp, Homo sapiens
gagaaagctccctctcaggacagctctcctggttctcttcaggctgataatggaactctggtatgatggaagggtatgaaagtctttttctaaatgctgtatgtcttgccttttttgtatatttgtgtaaagaaattcatagtagtaattctctgacactgagttaaaagaagtcttatttttaatctgtcttcacttatctagtcctcaaacttaggctaaaatctcaaatggactataaaagcactacaggatttagaacttaattagataatttagataagggacaagaaagaaagaaaaggagagtttaatgtttctaaattgatgtcatctaccaagagctggaacacaggaggaagaaggtttgacttgaaagggcaaggagtgcttttggtttgggacttgaatttaaggtggcacaaaatatttagattttcttaaaatgcccaggatactataggcaatacaggttttgaagctccgaagaaaggtctgggctaaagatcaagagtcgggagttatttgtgaggaagtagtaggtaaagccataagactagataagatgactcaaggaaaaattatgagagaaagaaaaactcagagcagaacactaggaaattctaatacttaaagaatagatgagaaagaggagccaaacaaaagaggagagaaaactagagatagagaatagggaaattaggccagtattattaaggaaaccagggatgaagtatttcagggaggggcagtgatgagaattaaaaaataaaactgaaaatgtccaataaacttgactcaaaagaggtcagccatgacactgagagtaaagtatcaaaagggcgatgatcattttgagacagtagttaatacctgtaatttcataggtggtaatgatgttaaaaaccctatgtaactaaaagcacttcttttaaattacctagttcttagatttctcaagttagctcttcacttgtccctccctttagtattattttaacttttcaaaatgtagtcacacattgctcaacaaagggaatacattctgagaaatgcatcattaggcaatttcatcgttgtgtgaacaatatagagtgtacttacacaaacctaga

SEQ ID NO: 107617 - DNA, 1046 bp, Homo sapiens
gtaagagcaaattttcaggagagggcaggtgtttcccttacatttgcatgacaacatcttactgggaatgagcagtactggatatgagaactaagaatttcacttctttttttttctctaaatgtggcagaaaaggttttgttggggtgagataagcattttccatgaaacaatgcagtagtgacattaggtaattacgtggtgactgggacacaccgcatggtatactggagaaattgcatgatacctacatgataactgtagtaactttagttatcgctaccgtattatctcctgataactatataattagtttgtgtcatcaaagcaccctaaacgtatgcctgttccagctactctggtagaaaaaagaaaataaactttttgcaaggggggagaaaaagctaatgaagaaagttgccaagaacagatattttgtaatctgtgctaaatctctgctggaaaacatgaacagtaatgaagctgagaagacagtaaaagaaattcggggcaaggtgccagacgcccagacggaaggagaatgtggaccaaaagattgcgacaatcgggtaattatggtttatgaatttcagctttaatctgtagttcagtgagtcctgattaaatatctgttaaacacaattaaagtttgtttttgtatttcaccgtcttgatcagaataattagagactgcgtgtttcatgtcaaaagtagcaagaggaattttagtgaatgaacatcgtttttaaaagccatttgtagcaccagctgttggcattattttatattttagtgttatcagcataaagatggtcctctggatgctgaatagtttccagcaggacaaggatgttatgctgttatgatgggcatgtgctgatgaggcttaaatgtttaagggttagtgttcattggaaacaatggacaagggagatgtaggtcaggcaagcagatattttaggtaagagaaggaagacatttgagttaactttacccatgcaaggcgtgacataagggaatttctcatggtatagtcattggtgtta

SEQ ID NO: 107618 - DNA, 1066 bp, Homo sapiens
ctgtgggagctctctttttaaatacacattaggggatagataatggcaaacaaaaaaaagtctttcttcctattcagatggatagctatcagtgtgtgtatgtctttttaatatttatttatttgcttatttgatcatttatttgtctatttattgtaaggaaattaacaaaggaaagaagaaaaacacctcatgataaattaatctcattagatacgtagaattttagggctagaaaggagtttgatgatcaagctatgactttatatcacactcactttagaaatgtgaatgtatgtgaattttgagacccaaagatgtttaatcagatgaaccaagatgcgcaataggattgtggcagagctcggcctaaaactttcatttcaggcaatactccctcagagattacattacattttttaaagctttattttaaacaaagacagtctcattttaataatttgcactgatgtgcttaaatctaatagaacatttgctattatagtaactgagacctcacattggttacaccaactaaggaatatacatttcaacagtttgaagacatttctttctaagccgtttcttatttgcatagggtaaggaaccttagttagttcaattaatttttatcttttgtaagatttcaaagaaacacttgcaccgttcctatttacctaaaaacatgttttttaaatgaatctgtttctttaataagtattcacttaagtaggtcatactgtaacgttcttggtgataaaaaatcttttatcaggataaaagaaatcttatttttattcccacttttagccatgtttgagttggtccttgtaattgttggtttcaacaaaacactaagtcaaaaaatcaatgtttgtgtttatttttgtttaatacatgagaaaaaagtccattgatctttttgcagttatgatacataaatactgtatttttcacttatgcgaaacttaatttttgagggtttcctttttgtttcatttctctgtttcacatttttcaaacatctgtaccatggttagtggttagagtagcagtggctggcact

SEQ ID NO: 107619 - DNA, 1054 bp, Homo sapiens
tccccagtgcattaaagtaggaataggtcaggcctggagaaaggaatgacatcttgatgaaactcagctttctcagaggcctaacaaggatggcaatacagatagagctagaatcttctcactggcccttttgtatcaaattagtgaattcctgtatttccagactgaaatgttttccagtaagcaagagagaaaaggcttctggaggcagtggaaatgactttcgttcttctatggttaagagtacatgggctttggaacaatggaaaactggtttcaaatctctgcagcttacatatttatggtgtgaagtacttaactccctacattttagttctcacatctgaaaaaatattgagcatgcatatgccatagaattattgtaatgattaaattacacatgtaaattgtataatacacatagtgtctggcacaggatcattcacaataaaatttttattcaatgagtactattatcgctttctgtaacattctctagtagccctttctaagctctgcttcactttacatcattacttttgtctagtccttgacattccacctgttccggctttgacttgcttccccagatagtgtacatctgtgtctgcttcaaagcctcattctgttatgttctttaagagttatacctagaattgggccaggcacggtggctcacacctgtaatcccagcactttgagaggccgaggtgggcagatcacctgtagtcaggagttcgagaccagcctgtccaacatggtgaaaccccgtctctactaaaaatacaaaaattagccgggtgtggtggtgggtgcctgtagtcccagctgctcaggaggctgaggcaggagaatcgcttgaacccgggagatggaggttgccgtgagccaagatcacaccattgcactccagcctgggtgacaagagtgagacttcatctcaaaaaaaaaaaaaaaaaaaaaaaagggagttatacctagagttatgtataaattcagtaccaacaatgggcaaaaatgtaaaattgtagaaagaataaatgatgtttagaga

SEQ ID NO: 107620 - DNA, 1033 bp, Homo sapiens
gttctgatttcagataatactgaatacaaacatcttagagagacagaattatcaaacccctccaaacaaatttaaatttaacattttggaaaaaaattctcaaggaagagtcaaaaacattgactttttttatcttggaaaaaggaatgttaaggtagagcgctaatagtagctgttaagcaagtgatgagaagtgggaaacaaggctttctctcttttcttcactgaggtctgataatgacaaaatatgctgcaacagaaaatcttaaggtttgataatgagataggttattaatagtgagtgctaaacactgaaagggaagttgtgagattatcctctatgaagctctttaaccagtatagagtcatatctttctggaatggtctgcatgtgtcagcgagaagggaagaaatgacttctctaagtggttcacattttccaggcactttctccttacctttctttttcttaaagccacagttactcagaagcaaaaaaactgccaaaagttaccaggacttccaaatgtgcttgacgagggtgaaagcaatagaaatgccaccaacattttaatggagattaaaggatcactcttaaattaccatcatttcctataataactcatttactacaaacttgaaattgtggatacagctgctgaaatttttatttatttatttatttttatttttgtttattttttatttatttttattttttattaaataaattaataaataaatttatttatttatttttattttttgagacggagtctcagtctttcgcccaggctgcaggctggagtgcagtggcaccatctcagcttcactgcaacctccgcctcccaagttcaagcgattcacttgcctcagcctcctgctgggataacaggtgcccaccatcatgactggctaatttttgtatttttagtagagacggggtttcaccatgttggccgttcttggtctcaaactcctgacctcaggtgatccgcccgcctcgccctcccaaaatgctgggattacaagc

SEQ ID NO: 107621 - DNA, 1902 bp, Homo sapiens
cactgattacagtgtctgagattttactgcaatttccatttgagttaaaactgattttgtcttcaaaataaaagcctttaaagacagggaaaataattatttttcccatggcaggaaatctaaatcctttcattttatctcctaacataaaaaagaaaagtactaagaaattactgaaaagttgatgcaaaaacaaaacctctattgaatatttgagctatggaactttattctccaagtatatacctgctaaagtcccatgtatccaaaacagagagagccagatgtagaaaaataacttacaccaaggctttttgtgatgctagtaaaaaggcagctagggctttgtgaaaccatgttgctgcaggttaaaaaccaaaacagaaaacttacccatgtgcttttgaattggaagaagaattttgtttgtgtgccttggcatgatcgctttatgtaaaacgtggagattgtacaactctagtatagaacagtaaatgcacaaacaagccatattctaaccttgaaagtgtgactgctttcaatggcacagtgtatcaaggtcaagagaagctgccctcagcagatggaaaactttcaaagtaaaaaagcttcctttacgtttaaaatatattgagttacacatgatttctaaggaatacttggtcgttctagttataaccatggctcacttttgttatcatgtgtcaagtaactgactcgtatattttcctggcagatgttttctgtggaaaggcaggaaaagagaggtgaaggaagaaggcatcccttaatatcgtgcaataaacccactaggggtcactactttcagtaggactgtggagaagaaaatgtcagaggacacatttgtgtcttggcataaaatagatttcatgacaccttgacttttcaccttttatgcatatggagaactgcttagaaggctccaatgcttatctgtgcctgtgggcctttatatatatatatatttttttaatttgctttaggattgagtcgggaagtatttatatttgaactgtattttgctcagaaatagtttgttgaagctattctgtaacatgtatctcccttaacttttaaaataccatgcaatgaaatgattaaaagtgtttgagtgctttggtaatgcaatgcattcagaaggcttgatctcacatcctgtgtaaggagttatgattgagctttagagatgagatgccacatgctttcatgtcagtgttatggaagtgattttcttctttcttgtttctttcctgcctctcattctgtgttctttctctcctcttgctcttcctctctctcagtttcatgaaaattcatttatctgtgacatttaaagactctgtctgagaggtgtctggagctgtggccggctgtgtacatcaatagtttcttagaatctggcactctgtcaatatttgggggcctcgataaccgcacttaaatgcagagcctgccagccatcatgctcttagtgaatgaatggatattagcatgtcaaatcctttcacaactggcaacacttggtagacaatatataggcatcttgcatttgccttctacacctttctgtttgcctgcctcatttatatgatgtcatgtttcccattacgtataaaaataggaatcttcaaaaagcagtattataaaaattgaagtaaatgacatcattgtgcattctaagtttggtgggttttatagtatacatggtgatggcatataggcagtactttttaagattatattctaggtagttttcgtttgtttgattttgtttgtatttttgcttaggttatgatatttgggccaaaattgttgttgctgttttatagtagaaatatatatatggctctaaggccattgagaccttctaggtgaagtctc

SEQ ID NO: 107622 - DNA, 1051 bp, Homo sapiens
gtcattgctcctccatctcatgcttgtaagatggcatagaccattcttttcttcaaaattcaattttcctcaagattgtggaattgttgcaaaagaagtgacaggaatatttttgtttcttggttagttttcttgttatccatttaatagaagtctaactgaaagacacccagaagtgagctcatcttagatggtgtttctgactgtgcctttctaaatggtaagtggaagagcagaagagttttgtctcagaccaaatttgtaaggaaatagactgatttatcagagagatgaggcgatgtgaaaggtcttatttctgcctgtcaaaaaggtataagacagatgtttcactaggcaggacaaagactggactcaaatatggtggtttcttttcctgtttatttatgtttggtttactttttaaaaatcattattattgttaatatctctgtaatgcaaacatggcagacctgtttttctaaagatcacttccagtagagtagaaattagtaatctgatcaaccagattgacagacaatgaaataaaagtaaaaaaagaaaccctctgttacatgactaagcatatgcttttatttttgaacacattagaattgatacttgggaattacaggttggtgcttctgtgggaatgggctagttaacagccctatttgactttttgctaatcctgaaaactgagtaaatgtatcttaagctattttaaaggaacataggagtttatggtttgctatgagagtctgcacctgcttaagacacaccacagaaacattaaaatgggatgattcattaggaatgaagaaatgtttagctattgtacaaagttttctccagaacagtgtttcccaaacatccctgaactaagaatcatcagggtcacccttgaaatatgcacattcctgagtctaccataaacctagagaataagaaattttcacgaaggggccttggcatttggatctgaaacaagaaactagtcaattggtatgattagggaagtttgggaaatattgttctaaaagatttcttagag

SEQ ID NO: 107623 - DNA, 1109 bp, Homo sapiens
ttatggtatttgagtgagtgtctttcactacttacttacccatagctccttctagataggaccaagctttacttttcccttcatcttctcgtttcagcaaaatgtatatgccccacagtagaccaccagtacacatctttggactctcctgatttcatggatgttgaatagggacaaccctttttgagttttctatcttgagttctgagtttctaatgtggaaaatacctcttaaatgccaacctctcctgccttcctaaccagtcaaccccagttacgtacaaggcctaattttgccctgcagttgggatgaaaaatgtgaaattgacagctctgcttgtcaaacctgtctgtctgcactacacagctcagagtagcaccatttagagaaagggtgtttggaaaattaaacaaggactgtgtgaataggagacctatcggcctgcaatggaatgacaggtttctgcccacaaactggggttaagacctgcatattgatgcttcttttcacccatttgtgagtaatgggtctcaccccattagtgggtgcatttgttataccactagaagctgttatgcattctctgtaagtctgtgtgagggaactgtagatacacataaatatgtacttgccaacagatctctgtatttatctgcctgtcagtgggagcagacagggcacagctctttgatgggcaagaactgcgggtcaaaaccatgttcttgctgctgctgttgctgcttcagctgctgctgttgctgcttttgctgctgctgctgctgctgtgattgccatggctttatcatttaagtcctgaaggaggctaggggcagcttgttagttctcgttctcacttaacctgggaggctagctctggtcactgacataattaaacagaccttgcaaatgttgactgctaattttcttgtggctagcagagatagactctcaaaaccatgctcacctacaatctgtaatctttcagtgttccttgagagtccacatacctctgctatcttcaaacactgtgtttaatgctgtcctgatgctgtctgatcctggtggattctgccatcaggtgtatttccggctgtatttcactgtcttt

SEQ ID NO: 107624 - DNA, 1015 bp, Homo sapiens
atatatatatatatgtaaaatatgtggcattttatgataagtgctatggagaaaatttaaagaggagaaagagtgtatacatgtgtgtttgtgtcagggataagtttgcaattttaaatagggtggagaggtagagagggaagtcttcattgggggacagcatttgagaaaagacctcaatgaaagtgaagaagcaagttttgtggatatctaagcaaaagcattttcaacagtggaaccatcaagtgcaaaggccttggacatgaatgtatctggaaagtttgagtgacaacaaggaagtctgtgtggcagaatctgagtgggtaagcatgagactagtaggagatgaagtaagggagacaagggtgtctgatcacatgggccctaatatgctgttgtgaaggcattggctttgtcatttacaatacaaagatgaatacaacatggtctcaagttgctcactagaggagaggcagatagggaaacaagttggggtaataccattatgctaagtgccgtaactgaaggatgttcaaggaaccatggaggcacagtgagtgttcagctgaacatatcttggagtgggggatcagaggaagtttcacagaagagctgataaatccgtgctgggaatggaaggattttcccagatggtcagagggaggaagaacattcagtaagggagccagcaggggcaaaggcagttaactagaaatagcatggcagagctggggaacactatcacttatgtgtagtaggggagtacagagaaacgatgctgtagatgcaggcagggaacaatcatgttggaccctgattgccatgcaaagaagttttaacttcatcttgtggcattcagggagctattgaaaggttttaagtagagaaggttaatgatgaaattgtgtgatacaagatcaccctgtcagcagggtagaggatagattataggagtgggagaatagaggcaagaaaatgagttaggaggcaactgaaattgttcagacaggaaaca

SEQ ID NO: 107625 - DNA, 1050 bp, Homo sapiens
acatccagagagtaactgcatgtactacaaactgaccctaataaacaatttaaaaaaaaaacccaaaatattgtgtataataaaacatgctttaatcttacccattttcaattgtcaatcaacttagcaatccccaaactatatctcattctgtcccctaaaccaatttttttcctggagtttatatatatagaatattccttttcgtctctttattttccctgctcactctctagtaaactgaattcctagatgtaagcagccacagaaagaaaagtgattcacataatggataattaacccttgaacaatggaaagttaactctccatagaaatgccaaaaactgaaatgttttgttattgaatttattctcctttgggagttaacactaatggagaacatctccattagtacaaacctggcaccaaacaacctgttcatccttaagctatgaatgctgcactcaccttccagttcattctggcaggatttgtaacacaatgtcctcctgggtagtcatgtacaaaccactccgaagggcaaaattatatgagtgcctaatccacttgtgaaaattaaagaaaggggatcttttttatgaaaaacacctaatatggaaagacataaattgtaataaaaagtgttagcaccttgcacctcctgctaattgcattcctagtcaagaggaagcaaaattgtataacaaatgtcagaggtacatcatgaacaaagtgcaaagaattgtctgttcctttcaatagtgaattgaaaaagagtagcaaacctgtttaagctatgtatagtagctttaattttggctcctaacctttctgggactcatctatttcatttgtctaatgaggataatagtaacccattcaacttactgtacacagactgtactgtacacagactgtttcttcattatattcattaaagatggatttaacattaattcattcattcacccatgtattttttagtttaagaaatatttttgggccagatgcagtggctcacacctataatcccagcagtttgaaaggcca

SEQ ID NO: 107626 - DNA, 1010 bp, Homo sapiens
tattccaggcctggcctctcatgaccagagactgctgactcatcctggcctgtgccaagctgtgcagtcgcttagtgatgtggacaggagtcgaaggactagaatgagatcactgaactcatttcacttgttgcttacggtacagtccagcatgagctggaaatgtaggaacctcagcctcccgagcagaaagagtaagtagataaaacacaccgcatcaccaagtcctcaacaagcagtagtcgggtggtgggtgggggctcgctctatcatggccgtggctagggcattctggttcatcaggagttttcctttgtcctctcttcttcctcttctccacagtcgtacccttccccccttccctgaacttcccttctgaaaatgtctggatggtacagcagtgatctgggcagaaatgaaatttggctaataagcagcctctgcacaaaattctggaacagtgacactgttgaaattgcttagtttagtttgtctactgggaactcacatgaacttcccaacagaattcaaggggatgaaatcttttttgttctgttttgttctcctttcctttttgattctctttttctttctgttttgagggaggtagtttcaggagacatggctgcattctggtgtggtgtaaagttttccgtcgggagacaataatgtacattcctctggcaggacgggatgggttttttttttttttgtttctcttactgttgtttatttataagacatttcctcccagttagtggaagttagatcgtaagaggctccagtgattttccttccacctcccctccctaatttctgtgcttcagcactctggaacactgtgaactcgacaaactaatcagagcagggagcttaacagccaggcctggacaccctcaagagactgtgtgctgattctcagtcgtcactccttggatcaggaaccatagtcctggtgagtggtgaggttccagaatttgatgtgtcaaggattttattcttggtgtctc

SEQ ID NO: 107627 - DNA, 1068 bp, Homo sapiens
ataatgcttgaccaggtctagtaaaatattccctgccacaaccactattccatgaagagattgagccaagaggcctgaataaactaaccttaagttcagagttgccattattgtgggaggcatcagggagagcacatccggaattgtgttacacagtaatcactgctgggtgtcagcattcatcagccagatggtcagacccacaattaatcaattaggctgcgatgatcaactggactacgttttcccctttggtaaaaagccctcatcatgcggttaaggccaataacacttttatcctgttgcttttggagaagcttctaaaaattcctcttttcttttttgggcctctagttactggacaactgttaggctccaagttgctttgacaacatagatacccaaattcaaggatttcacataatagattttcaacatcctgtgtcttcaagtataatgtttaacatacccagacagaaataatctttttaaagcagcagtgtaagcagtgttactcaactgattttactagagtcttcatattgattcctctcaatccagtggaacaacactggagggggattctttcactggatacttataaagatgatatgatatgataatcaaataatatgaataataagcaatttactgaatgttcaccatgtgacaggtactgctgagataagggttaatgaacattgattcagtgcttacaatgattccatgaggatgataatattatttccatttcaaagagagagaaactgaggctagaaagctcatttgcccaagattaaacagttagtaaatatgtgttcagatgacttaataccctctgaaatgaaagctgaaagtttattttacatttccttacccatatacatctgtgcatctctgagggacaacatttaggaatatgtggtgggtcctcattactcctcttaaaaggactttaaagaaatattttactcgtgttcccgaagtctgttgctctccttctgttttccatgctgttttattctacatcatgtgacttgagattgctttcttccttctttatggcca

SEQ ID NO: 107628 - DNA, 1115 bp, Homo sapiens
atcacagtatcatagtttaccaaattggtcatttattgatgcttctctatttaatattaagagtagaacaatataggaccagaatcataagaaaaaatttctaaatatgtatttttctgaaaaacagtaacctatattttgctgggcacgtggctcatgcctgtaatcccagcactttgggaggccgaggcaggcggatcacgaggtcaggagttcaagaccagcctgaccaatatggtgaaaccctgtctctactaaaaatacaaaaattagctgggtgtggtggcacatgtctgtaatcccagctactcaagaggctgaggcaggagaattgcttgaacccggaaggcagaggttgcagtgagccaagattgcaccactgcactccagcctgggcaacagagcaagacgccatctcaaaaaaaaaaaaaaaaaaaaaaaaaaaagaataacctatttaagagccaccccacccctccacaaaaatgtcatagaagaagcaaatatgagttctagagttaattaaaaagaaaaggaaagagaaaggaaaaatgataatcgaggcaatttttacctctctcaaagcttttggttgtttgtaatgactcttctgaatacccacttagttgagattctggtgtgagatcactgatgcatacatttaggtcaatagcttagtacttctgtatatttttttcttaagtaaattataaacatgtaattaaaatgtatgtgggcagcacttgggggaaaaggttatgtacatatactagtactgtcactttaaaatattctattataggtatttatctactggcctcttatttttcttaattctgacagtatttgcttaactatgcaaagggagttggtttattagtaaatgtgaacagtagtgcaatcagttgaaaatactggattataatctctaatgtgagttatttcatgaagtgtgtgagcaaataataatatctgtgccagttaccaatgtattacctcccattgcctccttccaaatgtagttctccttgcctgctctgcaaaaatgtatctggattctttaaatattttttctttgctagctggtttgagggtgctttgtcagtagagaaggt

SEQ ID NO: 107629 - DNA, 2655 bp, Homo sapiens
gcttcacagagggaactctgaaatgctgagaataaggcccccttcattccctttcctccctcatctaagaataacctcagttctgccccattcctaatcttgcaaggcagctctaactgtaaggagttgccctcctcatttctttgctcctacgcatccctgggaacgaagttctacaggtgcgtcagtacacagtatgaggcaatataggaactgacccaacagagggttctctgagaggccagaggccaggaagccagatacacactccaatctcactttctgtggcacaggagaaatcatgagctgaagcagtcctctcagtgttgagctaagccagtctgggggaagtactgatatgacattctaacatgaaattgcactttttacccatgcaaatgcaactgcttttagtttgggatcctctagggtgcctctatttcttagctacaatctgaatatatttgcaaggtattttggttccaacattgttttatcagtatttctgtggaagaatgagaggtagagttttccactctgccatcttgctgacttcacccctattatttgttaagacattaattttacttgaaaaaaatatgccatttggactggctgatagacaaagtattaagatatgcacccctcagtaacttggcatttctaacatgcctatgggtctatagctatttaattatgtttacttgttactttaggcttcagccttcttgattaggttaggatacatcggattatttgagctgaatagtgcttcttattttgacagaagaatgtctattttgttttaattcagtgatatattttcagtggcagatctttaaaataactcttctaaaacttgtaatatttttagtattggacttagttaagttacttatctgggcctcagttgtatcatctgcaaaatgaggcaacaggatttaacatggtctctagttaattcgagctctaaaattgtgcgatctcatttgtcatttcaattcaacatatgttaacgaatggaatacttacataatgtaaatcaatgaggtagaacttgggtggatacagagatgaatgtgattccttcatgcaaatagcttataatttgatgccttcaaaactgagatgtgtattccccaacacatcctagttccttatgtttgacatgtcatttataaataagggtatattatttatttttgaagtggaagaaatttattcctttgttactatttttcatctctagatttggagaaacaaaaatgtggcctaaactatcattttaataatattgtgcatttgtatttcctcttcattgcaaagcatttacaagattctggaatcattttcttatccatccctaaagtagcccagtgcaagtagaaaaggacagttattccccttttagtgattagaaaactggaccctgatttttctggagttatataatatgccactgaatgagaacaggtaaaaatccaggaactctcatttcaagactgcccagccaggttcctttgtatgttacagtttcttttagtaagttctgcagagcctgattcctaaatcatctttcaaaccaaattctttcttattccctatccaaacagcagcatagccattgatgatttcagatagatcaacaggaaaaaaaaattgtagtgaaagaatagaatgtatgcagcaagaaatgtgctgtgcaagctgtgatacagtgtacaatgtttcagtctttagctggaattaaaattagaagttgaaaaaacttggggactcctccatcaatctaatctagaaacatttgactgtaggcccagcagcccacaatgaaacctgcccttttgctaggtgagaacatcattctgaacatgccaccttggaaactttgcatcagttcttggtatcactagaattttcctatcctgcttttgagaagagtcagtgtgagaacaaatatacttctttttacaaatcttgaaagtagatccttagaaataggtgattacatttccttcataacctaattctttctatgtagtaaaaaagtcatattcatgtttggtctcatagtttccttagtcaaaaaatttgcatctaaaagcctaggaaaatgtttggcctgcacagttgaatgtttaaacaggtgcgcactgcactggtctggctgaagaaaggtagtctcctccacttggaaaccctgacattaagagaatgattcttgtgccagctttcaggaaagcttgtgaaggaaaagttcaggtgattcttaagtcttattacctgattatcagcccatgtgcctcccttccattctgtattctcatgaagaaattgatttaatagattgaagatattattaaatacattctgcattaatattatatgtcctctttgaatccaagtggcaatacaatagaatttcattttataaataacacctttcaagcgaacaccacagggcacagtacaaaagaatcaaaatagaacacaaatgctgtaatcaaatgcagaccccaggaaggctgattaaaaaggcatgttgctactaagaacagccgacaggttaagtatagtgggtcatagcagaaaagccagcagaacagaagggcaaactaaaataaaatggacttgcctgcctgaatcacacggact

SEQ ID NO: 107630 - DNA, 1081 bp, Homo sapiens
taacagcatatggatagtcttcctcttaatctcttcagccagtttgtatcttttgattggggaagctaatccatttacacttaattattaataggtgagaacttattactgccatttttaaattattgtctggttgttttgtagttcctttgtccctctgttgctgtctttttttgtgatttgattatcttttgtagcaatatgctttgattcctttctctttatgttttatatatctactacaggtgtttttcttgtatttaccatgaggcttccataaaacaacttataatcatctattttaagctgatagcaacttaaatttgatcacatacaaaatctctactcttttacttctcctatatacacacttcatgttattggtgtcacaatttacgtctttttatactgtgtatccattaacaaatcatgtcattacttttatagttttgtcttttaatgtttataccagagttgaaagtgatttacacactatcattagagtactagaggtctctagtatttgactatatacttgactttattggcaagttttatactttcatcttttcatgctgctaatcaacatcctttcatttcagcttaaagaactttctgtagcatttcatgcaaagcaggtacagtgatggtgaacacccctctgcatgtttgtctaggaaagtctttacctcttctttattattgaaggatggcttttctgagtatagcgttcttggttgacaggttgttgttgttttttgatcttcagtactttgaatatgtcatcttactctctctttgcctgtgaggattctgctgagaaatttgctgacagtcttatggggactcctttgaatgtgatgagttgcttcgctcttgtttctctcaaaattctgtctttgacttttgacaattggattataatgggtcttggtgtagatctttggagctctttggacttcatgaatctggatgttgatttctctcccctgatttgggaagttccttaccattatttctttaaataggctttctacccctttccctctcttctccccagaattccctaatgtgtttattg

SEQ ID NO: 107631 - DNA, 1056 bp, Homo sapiens
ggatgaagattatgactgtgagatgggtcaaaatctccccaaccaaaatgtaatgtgcttgtaaccagaagaccttgtgttgctattcatttgtttttggcacagcacctagaatgttgttaagacatacaagcaaataattaatactggtctattacattaatttgccaggataattggtctggtggaagggtagatggttccagattaaacatgggaagagatgaatgtctagaagaaatgaatttgaaactgagatctaaaggacaagaatgatggacagaagtgaacaggctgtctcaggttcattgattgagagatgcttcttggctattcactgcttcaattgttattctccattttatggctgctccatgaaaatgaacaagaaaggcacggagatgatagagagcaagtttacatgatagaggaagaaagttgttaacatgggagatgggaaagaacattaataggtgatgtatattcttagaaaaaatgatgactgctgtggatgagttttatctcaattctgagcaggtagttagagggaatggttggaatttaactctggagtctgatggcctgggatactttgtagttttgtgatctacaaaataatgttacaatactatttttaaaaattgttatgaaaattatataagttcatatatataaactacttagcaaatgcttctcttagaatgacttaaaaaataatgaagataagagttatccattttccctacacaactgtaccacatgttcaacttctctgtcatgattagaaatatcacataccactgatctcccaagcaagttcattaaggtagttttctttacatacaggtctgtttcattttattcacagattattctgctaaatttaattatagaaatattcattggccatatttagcgactgagtggaatatatagcactttcctagggcactatgagtgatttttttaaggttaaaaaatagtcttgtctcaattttaaaatactgaatattgagagaggaagccctatagacactttgattctaatgcagtttt

SEQ ID NO: 107632 - DNA, 1004 bp, Homo sapiens
ctaccttttatttttctgcaccttgttctagaaataaattttagtggtggtctcttggtaggaggtacttggcagtttttaattgaacttctgtgaaaacctaaaactatctctaccttctctatctccatctccctgatcctagaacttcccttaaggtagaaaaaggcaagtgttttgaaggtaaatctagaaatttaaatggagaaaaggagggtgaaaaatattgccaactcagaaattactgagctttcattctttgtgaggctaatccagttattccacctcttatttcctcctcagtaagatatgattccctagtatcttcctaggaagtaaatttttggggttctaagtgtaaagaaataaagtcaacttttgcgaagccctcagtacagtttagtgcttgctaccactaaccaaagtagaattcaaacacaagagggtaattgcagaaatgagtaaatctgtacaacttcacattggtagtatccaaatgctcttatgaatgtcaacttcaggcatcctctttcattagaaaaatatgtgttgtctttgacagggaaacccttaaaaaaataaaatgtcacatatttgaattttagctgtattcataataattctcacaaacttttctcagaaaaaattttcttgattttcaaatttcctttatatttgttcttcctttcatatataattgacattctttaacagttgagaggtgctaggttaaatgtttgcagaataattgtggcttatttagaaaataaattttactctagggcttatgttgtgctaaaaatgactcatacagaaatggttctgcaactcttagctttagcctgatttgtcttcagagaggagttgtattagaaatgtggtgctatgttctgcacaaatgaatgtttgcggtacatatggaaaatactatgcacaggaaaaaaaactggtcctagaaaaaatgactttaactttgcataactcatttgggctagttttttttt

SEQ ID NO: 107633 - DNA, 1046 bp, Homo sapiens
gaaagtaatccggtctatcacatatattattggtttggactcagaaacaaatggtttgaataaacaacttaagaagcctgatgagttataagggacttttgtgttagtgattgataccacatttacaatcacagtctctctaatcactttcaggggttttcatcatagattagttttgaattcatcaattatggtaagcactgaatagaaaataagggtcagataaaacacagtaggttagagatgaagagtgcgaattctattccagctctatcactgagggtgaaatctcacacatttctactgattttctcccccctcagtattatgatctcaaaaaaggagtactactcttcttttttattttttcttagtatagaaagcatacaaaaggcattgtagaattctgtgcgtagcataaattacaagaggacgattaaaatccccacaatcgtctagaagtaatttgttttcaaactttggggatatacctttctaatcattttttttcctgtgcatatataccctttttgtttttggtaaaacactgtgaacactgtttctacttttgtctcttaaatctgtgttgtgagtaacattctatgcctttaaataatcttcagtgtcatttttgtgaagatttattccacattcaccatcctttttttgtgaaatttaaatcagatgtcataaagtctttaaaaagcagaattactttgaaaataaaggtattattattatagaattttagagattaaagaaaaaacagaaactaacatttaatgaagacctactctgtgccatgccatgtgcttagaactttgtttaagccatttcatttaataacctttcaacctaatgaagcaatatagcatgatggttaaactctgtgggctataggctgtcaagttcagctgcacagcggctaactagctttatgacttttcaaatgtttatcttctttttggcttagtttctctgttacaaagtggcaataataataatagcactcacttccaaaagattgttgtaggattaaatgattg

SEQ ID NO: 107634 - DNA, 1037 bp, Homo sapiens
agaattgtggttagatgattctgcttacatgaggcagggaatccttggcagatacccccaccaaccaagattttcattttagacctaaggataccaatacatgtcacaaaagcaagataagtggtttgttcagatcatcagatccctgtttaatgaagctgacatattttctgaataaactttattggatgcataacacaggatcatgcacaactgctataggatgggatttatgacattaccgtaatgagagaactttggtgattctgctctacctagagtggtgaaggaaggataaaaaccccactcaagacaaaaatattcaagaaaatggttctgtagtcagctcattcctttcatggtggaagtgttaacgaaagaaatcttcacttatttttctcctcttacctagagaatactttcttcttacctagagtctgtgatatgaagaatatgctctgtagatggtcttatcttatgtggattggtccatgggacactatgctaggctccatagagaactggttatgtatgttctgtcctcctctatgaaaacattcctaaccgtactgttgatgtatacatttcggtcaaaagtaatttgctttctgggtatttgatggccactctgtgaatcaacctaatgtatttgtggtatggaaatctgtaacctctcaatactaagtttaaagactcttataattaattattgaaaggcactttagcccttaactatttctctctttggagaaacaaattgatcggttaatcatgtctttgtttatttttattgttgttgctgtacacattgcacataaaacaggaaagaggaaaggctgtttgtaagaggtaattacaatggcaaaattgtattttctctaactgttctcattttctcatgtctgattatatcaagacctgcactctagaagtgtgtttcagttttgctaagaaaatgatagaggagaagaataaatccatttctataaagtggtgtcaaacacaacttgacacagttacaaatttctttttttttt

SEQ ID NO: 107635 - DNA, 1212 bp, Homo sapiens
ctcattaaaaataatttagaaaaacacataggagtaaaatgaagaaaaattaaagtaattatttctataatttaaatccaatcattaataaccatttgatatatttccttactctcattttccccgaggatatatttttaaaacatgatgttatcatactttctatataattttgtgtcctgctttcaaaatttaacctaagaaatatgtaattacatagaccttataaacatttaaaataaatatataatattcctgaagaggaatagctcatttaacctaaatgcccaataagagcattattattattatttatatctcaataataccttgcataaacagtaaatgaatcagtcaacaaataataaatgaataaaagttcaaatcagtatatgtttttaaattttttatgataaaaaatcttaaattcatgaatataaacaaattactataatgaactcccatgtactcatcaccagcttgcacaatgactaactgatggcctgttattttctcactatatcaccatgttatgttgaagcaaaccccagacattgtagtatttagtacatcattatttcagatccatcaggatattttttacacgttaatgttaaaaactattcagataaatagttcttattattgtatatagtagtatttttcttcatagtatcctgacatcatattttctaacatgtaacagttgattgtaaaatctcatcagtgagttgcctaatattcttagacacatctgtaagccacagggcaatttggttgcctagagaaatatttcacagatttggctaggtttcttgggggaactattttcttttggtactttttttacttgactcaaatttaggatgctaatttgcctgccagatctatacagcattaattatacttattattgggtttaagcatgtgttgaatacaatttcttacctgaggtgaaaggaaagcatagtccccttattacttagaactccagtctggctacagccaaccaataccagataaatatggcaaatctacttaaatcaaatgtaacactggctttaaaagtttataatttttaattaagattattggcagacatggaaaacatgtgatgggtatgtgaggcatttagaaatatgtaaaagggggaattatataataaaaatctgaatcatttttaaacaacatgtttggggggaaagaaattat

SEQ ID NO: 107636 - DNA, 1042 bp, Homo sapiens
ttgtctttgattaaaaaagcataaaaagtacctcacatcttctgttactcccagcagatttatgtatcattaatacaagagaaagtcacacacaaatagacttcttaaatatacaataattaatatttaatgcccccttttatgagggggtctttgtgctgggatgtctctaatcttcacaacgttcctgcaaaataggtggttttattctttattccacaggtgatgaaaatgaggtttcagaatcatttaagtgatgtgcctacagctttattgttaataaatggaaaacctgggattcaaactcaagtctgtctctctctctctctctctttctctacatcatattcttcctataatatcatgacctatatgggagtatggtagctcccatttcctatagaccgtggctagatggtgttatgaaagagttaagtaaaatgtgccatttgtgacaaatgtctgaaagttgtttttataactaggatttaattcacaaatgaagagtaattatcaatatggcacagatgaagagctgcatgtatggatcagtataatttctgttctttggcttatggatgcagtatgccccagggagtttcacaaatccacatgacatctcccagtgctgggttctgggttagctggccaaagtgtaaaattcctccgtgttcggatggctcacaactggttactatctgaagagatttgtataaaactacctaccatacgtagacttagtttcttttctgaatttgtctctaacacttgagtggggaaaaaaataccaaattttgatactgggtttgttgtttttaatgggtgtttgtttttggaagtgttgtgccaagagaggaagaagaagtgggtgtgggtctttcttccttttgctattttccctttgccttcttgtggtcttatttccaatctgattctatattatcagtttgccataatcctttgcaaaagacataaaatgttcatagactggaagttattaaggctttaaatcacatcacactatcattggagtaattttggg

SEQ ID NO: 107637 - DNA, 1489 bp, Homo sapiens
aggctgaattgaaagcaaaatataggacttaaagagaaattggtattttttctaagcaggaacctaagattaaaaccacagatttaataagattttttatttgtttaattggtagggtatcttttataactacatagtcccaaatacttaagattttagaatgcaacacatacatctataaaaacaggagaaggaagacttctagagacaaaagagtgcctacagagggtcacttttaggcctttagagaaggaaggttggtatagatgaatattttaagtaatattttactatgaaataaatgtgcttttattatggaaaagttcaaataaacaaaaattatttataatttctctacccagaaacaagcacttctagtgttttctggtctttttgcactttgtgtgtacacaactatcacttcttaaacaatatttaagttaacaatatttaacttagcaatatttacttaaacaatatattttcctgtacatatattgttggttatatgccttttcacttaacagtattccaaaaacatttcttcatgtaattaagtggtatctaaaatatgatttcttaaactgcatagtatttaagtctaggaatgtactgtcatttatttaatcaactctctattgtcagacaaggttaccagtctttcacaattataaataatgccatggtaaacattcttgcttctaaatctttgtgtagatctttgagtaattcctttagatacattcctagaggtgagatttctgggtcaacagtcttcatatattttttaaatttttgatgcatattgctaagatgccctccagagcattttgccagttttattttttcggtggtaacatcttaaagttttcttccaaaagtgatttgattcaaagccatgctgttgcttttctctgagtcctttctggtccaccagttatagcagacttaatttaactcttaccttaaggttaacacttagagtaaccaaaacatttttgtagtcatttatgctgcaaatgagacagtttacagaatataaattgacagtgagattagattgcgtttctttcttatgcatgttctgtacaagcattctgcttatcctggataacaaacaaataacaaaaagaaagaaaaaaccttacctctcttgcttgtcctaactgaacactcacaatgcattaggcattgaactgaacgtggaggagatatgattcctgctttctgagactttgcaattccaagtaccatgattgataaggtacaatataaatagtgggcttctaggacaatgccctgtggttaaaagtaattaagttatatggtgccagcagactacaggatacttgtgatccacatatgcaggtggattgtgtgcatcagtcatgatatctgtggaatctgagagacgggaaaggcatacctgttttaactccagaataatatagagaactcaaattcctgcccaggcaaatagggataagtt

SEQ ID NO: 107638 - DNA, 1009 bp, Homo sapiens
agaacaaagggattgaaaagcagaggttttctatttaggctcaattagtgtaacctgggcttcagccagtttaatggaggaagtcatgtctcctgtgttttggcttacctacgtaaccaaagccttgagcagaatgtagagttgggcttttaaaaccatcagttagaataaggttttgccctgaagcatgttcatctcatggaagaattctcttagctgggcacttggccaaagttaagaggacacaccatggtttcatggaagaaaaagctgaagactatgattttcagattttgattaatcacttgtctgtacttcacttatttcagtatttctgtctaggatgatagctttcctttcctgcaaaaagcagacggatatagtagtagtatattagagtgacatttttttcctctgtattgtttgcagtaggtctaacttttgcatctgattctttagggaaagcacctaccaaggcttcctattacctatttcacaggtaagtgaaagtcagttataaaaattcgatcagagatgaaactcattacactgagcctgggaggcataaatattacaaatgtaggtaactgttgatctttttagtcatgggagcttaaaaaaatggacacatcaaatagaattttttctcctaatttcactgtttcgtgtatattataaatttagatatttcttttttatcattaaatttaaaagacataaaagaaatggagcctcaaaagtaggtctagttactgagactgaccagagatacttagaaagaagatattacccttcaatgttcaaagcctggcattgtaatctctttggaaaatgcagtgtttttcagactctaatccagattccaatggctattctgtgcccaaagaccaattactattttggagttctcttaaagccagatgatgctttgagggggccatcaggaccttaaggagaccacaggggactgtctcagtttgtcttataataaatatctcggcagaattag

SEQ ID NO: 107639 - DNA, 1069 bp, Homo sapiens
tctggagtcagattgcctgggtttgaatccaggcttcaccacttactaactgcataaccttgaaaaagttgcttaatccttatctgtaaaatggaaacaataaagttacttacctcttagggttagcatggagattaatgggttaatctacataaagcacatagttcggtgcctggcacagagtagaactttagtaaatattgttattttttcctccacaatgtctctagaacatgttatttcctgtacatttctgctgacactaccgaagtcagatatttatcacatagtacctgggttgttgcagtggatcacttctcattctcttgctctcacaagctcgcactctctctctttctctctcattacctttatgctctccctgtttcagttttttctgtccaccattcccaattatttatactagaatatcactgtgaccatgccagtgtcctactttacaagcctttaatagacctcttgtgttcacagaataaagtggactactcagcccattattcaaggaccccgtttcgcattccacactcaacccatctttccagcattgtttcctattacaattccaactaacttgtttatttgctgctcccaaatacatatctcaattttctgcttccatgctttctctcatgcccttcacacaacttgaaatgtcttatcacctcccaaatcttacatgtttttcaaagtataactagatttgttcatcatactgaagctttcctttgtcagcctacatatcagtgatgattttctctctaaacccctattctgaatatctgaattttattgcataataattccttctgggcattatcccaacaaatagatattaaatatgtcaggcacaggtcagtgtctccatacacatcattatttacccaatagcatctatcaaagaaaatcaaacatagatatacaattagtatatgccaaatgaatacatggtctgaattggaagtttctttccttgttctaaacactttttttccaaaaaagttactccaaatttagccctttatttctactgattttctaaacttccttt

SEQ ID NO: 107640 - DNA, 1049 bp, Homo sapiens
tgttcaactgcaattagagaccataattctcctgttatttgttacacaataacttttagaatatagagagttaatgcacatttgttggtatattgtattagaaactctaaacacatttctgggatttcgctgattgggaatgaaaatgtttaaatttctccttagatccagaacagtctccatgtgtaagttgagtatattcattttagcgaagtaatcaattgcatttaaaatattcaactcacaattatatattgactttcattatcaatttcgattaatgcgttttgaaaatactttattctacaatgcatttagaggaggaaatagctgcttttgtttattcaaggaatttaccaattttatgaaacctgtttattattttgtaagaagaaaatggatgagtcgatagcaaatctgacccttgtctgtatacttacatgtacccagtagtgatgaaaagagatgaagataatgttagtggctaaatgataattgttgagaaggcatatttaattgaagagaaatagattttttaactctgtgtgcataaatatactctataaacattttgtatttgcacatggtttaaactcatctaactgaattctgacttaaggaatagaaagcatggtctcttccaggtcaagccacactgtagttatttgggggataaatgcttggctaatttatattcctttataactgtctttattaaagtgaagacccttgaccctgagtcagaatcacctggatggttcctagactccactcctacaaactgaatcagaatctctgggattggagcccagaaatttgcatttttaatgatcatttccaggtgatcattaaaataaaattgtattttataaaatttatttaataaaatgtattttattttatggctcaattaaatgtgaaagccattcctatttggactcactctctttttctttggcaaatcaaatcttccagaaaactgatctgtgagtcaccaaactgatagttgttaagcatagagtctcagtgacaaccttaaaagtgactat

SEQ ID NO: 107641 - DNA, 1037 bp, Homo sapiens
attgaaaaattagctactgtatattctatatacacacacagcagctgcataaaatgcaaattctattcatgtctgatctcttctgcatttatatggtgactatcgctgtagcacctaagcactttatgttatttcctcttattattatttaccacctgatcattccagagtgctttttacaatcagagaatttcattaacaacccattccctcgctctttgtttttcagcacccttgcatgtaaaagtatcaagcatcttggtagctatatcagataaattacagtaaaaagatagagggcttccgacaggagggcaggggaaaaaacaccctaaagcatctcctaaaatttggtttgtgttttatggtatccaaataatgttacagaagtctgtaattttagtgaaaaccaaaccactagataagcgcttttatttatcatggtttccaccattgcaataatcgaaagtgtgaggtgaggaagaggaatactgtctgcacttcatagatagagaggactgggcaattgcactttcttctcactgtggaaagcttgtgattcttattgactcttgagctgcctttagcccagaagtatagaagtcaatctgttttaaaatccaaaaagctactgttatattttttaagctaagaggatagaaacatgtttattaaaaggttcattgtgattatagatgaaagtgcgtggttggtaccttaacagtttgattgaataaaaatcaagttcacactggggtttccttctcagctctactccttgctttctctttgactccaagctaattgcataacctctggttgacttgtgcctcgtctacacattcaaagtgaaattcagaaatgaggttattatctaactaatgtaggctgtaacattatttctctaaaatatctctgtgagagaattttgaaatttctgatttcagtagatagtaaaaaaaataacaattttatggaccatctccttttattcttagacaacaaccccatggaggtggatacatcagagtcagctg

SEQ ID NO: 107642 - DNA, 1054 bp, Homo sapiens
ccaaggatcttcaacttttattcttctctttaagatagtgagtcctggaaataaaagtgaaaatgaacagttctaaaaggttagtattttaaaaattatagtttgccattctcaggtttattcaaaattgactttctgatataactatatgtttttacaaatataagcattacctaggtagtaaaacatattcacagagagttattatcaaaaatatagagaaaaattttacatgtatatgtcccattccctccccactccttcctgagttgttgacatgagaaaatatctttccaacagtggggtatcatttgtttggtgaattttaacgtttgcatgagatggtgttcatgtttgtgaaaaatatcgaagacttctgacttctttctttttaactgcacatggctcaatctaataaattttcaatatagattctgatatggttataatcccaatcataccacatttaaaagctatattcctgactgtgtttctctgctagcatgacgccacaaggaaaatgaaaccaacccaaacaaaaccctccttataacagaaagtaaaatgaagcttgtaacgactgttttgaaaaatggtttgaacagtgaggaacaaccaatttttcaaacactgttgtagctgtttcaagctgtagtgtggatagtgtatgcaagaaatcaataaagggaagagatctctctctgacacagatgaaacctaaaaatactgttaagaccaattctccctccatgcatctgttactgcattccactaaaaggtgttgggaaaaaaatcagccaaattctactagaacgaagcatccagacaagtgactcttcaaataattaaaaaaaaacaaaaacaaaaaacaaacaaacaaaacacactacagtagaaaaaggggaatgggggaaaaaagattaagcacttaacatgttgagtatatacccaaagcagaaaactcagtgagtgaaaaacttgtccttcaaaagaagatactttctatccttcaccagtaacacagaattgatagtctggtaacagaagcctttta

SEQ ID NO: 107643 - DNA, 1115 bp, Homo sapiens
aaatgtatgtgtatgtatcatgtatacttctatatttgtttacataaaaatgttttcagaaatatacactttattaggctgattaagccaaaacttttttgtgtgtgtaatcgaaagactgaacacaaaaattttaaaacagaactgaaagatgtcagtcagaactgaattaatgacctggggctgaaaatacctatgtcaaatttcatatggattttttcatggtggtattttaattttatatctccctaaatggaagtgctgcagtcaagtgaatctatagcccaaagaataatgaaatatgtcaattattttaggtggttagtttttattttttattttgagtacatgcgatgtaaataccaaatacacatacatacatatgtttttgttttgtttatttgtcttatttactatttattgcaccaataagggaattaaaatggctgacaatgaaaaaataaacataaatacatgattgcagcaaaatacatgaattagaaataggtaagaaaaataaaacaataaaggaaaggatataaaaatggagttagaagtgaggtcagcataaaactatattcagtgaagtgctatacagttgcctttaaactttcttgcagcaaagttaaagagaaaagcttgttacacagtttgtaacatccataagcataagaaaataattttcattatttgtcttgaaaatggcttttgaaaacagctcttagttttccaagaaatcaatgctaaagcaactcccactgtaaagaattgaaggctgcagatacctaaaggtcaggtcggaagcagaagcagtaccttccctgggacatggatgtggaagtagaccaaagtaatccccttttaatcccagggcatgtgtttctagagagagaaaaaaaggacaccattaacgcagtaatgttggcaagctaaaaatgtgtggaaagtagggagttaaggggggaatttaaaaaaaaaatttcatgtaaataaatacatatatattttagcagcaaatcaaagattagaaggcattcacttttataataaccattaaaacatgttatcaaataaacctcttgaatcaatgttgctttcctaaattgttcataaaa

SEQ ID NO: 107644 - DNA, 1031 bp, Homo sapiens
tatttgtatgttcctaaagtgattgtgaatctttggaaattgtttatgaacatattaatatgtttcttagtgctctagtcactttgagggaaattttttaatctttgaaaaacatattttttaatctctgtatattcttttttaccccgagcattacttttgcataatggactcaagtgtgttgtcaattactgattatttggttgagccacacagaaactgttagaaatccttatttttatttgcacactatctgtttggtggctttgttcaagcccatggattgtcagttaaatggaaaagtcttactttcaagcaaaattctcagcatttaatacagtgtgtagcatatatttgggagtcaataaatgttcatagaatgcatgaacaaatcagtcattgttgcaaactgatttgaggatgaggtatgagattttttttttaaggctaaatgaaatgcccagtatcacatagcaggataagagaaaatctgacactcataactcatacttctgtgtttccagactgttacccaagctcactgagaagtgcagtatatgtctgatttctcaacttcaccctgcagtaaacttttgcaatccagaggctagagacctcttttgtgaatgttgtctgcccaatgactgtgttggcaccagggagtccctagcagataaagtggaggaacatatggtttccatctgaatacaaattggtggacataacgtggtaattcaactgagatgtcctctatattgtaaactgaaagagtatgattagaggtgtttataaacggcatctgaattcccccacacccctccccatcccctttccactgtagttttatctgtctgaatcatagcaatctagcctcccagcctcactgcattatttgtgaaaatggccagtgtgaggaattattaattaaagctaacaaatcaccctgacaagctgtgccctggcatggctgaaggttgattggcgaaagtcttctcctttggagaaaagactttttgtgctcgtgacgcagt

SEQ ID NO: 107645 - DNA, 1049 bp, Homo sapiens
atttatagtgttaagaactttcttttttcatagtagtggttcctgtcccaattctttactctatgattttaaactaatgtgtctgttggcctttggactgggatagtatgttggataatatatttgttttctgttgctgttgtaccaaccacaaacttagcagcttatgacaatacaaatttattatttgacagttctgcagatcagaagtttagattggctctaccagtttctctgctgtaggctttacaaggccaaaatcaaggtgtcggctggattcttaactggaggaaactctgaaaaaaaatccactttcatgcttattcagttcctcatggttgtgggactaagatctccatttccttgctatcagctgggaaccatctttagatccttgcatgtgtgctgtccctatatgtcagagccagcagcagcaccttgaatcattattacacttgacatctttcaaatttccccttctaccacacctcttttccaaattccagccaaaaaagttctctgcttttaagatgattagactgggccagcttggataatctaggatactctccctgttttagtgttaacaaccttcattacatttacagagtcgctttttcatgtaacataacattttgccatgtaccacaggttctgggctttaggcagtgggcattttggggtgcaattattttgcctcccacagatgaattctaaaagaatgagtcacctacctccatcatacatttctagagtactctgagtattctagtgcttttgatctagaagtagaagattcagtatgaattctcaccttctaaatgctattagtagatttttttaatatatatgttatgaaacttggtaaagagtatttattttctgtttgataaacagaataactaggggcgagggaaaaccaagttgaccattagggcttgaggtagaccagaaattttttggtttatggcagtggttttatttatcctaatccttttaatcactacaaagcatactagaaccatagagagagcccagctgggaaaagg

SEQ ID NO: 107646 - DNA, 1776 bp, Homo sapiens
aacttaaacacagagcactcaaatgataaccacatagcacaccttccctgagtccagcagatgatagtgaaaactctttgttctctcatgctgtgtatcttgaggacattttcactatatttaagactacttgaactgattacaattcttttatgattgggcagtggatcagtggctgggtttttaaaaatcatatttaattgtattttgtgcaatggtgaagtgttatatttctgttcactcttttctgttattcacacaaaacattacttgcccagtttattgtttctgttcatctactgcttagactacaaagccatgatgttgagctagatgaaatccagttagataaatgcagtatatattggatcagttagtattttactctgttagtcctcttgcctgtggcaactctagttaactatagaaagaaaaaaaaagttctattcctccaaaagaattaaaatgaaggaggacagcatattttctgctttaaaaaatctagaattgtggtttctaaagaaaacccactgtgtacttgataatttctaaagaaaaatttgttatggactataggttataccttgcatttaagaaccacaacgaaaagaccaactttaacttctcctcattaaaatgataagaattggtattgcctataattgtttccactgtgactcctatgtggtttttgttcaatatactagtccaaacaagattttactcttctcagccctgtagatctaatctcacaaaactaagcatatttttttcagtttcatacatcatcaccatcatcttcctgaggatgtatttttttttttttttttgaggcagagtcttgctccgtcaccaggctggagtgcagtggcgcgatctcagctcactgcaacctctgcttcccagattcaagcaattcttctgcctcagcctcctgagtagctgggattacaggcacgtgtcaccagcccagctaatttttctatttttagtagatacggggtttcaccatgttggtcaagctggtctcgatctcgtgacctcgtgatccacccgcctcagcctcccaaagtgctgggattacaggcatgagccaccgtgcctggccaaaagatgtatcttaacagaagagaaacactggagtaggaaaaatgctgccatgtttagtcttaaggaatttaagaaaataaattgatttgtgcttcatgaatccataattaaataggtagttcaagaggcaagattttgaatagcaaacagtataagtaagacccagatgtggcagtctactctgtaggtaaacaagaccaaatcagaagaaattcaaggtcaataaaaaccaccagcactttatccaaatatagttctgccatatttatgtaatgagtttaagtataaattgcttataattacatatttccataacatgtagtactttacctaacataatatgtattgcattataattattaatttaattgtctgaacctacttcttatgcagagactttattctgtcttgaccaccgtggtttccaatgtactcagcacagttcggaatttgatattcagtagattatcacattaggttgaaagagtgaatggatgaatgaatattcatgaataaatgaattttttaaaggacattattattattttatttactggactgattgccatacagggatatatgcatcaaataatagccaatttttcaagtatattgggaattaggaatacctttgatgtttatgtcacctattcacaggactttcaa

SEQ ID NO: 107647 - DNA, 2228 bp, Homo sapiens
aaaagcaatctgagcaagatacagtcagtactgaatagttggaagagcaataagagaagtgcctgaattaacatagacctcctaagctggaatgctttgttgttctttccttgaagttctgtgacctggtgatatctaaaactccttctgtgtgaggattttagaaagtagaatgtggtcagaagcagccctttgttcgtagtcaatggtaagatctgtagttctcaccccccttcaggttttgttttgttttgtttttttattgactagaggctttgtttgtggccttgtgacttacaagataggttactgcaatataatgcatttgctacttctctggaaagccattcagaatctttaaggagtgcagaatgtacaactcttttgctaaagggtctctgccagagaagcattcttccggattttgtatattgcattgattacggagctgttgctcagtgcatcattggatgttgactgtaatctataaagccttacatagttttcttccaattaaagaagtctgacactggtggtcaattttaataatgactgagattgatctatgtgacttaaaattttaacagattttggaacctgaaatgtgagaaacaagttttcttattgatgacacatactctgaaatctattttaaaggtgggttcagtgtacagtagtgaatttgaattaaaaaaaaaaaaaaaaacagaaagttgaaaatagacaaaagtgccaaaaataaggtatttgtcctgactttctgttccttcatctcacctgacattccctcagaatattttacatccttgatgaccagtcttttaagcaattctacctgataaccccactatatagtgacagagttactgatttgttccatgaggagataagaagaggagcactattcatatcaaagacaactggtcctacttccaggtccatctttgggccaagatatgtagtcgccaacagtgagttggcgactatattttttgagtcctggcgcaaagtaagatccatctgttttgcccagccgtttgcctgagtgccacaaaatggtcctgttattagtcttatttgtggtcctatttgaggttaggtataatgtaaataaatttcagttctcctcgtgatgagtagtacagcatgggaattaagagggctggtgttggtagttgtaagtgatgttgagtctctattttttcaattgctctgttttctttggattgggaaacagacatttaagaatgagtttgtcatctggaaggatagttgtgaccaagtttccctcaacaggatacaagatgttatttttgagcctcattaccctcaccaagagaaaaaaaaaaaagaaggaaaaaggaataagaaagaaagtgaaagtggagaagaaacaagcagaaatagaagaaaaagatcaaagaggagaaggagaaatggcatggggggggaatgaaaattggtacactgaccatctattcatataattgatttaattattttgagctgatagttcaattcattcaacatctggcaaattgaggagaaggaaacctgactgaatgaattgaattactagttgttagttatatgtttatatgtaaatattcagcctagtttctatcaccttttcacgtctaaactagagaatgaatttgtttcgctaaccatattttgttggtgagtagaacaatgccagttggtgaattagatttatccagaggtgggcagttttaaatttctgaatcatttttcagagattattgttattcaatatatttatattatatctcataatttctgagcacaagttatttttgtcagtttcttttatgaatattttgctgccttataaggaaataatgtgcactcccctcctctcattcagttgtccctggtgacgcctccataatttctgcctttacgctggttcatttttagcctaattcaggcatgtgagaggagggggaaaagtttagttagtcaatgtcagtgattttttttaaatctaatctcattcatgagtgaatttactgtgaacctgagcatgtttacgcttaaaatctatgtacatcaaatagaccaattacccaaaatattcctctatacatttcaagagaaaaagaaaacaggaatcccaagtaagaactacatatgctttctaataatagtacaatttaaggggtgatttgtgattatgctctcatatggggaaatattaaaatatt

SEQ ID NO: 107648 - DNA, 1048 bp, Homo sapiens
ctgagatttttttcaagtctttctctcaaacctactttgtaaatacattagaatagccccagttttacttttattcattcattttatttcccttacccgtagtgttgaaatggaatttatcaatgctttagcattataagattttcaaataatttaaaagaaaaattatcttcactttaagcattgaatgcatcacttttttccataaacccgaaactcagaacctgtaggaacgccttcatttgctttatttctgacattaaatttgcaaaaaggcactttccaggtaacccatcagctatgtcaccctgggtatttggccagagggcagtcatgttgaccccatctgcaaaggctggctaaactagagtcttggactattagaatctcattcatcaaggtccacataaagtacggtaggtgggaagcaggaggacagatggtagggtcgggcgcaaggaacttgtttgttgacattgatgtagacgcttcttcttgccagagtgactccatgcacttattttggcatggaagactaggccaaagctatcatcttaatagaaggtgagctgcaggcaaactagagagatccatgcacagtaggtatttagagttggcttagattttatctatcagcttgactgtcatacatacttgattgatgtgcagcagggcttgaaagtgctgcattgatgttgaggactgtgtcataaggttcctgatatggtgcacatgtctgaatggagttggacattggctgtctttgcccatgccaaacaacaccagacttcagtgcattattctgcagttgagtagcagatggtgactgcagacgtttggagggggtgtgccttcaaacacaatatggagccagcaaacttacttagaaggttattacatgtcttgactttggcagctattttttaagcactgttgaaaatccaagttccatccattgttattcgcaaaatactaggcaaggttggtattccatggaaaagaaatgtgaaaacgcaaatacactgttcactatgctggttacagttac

SEQ ID NO: 107649 - DNA, 1036 bp, Homo sapiens
tcttctagtgatatggatagtacataaaatctagtatcaatggcccagtgtttctctttcatagagttctttgattttttcttatattcttataagtcctttctttggaaaatatatgaacttagaaacagaagtttccctggctcatattatgcccatgagacaatgataatgctgaagtccttttcataatcaggacctttatagagatcatccaggtattcttagccaaaatatccctctcattgtacactactccagggcaacatgtggtgtgccagctggatgccctccctacatgcctcaggtggccacatttcaatggtgcctatagagcacaggccaaattctcattctctgtgttaatcagtgggagaattcccatagaaaatgggatgtgaacatatttcaggaaaactcaaagagattagccagatgattaggccaggacattgtaagttcaagttttatgtaggatttctatagcattatcttagttgaccgaagaatgctataaaatttggagatatttagaaattaaaaataatcatccttttcattttactgtgatttctccaaagagaaattcaacaatattttttcttttgatataataggatctcatcttgattcataacatcaaagacaacggatgtacctagtcatataatttgactgaaactttttcccatggtattaaaaggatctgattctacttgtagaagtctcattatacttctcttttcaattaaattctagtcaattctacaaacatttagtaaatgcttactatgtacaaagcactttaatagatgctctgaataattctgtgtatggtgctttatagtatgtaacatattttcacattcattttctcatttggtgaagattcactttcttattattacttaaattgtctagagtttcagatgatgttgtttcctaggtagaatgtttgttttgtttttgcttgttctatttttgatgtgtccagagaccattctagaaatacatttagctttccttgaaggaaaaa

SEQ ID NO: 107650 - DNA, 1037 bp, Homo sapiens
ctgataccagtcaccatgccttcactagatctggggatggacaataaagtatatgaggagtactggcatactaagtcataataaaattagctaaatgttctatatatcaaagaatgaggtgattttggtaggtaaaaggtagtccaacctgcacttctgttgaaaaaaaatgactgttgtatcaacctggtattccatccaaacctgaatttgagtttatccaaagagctgcactgaaattcagcaagatagcatggactgggccaggtgttgcaggcagaggacaggattttactggcttggcagagtaggactttaggttatttcctccaaagtgacattaaattcctctctgtgctatcacaacaccttttgttttttcagacctgtctatagactctcagaggcttattctgtttcgtgaaaacaatgcagataagctgattgaaatgtcaacagatataaacatgcagataaaatgttagtatgtaatggtagttttcaaacataatgagtaatgaaatttaagcagggtccaggtggaataggatcctagaatcctagaataaaaacatatcattttagaggcagaggtacagtcccattcctctgtttaaaaagatgaggtagataaagtccaagatctttcatctggagtgtttgaaagagttgggactagaagcacatctctggtctccagtcaagtgccttttctagttgagcttgacttctttatatctggataataaaatcaatctcatacaatgatataggtcatatttttccaaggcagttaagtattcattcactcctataccatcaataataatgacaaacatttatataaagcttacaacctaggcagtaccctaattgctgcctagcaggctgtaagcgctatatgaatattgctgtatgaatgttgcctgacgtgaagagttagacactgtagagtaattttccttatattgccttttgcttaatattgcccctcttttaaatcttcacaagagccacattaactaggtactgttgtc

SEQ ID NO: 107651 - DNA, 1089 bp, Homo sapiens
aaatctataaaagctcttcctgggagatcaagttgagaattgtaaagatacatttaaattccctagtcaatgctataagccttattttgagggaaaaagaactctcccatctgcttactctgtggggataaagcgatactgggagaaaattgactttacaaaagccctcctgaaacctttagcaagctttaggtgtcacttcagagaccccctattagtataaataacatcagtgggtaaacagtagctggtgtccttaaatacaaagtagaaattattgtttagctttgtcctaaccagaccttgattagaagtgggaaagagtattttggggtgaccacaacaactttcctttcactgtggctttaagaatggaatgagaaaatacggtgaaaatataatgaaactgttttctttgggagagtttattagatgaatattttaatacaaatataacatattttaataccaaagataaaaaaaatccaggctttcttttcaatgtgataacgactccatatctaactcaatcagacacttgcttcagacaaagaacgggactcttgccatgggcgggtctgggtttaatctcaggagcgtgagggtccaggcatccagacagtttgcagccctcttccctgaggcttcagggagagagagaacaagggtggaaaggtgcaaggattggagcaaaggagctaagaggtggatggaaaagagaaaaaagaacagcctaaaataaaatattttagcaccaaagcaatgaaaatacattctgtggataatgtaaatgctatttattgaatttttacttttcaaaaatgtttaacttaaaaattcttgctgacagtgggaatgtaaatctaagactaagagacgaacttaccagaagaagtttattattgtctgataacagctgaattccggtcttctttgggtactgtaaaatggggcagatttgtatatctgtgatgtcataggcactgttggaagggcttgtctctggttttgtcataagtttcctacttgagcagttataagccatgaattagaaattcattttagattttgaagagttacaaatttgga

SEQ ID NO: 107652 - DNA, 1011 bp, Homo sapiens
gaagcacggtgaacaaaggaaaaatgttagaagatgagaacagaaagatggtcatgaacagataatggagagacttactggtcatggttttgaattttaatttcttcttattgcactatatataacttgtagaattttaccaaaggaatgatatcatctttcctgcatttcaagaattctagcttctgtttagataatggattataaggtgcaacagtggaagcagagaaatcagttaggagaccagataagagataattgtgatttttgttcgtgatagcagagatagtgaggaatggtcgggtttgggatgtacttttgtgtttgggttaatgcggcttattgatggattagatgtggtgggtgaggcaaaaagagttgctgatgtttggcctgatcaactgtcagggcagatggtggcacctttcactgagacgagagaagtacagttagattagaggaggaagtggcaacatggataatagggaaaccagagttctgtttggggcataaattagtttacagtatgtagaactaacaagaaaagtgctcattattgctattctatgttttaagccagttcttgctttggaaaaccatttccaacatcttgtagcatcttgtttccatatacttccattttttaaaatctttgtggtggaattttttcagaggctatttgagaatttgtaagtaatatatactgactcccacttttcaatatagcaagttaatcagacaaaatatctcttatagaatgctagaaaatccactgaggaaaaagtcagtgtagtattttgattataatttattaaaacacacatatcaaatacaagataacctttggcctttccttgagtcagactttgttatagcttctaatcatgtcttgccctattcattagcagctcattcatttcccttatgccacctcactcaccttaaaatttaagttttagcagctttgctgtaagtcttataagtgcagtggggcatttgaatggatcgttg

SEQ ID NO: 107653 - DNA, 1305 bp, Homo sapiens
agctcaaacaatctgcccactttggcctcccaaagtgctgggattataggcatgagacagcgaggcaagcctatctttgaactatttaatggtcaaagttttgctaatgtatatacagggaggaaaatggctggttcatgctgattctccatcagggctatcagtaaaagagtgagtgacactgtaattaatagaacaggaatgataacatcttataggggtgctgttcctgcttttggaatggcttctttaaatgtgggatgcatctaccccatttggttgtaaatggaaacatcagtaaataagtttaaagacatccttgtttgcctctctgatggcaaactccaatccatacatccactacagtctattttggtatatcttctatgaatttctccaacttcttacttaagttttgctaccttccaaggcaggcattaaaaaaaaatatggaatagtgctttattacctgaccctatttgtacttttctgaatatgaagtttgacctctagtattactattctaggatttcatgaataattctatgactaccctctgcctaaatttcataaccccattacatattagatcagggttcagtgccctgtcttcttttaacttttcagagactttccccccccagtcacaccatggatcttcaattccagggctctacacatctctctccctttaggccctcatgattgtggagattgcaaatgcatcattatgtccattcgaagatgtcaaaactttacataaatatatggaaagctttctagcctattttcagtacacttgatgagttccaaaattttattagtctttttggttacagtctcatatttaagctaatataattaggaaacaattgaaagtggttcttaaattcttttttgagttaaacctgatgtatcaaataccatcattataaaaacatgatttgtgttattttccctaaaaatgcttcccttgcatttatacttattaagaatagataatagctaacatctatccactgcctttgattcatgaggccctcacgaattgcctcattaggtctccgacagtatggtacaactactctttatattttacagatgaagaaactgaggctgtactgctactttctgcttacacatcctaatgaaaccttcctactggggtgatctcttttggtttgaatgtcactacttgagtgagattttattcactactttttcttgatcattggcaaaatgtccaatggaactaattcatgagagagtcattttttaaattaatttgtttactgaaagtccgaa

SEQ ID NO: 107654 - DNA, 1053 bp, Homo sapiens
caaatagtactgacctattagaaaaattaattatgaaagaaaagtaatggattatagttgcagataatggttttggggacactgctggttgaaattcatcctgaggcttatttacaattggcacaattagagcttttgagaattcagcagccttgatttatttgcaggggttcatatagcacttgagtcacgggcgaggtgaggcacagaggtgggtaggggacttactgctttacatttaagttctatggaatttcacatttctattttggggaagaaaggattgtctctagagagagagcatcaggttctttaacaagatttaataaatttgggtccttgtatcgatcaaacttcatactagatcagataacaaaaaattgaatatggctttgcactagaggctattttattttctgtgctgccaatgaactaagtttctataattttgctttcactatttgaaattttaatttatccatcagatgtttattgatacctaatgtgtattcagtactttactagccacttgggatccatcagtgaaaagataagtaactcatgtagtatgttaggagatgattagtgcacaattcatttatgaatgacccataaaagaataagttgataaattagatttcatgaaaattaaaaaattctgcactttgaaaacattattaagaaaatgaaaaggtaagccacagactgtaagaaaatatttgcaaagaatatatctgataaagaacttatatccagaaaatacaaagaacttcgaaaactcaataatatacaacatattatttaaatgggcaaagatttgatcaggcacttcaccaaaaaaaaaaaaaaaagaaaaagaaaaagatggtatatgatgagcacatgaaatgatgctcaatatcaatcattgttagaagaaggcaaattaaaatcatgagacactattacacatcctttagaatgactgacatttaaaagactgagcatagcaagatttttgaggatatggagaaactggaagcctcataagttgctggcagtaaagtaaaatgg

SEQ ID NO: 107655 - DNA, 1050 bp, Homo sapiens
tcaaattctctctcttcctttgagctggtttgtaggaagtggggattaggaggcataagagtggttctgtcaattagatgcattacttcctgaaagctagaaagtatttgggttgttggattttaatgcagtatgtatatagttaattcacattgatagtgagccacgcattcagtcaatcaacaagtgcttactgaaggcccacagggtgcaaagaaccctggactaagtgcttaaacttgactccatgtgccttactgtgttattgcacaagtgctggagtaaggttggagttttcccagattccaggtacccaatgactacagtagattatgaaagagcagttcaggtgagagccaagctagaaacacacacatgcaaacctcagaaaaaaaaggattcccaaaagtcctctattttgtcatggagacttttttctccatttcactggtcccacgaaaaggcccttgataatctgagttttatattgcatttttggccaaaggaatttcatatgtttcacagatgaaataattaaaaatagactctcttaattcctataaaccctcttcatcccccaccctcccagtaaagcccaggataaataggccgtgttaccatttccaggaggcttttggttgatcagtgtaaatgaggcatattcaaagttggtgatcagggatatgtagtgttaggtggggagggtaactatgaagcatgtagtgtttctttttttttttttctcatgaaccaattctaaaggtaaggtcccaaatctgaagtaatgacggtatccctggagtgactttcttccaaggtgaccattgtgaaaaatagcccttgtgagaagcctatagatttgtttaaaaaattagtccgattcctttataatcatggctcacacatgatgaagctattaattggttgtggtactaaaaccatttgcttgagtgaaatgaaacttctcctctctcagatcactaaatatactttaactgtggagtaatcattccgtttcttggactaagatatttttagatcaagagtaaa

SEQ ID NO: 107656 - DNA, 1067 bp, Homo sapiens
gggacgttaagtgatgagcacaaaaacacagtcaggattcaaaccaggtctgtctgactccaaagctgctttctcttttcattaccctatgcaatcttttgcagccaatttaaagccacagaaaacataccaaagaaacaaagacaaaaactatacaaatgtactggagaagaggaggcgggaaaacagaaagtgttttttctagaggcagactcactgatggcaatgagaactgaaatagaagtgagtaccttggctaaacaactaggaaaaaacacacaaaagaatcatgaaagtatttatataacttccctgttagcctctattatctttgatagtagtgtaatattttatttggattatcttttattattaaggctcttatcattttctagttgttagtatacaaagtattttgacacatattatgtcattttccactcacagaaaacttatattgcaagaaaggaagtattgctattcctgttttacagatgggagaactgaggcttgggtgggctaaatgatgtgtcaaaactttattaataataagtaacagaaagaacttaagaatctggaactactcactccagtacatttctaccatatcaagtcacttatttgtttcagaaaataggaactcattgtaaagattttcatcttaaagtttaaaagaaaactgcttaaacaggtaactagaaaatttacttacaacaaatgcctcattttcctattactcttctattatagaaaacaatgaagcattgcagaagctaattttaaagattaaagcaactcacacataactttgctactcacatgaggtcattttacagatactaattggggtcctctaacttcttttccacatataccatgttatttgtcattctacaatcaaagttttaatttataacttcatctggtagtctaaagtttagtttagatttttaaaatctcctatttaaatgcaaatatgcttatgaggggaaatataaatggtcaatgaatgtgaatgctgtagttgacaccttacaacaggacaccttacaagggattagtccagg

SEQ ID NO: 107657 - DNA, 1034 bp, Homo sapiens
actccctgtgatatccatgagattatgtgctgtatgagaaaagaatcaggaagtggaatgtgaaacaaaagaactggaaataggcctgcaatcaatctagcttggtatctcaacaaaccagtgacttttttttaatatgtaagaaattcagggcagatattacagccctatcatgacagcacggccttttcttcctcctcttctattaaatctacattttgaaggtggatggtgctgactcataaattaaattggagtaatacatacagtgtatatatatttctgtcactttgtctcaaattaaacacgaaccttctcccctgacaagatgatagaaaagttaattgctcgccctggctttaaattggaatttgaatttgcaaaatgctaaaggtttatgagatctaaatcatgaggagcttaaattacattcctgtgataaaatattaataaatcaattaaaacataagccgagtataatattactttttttttgtaagaaccttgaacacaataattcattagggtgtagtgcagtaacaattattgtatctttttttaattttctttttattagttttttttgataaatacatcatcagataacattccacatggtggattatcattaccccaatgcagcttccagaaattctgttgtacccctaaacaagagctcacaggctgaattgtctgctcttatttatccttgttagcatcagctgcttcttttactgaaggggtatttgcctcttgggaacatctgttcaatgccaactctgccattttgtggtttctgaatctctcttccaaaaatgggcataatcataataatactacctcagaactggcatgaagatcaaattagataatgtatgtggaaatcatttgtaggtggtaaaggaccatcaaatgttaattattattatcatagattggggaattttttatctctagaagggctcttagacgtcacttagtaatcaaccccctcattttaaatctgaaggatcagagaggtccagagaggttaa

SEQ ID NO: 107658 - DNA, 1762 bp, Homo sapiens
acataacaaatgcagaaattggagaagtgtaaatctatcatttcttttgacatttatgtagcttcagtaacctcctaagttgagatcatttgagatttttagaacatggatacctctagaaaaaatgaggaggttccagtagctcctcagaaatagcttagcttcacattgaaggaagattcataaggtctttatggagcaaagatatttgatcagaacaaacattcttatcatatggaacctttttcctgcaaaaaaaaatgactgttagggtaattaaattggttatttgcagcttctctcctttcccctcttccctcttccacctgcacagtattgttatattgagttgccatgataagagtaaaaaataatcaaaccaacctatacacatttttattatgaacaaaaaatacttggaaggattctattgatacaagctaatgcaagataataatttgtttattcaaaagtgttttgaatgtccttttccattgatcatgtgcaactggtataaacaaagatcctatgtatggtagagagcttatatttgcatttctttgtatatttaagcatttttagcagacttacatttctgtttattgagagtactctttagaatttgtgcaatcatatgtatatatcagcagcagacatttgggtaggtagtgaaggtaagttctatagtcagtgtaactagaagattatataaattaattatattagttttgatgctttgggtaaaatcagtgtgctacatgaacctccagttacacaggacaatatactgtgctcaaaagacatgaaggcagactaagagtacagaaaagctgttggttttgtttggggagttcctggctttttatccgcttggggaaggagcaggtcttattgtcagttgccaagtgctctgatgctgagaagtttgtcagctgtggttactttggggattttggcaatgataagcacttttccttgagaaaaatcagcatagataccacacattggaattggacaaattgcttttattttctattttctttaaaaatcaaattggcttttccttcttgtcccagctgttgcagcttccttgttttttagcttagatgatgggagaaacacatgttccctgagatccagagtaaagcttacttattttcttcctgtacagactacgtgaagttacgatactggccccaaatctaactaaacaaagttattcagaagagatttgacagagagggtgtctaacaggtgttgagctggggtaattgaatgggtatttcaaagatattaatgtaactcgcatatattagaaagctttaattgccatctccagcatgtttagacctgaaaacttcagggacctaacctgttccatagagaagtctttttatgcccctatggtttatagctggaaacaaagtatgtatgtaagagttggattggggcaggtgcggtggctcactcctgtaatctcagcactttgagaggtggaggcaggtggatcacttgaggccaggagtttgagaccagcctggccaacatggtgagatcccatctctactgaaaataccaagttagccgggcgtggtggggtgcgtctgtaaccctggctactcaggaggctgagtcatgagaatcgctggaatctgggaggtggaggttgcaatgagacgagattgtgccagtgcactccaacctgggtgatagagctgaattggttgaagtagtacacagtaaggcactaaacaaacttgac

SEQ ID NO: 107659 - DNA, 1050 bp, Homo sapiens
catatgtttttacagaacaatcatgatggtgctcccttaagaatgccctttgtattctgtcctcctgttctattctgtggtttgataagctatcaatgaaatgctgtgatatctacttgtttgaatgtattcagagagcaaaaagcatttcaggattgtttagtgaatattcatttttttaaaaaatgttttcagtccatgagatttttcctttactctggagtttaagcaaatgtatacgttatttataaaagggagggtctgcttccctctatataacctgacagaatatttatttaccttttctttttaagcctatgtctaagcacagctcatcttcacaaactgaagtggatcttgatttctggaaatgtccaaataatggtaagagtgctacagaggcaaagtcattgatgatacctccagaataggatgtattcataagttatttgtccaggcagtgttggttcttggataaagacaggctttcagttttcataatttctttaacctggaacaatttcattttaaaatatgaagagaatgacataaatctttggtttccaaggagagtctggaaagaaatagattgttagaggacagcgcccacaaattgagaaagcctgttgggggccctttgggaatttggctggaaaattatgttataagcagtccttctgctcagcttcatgggaacatggttttagaaatgaaatattgcttctgtgttccccaccccccaaaactaagacaaagatgaaatattcatattatcctttattttcagaaccttttgtgttatttctcaatatgttaaaaaactttccttaattccttaatgattctgcccaaagggtactttgtaaattctattcattgatggtgtactaaactcttaattcctggtgaaggcatttgaagccaaagaccttgctacataagacatttataatgtcactgggatgtttaaaggagaaaatcatgtgatccaaatggcaaataaaaataaatttagtaacatctaactaaatatgaccagttttccattta

SEQ ID NO: 107660 - DNA, 1038 bp, Homo sapiens
tgggggataggagatttagggacctagaatggaatacctcatgtacgtaaagtgtcttgcagttcacaaagcaccttcctaaattattattttaattacagttattgaggtagcagaactggtgttattattttaattttgcagatgagggaactgaggttccaaaaagttaaatcacttagccaggaaatgtcatagccaggtttttctgataggttgtccagttctttccacatgcctcattgtcacccagaagcaacacaagggagggttatatagttctatataactctctctatgcttctatacgcatcatatatcttgttttctaatgttattctaaatatttttcattcacttggttttatatccccattttctccattttaacatgggtaaaatatgtaagacccaaactgagggagatgtgtatgggtaagaaactgattattttggtaactggtatggatatgaaaaccataacgagtctgtggattgcaagcattttaatttattttcttgacttttgagttaaagaaaagatttcaatgtgaaggtgcaaaatatgctgcactgaactaatcttggaggtaaccaaagggctgtgggactaacagcttttgatattacttagtgcttattattgttattattattatttctttttaattatgcaaagtgctaatcagtttgattatgcacagtgctaatcaggttaattatgcaaagtgctaatcagttcttcttgaagcacacgaggagagcagaggtgctggcggtgaatggcatagctagatgggggtagtcacggcagtcattccttattaagataggagtagacaagatagcaagggggatttatccataaaaataaataggaaaagaaagaggactatgagcacatgaaagattgtagtttgggcaggacattgcttacacatagaaagctcctcccccctgtagcatagtttggttggatagtctctgctatattttgaaggcactcatttgaagccaaaaagactgtagagggaagga

SEQ ID NO: 107661 - DNA, 1046 bp, Homo sapiens
caagttcacacttctttgggtcactaaaattgtaaatttgcattatcagatgcagaaaacaggccaaattaataatgttaaatatatgtccaaggaaatgcatctcccatgaccatttgcagcacccagatacggatgataattccatcgaggctttggtgccaattcgtacctggctttataattttcagtttgcccttatgtcctgctttacatttgtatagcttgttataatcttgaagcatttttgtgtaccatatttcttttttgtgtgttattttagacatggcatttcagaaacttgaatgagcctagtgtttattttcagttggttgtgaccgcagctttattagttattttgtgtgttttcaataattgttaatatttacaaaacactgaacaaacctcttcaagattgctttacataatctccttttccatgtgtcaaggatgagagctacagagagaagagtcatagtgactcaccccgtatcacagagtatgtgaatttactttcaaaggagagtcaagggtccctggttttcagttcttttttttttttttttttttaattctccaagagtcatgcaggtttggagacttacaaagggatagcattgctgagtggagaaacatttgactcaagtactcttttacccctaacatctattttaccatttccctccctatattcaagtcttcttttccatcatctctccagtagatgctgaaaaccatttctttttgaagagctggttcatatgataaagacccaaagtctcaataaaatctattaacctgttaagggtaagtgtatgcattgttcactggagagcatgatgccatattctaccctgtctgcttgggaacaaggccgatggcagcacaaattagcatcagaacagagctttatcgcagtggaatcccaggttgttttaggaatgagacacgaaacaaaaatagataaagggattaaatctatcaaatataatagaggaaattgtagtagattcagggaacttggacccctgaattgtagtaaccaa

SEQ ID NO: 107662 - DNA, 1089 bp, Homo sapiens
ccttggcagaactaaaccattgagacccagaggtacttgtgcatggggatggtctttaagataatatttagtttattcaatgagccaaaattttcagtacatttattgtttgtttttgtcataaagacatggctacagtctacatacaaaataccaagtagagatttgtttattgtagtaggtacaggtgctcaaaattgatatttaagtctcaaacatatttttccaccattctgtattggattattaacacatgaaaatatgtactgttagaactataaggtaacttacagattattctttgagctaatttaattattattttacaaatgaggaaatgaaatcccagtgaagttgaatgatttactgtgggactagagaagtctagaatgagaaatttaacagtgcagtactctttacttccatgtatatacctttcaccatttaccattacactgaacaatctttctgctatttgtatttttaaaatgtgctcacagggttaaaaaatttgaatggtacacaaggatataaagtgaaaagtatgtctttaccgactgatagcactattcaccagagataaaaagtttcaactgtacttgcgtagagaaatgtgtctatatacctttaatttaaaaacagaaagggaatcatactgttcaaatacatttgtacttttttcttaatgccatgtcttagagattttatatattctagaaattttatagtgtttatattttggtatattatattttaccttttcctctttttaaacagctacttaatatttccattttatggatgtcacaaaatgtatttaaccactgcctatttatggaaatttggttatttacagtttcttcgctgtttaaaaatattacaaaacagctttctaaatatatccttgtttttattttaatatccacatagcatactttcttagatatgtttatataattaaaattttgatgcctgttaaaaattttccttcaaaaacatttttctgacacacacatgtaacaacattatatgagaattcctgctttctcacagcctcatcagtactgggctttagcaaatttttcctaa

SEQ ID NO: 107663 - DNA, 1256 bp, Homo sapiens
cagtatgcatccatttctgtcttcccagccataagaaaaaaactgactctaacgtttttttttacttagagttgcaaacctcatatataaggctctggtcatctgcaggatctccttagaatacataaaaaggtgataagtgcctacatgtgattgctaagaccattacacggcaccttggtccaattccagttgagtaattatattcattttgtccttattttccttttcctgattgtttcagttaaatgtggaaagtgatccttcatttttcacccagagaagttcggcagtgttgctgcacgtattatttagactttactgcctttcttttcagtcataggaatggagcttaaaagtgctggttagaattgttattgtggctattactattgttgcagtgttgcctgattcagaaatgttctgtgaacatcaagcacatgactggcttttggatgagctgctggactgtagggtgatgtcttcaacaagccttctttatctccttactccttgcctagcttagttccttagcttaaagggacagacatgctttcccttttcatacaactatgatagtactaacagttcccttttatcaaatgcttacctcatggctggcactgtgctagttcctttatatggctataacatataacctgcatagacaacctcgtagggtgagtaacatgatcaccattttacagacagaaaatttaaattgcttaggatcacagaactaaagatggggagctggaatttgattccaggtttgtttgatggcaaaagctaagtgcttaactaccaccctacctcataactctactgcttcccagaactctgagccccagtctatggatcactgatcacacaaatagcttcttaccttctcttagtgtttgtcaccacttcacacagattgaccccattgacctcacattggaataatcctgcagcactggcctcagaagggcattgctgattatgtttacaggccagcaggaaactgaactgctattgagagaatctctatgctgaatcattttatctgcataacaaaagtggtttgctctatcttcttttctttccctggtggtgttgtcataacagtgtcttttagcaggattaaccagtaactaacttatttgctttggtttccaataaataactgcagcctgttaataattgtgcatgtgttttatgtggcctcagataaactgagacaatcttacacatctgcattccagattgggtca

SEQ ID NO: 107664 - DNA, 1048 bp, Homo sapiens
gatttcagaaaagagcaaagtgctgtggcagaggtaagcatagatttgaggaatcgtgggcagcaaagtaaagaaggctttcctgaagaggtcgcaggtaagtggaggtctaaaagatgaagaggactctgccagggcagagtctagaaatggggaaagttggggaaggtacattttaggcagtaggaacaatgcttggtgcaaagatccataggtgtagggtttcaacagatctataactcgatgagattcatgcattagggacctaagagagacagaaaagggcaagtacataatgggttcttgtattctaaggtggggtattccagagatggagaggtgctggattaatgctgcatttaccttgaccctttcctgtggtattagtagggaaggaaggaaggatgattctgaatgcagtgcaatggaggtagcaaaaaattgatctgatgacctttattttctcattgggatagagagcatattgctttgctgataccgaagggggaggggtaggtggaatagaagatttaataaaagtgggaagttttgaaatagatgtaaaatatactaaagtaaacagatgattagggaaacttggaaggattattaagtaacatttgggacccagctaagtttgggagctgtagatgtgtagtggttataatctgtgagtgtatgtgacccactttagctgttgcagttctaggagtggagaaagcagatagctggactgctctaggcctgggttttcacctatgttgacgctcttcctgtttccttccaccactcacctcttgtcacagaagactgcttattcctgatactgtgactgtctgcctgaaggcattttttgtgtgtggctgctgagcagatttggctcacagtgttgggcaggcttaaagtaccaaatagttactgtcactagaaaaagacttaagcaaataactgttagcaagtgggtggattacactatcatccttacccttcacatgggataactgtgaggcatgttctttactgttttccagagtatcccagaaggact

SEQ ID NO: 107665 - DNA, 1025 bp, Homo sapiens
gtttacaaaatgcagtaattttcagatggtttactaatcttatttacccttcttttctgcatttttgctttaacctaattttttttaaaaaagaaaatcttaattggaaggatgttttgagtcaagaatacgacacttcataatgtaacatatattctggattcaaggtggcaggtaataaaaaataattggagtggaatttcaatgtctttatttccctgaagaccagccttgaagagcttcctcaagtgtgtctcctcttcctaaaggtaacatggtggggaagggagaaggtaggaattactctgacaagattttagttgttctaaatcagtgtgattaattttatcttaaagacttaaaatgtcccatattccctagttgccaagaacatggtagggaggaggcaaagtacacattctttgtttcaaagtattttgcagacagtctggtctattaagaacaaattctaggactaggtagtagggcttagaagttaccatgacccaaattgattttttcatttctcttaaagttgatggttcattttttgatgaaagtagcaatcatatctataaaaaccaattttgataggcctatcaaatctgaccataaaacagaaagctattttacattctacaaacatattattaaataagctcactgtgagtatacaagtactgtatgcatttttacttatgaaaatctttttaaaactgaagaaattttgaaacttttgtgatgataattaacaattatatgttaaaagccagtatggaagcctattttgtcataacattataacaaggcaacaagttttaactgaacaatggattcctgagcttctaagcaaatgcattttgacgtgttatttttcactatatgcaaatttagaagagactcagtttatcatgacctgtatgatacctcttagaatgttaaaaagaaaaaaaaagatagaaagaggaagggccacagtacacataaatcttgcctgcagcttccactaaagttactctggaaag

SEQ ID NO: 107666 - DNA, 1005 bp, Homo sapiens
aaaatatataaggaactcaaacaactcaatagtaagaaaacaaataacccaactgaaaaataggcaaaggacctgaatagacgtatctcaaaagaagacatacaaatggttaatgggtatatgaaaaaatgctcaacatcactaatcatcggagaaatgcaaattaaaaccacagtgagtaccacctcacacctgtcagaatggatgttatcatgtgaccatcaatggaggaatagataataatatacataaacatgatgcaatgtaagtcatctttaaaaaagaaaatgctgttatttgtgacaacatggatagacctggaggatttttaagtgaaataagccaggtacagaaagacaaatgctgcatgatctcacttatatgtggaatctaaaaaagtcaagctcatagaaacggagagtataatgttggttaccagaggctgggatgagagactggggagctgctggtcaaggggtacaaaatttcacttagacaggaggaataagttgaagagatatgttgtacattgtgtaaataaaaatatactctatacttaaaaattgctatgagagtataccttaagtcttctcactacaaaaatatgtggagtaaggcatgcgttaaaaatagcatgttgtatatcataagtatatacaacttttagttgccaattaaaatttaaaaaacaaaaacaacatcatgatatattaactaagggagaattttcaaaaggcagaaaatttctgaaattaattataaacagatttttatatcacaaagtacatttaattatttgcagatttctcaggattccctggggtataaacctaacagcttctctttctactggcttccattaatatgttatcatcccatctttcagatagacatattttaggaatttttttccacatggcacaaattctttgatctaaatgcaagggcttccaaataacattatgggaggtttgaaatttgaaaatgtttttcaaagatcagtag

SEQ ID NO: 107667 - DNA, 1043 bp, Homo sapiens
agatatccagatgtgtgaacactttgctgatatcatcagtatttgaaatggaggaatttagtatgttttttattggataaaaataagatatttatatagctgaaaataacaccaagtataacgttttctgctgctatttaataaaatctattaatatttagatgatttcttcacttctgaacaggttttctcattttgtgctaaactgtgttctttgttgctaaattcacaaaattaaatctaaaatactatggagagatgaatacttaaaaacatctgaataattatcttcaaggttacacaaccacctctttgtattttaagtattttagaaatggttaacttggttttgttcaaattattctctaggttaaaactagcgtgatgtgtttcataacagaaagttaatttaggcaacagcactgaaagcaaagaactcttcaggaaggtgactcttttcttatagaatagatagtattatcctaaaatgtttcccatgaaaaatgttttcccagtatgtttgagtgtactttttaaagattttttaaaaaaatatttaactttatgtaaatattttcattttaatttcagaattatgttactaccttagttaactctagagctttgagtggcttgtttttaacagactgatgtaattttggagttctttattgataggtatatgtgaacgtttgtttatttaacctgtatgttttgtacttcctatactggacataccattttattttccactggatttgagattcagtcttgactgaactattcactaacagttgggcaaattactttagttctctgggtttaagcctacacaccgataaaataaaatggaaaaaataacatctatctcttggggttataattaggattggagatattattaataaattgatgaattgaatacctagcacatagaaagtgttaaataactgatgattatttaaattggagaaatgttcaccatatttagaaaatattaaaacttttttaaacaatttccatctttctgataaatttgctac

SEQ ID NO: 107668 - DNA, 1042 bp, Homo sapiens
agattaaaaattgtggagaggccaaagtatttcagattatgttttaaggagcaggtggctttgagatgaagctaggtgtggtaatatttgcatccaagatgagtcgtaaacagttttgtaaacctggcttactttatatgatatagaagatctccatagacatttgaaaatctcagattggaatattataggaatttctagtatttttaaattataaaaatcatttcttttgatgattatttatcaatagcccagagttcattcgtgaattggggtatagtaatgatgaaaaaagaggaggtgaccgaagtgtgttttcttttttctcattgggtgtatatgtggagtatttttgtcttctgatcagatagttcattatgctcccttttggatgtgtgtactgtttggccttccaacctgcatgcttattcaaaggcattccaagtcattatgttggacttcagccttgttcagtaaaaggctatttcctccatcagctgtccacttggacatacattctttttactcgcaaaaatatttcatatgcattcagtttatattagatgcatttgtcaaattactcacaaataatcagttttttaaggttataatttgaggtatgacctctcaaactgtaaattataaggtttgacctttttggttcacagtttgacataacagccattaattacagtttttaaagaacattttatttcatttagaatttgtattttgaaaacagtttaagtattttctctctaagtttttggaataaatgtggaaatgtaaatgcatatgtatctatatataatatatacattcaaatatactaaatagattgcatatatacgcatgctatattcaaatgtgtttatgcatagtacattggtatacatatatacaaatatttttatataatagcttgtgagttaacactaagatcttcttttatacaactctagcatcaggatgagatcaactcttttttttttttttgagacagagtctcgctgtgtcacctaggttggagtgcaatggggtg

SEQ ID NO: 107669 - DNA, 1050 bp, Homo sapiens
actttgcgaactctctgttaataagaatgagcaagtaaataggttaaaagcaatttgggatttgcttttcttaaaagaaaacatgaaataaaaatgcaaatatccttatgagttaagataacttcttatgatactatagcaaacaccgtgctatgcctcctcaaaaatgtatatgcagtggtttagattgtatatttgggccacgttttactgagtacttgtacacatatgaatgtgttagctttcagttttctttttaaaactatagatattagttggcatacacaaactcagctacctgggtcataaagatattatagaaatgcaaatgttttccttggcagatttctaattttaagtattcctttttttacagacaaataaaaagaagtgttaagaattgcctttgggactctgaaggctgaaggtaatgtccagtggtattttcctgaatgggctttatcttcttgaattgtcttataatatttaaggtcttggatttgctacctcaacttttcttttattttattatttttcttttattgtccttaaacacattaaatatctttttctatgtatacctaaaaataatatgaaattgtaagttaaaaagtagaaattttatactctttctgaatatttcagcttaattaggtgttgctctaactcttgttccttctatttcattatgtattatgtccctctgtcctcctttttttttttttttttaactggtttggaactcatgattttaaactgtgttcttttgttaaacagacatattggcttaaagtcagaatgtcagtaacaatttctcctgaggaagagctttacaattaactataagaaataaaattgtatttgttggggacattgaaactcttcagatgagatttagtggctactgatagtcagaagtccagaatttcaggcaagaagtttacaatagactcgtgtggctgcattgtgtataaagagctcacagggattgaaggaggcttcttagacaagagggggctgtaattacttttcttcttacatgcatggtta

SEQ ID NO: 107670 - DNA, 1034 bp, Homo sapiens
ttctccactctaaaatgtgctcatattaattaaatatagtcataaaatttatccagttggatatatatatatatatatataaccatttgtccttagtaaagcttgaaatatgtgaaatcatggcacttcttttttttcccctgaatattatttcttggtcagaacattatcttcctccttggcaaaaatatattgtgcctttatgttttagcaaagtatctcaaagaatcatataaccgtagcaaaatggagctgaagggcaccttagagcccacctacccctatcatgcacctggcacctgagcctcttctacagcatcaagtggccactgagacataccaggctggaggaactaagtaccttttaaggcaacacatctaattcttagtgttttaatagcctaatatttgtttagcgttttggtactaatacattccaagtttctgctgtctactgacttttcactatttgttcccttagatattcatttgaaatctttttagtttaacctgatttagctgtttctttttattaaaaaaaactcgaggtaacttcttttctgatttaatgtagcaataccagaaaatcccttttgagtttagtctttcagattgttagtaaacttaatgatgagaataggagtatttgttatttttctgcaaaatagttctatctatatttctttctacttctcattgtgcaaagtctgttctttcattaagacactgtaattacattatagtcagtatgttttaagtaaaattctgagattcctttactttttcttgagtcgtctaaaaaaatatgttttgataaaatcaagtgaaatatcctttatgacttcaacttcttctggaaatacttgtcctctatatattttatcacttaatttgccaattatgtctactccttttgaataaggaggaaataccattttctgaaataaaaaaaagagaaagagaaaaaacagaaattagagaatattttaaacaatgtgttttatgtgttttttaaatgtcatcaaactcattct

SEQ ID NO: 107671 - DNA, 1030 bp, Homo sapiens
ttagtgtgtttaaagagttagatcattgggttaatcatgctttgccatagtatcattgctatcctttaaataaaaaaaaaaggtttagttagaaaattttttaacaagataaaattaaccacagactataacgaaaagtaatttcagcaggattatttattctcccaaagttgaaaaaacaacaaaccaaaaaaggtgtatatgtgacatctacttaattttttaaatatgattatttccatcttttgttctttgatctccacatgagcagagacacataaagtggcaatggggccaagggtgctagatggcttggcattcattaactatggcaattagcaccatttagattgatatgttcccaagatgaaagtaagaattggactagacaaaaaaaatgatgatcgcatttgtgaaagtggaacaacactgaccaacaagaaacaaagaaacagagctcaccttaaaagacttggaatatttgaaaaattgattatgagataagataatttcaacataactacaattccttgaagagttattaatgcttcggtagcattaaagtaaaatgaaaagacaccagggcagtctgctttaatagcttgctggcttgaaccctaatacataatgttcttgtaatagtttatgggtgactgcagtaaattggtagtgaatgtttttcatttttttggctcttcatatcagatctgctcttggagaacattttgttctgagaatattatgaaggcagttcatctactttagaagttgcttgacaattttaatacagtgttaacttttctcccctccagattgtgtgatttttttgtcctttgtacccgacatcaatttatggtttgaaattcagcaatttgctcagttatactttacctaccctgactaaatattttaagtgctgccacaagaaaagaaaaaatctaatttttcccaatgttgttgttacccctctctgtttatatagcagtttaaatctgcccttcatcttgacagagaaaaaattttagatgga

SEQ ID NO: 107672 - DNA, 1011 bp, Homo sapiens
cagcctgataattcaaagaagacttcttgttgtctaaagggatgtcagaaatgatgcttgaaagatgaataggagatgtatagacagggaaggaaggaggatctcttcagtcaaaggggactatatgtataaaagcatggaaattataaacatggtatatgtgggaaaccattatacccaaatgtaagtgtattttacaaagttcctataataatgtatgtactgttttataacaatttctccgtttaacactatgtgctagttgtttttcccaggtccttaattatttttcataggacattgttttcagctgctatatgatactctgtcatatgttgcaaatagttttttctaaatttattgtttgccttttagtttcatttgtttttgctatactgacctttcatttttatgtgttcaaatattctatttttaaaaaccatattacattttttatggcttctgcctttgcttttatgcttaggaagaccttctccaacccaagataagattaaaaattcttctgtatttgcttctatttcttttatggttttattgtttacatataactcttcaaaccatctggaattttattttgatatacagtgtgagataggctctaaatttactctgttctaaatatttaaccagttgtctcagcaccatcaattgaaaaaaaatctatgtttttcccactgatttaaaatgcattatttatcatatgctaaatacttaatttacaaataggcttgtttcttgtctttctatttgatttccagcctattttttctcttcagttctatcagtttctatatggtttactaggactacactatttattgtggcttttacaatacagtttaaacctgctaataaaagtttctttttagtatttttcattttaaaaggttactggctattcttaaccaattttttataagagatttagaattatttaatcaaggtctctctaccactgcccccccccttcaattttattggacttctgag

SEQ ID NO: 107673 - DNA, 1071 bp, Homo sapiens
taaaaatcagacacttgtaggttgataactgcagattccaggccacactgtaaaaacatccaccactcagcattattaaatattttaattctgagctttgagaagactaatagaatcatattgtaaaactgctttaaacacctccagtctctgcttgaaatatgttcactaatatttcaagcaacacgtcatctgtgagcaattctgatgttaagaggttcttatttactttgagttgaaacctgtatctagtattctcaacccatcattttattaatagtatatgccttgggaacatacagagtaatctcatttgaagttttcaaacatttgaaacgttttctatcccgattgttttcctaatcgcatagtcaacatgtaatacccttgattctttctaccattccaaatatgttatgattctagtctttcacccttcctcttcccccttcttaggatattattgtgcttctgggtcatgtatcacagtattgatcatgccatctgaccattgctgatgagagtgggaatgtcatctccctcattctagatactgttattctgtcaggtcagtttaagatttaattggaatttttcagtacccatatcacatggttgactcatatttgaccttactggagatgctatctcctcttatccaaggatacagtaacaggtcattgagatattatctagttatgatgtcagagaagaaggcaataatctccagtaaagggagagaatgcaaaaaataataataaaaaggtaaaaaattgcataactttgatataatgcaatggctaaaaggtgaaaatattattttaaaatgttaaacctttagacgttaccactttcatattgcagatgtgtgaagcaaatgttgatagtagtatatagtttttagaattaaaatattaaaattttaataattttaacatttcctttgaatataatgacgttaatagtttaccaacaacagatttttaaaaattgatgatttctataatgttggatgcattgtttacatttagggataaacttgtttaggcaaaatttagctgcagttttata

SEQ ID NO: 107674 - DNA, 1035 bp, Homo sapiens
ttatttgcaggtttcaatatggaaattcttaaattatagaaagaatatgtattctaatgaaagttgggatgaaatacagtagaatctcatcaataaatgtgagttaatatacacatacttaatttacacaaatttaaccatatgcattcatttaaaaaagaaatttttatcaaattattgagcaagtactctcactattccacttaaataagctcttgctgattagtgaactcaccaccctgagtgagattggagttatggttggcttccatccctgtttacttctcaggatgtgagcatcttgccattctgagtgattctaatatttgatgacaccaaaaaatacatagctttgacctaaaaccaattcagttactttatatggttctgaactgaaataaaaacaaaacaaagcaaaacaaacaaacaagaaactgttccaacgatgaaggataagaaaagctctgttggatttatagggagaagatttatagtctccaatgtgttacatcttttaaagggatagatcaaatgctttaaagtcgttatttctcatttggattcacaggaaaacaacataggctttgttttgtacttctttatctgtggttaacaatatttagttcagggggaattactgttcttgaaaggggagctaaaatggctaaaccacaacagagagagttataggcagtgatgtcagcattcagattagcctttactgtggactttactgaagagtacaaaaaactgaatgaccagagagtttgattagctataaacgttttttgaaattaattaaaaattcaattaaagaatgaaaattattattactaaaaacaattcaaacatgaaaatttttacagtgctcattttgcagtgatgggattctgaataattttatcttctgaaatttctagctttttgcattttctgagtctcctataatagcatttacagtttatagtgaaaattagatatacctcaaacattataacaaaactctcagtaatttaaatttatgatttcttaaat

SEQ ID NO: 107675 - DNA, 1031 bp, Homo sapiens
tcctctgaagggttttaagtgaggaaatgacttcttagttctattgagaaaaagcacttcagcaattgagtgtggaagaaggggtatgaagaaagcagaccagagtctgtgagactgttagaagacaattaatggaaatcagggtgaagtatagtgagggcatgaactgaaacagtgactgtgaagctatgaggaacctaagaggaatggattcaagggatttttaggaagtagaattgataagatttgggtactgtatcggtgaaggggtggaagttggatgctgttaaagaaaaagagaagtttaggatgactctcaagatgtttttctcgagtacctgggtggtgccatttgcagaaaaaaaaaaggactattttaggagtaggaggttggtggccagccagaggtcaggaaggaattgagggtagaaacttaggaaagatataaaagattcatttgaatttcaaacacagatttaccttgctttgagaaaatatgatgtgattctgtaacctgaaagagtaaaagttaggataagtgtgttatgctgaagctgaataaggggaatgagtttcatgggagagtattgattagggaatttctactagtagaaaacaggatgtccagagtcaaatatttattcttggagacattttttcccagattttctttaatgacagctctcctccattttatatccaaaagctagattggcttattcaaatgtgttaaccctaggatgtgtctgggagtcttctgagtcactactttaaggggatatctatttgaggaggcactatggtaatgaaagcaagtcaaataccaaatgtatggattgctatttaaataaccttgcacaaaccacttaacctctttgggtttccattttctcacttttataaaataagagggttgaatcggatgatctctgataacctttttatagtaagagccctatgattttatgaccctgtgaatagcatgattatagctctaggattaacatcttcaggaaatttaacagcagact

SEQ ID NO: 107676 - DNA, 1001 bp, Homo sapiens
cgtggcatattagtggaggtgtgtggaatgcttacacagtactcacccacactgaacctagatctagccaacgtgtttctgacttaaacgaacactcagcttcacacagttctctcccgattgaaaacagaggaaacaaaggaaaaagaaacaaaagtcgtgacaaaaaagactgttagctaagctagaatagttgtgtggtagtagaacactgattctaatagttggcattgtactgtatgccttccattcctaaatgcttctgctgactgctaggttgtaagttttcattaatgaatccacatttagaaactgctttttttggaggagaattaagcttttacctgctttctttctgaatgctggggcacatatttttgtgtaatttcatatcctgttttcctccctaagcatgtgctctttgtagaaaagagactcacacttcagagtaggagacagcatcaagactgctgaaagtttcctcttggtttgaatgttatagtggttgattcagtgctggaggcataagaatgaatgcactatcaaactgtcaacttttttttttttcaaacaagcaatgcaatactatctacagtgatttacatggcatttttctaattttttaaaaaataaagcaagtaggtagcaaagtggaatttgaaacattttcccaagttgaaaaaaatttaaatggtataatctaaagttaagtgcccagttgctttcttaaatattataagtatcactattggtcactttcggggcctataatggaaattaggtctatttgttcttcagattatagtctatctttacctgtcgtgaagcttttggataaaagaaatacaatcattctatatcgtgccttatcatggcattggaatttccacagttcattcctatctatgaatattattcaagtttcttctctactctttcttgtgcttttatttcagtcattacaaattctatcaatttcaactgtcctcagccttttgccc

SEQ ID NO: 107677 - DNA, 1849 bp, Homo sapiens
ctatgaatgagtgaacttaatcagaaaaggccgatgccccagtgcagcattgtctttcaaaactttaggtgctgcttttgaccctctttaaacatggatatccaaggcagcttaagagttggattatgcgttgctgtgaccaactgaggggccaagagcaatggcagctgtatggcaggttcttatgactcttaattctatttggagcacttcctgtgggcaaactcttacctgacacagctattcgagatccttagaacccatgagacctgatgccatgcaatgagtattccgtcagttacatcactgagacctcaaagtctgtgatcttaaccagcatgctacttggtataacaagcatatttattattcattgtatctacatcagttacagaaaagcccaatacctattcttccatacagttttaaactctggggtgatatagagcttcaactcggaggaaaaaataatcaattatataatatggtctcttatgaatgggaaaccctcaaaactgtataaccaattagaaattattcaaatttcttttactcgcaagaatgtttaaatgtgggtgaattgcagagataaaagaaataaaccctgatatttctcaagttctgccataaagaagtctagtttattgccttagtttcaaaagaatagttttctaagtatttcaaaatgtccggctggctgccccttccattctctttggaagcttctttgtcatcctcgtggcacatccctctggcatgcatgaccagctgcaagctaaaccctgtggaataagaattctttcatccctttgtgtgatgtgtttcattttcagagtttggatgatcctcttcggcagcagcagcaggcattgttagtttcaataggctgcctggatgcacaagaacagtcatcatagagagacaggctctcagggtccgtcccttcatgtcatggtgctgtgttagatcactttcctctgctggattaatggtcagagaaaaagggaaacaaactgtacccaaaggaatccaattaaagcacttgaacttcactgacgtctatcctattgttttcttaacttcctaacctatggttaattattctgaccagtggaaagaaacagcataaacatgggaattatcttaaattccctactttgtttagtttgtaaaggcatcaaaattttactgtgcaggatggaatactaatttggtatagttgaaattttttttggctaatctttctatttcttctttactctcctcaccaaaggcactgccaggacttaccgtacaacactccttggcttctggaattttatctctgctcacagtctacattacaacattagttcattctgggcactttagcttccttgaatctccagttgatctcacacccatgcctatgatattcttctcctggttaatcaagaattctctatttctgctccgtcatccatgccactgtaagtaggaaagtaatttaggcttttgaatcacagccttgtcatttgtgaaatgacttcccttgactctgaaattctctgtccaaaatataagctaggatttccagtaataacaatttatatgtataagatgattgatagtttgcagagtgtctttatatattttattttatataattctgactacagttttgtgaggagagaaccattattattatcttttttttttcagaaaaggatactatagctcagtgaggtgaattgatttactccatcacataagtagtaactgcccgaacctgaactttaaattcagttttccccaccaagaggtgatggttttctctagtagggagaaagtttctttcttaaaaccttaa

SEQ ID NO: 107678 - DNA, 1037 bp, Homo sapiens
ttacattcttttaattcacttgatacaatctattgttaaagaaaaggaatatcaaaatttcagggttcaacttttttttacctcatggttgttgtgaggaccaggtgagatgattaacataaaagacctaataaggtgccgagctcttgataggtgtttgagaaaatgttagttgttttcatttctattatcttgttattaccattgctggtttcttcattcccaactacctcaacccccatatcatctaccccactctctctctcactcttcatatatatatatatatatatatatatacacacacacacacacacatattcttactgataatgttgttctatacttagactaaaatgtatgaaatatgtgccataatggtcattaagaatagacataaaataatcgtctgtaattttccaatattgaagttagctaagagtgaagatcctatgagtgaaacatgtgaaaactttagttacttgtggataaaatttctgaggagttgtgaggatgaagaataatttctcataaagaattttaggcacactttatatatagtttatggtttaccagagttctggcttagcactcagtgtgattattcctccatagcttcatattgctcttttattcattcattcatatcaaaaacaacatagaatatctattagcaataacacgttgttctagatagtgtgagatatacaaataacaagattagttatatgaattgtctctatatttaagaagtctattaggtgattcagatagggaagcaatgaggttatgtgcatggactttggagccagattttctgttttgaattcctgctctgaaactcactagttatttcacttcaggcaagttatttagcctgggtttcagtttccttatctacaaattgaggctaaaagtagtacctattgggttgtcctgaggattaaatgatttggtacaagtgcatcatttagagaaataccgtggtaagctcttttcaagatactaattttagtttcttttgataaatacctaaa

SEQ ID NO: 107679 - DNA, 1058 bp, Homo sapiens
tggattgagatattcaaggattgtaatccttcttaaaaagtaagcagcatcgtactgaaatgcaaggaaaagtcttagatatgaactggatataggatagtgtagtttatttccaaccaaaccctacagatgtgtgttttaggctcttttaggttttggttatattactgtgatctttctgctggggtttaaaaatgatgatgaaggaagagaaactgttaaagtttgttctactcaacaattttgagatttatgtgattcccagggttgttttagatattgctttacatagaatccagagaatgatgattatttgataaaaagaggtatttgcctttaatacccagttgtttagttgactttcttggatattatcacattgaagcataattagaaacagttttcccagtgccagtttgtaagggaattcatcaatgtttcttctagtacttgcatgatatcctatagtaagtttttctatacagtcagatgtatttctatattcttctattctgtgccattgacctgtctatgcatgtgatattatcacattattttaattatagaagctttataacttgtttttatatctgaaatgttagcttccctccctgcttctaccattactctttttcagtgttttctggcttttcttgcatacttgttattccaagtgaactttataatcaactagcagatcttgaggaaaaagaaaatccctgatggcatttctattgaaattataaggaatttatgaattaacatcacaacaattaatgttcttatgagggtgaatctttttatccaagaatctgttttttatttccatttgctcagtaactgttgtatcttgctgaaatgttctaattttccttttggctttaggtttaaacatttattattaagtctgccttttggtattgcatccacttatttatttacttgcttactttcttacagccttactatactaaacaggctcttttcttctatattttctagctggcatttgtttctgtgtaggaaggctgttgatttttgtatgttaactttatagt

SEQ ID NO: 107680 - DNA, 3020 bp, Homo sapiens
gccacgcaattagtgctttatttcatgagcaccaaattcacccaatagtgttttgatttaaggaagagcttgaaattcacaataacgggtttcatttatcagagccatatgggactcaacatctttggatatatttgtaaggctttcacaaagaagactttttagacatctcagatttcaccgattggagggcaatctggatgaatatctttttttggaaaagatgaactatcgttttcacatgtagtctccaatttcagtattccttgagaagctcaaaacaacaacaacaacaacaacaaaacaaaacaggaaagcgttaagtaagtctcagcttattagcttttactggaaaataaagaccatgattcttagatctggttcagaatgccaagtgaatctttgatgttgaaatttggccacctaatctttgcagtttgtgatggggcatttatgaaagagaaggtgggttctaagtctcaacatatttgtgcactttttgctagttcggtcttggtcatatgtcagtggattcttgggacgctttctgcagcatagctaactgattaacatgatgatactttttatatttactcaagattatttctttgttcactcctgattttccataattttctgatcattagggatctatcttaatgcaaagtattcttgaagatgttaatataaattaatcttttaaaaaaacaaatctcatatttttccactgatctgttaatttagatattaaaaaaacagattgaccttcatttggcaattgttgttaatactttaatttttggttcacagattttgtttagtgggctataaatggcctataaacaaatatttcagtgtttactaattaaaaatcagtattttttttaagcatagagtgctattgtgttatgagacaggcaaccactaattctgttaggttttcaactttttattttcttagttctctagtctttttttttttttttttggcactcttcatgcagtatggtaagcctggttaagtcagaatatttacaagtagtaaatattactgtgacagttgctacttacctatacaaagtctatgtaaacatcgtaaggatgataattttaatttgtaaattgttatggtaaactggaaattacttgaaataactcttgctcatctttaaataccattttattgcatctaacattattttactatcctttattaaaaaaacttttaacactttattagctaatagtgcttatattagcaagttttagttttcacagacaatatccactaaactttgttcagttatgagcatgttgaataatactaaattaaaacaaaatacagtatattcttggttaccatttacattttatattaataccaatgtcatatattttaatgctatttcaaaaatatttagaaaccctctctctgctccctaccatttcttctccaatatatatcctactctacagagagagcacttaggaatttgttatgtagcccatctctatcatgcacacctatattgctatgggtcattgacccctatgctataggccaatgagcctgctggacaataggtagaaaattggaattatagcatgagctataattatagcttaactgcttaaatcaacttaacatgaattgtgctgaatggctgaatatattctttctatatttattttgtagtcaaatgttctaaaataactttctataaaaagtataatactcttaggtttaagttttattattcacctttgtttacaaacataggtattgtaatccaatgagggtaagtgttttcatcactgaaaatttcattatggaatacagacttttttggtattttctttgtgaaacagtatagtttgatggcaacaaggaaattaaagatggcagaaagactatatagatatagtggtatctaataagactttggatttataaactctaggctgtgaggagaagatgggcacatggattgaaaaagaaaatgtggatgcgatgatcaatggttattctttaataatattcctaatgaaggacatatgatgaggcaaagaagaatacaaattgatggagtatatgtatgaatgataaaatagttgtatgctgagagaaggagattgtgaagcaaagagataagagttatatgtagctttgtggctataattgccttggtttttgcatttaccttgagtttccattgtaggtattaatggctcctgtatataatgttcttagtataagtagaatccataaagcatttggtttgagcaggaatatttatttgcttgtgaggatagacctgtttgactttgaaatgtagtgtgctattaccttatggtcagagtaaagtttatattgtttttattcaaattacaatatgagtatatttaagaggagcagatatgtgtgtgtttgtgcatgtgtgtgcatgtacacacatgtaaggaaggacattttcatttctgtatatttctcctgtgtttgctgctttttgcttgccagtttttctttgtctctatcattttatcactgaaaccatctgtgtagaaaatagtatgcttggttttatcattttaaattgttttctatttttgttattttgtcctcccaacttgttttcaccttaagtattcaggctcaagtataaggcattttagttttcacattcaagaggtgtttctgctttctttcccgtccgtttgtccatatgtttactggtttctgataggctgtgcagtgagacagcagtttactatctgtgtgtgtgtgaaattagctaattggtgttagcagaaatattttcacatgttttataagcaaagtgcagcaaggtatataaatgtagatatgatccagacacgcgcacactcacgactgtcactgctcatgcataggcgctcagaagtaattaatgttaataagattttaatgtgcttgtgagatcataatgaggagaaatgaatgctctgattaggaaaaggtaactgtgtgtgtgttttggctt

SEQ ID NO: 107681 - DNA, 2673 bp, Homo sapiens
gtaatttcttaaatcttgtaaagtttggaattgataatgcataatcctctagggaaatcagttgaagtgaataatcttttgtttatatttatatttgagagttaaaactcttggatgggacagattatttgaaggaaaattccaattttacctattatgacacgctgtgaaacacaacaatttcatggcatatccattgttattggtcttaaaatatttggtttgcatttaaatttcaatgaaagtgttaacagcatcaatgcctcagtgcttcataacatctaaaaactgactcttgagcattcctgatgttcttgtctgaaaaaaacaatgcctcatagtataaaatgacagcacatgtatgcaaacttgtacaatttctcacttatcctgtatggatagctaaaaatgtaatttttatattttttaaatatttaataatatgcaaattattgatatgcagtaaaatgcagtaagggcagtcacaatttaaaagagctctaaaatatatcctttagttgtgaaaataatcatgattttgtaaatttagatatgtgtacacttttgggatattcttaacacctctctatgtattaaaaggttcattttttttaaaggaagacccacaaaatctctaaccagggttatggtcttgtctttagcagacttacaagtttattggaaatttggggttatatttcaattttcttctctaagagtggtcttttctcaaatggcattcttttagaatactgtcagagaagagagaagaatgaaaacccaaagtgaagaactttacctatactcctttttcagatgtagaaattaaaacatgattttgtagaacgtcccctttagcagcagagcatgaattggaaaatttggtcagtgatttatttaggctccacaggaaaaatcctgtagggcattttttgaatatcctaaatttattttgatttgagaccagcttacagggcatgtctatcttaaaacagttctccattttcctgagaaaaattccagtggagctagttgtgggaggtggtatcccaacaatgaaccatttggggccaaataagcactttaacacaacttactccatccctttccttaaaccaaagtctgtcttgcccactgggcatgtttaactttgactgctaattttatttccctgcagaggcaaaggaggcaggaaaaaggagggaaaataactgatggcatgtgggtgaggttttgtccaggaaataatttttaaaagatcctagccagtatagggatgcaggaagcagttggtgcctgaaactatattacccttgcatcacagattaagaagtaggagccagttgaagttaaataacttgcctacagttacacagcagttttcagtgttggggttggtactgggaactaggttattcattgctccagtgaggaaattggacaatccagcttttttgctgataaagatgctctcctaatatccctactcacgttttctttccttcttttctttggctactgtcttttaacatctaaaaaagtattctgctgataatctcaggtgtagaggctagttattaaatatatttagacttttaaaaccattagaattagctgagctgtaaggacagtgtccaccacgtgaagcctttttttctctattttatttggatcatgtaagtaatgaagatataactggaaaaaggaaatgtcattgaataaatagttctgagctcatggcagagttctaaacgtgaaaaatgtaatggacacctatttaaagacaggccatttttatttttacctcctaattacagttaatctgaggtatttgaaatgaacataagctaaattttgataccttttcctcctaaattgatatcattagatggatttaagttggaaaggaggaccatggtagaaatacgaatcagaattttagacttccataaagtttataactgtcccagttagcctctgtgcttgaaccccaggggaaagttgctatttggccctagtatcaccctaagttgtgaatatgttttggatcaacttctcactgatatgataaatatttgacttaaaaattagtgaaaactttttaatgtggtatctgttgaatattaccatttaccccttagtgtccttagtaaggttctagataccaaacaatttctactagagtgtgagttttactcggttaccagagctgactaactgaatatgcaacagaacttagaagtgatgccatcacatcagacatagtacaaacacagactagtgcactacagatcctctaaattttgatttggaaatatatgaattattcagagatccaaaaccccagagaaaatcaggtagaggaccttcatataaacacacccatagcctgtattccattctaagaattgcagtttgaaccaatagaagcccgaagcagctacacacatttgatttacaactgtgtcctgtctacttgcaaatagcagctagtttccttgtagggttggctgacaaggctgttgttttttttatatattattaagagtcaatagcagcagcacatgcaggctaattgttagaatataaagctttgttggaggtggaacatagggttctagtaatactcttaaattcacaccaattgacacaaaataaatacggttctctaag

SEQ ID NO: 107682 - DNA, 1619 bp, Homo sapiens
tcctaatggcaaagctgcactctatgcctttggacatttctatgaatacacacatgacattttggagaagtcatcagagaatatgtcctatttctatataggcatgatataatattcatgaaatgcaaaatactcctctttaggccagtgttaatgttggtagacccagtcggccagtattacaactgtggtgttagttgtcacaatagggtctattctgtctcttacaaatttgtccatttagaaaggaccctgaaatgaatgtcagcacgacagtgccaccttgtgtccctgttgctgtgcaagtaactgatgcatgagttagtgaaaaaaacaaacaacaacaaaaaaacaggacatttgcaaaaaattggcaaattgtttcaggccctgatttcgtagtagctgtaccaaaattctataatatgttttagtctttgaaatttcttattacccaagaaaaagttaggatgtgtgcactttactacttttctcctatcagggtatataaaaaattctttaacaattctaggcataaacagggaagtatttaatttagaattggaaatggagaagacagggattgtcagagatactcacttaagctcggtcatttcaggcattgaggtgctccttctttcacattcccacagcaattttatatgcataacttggcaatatcacctctcacattgtattgccattgtttgtaagcacatcttccaactaaaccttgagcttcttgaggatagtgtctgtgtcttattcatcctccagaaccttctattggcattcagcacagagctatgcaaatatttgaggtctaaacaaatgattatgtctagctggtttataacattctcgtgtatatatatatatatatgtatgtattatatatatgtgtgtgttatatatatatatataaaatacacatttctttgttgtaaataagtttggagcctttttactttggaaaaacagcttctgataccacttcctgcctaaacatccctttataaattaccttcttccttttatcttaaaatgaccattttctctttttgattatgaaaacaaggcattgcctattcacaagtgtgtattgtaattgactttgatgtaaagataatttttaattctagctttacaacaaatttgctattatttggggtaacatacttaagtttttttaggtctacttcctatgtataaaatgagtggactggactagttgatttgacaggatttttgtagggattgggcaaatgttagtattattctagctgtatatttagttgtactttttaaagtaccatcatagttgaaaatgaaattgctagcctttgaaagtgctatttgatatttcatgttttagaagaggaaactgaggcaaaggggcttataggggaatgaattgcaagtaggcagagtaaatagtattataatggatgaatattccatttttttatttgtttttcacttttttgttcatttgtttttggttaattgagctccactctccttctattctttaaccatataataaataaagtacaatgaacttatatagtaagatgaacccacaggttggtagaggactatggactacttgcagttca

SEQ ID NO: 107683 - DNA, 1034 bp, Homo sapiens
tcccaaaacatgcccccaaacagcatcacatgctgaattaaaatagatgaagtgattagctggataagtgtgcgtgtgtttcctttttaaaaacaaagtcaaataatttgtatgaaacaaaacaaaaagaacttttctagcagtctgaatgaattcaggttgtttcacataatggctttctgaaaccattttttgtatagtaattttgaccaacacatccacctattccctaccccacttgctttttcgctttctaaatgttggatgaatgtaattccttaatataaaaataattgtgttcttataacacattcaaaatatacctatggatatgaagatgtggtacggcctatacacagtagtttcacttatatcaccttagtctgaaaatatatgaataaaaaacatttttagaaattatttttctggtatgttgaaagaaactttatggtgtgatacaaaaagcatttcctggggaatcaggaggtattaatcaatatcaaaaaggatttaaagtggttaaatctggaggtctggttttttgttctgactttgtgactttgagtacatcatgatctctctgtccctcagtttccttcctgtaaaatgaggagaaagctttttaaaatattttttcatcttaaagactgtgattttaagtagctatatatgtagataatcttgcttgcattttctatctaaaagtcacaaataaatggagaaaagttagggtgggtaataaaggaagaataacggacatttatgtggcttgagagagcacaggcactttaattttgtgatgatttttcttagcttaactacatatcataatgtattattgagtctgtttaatgattgaacgaatgccataaaccaaaaatagtcatttgtcagacaaactgacttaattgcctatgggtgatttggtaaaagggctgtttttaatggaatgaagtgcagcatggttactatggctccactcctctccactggccactagatggagaggcgatccgtgtccactgccttgccaa

SEQ ID NO: 107684 - DNA, 1046 bp, Homo sapiens
gcatatgccagtttaaactttttcttcttttttaacttaagaggagaatcactatgattatttttaatataaagactatatagtgatttattggattttactcattagggtttcaaaaattgcagatactttttattctgcacatttttatctccagaagcctatattcatcaaaaggatagcagctgcatactttccccatgaaatgttaacaaataaatggcattcctgtttatttatctatttttgaattttaatgattagtccttgtgctaattaacaaattctcgtattcataaaatctggcactacataaatatctaattgtgtgattatctacacatgttctggctttctataaatatagaaattatcagtggatgtgttcatggacttgcccaactctaagcagtggccggtcatgccgccacataggaagccaaattcaggccctgagcaaacgtgttaccccaacatctggcaaggtatgttgaagcagcagcacctggctaatattgctaactagtgatcttttctggcaaaagaatgactggtgttgatattctttgaatgctgctagctcctgggttcttcagcctcaagggtggcctctgaagtctaaatgttgaaaatggacattaaagctggtttatcttggaggtcactttataaatatattttaacaaactacatttttggtgggagacatgttttactgtaaaacataagtaaaatagtatccttatccctcactttcttaaccagtgaagatctaagttaccatgagaagtcacaaagcactgaaaagaacctctaaatattttcatttgcatggctgtgtaactatttcagggacattatagaaatcaggtattacctacatagaaacagtttaccctccatcaaggacaataaacactagcaatcggacaggtgtgtacctgccagagttatcattaaattagaaaccaaatctttaaaataatttgtttcatactgtgtaagacatttttgttattttatacaattactatggattatttaca

SEQ ID NO: 107685 - DNA, 1082 bp, Homo sapiens
ggagggtggagtgaggggctggccatctttttacaaagtggaagctatgaagtgtatcaggccatcttgcacaacaactgtaagtattcatttaacattttggggagcataaataatataatttttatttcaaattcagttttgtggtgctttcttttcctttatttctttttttcttttttatagtgggaaaagttacatttcaaactagcagacattgttgaagagttttcccagaatagtgttcttcaaaattgaaaggattattttaataagggccatttgaaatggacttcttaatggaattttatttcagatttgtcaaagtaaaactgctcttcatttgataaaatttaagtcacatagatacacaaatgtttcggcatatacagagcaatgttagaaaatggatgctgatctgtagagatctttgataataacagtcatctttttgtaataaattatttatttaacagaagtggcagacttttttcccccttaattccattaggcttctctgacaacacaaagaagtccataaagcaatattcttaacccacctgggacactagagcagattcccaaacacattctcaaggttcaaacctagtaaaatgtttattaaaaatccattatttcaggaaggtgatgaacttttgctgctgaaagacttttttacctcttcttttaaaaaattaattctgagactttcaatttgcttatcttgcctgaacagtttttttaaactggataggctggctttgaccaagagtagtacaaatactaagtacgctcaatcaggtcccgtcggagatttttttccgtaaggtctaaggggaactttaggagagtattttatgttaatatggtacacgataattttgtttttcatatacaattttatatatactttatgccatttctgacggtgacccaaaaatttgtttcaaaactgatactgtatgtcaaaagtgtacatgtctcatgcacctgtcattttctgtgttagccttgtgaggaccatctaaaattctactgtttttatcaatagaaatctttcatctatgtcttgattagtcatt

SEQ ID NO: 107686 - DNA, 2002 bp, Homo sapiens
aaacgcagggtttgaataagtcaaatgcacttatattttttatttgtgtgtaaatattttttagaaaattttacctctattataatgttcttaagtcccatctaaatgacacatagccaaactgtatagaaatatattaaggaaggtgggtgtctagatagataatagtgctagaaggagatatgactcgtcaagcagagtctagtttttaaaaattcggggacgaggagagtggcttaaaactatttctgttttctgatgtttgtaattctatagctgcaaatatatcacttacaggagaaagggcacctaggagtggggaaagtgggtgggaagcatgtgatggggtgaggagtataataacatcataattttggaactagaatatagaaaaaatctggttagaagtatcagacaaagaaaaactgttttttttctcttttaaggcaagtttatttagaagcattgattatttttatttttccctcctaataaaagattaagggtaactgctgtagtttcagtcccatattctatgaaatatcatcctgattgtgatggtagcttcttatgggatttatttctgttgttgtaccactatgtactatacgcattgcacctgttcacacagagtacattgcattgtgatgtttgtacagctagatgctttaaatgagaagccaatctcccttcttctaggttcctagcctattagttacttaattaagcttaattctgttttggtctgtaattttgtaagtctgcaattttgtatatggtctcgatttattaactgagcaatgatttcttctttgcagttatcagttttgtctgagatcagttttcctattgtatggagtctgtttcttacagagcctcctttaagactgctctgactttaaaatcattactaggcttttgtcagagctgatttgttcacattcttctcacattaaaaataaatttaaaagattgcacaaataagctatgcatttcactatttcctgcttatatgcaaaaaatgtatttatgataattacatgtactgccagaactgaaacaatacattcctcataatggagcataaataaagaaggtggagccagctgctcttaaactgtttatttgcaagcaataatgatatagagaatatacctttttcactctgttagtctggcaatactgaacctgttgctgcattagacgagttgcattttgctggataggggaaggagagctgtctgctgtctggtaggagggctttgtctgtgcctttctctctgtttctttctgtttttctttctctctctctctctctcctcttctctctctcttactcgcttgctctgtctctgtctctctctccctctcttcccccctccctcctctctcttgctctctctctctcttcccgtctctgtggtttgtaaggtaggttgcagtgtgtgtatatacacaacatcaagagcaggaaaatggactcattagggaggcaggcagtcattaccactcacactgtacttccagggagacaccgattataagaagagaaactcagcgctggggaagaaggtagggcagacaactttcttaaaaaaaaaaaaatcctgcttcctcaatgccccctctgtcatctcctttagcccccaatgcctttattctttcctgcttgaattttaatttccagatttaagtttgacagagctagtgctagcttaaaatttagaacatctgtaggaggcctaccctttactaattttcttcctacttacttaggggtgtgcccttgtgattcagttttgttactttaaaaataattacaaacaaatctatttttctcactaaagtaccaaataaatcagaatctttcactcttttaaaacagacccttccgtatgtttgtctctttgcttttcttgtctgtttatgcaattccatctgtctgtctatatatcatgttgtccttatttattgctaactcggttttgttagttatttgcca

SEQ ID NO: 107687 - DNA, 1063 bp, Homo sapiens
gacatctatctgtcactattgtattatacaaagtagtttcactgccttgaaaatcctgtgttcttcctgttcatccctctctctaccctaaactcttgcaaacaatgagtttttgctgtctccatggttttgccttttcagaatgtcatatagttggaatcatacagtgtatagatacgtacagtggatagaaggcaatcttttcagattggcttcttttgcttagtaatatgcatttaagtttcctacatgtcttttcatggcttgatatctcatttcgttttagcactaaataatatttcactgcctggatgtaccataatttatccattcatctactaatgggcatattaatttcttccaaatattggcaattatgaataaaattactgtaaacatctgtgtgtaggtttttgtgtgggcataagttttcaattcctttgcataaataccaaccactgcaattgctggattgtatatgtgtttagttttgtaagaaactgccaaactgtcttccaaagtggctgtaccatttttcattcctaccaacaatgaatgagagttcctgttgctccacatccgcatcatcatttggtgttgtcagtgctgtgagtttgggccattctattacatgtgtggtggtatgtcattgttatttttaatgtgcatttccccaatgacatataatatggagcccctttcatacgcttatttgccatctgtatatcttctttggtgaggtcactgttaaagtcttctgcccatttttaatcaggttataatattttcttactgttgagttttaagaattctttgcatgttttagataacagtcctttatgagatgcatcttttgcaaatattttcttccagtctgtggcttgtcttttcattacctttacagtgtcttttgcagagtagaactttttaatttgaattaaatccagcttatcaattatttctttcatggattatgtctttggtgttgtatctaaaatagtcattgtgaaacccagaattatccagattttttcctatttaggagtcttagaattttgcattt

SEQ ID NO: 107688 - DNA, 1020 bp, Homo sapiens
atgtaatactttattttagttttaaatttaaacatttgttgattagaatttaaattagatgtgcaactcttcccatttaaggatggtactcctggcctactattgtccttgggcccgatgggatacaattttaaaatagatgactagggttaagaattattgcctaattggccgggcacagtggctcatgcttgtaattccattactttgggaggctgaggcaggcggaacacaaggtcaggagatcgagaccatcctggctaacatggtgaaaccccgtttctgctaaaaatacaaaaaattagctgggcgtggtggcgggcacctgtagtcccagctactcgggaggctgaggcaggagagtggtgtgaacccgggaggcagagcttgcagtgagctaagatcgggccactgcactacagcctgggcgacagagtgagactctgtctcaaaaaaaaaaaaaaaaaaagaattattgtgtaattacgccacttacaattaactttatggtggtgtcctcaatggcaaagtcatttacttagcgtagcaattactcattttgacccactaatcccagacttttcttgtctgggcacggtggctcacgcctgtaatcccagcactttgggaggctgaggtgggcggatcacaaggtcgggaatttgagaccagcctgaccaacatggtgaaatcctgtctctactaaaaatacaaaaattagacaggcatggtggcacgcgcctgtaatcccagctagtcaggaggctgaggcaggagaatcgcttgaactggggaggcgaagattgcagtgagccgagattgcaccactgcactccagcctgggcgacggagctgtctcaaaaaacaaacaaacaaacaaaacccccaaaatacacaaatcctttacaattgaattcttgcttttttaattcctttctcaggctatagaaaataggaaatattttattgtgtttattatttagttctttaaacaattatttgcattactattagatattt

SEQ ID NO: 107689 - DNA, 1522 bp, Homo sapiens
catgtagtagagataacttttaataaagcattcttattaatagtagcaacttttgtattttggaaagatatgaagactattgagtttttgagtatagccgcaccaggtcaaacagtaaggatctcaccaacctgcttgacaaacatctatggcaattaagatgtaccttttatatcttctctgtgacttttatttttcctatagaatgcactctgtagtttctctttcctttccttttgtattaaatataaactgtacatataagtaaattatgtagatgtggaaacttttaagatagttgctggcattgttgtagattgtttagtagagaggattgaccaggcagcagaagagttcatatagtatatgtgtctaatacgttgttctggagccagggagatattacaaataacatttttatattttgtaatccattgatttagcatttattgattgtgtcacaaaagtaccctcttctaaatttctaaagataatcatatcatttaagatcagcttataggagtagtaacaacagctataatagcataataatcttatcattcagatactaaactccgtgccacttttccccatggtcatatttctcctttacaattgtggaaaatgactcatatatagatatgagtcattctatattaaagatacttttgattttctactctttgctatttactattcactggccactgttcactctaccactggtcactccgaggaactccggtaatattttctgtcttattaggaaactgccgtgattataaaggctacagtatatgggtgaatgtgaggcaataacttcattttttcattatttgattcttcgttctactactatataagactgtagaatatacattatcctttcctgaaagtttggagagaaggagaatatttgcatcacaaaacataaacttcatagaatttattattaggcattactttaaaaaatctggccacgtttacattgggaaattcccactactcctcttcttcctccctctcatctctgtgctcccctaacttcaaattgttactcattttttatgtagtacagtttaaccccacaagaaatattcatgcctcactctctgactccagcagcttatcaagatgttttcctcaaagaggacaattccattcccatgaagtactctgaagccaacttcagccttttacaaacacttatgttatagatttgaaagaaataatagataaatgaaatgtgaaggcaagctgaattttcttttcagaaatgatgtttattgaaattctgatagttgtatgggaatatctttttttttttttaagttccaggatacatgcacagaacctctacatttgttacataggtatacgtgtgccatcatggtttgctgcatctatcaacccgtcatctaggttttaagccccacatgcattagctatttgtcctgatgctctccctcctctcaccccccacccgccgacaggccctggtgtgtgtcgttcctctccctgt

SEQ ID NO: 107690 - DNA, 1843 bp, Homo sapiens
aagacagaaggaatgtcatttgcagcaatgtgaatggagctggaggtcattatgttaagtgaaataagccaagcacagaaatacagatatctcgtgttctcactcatgtgggagctaaaatgttgatctcatggaggcagaaagtagaatgatagataatagaggctgggaggattgagtgggttgggagaggatgaagagaggttggttaatgggtacaaacgtcagacaaaagaagttctaatgttcaatagcagagtagggtgactgtagttaataaaaatattctatattgcaaaatagctagaagagagtactcaaaaaaaaagaaaaccacatagaaattataaatactcagggtgatggataacctaaataccctgactttgtcattacacattttatgcatgtaacaaaatatcacatataccccataaatatgtataaatactttatgtcatttaaaaaataaaaggtaaatctaagcacaaaaatgtaatagaaaatacacacccaaacatggaagagccttaaaattttagtaataatctaaaatttagataggaatggagttgagaactaacagtgatctgtgcaaagttttaaatgtttttactgagggagcatacactttttaataatcggagaatcaatttcttgagagtaggggaaggaactcagtggtaaaactacatattacttcacttttcttgattagctttaagagatggattttgatttgacacctaaagctagggttgatattcagggaatacacactgtatttacagccagcatctgttttgattagtcatggtaacatttcttctgtgcccattccttatgagctataaatattttgactgccactgagcactacctaaaacttctctaatttattatttatttctatacacttattaaggtaacttaaaataatagtaatagtaaaaatgtagtgcctggaaaacttcagaatttaattattgaattattttatgttatcaaatattctataatatctattgttttattgtaaatatgtatttttaaacatctgattaaactgctaaagtgcaaattaattattgagtgggtattaagtgcatttattggtggaaaaatactagggagagaattttaattactttagacaaaagttacatgaattttattaagatattagcttacagtggtttgcagtttatttccgtttgtgaccttcagataaaacatcataagaggtatgtattggagtcccaaaccatttaatttttaaaataaaattcataataatgatttatttctttcataactctttttgtaattaatacagatttcattatgggcagtgttcttttgttgattactaataaaattttctcaactggtgagatactgtttgatattcaaatttcacataggtttaagtgatgttgggagtattatttgtgttatggaagatccagttattacattttcagtggtaaagtgccatcggtttgaaatagagtagtacatcatatttagtgataagtaaattcaatccattcaaatgtgtggacatttaacatgaaggaggatttgttttatttttatttatttatttatttatttatttatttatttatttatttttatttttatttttttgagatggagtctcactctgttgccgaagctggagtgtagtggcgcaagctcggctcactgcagcctctgcctcccaggttcaagtaatttttcctgtctcagcctcttgggtaggtgggattacaggcacatgccacctagcccggataatttttgtatttttagtagagatggcattttaccatgttgg

SEQ ID NO: 107691 - DNA, 1005 bp, Homo sapiens
agacattgggacgaagagcttgggctttagaggtttgtgaactcctgtaggaggagatcaatatttatccattttaagtaccgaagtgtcgctagctgctaaaaagctaaagtagctgaatgtcctggtggagtcctctctgtctttggaggctaaaaagaaatagagataggacaacagagctctttgtccatgtgcctttgcagggaactgacaggctgtttacctttgcttttcaccacctgtgatatttctgccatttaggataatctggcaaccagacctgagctccagtgagttagcgaaaaatagcaattcatttaaggagacccatagcaagtgagagaggaaaatcagagtacacactccaggtaactaggactactggcgaaaacatgaaaactgaatttgaaaacaaaaattgggagcacttaaggaaattcaaagaacagaaaataatttcagatattaaatatatctcatttgaacaactcaggatttgtgggagagcatagtcactgtcgaaatatgaattagtgaatgaaaagaccaaatgcaagaaatgtatccaagcatataaaaaaacccatgatgaaatattgaaaaaaaaaagatgagatttggaggatagatctagaaatcaaaacgtgaataataggaattacagtgggacattctttaaatatttttgagcatctctgcacttggctgctaagaaaactgagttttagagagcagagattttgcaggcactttctctgactgtaagctaacatatatcaaattttaacagtttttctaaaaggttaaaaaaatctacatagaaattaaaacattcccagatatcttttggatgaagaggaaatcacctagaaagcaatgaaaaggaaatattttttgtaaaagccaatgaaaattagctaaaatagttgtcagaggaaaattgatggccttaaaggcctttgttattaaggaagagggaagataaagataacctaatgttaa

SEQ ID NO: 107692 - DNA, 2145 bp, Homo sapiens
cagctgcagatcaaaaatattttgggtgtgggggaatagatggaatagaatatatatagtttttttcttgccacaattccctaaacaatacagtgtaacaacgatttattaatacatggcatttacttgtattaggtgttataagtaacctagagatgatttaaagtatgtgggagaatgtgattaggttaaatgcaaatactacactattttatgtaagggacttgagcatctgtggattttggtttcctagagaggtcccagaaccaatctcccatggatactgagggtcaactgtaagtttgtccagtcaagatgtggctactttttgcttttttgctttaaaatgaagaatctgtatttttctagtgaaagaaaaaaaattacattgattttcatgcctttgttctttgtgattcttagaatatatcaaagttgttgcacacatagtgcatggtgatatccctgtgccatctttccagtagtctcccaggaaagcttttgaaattgcccttgaggaattgctgatgtaactgttcagtactcaaggcttaattttcaagattggggttttgatttttatggagctcaattttggagggccttaggtttggggacacatggtgttgaagtaaacaggtgagaagaagaaaagtgagatttctagaactatattagctgctcagtgagttgggcaattggatatttttggttttatgatttcagattttatagaccagtggaatacaggccttgtgcatatgaagatcaggtgacaagtttgctgcctaccagcctccacagcaatatgccctttcacggtgaggtcctaattttaacaagctaaagaaagtatcaggttaaaaattgtcaaattttatccatttccaggaagaagtctttatgcttacccatctaggcccgtgttttaagattactacaaaaccaagaaaatgcacatataggtcatgtgtacattgactagctactaaaagaaaatacgagattaaatggaatactagaggaaagagaaactttcatgtgagggctataattggggaagggggtgtttagaactaccagttgatgtgatgccagtttcttctataattggatcagaaagtttttgaggcccgcaaacatctaattcctcttgttgtcctgttaataagaatttgactacttggtataggaagaaaatctaaggaaaaaatattttaagcgaatcatttttgttgcattagtgaaagttttcagaagactttttagacaaattggactttctagtaaaaaggctagtctgaataattaggtaaattggactttctagaaaaaaaggccagtctgaataattaggttgttttagaagggcaataaaagctacagctaagttcctgcgatctataatttataaaataattacatattattttgaataacttcacagaatcagtggcaagcagagacttcttcaaaaacatttggaatacggaagtagagattgatgggctttgctttagtctctgaaataatcatatttttctgaaatggatggttaaatttatcatattgttctagacacttggagtgtaataatgaacaagagagaaaattgcctgcccttgtggagcttacattctaatgtcacacacactttgtgcattttagattgttaggggaggagattttttaatgaaactttaaaacctagctgctttcttgtcttaggaactacagtttgaaagagcctacagaagtttgagaaggaggaaggtgtttaccagttggcagtgataggaaagaaagatcttagtttatttcttatttgtaccttttgttattgtcatgaaactttctccatatatttcagttggtaattttaacagatagggatttttttcatgattttaataatgtctttgaaattaataaaacgttgctttatattaaaaaaatcttgtgtcttgaaagttactataaaattcctacatagtattatcccgttagcaaagtatggtaaaacaaaagctagaatatctgttaatttttggttgggatttgtttttaggaacatatctgaaaaatcaagtacctaaatctttttcagttctgggtttctttttcgttttttgagatgggaatctc

SEQ ID NO: 107693 - DNA, 1101 bp, Homo sapiens
ggactagccggggctcaggagctgctagaggcgcccgcttgtcttctgccccctccctcctcgccctcccccgcttgccgtggctctcgcggtctctggagcgtcttcagagaactggggggcaggaggtgtcctggccccacagccgctggatgtctctccagacgccggagctcccggcccccgcctgcttcgcttctacgactagagaggagggggcttgggaagggaagacacacctttccttctttctcttctttgggccacttcggaaacattaaaacatgttaacactttttgattcctgatataaaaatggttggaaggttcttgaaagtttaaaacaaatgccgtctctcgtacactgtttaatgtattcctgtctgtgtggcttttgggtcctccccccaccccccgcccccagctgttatcctttttaaggatgctgaagaggcaggaggcagggattttctaaaagttctattgataaacacacttgcacaaacatatgctaggcacacacacaaactaaacattagcgaaaaacacaatatggcgtacagctacggtacctagcgcggtaatccgctgatctctcactccgaactgggttgaatgaggtcagtagcaggatgacagctctccaatgaaaatctgaatgaatcaggaagtagtttggaagcttgcgggtgtagtactgtcctcagaatcagcattggccaaacctaagttgaacatgttacctttctagacatgtgaaaatcttctccactgttttttctattaaaaataccaaaagggtgctaaagtcaagtttcctcactgcgtggcggtgtatacatttcagctaaaaaaattatagaggccattcacccaatgttttcaagtgaacgctattctgaagttactgttgtaacttgttgccattgaaagttttaaaacacaattaccattttataaataaatagctgtagacactaaatttaagtgataaccagtcatctttaaatttataatggtttgttttcatttctgttcatgctcccaatcccaagtaccctttgctattttgtggaaatatttatatagatccccctccac

SEQ ID NO: 107694 - DNA, 1059 bp, Homo sapiens
agatagccgtccttgacactataaacttcttaatatctgggctaaggatgagtactcactgtaaaatatacagctatatcattttagccaattattctgcttcctaagcttggtgctgaacagttagcctttcctcacatttaaagcttgtatcttctggtactcctcccacaggaatcctggtgaggtttcagatcttcccctttgtcaataatataatttatagttacatgtacactgtctcttaccttctctagttaaaaaactatgtacaataacgcttagttgttgctattttttcttgtccccctttattatgggggaagtatccatctgtctgatgttattctatctatccccaaaccaataaacaaaggaaaaatgctagtagattttcctaaagggaaataaaactacaaacggccagaaaatcaatgacttctcaaccctaacttatgtctcctacacacaaaaatataattcctgggggacggatctgggaaggaatgggcttccccttataattctggtgagggaaaaatatctccaattaaatctgttccctttgcaagaatatttaagagaatcaagaagggaaaagaatggtccatgaacattaggtagctagatctttctgaagtgaagctaaataacatagaaattaaatatacctctttggggtctagatgggaaacttaaacactctcttggatttatttttttcaggaaatgttagtctaagtttcaaactggtaacttggaaaataaactttggaaatacatctaacttgtaggttgggatagtgttcactcaaaaataaaatttaggaaggaccaaaagaatataatttttctgtttagagaatggatgatcataaggaaagaaagatgaagtacactttagctgaaaaaatatgtcactttttttccattgtactttaaaatttttaattatgtcgaaggtgaagaagatgcatgagtagtttgggttgccaagaaagcaggtaagacaggcaagtattcagtattgaagacattgatttggtgggatatggtaga

SEQ ID NO: 107695 - DNA, 1067 bp, Homo sapiens
actaattactactgtgctagaaatttttttctatttattggatcccagaaaggctcaattaaccagtgccttttggtcaaggatagtagctgaagaataagacctcaagattatagcatttaaactttgcacggttcatcttgttgatatggcaaggattcagggataattgcctaataggcaatattgcctaacaggataggtgggggttcagaagggctctaatgaaagagaaaaagagagagaacttcaaatcatactgaagaaatagaggaaagcagaagtaacctgagacaaaagagggaaagcccttcggatatcttgaattaaatataaaccctcagaaatatttacagtgctctaagttagtagattgtcatttcttatggagaagacataattagaatggaccccaaccacaagagacctctctattaagactcatttgcgatttggtaccatattgcaaatgagtcttaatataaaagatgtgtcagaaaccctcttctcacttcactttatatattaagtatctcttttcaggaaaccaaacaaccaacatgtatttcctgaacccctacaatgaaccaaagtctattagaggtagtatgggacattgtgatgggggcagagggatacaaaaccccaccaacaaggagggtgctatgatttgaatgttagttcccctcacatttcctctgttgaaatcctcatctgaggattacatctgggattactatcactgagatagtattaggaggtggggcctttggaaggtgattaggtcatgagagtgaagcccttatgaatgggattagtgcccttttaaagagaccccatagagcttccttgcttgacccttctgccatgtgagaacatgagaaggctcggtctattatacagaaggcaggccctcactagacaccaaatctgccagcactttgatcttggacttcccatcctctggaatggtgagaaataaatttctcttgttaactacagttaaccagtttatgtttattttgttttctaatagcagtgggaactaaaacagagaagaaagaagg

SEQ ID NO: 107696 - DNA, 1051 bp, Homo sapiens
tgtcctgggattctgctggatctcaaagatgtgccaagccaaggaaaaagatacaagagcagaatagtacttaaaatccaaactgccgcccagatgggcttgttcttcatgcctaacttaataatttttaagagattaaagtgccagatggagtttaaatattgaaattattttaaaaggtaggtgtctttaagaaaataacaagcaaccctgtgatatgttccgtctctcccaattccctcgttatatagagggcttaatggtataaatggttaatattggtcccaacagggctgactcttctatcatataatcaaaactttttacatgagcaaaattcagtaagaaatgggggaagacaaaggaaacgtctttgagaagccccttcatatttatttatttatctcttcctgaaccatgaatttcatatgtggaatattgctatattgacagattcttgcctgtctgtgttattctaggatctgttacaggtccatggcaattactgtttattttttcctggaaaaatatttttttataaaaggcttttttttttttttaaatacatgagaggcattgggctaagaaagaaaagactgttgtataataccttgttcaatggttgtatttagtgagctcatagaggtccatcatatcatgaccgagctaggttgtgtgggcaggaaggtagggctaaggggttgtagccttgctgggcagcctctcagagcaaggttgttcagatctcccttgctattacagtaggttactattaatgagggcagcacctgatgccttttgtactgaggtatgtaactttctccttatttgacaagtagaagttaacttacttgtcagggagggcagacgtttttttgttctgtttcgtttttcaaaataatgctttttgcaaaagaggtaagactgagactaaaggtgttatcttctggtgtgctcctggaagtgtctaccctacatttgtgtcagctcagggttgcagtgttgcccagatgcattttacatcactgtaaagagattacttttgtggtta

SEQ ID NO: 107697 - DNA, 1008 bp, Homo sapiens
ttttgttcacaacaattctttttactcttctgtttttttttttctcatttctgtggccttttcttacctttccttaatcttgcctggtcttttctgaacgctatgaactgctccatacccagaactcatccacccaactgctgaatataaaataagttgtcctttcgtcatctttctttcatccctctaaaatgacattttattactatgcagtaaacatgttttaataaatgcttccctaattccaaacataacatacattttgcagggattttagaagtggtagacaggtagaaagaagaaaattaaaattaccctaatgcttcgcactgagagctcacatctgctaaatttttaatgtatctgttctgtctcctaaaaaattatttaggaaatgtttggattttcagtgcagctcacatatatttgttagatttagaagatcagcaccacatttatgatctatgataatttggaactagttttcctcaagaattttaatgacttttttttttttacctctatctggcataagatgactgtgtttactaacattgattcattttcgagccaaaaaaaagcaacaaaacaaatcaggagagagaagagctcttttatttattaattcctgacacattttagatgctcatcacatagttaattttcttttcattgcttcttacttttccctccctttattttttatactccttatagctcacacatttagctaaggagtggcatcccactgggtctctttagggtgccgtatgtagctcatgttagaatttgagtatggtaccttagaagacatgctttatctaaattgaaggctcctgatctgggggttatttatattttctaaaattatatgctaaagtatatttttatatgtttatttttctgggaagataatcagcctatgagttttatcagatttttaaatgattctgtgtccagaaaaaacattcaggatctgaatctaagatctgcttgtggcctagccct

SEQ ID NO: 107698 - DNA, 1049 bp, Homo sapiens
ggtctctaaaatggatagaattagttacattgacaaaacttaaataattctgagattcataaactcactgcctagtattttatcttggtaagtagaatctgttttcaggtcattaaatttttcctgaaacaacctaccgataagagatggttcttgaattttgtattccaacatattaatagtaaaagaaatttaaacatgattcattttcgtgagaatattttctgaaattgtgacttttgatgctttctaatttgtgatttcgttgtcctcagaacaggacaagttttagttgcttgttgattaatatgtgtattcattctcggtcttaacatttgcatttctttgaacaaattaattgtgctcttatcctcccaaccccttactcccaccacagttattttgaatttagggagttatctttctcattaataagaaagtataatgttgtgagctacagggagctggacaagtaaggtctcttagagccctttaattccataatgtccttgatctgatgaagctgctcggtaaatctcttcacaatttccatgaccaagccatctgcctgcattaaaataaatcaaatctgcttactccttcagtgtctaacaaatattctataaactgatgatgatgaagaccatgaacacaaaaataatttgcagtcttcagcacttccttttgagttctcagctcagattctcttgacatagtgggggtcggcatgttagctttttcttcgacttgagtggagagtagtgaagtccattctcctagtccttttcattgtatttatcccaactgtggcaagtgaactaattcatgttcatgtttaggttaaacttcacaaaactttactttttcttctacttcatgtatgttaattagacaaatgcacttagatgtatctaattttatatgtggcagtttacatatgtgtaaactgggtgtggggggtgcgtacatgtgcatatgtgtttttaaatctctggcaggctgattttgtatctggttcaggcttctgatattgtccagactttaggaac

SEQ ID NO: 107699 - DNA, 1074 bp, Homo sapiens
gatatgcagtagtttcttaaagactggctgaaatgtggaaccagaaaccatatcagtgaacatttcctacttgttatattaaaatccactggtttatcttgtactttgagtggatcttttactcatgcatgagttttcataaatctatgcattgatcattggaaaatactggttctctttgttacacagatcttacaaatgttactgtattacattatataaatttaaaaattatgtttatcaatatgaccactgagatgatcagaacagtcttttaagtattatgaagctgctaagctcacaatgtcagatacaagttttccaaaattttgatattgcttgaattttatcattggccgcaaatgactgtcagttatttcacttgaagtgatgatctcattttgtacagttttgagaaaatgtctgctaaatatataagtttgaataaccatagtctgtgagttgttcattcaagtagatatgaaggaaagtgattagttccttcagccttgagctcaaataattgcaccaatgccttactttgggatgaccattttgcttcagtatgcagcataagtggttttatactacccattttgtcacacagaatattacaaaaggtcaagatttaatgaaattattgttattgcttcatcaaagacattctttaatgaaactggattttttttttaactgtgactacataatggcgaagactacagtgactactagtacagtcttaatgtcaaagccttgacctgtgttaaggtgccaacagtttcacccactactgcttttgtaccatcaatgcacatgttaacccagggaaaaaggcataaaactctactgttagtaagaaaagtagtttttactacatagactttccgaaagggtcttgggaatctgcatcagtccatggactgtacttgaaatgctggtatccgtaatagaatgttagattctcttttttttgaaattgctgtagagacaactagccagacaataaatctgtgctatatggggtggcattaaatggaatatacatgtgttattttaaaataaaaaatgaactca

SEQ ID NO: 107700 - DNA, 1024 bp, Homo sapiens
gggagtggattcccctgaccaggggctctacagaaatggccgtagtgatgggcaacagctcttcacagcccagcccatcagcagcctatgtggtcatggcttaggaactggacagagggtacgtgctacatttcaggacaagagtagcaaaggctagtgataaacaatccccattatcttccctaaatgtacttcactggggtgattagtagaattttgccctgatcacatatcttcagtgtcttctttcctgctatgcttcagcttcaaagtagaggggagcctccaattttgctttcatttgaaaagaccatcatggccttcagaatggtttttgactaatgtggtagataaactaagatgatttgaatatgaaagttggttgagatttactgcttatttattcgcctgtgcaacaggcactacccttctttgtacttatataatacatataatacattgcagagtacaagcatgttccatgcagattatatcatttgaatatttgaaatcaactccctatcaccattgccattttacagatgagggaactgagacctggaactgtgaactgacttactgaggttgtaaataacagagtccagatttgaacctagaattgtagctttaaaacttgtgaccataaatggccattcctttctttgttaaaagaaggcaactctaagtaaattggggatcctaacagacttgattctcctattcttcaggatgttttgaaataagtactttatcatttttttttctttttgaaaatgactaagtataaactaacacatctcctttgtaccccagtaataaatgctgaatctcattcttttttgggcttatcgcctgaagttccaccattataagaaattggaaattttagaagtttttctttttttaatactccaataatcaagctgtttgtgacactgtgtgtgtgtgtgtgtgtgtgtgtgtatgtgcgtgtgtgtgtataaattttcgcaaatgatgctttttatttgcctagtggtagata

SEQ ID NO: 107701 - DNA, 1053 bp, Homo sapiens
tcccaggcagcccaccgcctgctgtgcacacatggtgagaccctgcacacacatccagaaccaacagaaactgtagtgggatagttgttttcatagtaaagcatgcctcttggaaggatgatctctaggcatggttgtgaggctggagtatgagggcttgagtgatcccagcacatgcagatggctgtccctgctctcaagcactcaccaggctgccttgtgttcttctccacaggaggcagtgtcgcattgccctgaagaaggccaactggcccgaatccaaaatgttatccaggagcttcctccatcccactataggtaagaatggttgggaaaagaaacgtgtggcctctcaatgcagtgtaataccaaagagacaggctggcatcatggaaaggaaacaatgtgtggacagtagcaagtttaggctttcccaagggcattttgaagttggtgaacaggtcactattatcaaagtgagttggtgtctgaccagggacattggcagcaaggagaagccagtctccaaatcacctgcagaacacccctcagaatctctcaggaagtcattccagtgatgcatactagcctcttggtggcattcttggttcatacccagatttgtagcataaccaaatctatggcaaccaagatagcttttcaacaggggttgactgtgggctcttgagcattggctgattgttctatttgctcattagtaccatccctaccatcatcccccaccctttcatttcattctcacagtttagcccctaatgttgccacctttcccagtgttccctatgcctgcccatcttttacaagggggcagattttgatgtggtataagaaggaacttcctagcaataataaatgttgtttatccatgaaattagctccctaacaagtaccaagatccctgtagctgggagaatttttattaaaacgagcctagatgagagcctatttcaaaactgcttggaggccatcctgccctggttgaaaggacgaacaaatggccactaagagcctccaggcggcctgtgtggtggc

SEQ ID NO: 107702 - DNA, 1129 bp, Homo sapiens
gatgtagtctagcagcaacccacctacaatggcgttatgtttggagttatgaggggaagtgaaagataagaattacctacagctttgtactcagataatttatatccaaaatttgtgttttaaatttcatactccagaactttcatgtttatgagtattagccttttaagttatgggaggtgatatacttagtccattgatgttgtcacttgtcatctaaacttatgagaccttgtcttagagaatctaaaatatattgtcatatgttttctgtgctgagtttggtttgttacactgtgaagcttttggtgaaacaaaataagacttatgaagtaaaaagaccaatcatgtcgttgacaagctggctctgaaaataattcttgcagaagagttcctgaaaggcttcaccaaggggaagtattgtgaggagtgtttgtaaaaccaaggtacccaatatcagttttatgtttaaatcaataattgtttctttaaatattttgatgtgtatactttttttttaagttaacattatttggcattcagtctgagtctgttcaaccattcaacaaatatatattaaccagtaggcactatattaggccctggggatatagcagtgaatgagaaatgcaaaggtcctacttgcacagagcttacaatatgcgtgggggtgggggagttaggtggtgcagaaaatacagcaaataaatttatgtgtaatataacattccctggtagtagtgataagtgtagcaaagggaaatcaggacaaggaaatagtggtaagaatagcactgctagaaggcatctttgaggagatgatttttaagcaaagaaaaagcaagactgaatcatataaatagctttggggagaattccatgttacagtagcagaaagggcagtgccctgaggtggggacaagttggtatattggaagaatagcaagaaaatatattaggttagttgctttttaaagtagttcagcctaaatatagtggttcttgaggtaggggtgggaagggtagggaatctgccatctttctattctttctgtaggatcttgaaaatatgcttctcttggcagcaacattttcatgagattactcagcagttgagagcaaaatgggt

SEQ ID NO: 107703 - DNA, 1159 bp, Homo sapiens
taaaatataatctaagaaaaatgtttataagtagttttcttttgggcataatctcttttcgtgtctcaggggcattgaaataaaaattatttcattatttcttgagcaaaaaggaaaaggtttcaatctttatagcaagaaatagcctgattgatattaaataaacagatctatttattattatatatgggaacctgtaaatgttaaattattttagaaaaatcaatgcaagaataactgtagccattacttttctatgaaataatgttttacttttttaacttccttacagttcttatttcatcgaccattaaggctgttaaatctgctcatccttattgagggcagtgtcgtcttctatcagctctattccttgctgcggtcggagaagtggaaccacacactttccatggctctcatcctcttctgcaactactatgttttatttaaacttctccgggacagaatagtattaggcagggcatactcctacccactcaacagttatgaactcaaggcaaactaagctgcctctcaacaatgagggagaactcagataaaaatattttcatacgttctatttttttcttgtgatttttataaatatttaagatattttatattttgtatactattatgttttgaaagtcgggaagagtaagggatattaaatgtatccgtaaacaaggtgatgtgatctttcatgtgttagtatattcgaataatatacatatgagaggtatgcctgtccagtaaagagattgatttgtttgtatggctctggaataactcattcgtttatgaacacatctcatgtattacttgacacagtacctttggtatgtctgcttttctttcaatcctcattatctttagccctcagctggccagtacttattgctaaagaaagggagatcaatggagttgcctaccagcacccattctcttttagttcagctggctaatagtattggaatacattgggaaaagagtgggttaaagtcctaggtggggttctctttgttgcctaccaggagaaagcagtaggcttcctttctaagatacggactcagctggtctattttaccctgtgacatttaaatatacttttgaataagctactatcctgaggctgagggttttgctgccacttttcctg

SEQ ID NO: 107704 - DNA, 3896 bp, Homo sapiens
aagtgatgtgtgttttgccattgtggtttttctgtaggttcttaataatctacaatgaatgtgcactgctcttatggaaagaaattgaagagctccccagataatgaatttactatcagcaatgtccctcttgagttatgtttactcctgcgggtcctgactattttattgacctaagttataagttatattgacgtaagttataaggtgtgattttaggtggtatctgtggtctcattttcacactttgttttacaggtttggtgtttatgttcctctttgctgttttcatcaagatagtagagcacatcttcttctcacagactacaactatgtggttcagcacgaggcagtagaggaaagtgcctcgactgtgggaggcttggccaaatccaaagactttctctccttgttgctggagtcgctaaaagaacagtttaataatgccacacccatccccacccacagttgtcccctatctccagacctcattcgcaatgaagtagaatgtctgaaagcagatttcaaccacagaatcaaggaggttctcttcaactccctcttcagtgcctactatgttgcatttctccccctgtgttttgtgaaggtaagtggttatcttacttttatgtgcttcctggatttgtgtgtgaattacataaactgggtatttcttgtttaatcccccttttctctgtctcccctttggcagcctggatggtggagttcggctgcatctggagtgcactaataccgctcctggttggcggataggtatttccatatatgtgatgcacccgtggtggttccctctttttttctttttttttttttttttaagtatttttagtttctggggagaatcaaaatgtacttataatagaatcagtatgtagtagcttaagaggaccaaggtttcagtaaaactcagcctactgtggttgatcttaacatggttatcaggagtttccttgaatttaatctagcccttatctaaacttcagtttactttaatagaaaagaaaaatggtctggatgtcacttgggcccaaaatcttttggtacattttagtgccctttcttcacccattcagaagtacttctgcagctggaatggtccttcagagaacactcagttcttctagaaaggagacacttaaaatataattgcctctccctcccatccctaactcatacagccagaaagtcaggttgaaggattgtggaggactctgctcttgaacttttctgcacggacagcaggaccaccagtgcatgtgtgactcagtgtggcatttgtctgcagggcatatgtacaccaacccatccctgcctctttttaccagtgcatggatcatttctctctcttctgatctcttccagagtacccagtactatgacatgcgctggtcatgtgagcacctcattatggtgtggatcaatgcttttgtcatgctcaccacgcaactgttgccatccaaatactgtgatttgctacataaatcagctgctcacctgggcaagtggcagaagttggaacatgggtcctacagcaatgctccacagcacatgtgagtaagctagagggtaaaaccatgtaacactttctacatgctgctgatcatgtttatttgctttgtatgtcattcttgttcttggctttgaacatttaatttttagtttttgtcttacatggatgcttgtcatcatgctaaactgaatacaagggacattaactcatttccaccaccaccccagctccttaaatgcgttctacctttcagctgcccagtcactctagtgtgtgtaatttgtctcccaagcaatgcacttggcgttctctttcaatcttacccctttgcccgaattcaaagagtcatatattttatttctttttagaagactttaagatttgtcttctcatcttcattgccacagctgagtagttgctagctattcatctcacacttagctggaatatgattctctcattttttctttctaatacatgcagttttgttctagtaattttccttacctgtacttttttactattattttctttctaaactctctactgaatatttccctgcttctcctgtgtttaagtgagaactgtgcctgactgagttctttggaagaatttttctcattgtgtcccccttatcagtcattactccacatggctcctatgatccaaaatggctaacattaggaccgttttattctgtcacttctgagtccttcatcatacttttctttcagacccaaaccatcttcatcttcccccttttgtaatttgaacatttcacaaatttcatctagaaatttttccctagttaagtgggacagattgaggtgaccttccctttccctctccccctgagagttctcccttcaattatctgccttgatgtctgatacagattagcacaggccttcaagcccaggaactgaaagagattgggccaggctgaaaagaaacccgactgtgggcaaaggacagatttcaataaaaattgaaaatacaatccacagtactagtactgtacatcttcaggctactgatggcacatggccatgaggtgtatcatcactttaatgctggtaagtgtgagcaaggccggtggaacattttctgaactgggaaagctttagggtgctagaatttttttttttttttttaataacatatctaaactgcctcccagttcttatcctaggaaactaacctttccaaaatcaggaagagatgaattaacttagatttttttttttttttttaaaaagcttaacctgaagatccctgtccccacccaaactccattatgctggaaagaatgaagctgctgcttctgtaacttcttttcccccagagaaacctctataaaaataaaccatgaaagcagtgaaaagtctgtgtgtgtgtgtgagatgtatcgctgtgttctactgtatatcttcttacagttgtgaggtatttgaattgtgtgataagcaaactgatttcctatagttttttgggatgtaattctgcagtaaatgtcatgctagattgacaatgtgctaatttctccactattcttattaccatcagctttctcttcttgtttgttccctctagcatttccaccagtagactctgctcacttgggatggagatgacagtcaccctgcttacacactgttttctggcttacacatttatgtctgctcattcttctaagcctcttaagtcctttgacactgagttaactatatttctttgcaacctctgtttactatatagcaatgaagttaaagtaacaaatcctttctaaaactactccagtttgaccatggaattactgtattttcagaattcaggcagatgaagccttgattatttaattccttccataaaaatacagctggccttgccagatgctatcttatctgtaattgccaatatgctaacattgcatttctttctcccttagttggtcagaaaatacaatatggcctcaaggggtgctggtgcggcacagcagatgtttatatagagccatggggccttacaacgtggcagtgccttcagatgtatctcatgcccgcttttatgcaagtaccgcttatttattttcaaacataagcttaggggtaagtgttaggaggccactctatgtggaagcatgtagcatagcatgtagcacatactaggaaattattacatggtaattattgctactagcgtaacagtggtccctgtactttggaaatgtcttttgaagggcagtttgaagatcatatactgttattccagtttcagtagcttagctggtttctctagttacattggtatttgtcgaatctagtattacttgaaacaagcaggcagttatctaagactccttttt

SEQ ID NO: 107705 - DNA, 1024 bp, Homo sapiens
ttttttttttttgagaaggagtttcactcttgttgcccagggtggagtgcaatgtgcagtctcggctcactgcaacctccacctccagggttcaagtgattctcctgcctcagcctccgagtagctgggattgcaggtgcgcgccaccacacccagctaatttttgtattattagtagagacagagttttaccatgttgaccaggctggtcttgaactcctgacctcaggtgacctgctcgccttggcctcccaaagtgctgggattataggcatgagggactgtccctggccctaaatatctttttatttgctatttttcatatctgaatttatgtgcatgaaatgaccatttaatttataatacctaggtcacaatgtggaaattacttaatgaggacttgaagtatttaaacaaattttaaggaaccaacagttggaatactataagaagttatcagaagtctcaaaaatgttcacttctttaaccaattaattttactggtagaaattcatttgtacttccagaatttttttttattaatgagaagtttattgcatacttaaacagtgttacagccactatctgaggtaccagagttacagcagtgaattaattacgttgaaatctctggttcatagagcttaaattgtagtgaagggaagattgactaagaaagaaaacaaacaaaactacccccaaagttaaaaatcgaataaacatggtaagatctgtggagaaaaataagcaggaaaggagaagaagggtcgcctgtgggagtgggatgggtgatacagtagggaggcaggagggccccctactaagaaagggacatttgaagtaaagaacaagctgtactaaaatgaccaaacgtacacacgtattgggaaaatccttatcacattgttatttatagtagtggaaaataagaaacagcctgtttccaacaagagagaaatgggtaaattatggtatttctatatgagaatactattgtatctttaaaaatttctatagaaaaata

SEQ ID NO: 107706 - DNA, 1453 bp, Homo sapiens
atcctggccaacatggtaaaaccctgtctctactaaaaatacaaaaattagctgggcgtggtggtgtacgcctgtatcccagctactcaggaggctgaggcaggagaaccgcttgaacccaggaggcagaggttgcagtgagccaagattgtgccactgcactccagcctgggcaacagcaacagagcgagactttgtctcgaaaaaaaaaaattaaaaataaataaataaataaaacactggttaagttgttaaaatataggttgcttgactcaagattttattccttaccccttgagaggaaagttgttaggagtttacatgtccaattagtagcccaggtcattctgatggaacaaaataatgtgatccgtggaacatactttgagaagctccaatgttaataaattagatgatataaaaagaccttaaaagagttctgtagatggcactctcggggtgcaagaaggaaacaactgtgcctggagaagtctgaattttcaattattacgaagataaggtgggatggggcagtttttcttttatttcactttttaaagacacattttagcttccactaaacctattaagttcttacttgaattacaatgcttttgaagaagatcatttacaaaatgttcattttggtgcttccaaactttcaggctactaaggcaggtgcagcatcaatgattcactacatggttctgatatcagctcgcttggtactactcactttgtgtggatgggtactttgttggaccctcgtcaatctctttcgaagccattcagtcctcaatctccttttccttggctacccgtgagtactccagttttaccatgttattagtaaatctttagaaattatttcggtcacgtaaacgatacttttaagagtgaaaaatgaaattcttcaaatataaatgaagcatttagaaaactgggaaatccatgagcatggtgaacatataatttgttttctaaactggagtacagttgggacaacaggcataaaccaggactgtcctgggaaacctggaatgtagggtgtgttgccagtggagaatattttaattgtctctcttcaccaagtaaaggcccctcttgctatctatatttgggtaaacggtagttaattttagatgaatgcactggttcgaaaaccagtcttacccttggttggtcatattactttgatcttctgtttcctgtaacagaagtacaataagtagtcctcccttatccatggttttgatttctgaagtttcggttacctgcgatcaaccaaggtccagaaacattaaatagaaaattccagaaatatgtgacaaattatgttttaaattgtgtgctgttctgagtagtatggtgaaatttctcgccatcccattttgtcccaccaggatgtgaatcatctctttgtccaccatgtctgtgccgtgcatgctacctg

SEQ ID NO: 107707 - DNA, 1168 bp, Homo sapiens
cttatcctttaggtctcagcttaaataccgtttactaacacaagccatctctagaataggatctcctgttatttactttccatagcagcctactcttcctatagcactcattacaattaaaaaaatgattagataaaagtttaatatttgtttttcttggttagtcagcttcataagcacaggggttttgtttgtcttggttaccactgtacccctaggacctggtaaagggtctgtgacatacaccacagtgattagcggcttggggctctggaataaggcaaaattaacaaatccaagctctgtgctctgatgacattgggcagaaatagtcttttttatttctaaccctgaacttttgagaaggaggtaatagagtaactccaatagcttaaataactttactaagctttgatatgtgaggtaaattggcatgaaggtatgtatcaggggagttatatgaagctatgtgccaggctatgactgagaagagcttgagccatcttcacagtttgaggcttaagccgttcattatggcatttattcaactgctgctttgcattttaaagtaactatatattacgtatatatgctgtatatatatagtattcagtatacagtatattgcgtatatgttataggtactccataatatgatctgtaaactaagaaacggatatataggagggacctgaaaagctccttatcccctaccatgtactgttgactctagataatttttttctcctttttgggttccatcactgctctcttagaggttatggggatcttccattttcccctacattttgctcattctcttctccctagttcattcagaaagaaaatggcattgcagagtaagttttgacaagtacttaatatatttagtcagttttaaagatttgcgattgaagaagcatatttgaatagctgtgataaaaagaattggaagtgattatgcattatttccatgtttgcaaaagttaaaaaagaaacttatttatatagggatctgtcaaagaagatcggattattttttgaaacttcactaatttattaaacattaattcaccaagcaaattagaggtgaggattcaaagaaaaataaaaatattgttactgctgttgaggccctttatagtttagtgggaagtaagacagataa

SEQ ID NO: 107708 - DNA, 1311 bp, Homo sapiens
cctcccaaagtgctgggattacgggtgtgatcccaagtgcctggccaaggcttgcagttcttaatgggaacagaatacttaagctaaatttaaacatcgttttatcaaagtcttaattctataacttaatgttcatcagtaagggaatgtttaaataattttggtacatctacataatggaatagcatacagccattgacaacatgaaaatgtgtttatgtattgacctccaagatgttaaatgaaaaaagcaaggtgcagaacagtgtttaaaatgagacaggagggaacaaaatatatttgcttatatatgaataaattgtttccagaaggacatacaaactaataacaggttgcacagttggtggctaggagacaggatcagcaggtgggaagcttttcactacaagcactgttacatgttttgtgttttgagtgatatgaatgtgttacctattcaaaaatttaaaataagagctgtatagtgattttcctcctaaaatatctaaattagatggataaaacctatcataaatcatctttccttccttccattaaaatatgttttcctcctttttttgcatatatcacagaaaggatccctaccctgagaaagatcaataatatttaaggagaggctgctggtaattaattcataaacggaaatgctattcagagaggactacctctccacgtaggtagagtccgtttattcaccttcaggccagctctgcctgttcacctccaggctaactctacttctatacttgcttcacaagactagaaataaatttagctgttttttcaccaacctgaagcaactctctttttaaaaattgtttttctaggaaaatagtatattttattgaaaaaaatttggaaaacactaaaatataaagcaggacatttaaaaattgctcacaatctcattattgaagaccactttttttggggggtggggggcagacagagttttgctcttgtcgcccaggctgtaaatggcatgatcttggcttactgcaacctccgcctccttggttcaagcgattctcctgcctcggcctcccaagtagctgggattactccttggttcaagcgattctcctgcctcggcctcccaagtagctgggattacaggcgcccaccaccatgcccagataatttttgtatttttagtagagacagggtttcaccatgttggccaggttggtctcaaactccagacctcaggtgatccacctgcctctgcctcccaaagtgctgggattacaggtgtgagccattgcacccggccaaagaccacattttgct

SEQ ID NO: 107709 - DNA, 1511 bp, Homo sapiens
agtttaaatgggctctgcacctccttcttagtcattatttgttactgttttatttcttacaagcagttttaactatttaaaatgcttttgtttgggagcttgtttattgtcattacttgccctgcttctccaaacaaatttattgaagatatgggtttagctgccataacagggtggctaaaacaaaatagaaacttatttccctatttaataaacgtttaggtgggtgatataacatcagcatggcaactctttgtatttattgctcttccatccccaatatgcttcttccaaaccatggtccaaggcaggtactctaactccagttatcatatctgaccagcaggaaggagaaagaaaagagaaaaggggacagctctttctagaagagtatggcttagaagttgtgcgtattactttttcactcatcccttggctaaaagtagtttttgcaagggaggctggaaaatgaacctttagctggctaggagtcagtgcctagttaaattttatggtgatgcagaaggaacgaatagtaatctctgccatttcctttccctctgacaccacagtagaaagtaagacccaggagagcaggaaccttggctgtcatcttccacactgtatctttagtgtgaaggagagtacctggtgcattgtggatgctatgtatagatttattaaattaagtaatcaagaaatttaatgtttcattctggaaggaattgtggaaacctacagaccttttgatcatcaaaatgaaaatacatcctgattttggtggttcctgggatattgttgctaaagacttttcatttgcttattaccacagttgtatatacagatttagaactagaaggaactgtagacagcatctaggtaatgctattattttttagaagagaccaaacataaggcatacttctaaatcaaactaggagaaacactaaatgagtataattgatgtaccatctagtagagaatttagtagatgcccaattagattaacataagcttgtgtaagagaccaacaacagtaacttctgaagactgaatcccaactgatagtttgacacattataaatatgccattttatataaattattcttgccataattctgcaggttataacttgttaactcaaagctgcaatcttttccttttagtacagtaatacttttgaaaagggagaggaatatattgcaggtagtttaaaatagtgtttaaaaacttaaagcaatttgttatgaaagaagaagtagaaggtacgtagtctcttcaagatctctcatattcccataatctgtaagggtgtggtgatctaaggaagatcttttgagggataaacctctattcttgtagtagtgccagctgaatacacatcatatttctttctgatgtagttatttatttctgttgtagaattttcatctcattgattatcatctggcagcattcatcacagtgatgcttgcgaggaggcttgtatgggctctcatctcagaggtaa

SEQ ID NO: 107710 - DNA, 1050 bp, Homo sapiens
tacaggtgtgagccaccacgcctggccaagaaaagttttaatatgactcccaggtttctgatgtgggcagctaactgagtgggccatgaactaaggtcaggactataggagggaagaacacagagatgtccagtagggagttgaataatgtgtctataatttagcagtgagctctatggagagaaattatagtcttcatcatgtaggagataatggaggccatagctgcatcttagatcactgacagaaagtgtggagggagaaaagaggatcccaggatggagtcttgtggggaaagcagacagtgaaggggtagatggaggagacagcaggagccctttatgttctgtgatactggaggttatcaccatttgagttaaccatagttttctctttcaggaatggtagtgctattggccttccagtcccacctatcacagccttaatcaccccaggtcctgttcgtcattgccaaattcctgacttgcctgtggatgggagcctactctttgaattcctttttttcatctacctgttggttgctcttttcattcagtacatcaacatttataaaacagtgtggtggtatccttacaatcatcctgcttcttgtacatcactggtaagtcttactcagactttaagttcttcatgttacttacccaagaaactacctggaaagcctttctgtagaaattgtttttcttaataatttttcttttaataaaatgtttttctgctaggccacagattactttcagaaataaaatttcatgataagatggttaaattataagtactaccagaggaagtaaaaatataaatgaaaatgcagaaaacatttaaataattttttataataatatcacggaaaggttttggtatttagttttctctacaccattttaaatttgtaagtataaggtgtcagtgttactacattctaacaactctacccttttaatggctgaattaggatagtggtagcttctgtaacaaataaactctgaggcagttgtcctggttgccaggagttcttcaggggaccca

SEQ ID NO: 107711 - DNA, 1322 bp, Homo sapiens
gttgtttgctctttgaggtacatgccttaattttattaatatatgctatcaacttattgattcagtactttcaaattgtgatagaaaatcttagctgtccctaactaggattctagccaactaaaaaattctaactttgcctcctaactctagcagttctttgttcgttctctttgactttggctttgaggattcctctagataattatgttctctagataaaaatgttcttagactgtcccatgaaatccctcttcagtgtctcaggggttgctgtaggagggcttagaagggaaaatggatcaggcaagcctaacagtctaggcttgagttttcctcgtcttcttttaattagactgactcattttcctatgtgttttaaatattaagatactatgtaaaatatcatgaggaaaggaaaataaagcgttctgctattaaaaagaactgaaagccaatgaaaatgtcatttgtagatgcttctgcttgcacttagagtctgcagatggtatactgggaagaagtaggaacgttcggaaaatacctcggctcttgactgggtttggtattcttttctctgccttcactgtagctcttctatcctggtattcaaggttccaaccatggttgctttaatctgcctttctctcctcctttaacatatgtttatttagcaattaactggggggagggagggagtgggtagaaaaaagtattttccaacattttaaaatgaaagaaataattgtttatggtttgaaaagtcaccaagactattattgagtgattatttgtgacatgtttacctagagaaattatttggggaaaagaaagctttatatttctttcttggtgggaagcaagcagctggaataatttgttataaaagacctggggacgaggtatgaaaacatgaaagaactagcggatagcttataatatagttttaggaaggatatatagaaagaaggagtgtccagatgaggagaactcacttctggagtgtctatagagtattggagggaaatagataattgcttcagtattacatacttttggatgatacatttgattctgcaagacagacataggtcagctggagaggagagaatttgtccctgtttggtaggtgcttgtggtctgattggtgaagttaaactctagaatgtcaaggagctagtttggtaacacagtcaaggttgaaattgtagttccttgtcctgctgtccacctttggggagcagggatttgttcttgcaacagtgtatttaaagtattatccttttaaaaaaggaagatatattgtgtatttctggatttct

SEQ ID NO: 107712 - DNA, 1169 bp, Homo sapiens
cacactcagaagaacacactcagaagttaacttatccggataaggtcagataatatgtgaccatctgagctcacaagccatatcccttgataacaaaacctaatgttttataaagtgccaattcttctatatttcaagtagtttaagtgtgaaacattgagctggaaatgtataaggtgtgatgtttcttgtaaacttctatttgattataatatcttacagatgatacaaatcagttgacaaaagacacaaatcatcacttgcctaaagctgaacagagcttagatcagaacttaggcttttgacccattagagtctgagtagtcctttaattcgaataacgtaagtagtagacactgggaacattcgtttgaaaatcttattttgtaaggcctgcttactcagtgtttgtcgttgttttgttgcctactttaaaaatagtctactgatgtttaaatgtttttgttgtcgttcagagttgaaactggttgacaaccattaacctgggttgcaactacaggtggcactggaagcagactggttcctggacatgcccggtggaaggaggggccctagtcggcaacagctaagccgttcagctttaccttctttgcagactttggttggtggaggctgtggcaatggaacaggcttgagaaacaggtaaagaaaaaataaggctatatataattttaatgtcctttgatcagtaagactaacataaaagtcatcatgtcattcagatatttgcttattgagatttattcttgacactgtggtagaaatcctgcccttcaagacaaaattcagaattccaaaatactttggaggtaaaaagatgtgaaatggggcccacaaagtgaaagcagtcccattctttattttggctgatcatctaaattcttgttatcccctttttatctattagaagaagggagaagtgaatgaaaatacaaggtaagtgtgatggtttatctacttataagcattctttttttagagggcaaattataagtcaaattccatcaaggattttaaattgtcaaaaaattgtttggtcttaataaatgttagctgttttttagctgggttagcccatgccatcaggaggtttgataatgtagcagttcaaagagatacttttacctaatgaagtatttgctcaagat

SEQ ID NO: 107713 - DNA, 1080 bp, Homo sapiens
actagactctgagcttttgtggtattcgctttgtaaccacagcatctgtctagttcttagcaaacaataagcgcagggttggatgctgacgcatgacttcatgacttgggctccctcacttagcagtaacgtgaccctaggtgacacctcctaatctacactcatctgtaaaatggcggtgataacttgtacatggttactacatggagtccaagagacagcaagaaggatcagtagcatggtgcccgcacctagcagccgctagctgactgaggccgaaagaggaaatgctttggccaacactggccggaaggggcgggaccgcgagttaagaggagaaggcgcgccccactgcgcaggtgcaaatggtaggggttgtcgtgccggctgattccggggacgcactcgcggctggggcagaccgcggtcgcgtagctgacgtcatcgccgtgcgctgccacgtctgctcagctccgcggtaatggaggctagggatgggtgctgaagtatcaggctctggctctagctttagctctggcactggaactgcgtcggagtctgggtctgagtctggcagcccgaagcctggacaccttttcttgattctctaggcgggggctgcctgcgtccaagcagctggtttgcagcgttccaacgctgggagggagttcccttacctggggtccagtctgtaaagttgtcgccgctttctagggaccccgccccaccggctgggactcttccatgcgtgagtattactgagctgccccaaggtccggctgtcctggacctgcctcggccctcttgggtgtgcggcggagactgctttgtctacctttctgccgacttctcttagggaccagtctgttgaagtttgtggtctcctgcagtccaccacaccgcatactctcacctcttccgtcccagttttttccctgcacttttctttccctttgcttgttaatggagcaaggaccagcagcccctgcatccagcggtttgaatgctttgtttgacttggggttagtttacagccgaaggctgttaggaatagggagcatttgaaaacacgggtttttt

SEQ ID NO: 107714 - DNA, 2115 bp, Homo sapiens
aactttatttaacaccattgatcttttttcctacgtctaagtcaccccaactgttataaattcctattacaaagggatccctgctatgctaattgcaacctttggggtctaaccgtgctgtacacacacacacacacacacacacacacacacacacatgctcaacaaatttatgctatttgataagaggcaatttgacgtcaagagaagaactgtttggcctaggctctatgccaagtcttggttgtgccactaaccgtgaaacataccctctctgaccttcagttttctggctgcagacctattttcccaggggtgccagggagggaggataggcaactggtccattcgtttatcctccccaccttcccggcgcagccttctcagggaaactccgcctcaaggctggggactggaggaagggtggtggggccacggtggccatctttgtgcggggcgacccgccgcccacgtgctgcggctcccgggccatctttgtgcggggccgcgcttccgccagcgccgcagcggggaatctgcagtaggtctgccggcgatggagtggtgggctagctcgccgcttcggctctggctgctgttgttcctcctgccctcagcgcagggccgccagaaggagtcaggtgggctccgggcagtgccgagcctgccccttgggctcggggtctggccggagtcccgaggcgctcccccgcgcggccggctcccgggaagatgccgtggccgctgtagctcggagctgggcagaaggcaccggggcgccttgcggcggagagtgaggtgccggggtctctgctcctgctctggaccctggagagtaacccattccccggaattcagaatgacagggaggagagggaattccccgttcacccgcaggaggcgtggcccgtgcttggctactctggacctgcctgaaacactgaggggtcggggatgggggcaaatgtcgtgcgcgcgagcgtgtgtgtatatgcgttgccagaagagaagaggggtttaatgtctgtagcttttaactgatcctctttgtggagttcaatttgattagtagaaagtgagagtccgcgtcactatccatagcattctgagggttgagcattaagcttgggaattttccagtttcttggacacctgacagccggatagaggaacagacttgacgtgagcgtgggagttgcacacacaaaaattcctccctagcgtttcgtttccatcagtgggatgggaaggggatttctgaaagttttggtcttctgtttcttctgttggtgtggtgtcagcaaataacattcaggaaaatttttttaactctcatttacttcactttttaaaggttcaaaatggaaagtatttattgaccaaattaacaggtctttggagaattacgaaccatgttcaagtcaaaactgcagctgctaccatgggtgagttcttttctttgatgtgtctttgagagtttagttgctgtcacaggaagtattctaacatccttgagagattttggttgcagtggtcagaaaggcaaggatgtttttctatttctggggaataaaaatgctctcgcatgggaaaggctcaggtggtgtcaacctaaccactgactcactgcgggattcagtgcatgtgcatctgtttttcccactgggctgcaagcttcctgaggtcagggtctgtgtcttatttgctgttgtctccctggtgctagctgtcagtgcgtgctcgataaatattgttgaggaaataaacccatctatcgctgaatctagtcctaaatttcctgatggttatctttagaaaatgcacatcaggctgggcatggtggttcatgcctgtaatcccagcactttgagaggccaaggcaggtggatcacctgaggtcagaatttcgagaccagcctggccaacatggtgaaaccctgtctctactaaaaatacaaaaattagctgggcatgatggcacgtgcctgtaatcccagctactcgggaggctgaggcaggagaatcgcttgaacccgggaagcagaggttgcattgaatccagatcatgccactgcaccccagcctgggtgacagagtgagactccgtctcaaaaa

SEQ ID NO: 107715 - DNA, 2022 bp, Homo sapiens
aacaatattttaaatcagttatttccatgctgccagaaaattttgatcaagcctttgaatattgcccctagcatagtgctggtcaggacctcagaggatgaggcagaaacaagctaaactgtcagtgtatcttctttttctttcaagaaatccctgatttcccagggaatctagtcagaaagctgtgttacactatttatgattatgtatataacactttttctggcttgcagaactgattttgataatgttctttattcaggttgaaggtaatgaaaggttttctatctgttctcataaactaggagacttaattataatggaaataaaaatggtgtctttgtgaggagcaaagccaaaggaacacaggtggaaaattagctatttcagctattacgagagtttgtatcttgtctactaattaaactattccatataagggaaataaagaaaagaactggaatgaataaagtggtagaagtagcaataatactcccttcaaagctatgacgatttatttggaaaattttattaagtattgtaagctggagcagcttagctatgagtgaacttgcacaatacaaaaaagcagaatagcccctttagaagcattgttttcaggagactttgcagtagactgatgatatggaacactggaacactggcttgtcttactttaaaatgtgaatgggacctcgccttgtcctagagcctgcaggcactactctgctgaatttatggtatgtctggttgacaggtgtagtggtgttgagcactttattttggaagtgatcgggcgtctccctgacatggagatggtgatcaatgtacgagattatcctcaggttcctaaatggatggagcctgccatcccagtcttctccttcagtaaggtaagtacagggagagccacatgggtggatggagagtggtcctctaggatatgagcatgagatctttgtccggtgacatagtctgatggataatggtaaggatgaggactgaggtccagaaatgggtctgtgtctctattagcatcacagtgattgagcaaaaagacagaggagatgaagttgagagctggtaagtagtgtaagattgcttgagtgtctatagggctagagatggaggctagggcgtgagaggcctgagaaacctacaggaattagaggtgggtcttgaagatcttacagagcatgggaggaaggggtccaagaaagcttggagttagggaacaccttcattccaaaagtttgttgagctcctactatgtatatattcagccatagtgctgggtatcagctgtcccatctgtcaccatattccgggggcccagggtggctaaaagtgaacctgaaggtgccagataactccacacggtgtgtgtacaagccgtgcattgaagggataggctggagatagcctagagggctatgcaagggggtgatcttttagactcatcatggaagattggagtagctaggatacacctgtgggcttggggaattgggggcaaggaatgtcttgtcagtgctcaggttcatgtaaatgttgtatcggcagggatgggccttggttccctagagacaaggaaagcatttgggggtgaaggcaggaaggctagaagagagtggatggaagattctatggggtaagagtgaattgaggaaaaccccatgaaatttgggaaaaggaacactatttctgatttggtttgtctaaagcagagggaccttttatccccactttttctttatcatagtttactttctccctagacttgttttatttcctgtgttgcaagtgggcagaggccacatttgtgttgcatttcccatggtctagcctcatttctcgaaagtgtttggttccattgtttgtcatgaaactcactcagaagaacagatagaggctcccatgtaagtcagtagggacttcgtgtttgttatctatctgttgtttctatggataataaagtatgaccgtcggtatactaactttccgttcatctttacttccctt

SEQ ID NO: 107716 - DNA, 1044 bp, Homo sapiens
tggctcttactctcaaaaaaacccattgggaaataaccaaaaactggtaagacagtgtaaactcttaaatgtaatagttaaacaatgagagagctctgtgattattcagaattgggcatattgtttccttaaattggaaatcttaacagtatatatcctctagaaaaacagaatttgggggaactgaaaaagctgacctttaatgtgattctgaattctggaattcagtgagcccatgacttttaatccatagtcacttttgccttttaatgtctacaggctagactttggaaaatagggaaaatatatctttgacaatgtgacactaaaccaaggctgtccagatcctgtggcatgattgcagttgcctcttttcactgttccaagactgatttaggacgacctgtctgtttttgttgaagacatcagagtaccatgatatcatgtatcctgcttggacattttgggaagggggacctgctgtttggccaatttatcctacaggtcttggacggtgggacctcttcagagaagatctggtaaggtaggtcctttaaagaggttttattttttctctttctgggttttcttgaaataagccatagaatataaccaattatttactttttttttttttgagacggagtttcgccctttttgcccaggctagagtgcaatggcgtgatctcagctcaccgcaacctccgcctcccaggttcaagtgattctcttgcctcagcctcccgagtagctgggattacaggcatgtgccaccacacccggctaatttcgtatttttagtagagacggggtgtctccatgttggtcaggctggtcttgaactcctgacctcaggtgatctgcccacctcagcctcccaaagtgctgggattacaggcgtgagccaccgcgcccagcctatttatttttaagtgactaatttttaagttaaaaattaaagacagaaaactgtagtgtaaacaattttgtacgtgtctaataatatttacatatccatagaaaggggcagaatagtctatccta

SEQ ID NO: 107717 - DNA, 4499 bp, Homo sapiens
tgtcctttagggctttttcttttgagtgactttgattagacttacttagaaatatgaagctctggccaggcacagtggctcacgcctgtaatcccagcactttgggaggccgaggcaggcggatcacgaagtcaggagatagagaccatcctggctaacacggtgaaaccctgtctctactaaaaaatacacaaaattagccgggcgtggtggcgggcgcctgtggtcccagctactcaggaggctgaggcaggagaatggcatgaacccaggaaggggagcttgcagtcagccaagatcgcgccactgcactccagcctggacgacagtgcgagactccgtctcaaaaaaaaaaaagaaatatgaagctctgaactaatcttcagaaatggttaaagcacattcttatatagttgaaaaagatatattgaaactaattaaattctatattcttaggtcagcagcacagtggccatggaaaaagaaaaactctacagcatatttccgaggatcaaggtgagttattttctgacattttacaaagatattcttccaagtaatgtaaaatgtaagtaactttgagggtatgacaagctctgtagttcaaagggaaagctaagataacaaagaaagaaatgtggaatcacaattttagattcgagaataattcacattatttgccgaaatcgccattgattgagttgatattcaaagaagtaaagttcatccatttcagtcatttaacagatattttacatagtgtcacaaatgtgtcggtcattgattatgtgatgccaaacacaacagatgggtgtcttcttacagtccctaggagtagcttatgatcatgccacggtactctgctggttaatgcagagcaggactcatcaccatatctcttgactgccttttttatcacaccctgtggctgccaaatagtggttaagagcacagactgagactgctgaaaatgaagaagggagcagggaggaaagagaagagaaaaatggcaaaggtagtaggaggaccctgtgttgttcagctccatagtcccaaggccaagaacagttcctagcatgtcaatatatgataaatatctgtggagcagatgaatagaaaagaccatgaagggagcagggttttgtagttttagcaagtgagtccttgccagagattatactccctcttcaccctcctcttcacttcggagctagactttaggaggtaaatggattatccagctactatgtcctgtttcttaccaacttctctgattcttaaatcttgaagtcacaaattaacttggggaccatgtctggacttcaagagttttaggactcccttgaaattatgtgaggatatgtgcatttttctgggaaggagagagggttggttcatagttcttaacagattatcaaggaatccatgatgcctcacatgtcaagaccctctgctacttggaacatcactagaaattcttccacatacagtcgtcaggtttttaagccctttggtttttgtgcattttttttaaattaaatattatactgggctgtacagagcatacataacaaaggtcatgtagctgttttagtgagtcgtgactacctagcctcacagttatgagcaccagtgattatagaagccacatgaactttcctaaaagggaaatcattccctgggatttgactatagtgacctgaacaacatacccttcaagaccaaatgcaagcaaagaagggccaagtaccccccaaccctaaaggtacagaggggaccagccctggatgacctagatgctgcagtacccagtatacccctcctccgctgtcacgtcaccagtgaattgtccacttgtgcagagtcattgcattgggtcctagtcctgctcacctttcagggattgggaacagttttctaatacaggccacacagttttatgtcacgtgtttcttttataggacaagtccagaacgagatcctctcattcttctgtctcggaaaaacccaaaacttgttgatgcagaatacaccaaaaaccaggcctggaaatctatgaaagtaatcaccagtcatctgactagaactacagcagtgaacattctcactcaaagaacattgccacctgggtagaatttgagattaggtttcctgtcagtggtgaggtgaatgtaaagaaagttccatgaaccagcattagcatatatgtaaattctcctttttcaaacttacattgcttttctggccatattatgactagtatattgcactactttgaaggtttaaaccaggggtcacaaactttttccaggaagggccaaatagtaaatgttgtaggttttgcaggtcgtatggtctctattgcagttgccaacagacatgggcagtttgtaaatgaatgagcctggcagtgtttttattaaaactttattacggccaggcatggtggctcatgcctgtaatcctagcactttgggaggcgaggcgggtggatcacttgaggtcaggagttcaagaccagcctggccaacatggtgaaaccccgtctctactaaaaacacaaaaattagccgggcatggtggtatgtgccggtagtcccagctactggggaggctgaggcaggagaatcgcttgaacctgggaggcagagattgcagtgagccgagatcacgccattgcactccagcctggcgacagagcaagactccgtctcaaaaataagtaaataaaaataaaaataataaaaaataaaaactttatgggcactgaaatttgaatttcatgtaattttaagttgtcataaaatattattcttttgcctttttttttaaccatttgaaatgtaaaaatttcttagtccatgacaaaaacaagcagtgggtcaaatttggcctgtgggtcgtagtttgccaacccctggtttaaatcaatggtctcaaccctggctgtgcaatacaaccagagagcttaagaaaatgaatcaaatgagtcagaatctctgggaatggtgtccaggaatcttcatttgtttaaaacttttcaagtgattctaaggtgaagccagaaatgggaccgttggtttacagtccactctctcctcttaactctatggctttttgccttaatcaaagaaattaaagccctaaacttcctttatatgaaatttccatataccatatgaggatgctatgaggaaaagctttagacttcttgggagaaaactaagtaaatctgaggtgcatgtattatttcatacagttttaatcaggagcaagtgagcttaagaaactttgttgaataataaaaatatgaaaaaatgtgttcatttagaacaaaagttgttagcatctactgtgggaggctgcagaagcaaacaaaacttgtcccctcatcaaggagtttaccatctgctaaggtggatggaatgtacctggggatgtcaaactcagatgtccccaggggccagcaggtgatgtcaagaggtgagcaagagagaatactaacagttccaaatgttaataagagcccagtttgccagatcttcctttttattctccaagaaagactggaaatctggatttttgcaagaaatatcctaccacctgtaaatgttggcaatgatttgatttaaaaaaaaaaatactttgcatgcccaacaaaatttgagcatgggctatatacacccctaaggccatcagccagcacttgggaccttctctgcatacattatttacacagagtgaagtgtgctgcaggctgtgacatctgaattcaaaggagggcaacatggctttaggtgtgcttaaactttaaaatcagacgggccctggttaaaactctgtcttctatttagagccacactgaccttgagcaaatctcaacttccaaagccttggcttctgcatttatataatgggaataataatgtctcctgagtatattgattatgaagcttaaatgaggtaatgttgatgaaatgtttaacaatgcttgctgcacagtgatcacaataaatgctgttgctgttaatactaataacttcctttccacttaaaggataccttaggaaagccagctgctaaggatgtccatcttgtggatcactgcaaatacaagtaagatttgcaggactcctcactttcttggtttccatactgcttttgaaatagcttcactttgggtgagaactttaatataaaggcccagctggagtaaatgaaagttgcattaattcatttcactggcttttcctcagggcctaaatgcactgacctgagttctgtggcgactgtagagaagaatggaacatggttcctgcttccaaacagctgcatgctagctagtaatcacagtaatggaattacctctccatatgccccacccacccaatcattgaagttagaataaatatttctcagttaataaatattagaattattatcctggtgtgctggcatgctcctgtagtcttagctactcgggaggctgaggtaggagg

SEQ ID NO: 107718 - DNA, 1624 bp, Homo sapiens
cgaggtgggcggatcacctgaggtcagaagttcaagaccagcctagccatggtgaaaccccatctctactagaaatacaaaaaaattagccgggtgtggtggtgcgtgcctgtaatcccagctactcgggaggctgaggcaggagaatcacttgaacccgggaggcggaggttgcagtgagccaagatcgcaccattgcgctccagcatgagcaacaagagcgaaactccgtctcaaaaaataaataaataaataaataaataaaggaaaaagattgttaagttgtattgctacatgcatgtatgtggatatgattgccatagggttggttcttgaggctcaaatgaattaatttatataaaatgctgaataatgcttggcacaaggtgagcactcaaatgcagactgctattatcattaaattctgtgctttaacattttcttgttaaatcttgtctctaggggaagccagtttattaggaaccatttgcagatggatgacatcacctgttactgggagaacctcttgagtgaatactctaaattcctgtcttataatgtaacgagaaggaaaggttatgatcaaattattcccaaaatgttgaaaactgaactatagtagtcatcataggaccatagtcctctttgtggcaacagatctcagatatcctacggtgagaagcttaccataagcttggcacctataccttgaatatctgctatcaagccaaatacctggttttccttatcatgctgcacccagagcaactcttgagaaagatttaaaatgtgtctaatacactgatatgaagcagttcaactttttggatgaataaggaccagaaatcgtgagatgtggattttgaacccaactctacctttcattttcttaagaccaatcacagcttgtgcctcagatcatccacctgtgtgagtccatcactgtgaaattgactgtgtccatgtgatgatgccctttgtcccattatttggagcagaaaattcgtcatttggaagtagtacaactcattgctggaattgtgaaattattcaaggcgtgatctctgtcactttattttaatgtaggaaaccctatggggtttatgaaaaatacttggggatcattctctgaatggtctaaggaagcggtagccatgccatgcaatgatgtaggagttctcttttgtaaaaccataaactgtgttactcaggaggtttctataatgccacatagaaagaggccaattgcatgagtaattattgcaattggatttcaggttccctttttgtgccttcatgccctacttcttaatgcctctctaaagccaaaaaaaaaaaaaaagacaaagcctcttaataaatttaatggaactatacatagaacagcagctcttcctcaccctttgcatacctttaatatttttccttcttaaattggccacagcaggggtcattcacactctcactgtcttgcaggaatcacaagaagtcttcatatgtgaacgtgccattcagttggtagttaagagcattcaacttcaaatatatagaagatatttgttttagtgcaaatccatgatggagtgcctcccttttccttttttcactttttgaaaaagatgtt

SEQ ID NO: 107719 - DNA, 1306 bp, Homo sapiens
tttttaaactcctttccacaaaagtttaagtctaatgaccttcttagagaagttgagcatgcctggcaagatcatttcatggaataagcagatgtttaaagttggatttttttttttttttttttttgagtactagcaatgcacagggaccgtgttcttaggttcttagtctgtgaatctagcaataggcagtccagatttctgagtcgtactatggttttgccttgtcactgtgaggccctactaggtgtaagcattctctctgaattttaatttcctctcattaaaataggaacaaaatttgctatcctttagattaggagctgaagattcatttccctgggaatgtttcccatttagcttcaagtttcagctcaaacatcaccttctttctgactcctttcattcattcctccaggcagtaaggggctaccatagtactttgtttatgcctgtattatatgacatcactgtagttgcttgactgtttctcctactgttctgtaaacttattaatgggtgagaatctaattttactcatcttgatggcttcatgatccagcacagtgcctcacacaaagaactattgggtgggtggatggatggatggaggaatggagacagttggcttaaccagatcctatatacagattattactggctccaaaggatgagtagataagaccataagaattggatcaatgtaaatcctcacctgccctttgaagagccaataagggcatctttgtctttaaatacagcaaatgttattcagattttgtacttgtctatctgtttacctcagtgtagatgatatgaggatggtataactatgtaaattgtttttgaaaataatttgtttccccacaacttttgaaggttttatttgttgttgttattactagttcagtcccaaacttaccctttccttttcagagagctaatggccatgcttttcttcaaggaaagaataatttatttgaatgaagtgggatacttgcataacacaaataatgctttgtctttatttatttcgggagtgttatctatgtgctgtcagtgacccaccttattctactatatcagttcagattttcctagtggtcaagaacagaaactgcctctagctagtttaagcaaagtaacttactagaaggacatgagggcatctcgtggaatctaaaaaggtttcacagtggttagaaggatagaagcaagggcacctccaggaatctcagcaagaattttgactgtttccagggtgctactataatgcagttccattacctattgggctctgtctcag

SEQ ID NO: 107720 - DNA, 1055 bp, Homo sapiens
atggagcagagagttatatttacaagtcactcatttaatacttaccagatacttcttaagcatctactatgcacagagacaaggaaagtttacaagaggctcccaaacctcaaggggctgtgccgttgagatgataaacaatatgagaggcatcatacatacgtggaaggtgattaaggcaacaggagtgccaattattcatgaagacaatgtggatctggagtttagaggaagaataaacttccaactggagcagatgggaaactttgtggaggtaaaaattaatttataccatgaaggataagtaaatgaaatggttcttggagttctcaaaattcattctctctccacatgttgaaaagttttatatcatatataatgtaacaaaatgtaaaatacgtagcaagggcagtacttggtgaacctggcagggaagggaacctgctgacccctgagaaaaaaattcactgtgagggaagaaactattaggttctataaacagaattcagcaacaagggctgttggtggaagaatggtgttccaggcagtatggtgattgcactgaaatctttccctgatgcagttactctgctggcaaacacatgtcctggggacaagaaagccatatgtgaaacagtggtccagtaaaccccataacaccttttggcttagaccaagcttgtccaacccatggctcacgaactgcacgcggcccaggaaagctttgaatgcgccccaacacaaatttgtaaacgttcttaaaacatgagatttatgcatggacttttttctttttcttttctttttgttttttgtttttagctcatcagctacagttagtgttatgtgtgggccaagacaattattcttccaatgtggcccagggaagccaaaagattggacacctctggcttagactgtattgatcggagaaccttcaaaaagagcagactacagcctacagggctgggcttggtggctcacacctgtaatcccagcactttgggaggctgaggcaggcagatcacttggggccagaagtttgagaccatcct

SEQ ID NO: 107721 - DNA, 1055 bp, Homo sapiens
attaataatgcctttttttttttttcaagaacttttctctgtgtaaaagactggtgtagttatggttttacaaccatgtctggaacacattgaaggggcctaggctaggaacagggattgatatagtaggcttttctaaatctattaagtcagtgaaaataacactcaagaaggtaaatgggatatgctttaaatcttatattttccttctcctccctttttaccagcacagtgaacactagtctgaatgtataccgaaataaagatgccttaagccattttgtaattgcaggaggtaagacatttttgtttatatttttcagtcttctcaaatacagtttagaaaatgtgtaaggacttatacatcagaactactgaattctttggttggcttcccattacatctcatcaacattgatgcaaaatgtatttatggacagtgttgtgcttcacccttgatatactcaatgggcaaaacagcaaggcccttgctttctttgaattttaatgtctaatatgtatgtgataatacaggttgttgtgatagaaagtaacaattcggtggaacaatgggatctcatatggacagggtagtcaaagaaggcctttctgaggaagtgacatttgagctgataccaaagaataggaaggagcaagacttgcaaggaagggtgtcctaaatagagggaacatcaagggggaaggctctaaggcaaaacatttccttaaaagcaggataataacgtggtgagtgagggaaagagtagcttgagatgagattggtgaggactataggaatggactagattttttatggtaagaacttggattttattttaaagctctctgcctctagtatatatatgtatattttctttttaatgagcattaaaaatagaaggtacaatggtgattaccagagactggatatggggttggaaaagatgttggtcaaaggatacaaaatttcatttagacaggaggaataagttcaagagatctatttaaaacatggtaactatggttactaacagtgtattgtatacttcaaaatt

SEQ ID NO: 107722 - DNA, 1072 bp, Homo sapiens
ggtacttacattcccccagccctgggagcaagaggacagcgagacttcaagccttcacaccttagcacaaagtgtgtcagttcccacacatcactcctgtgagaactctaggacccagcatactaggaatatcttatggatcagagctgtcaccacaacggtatccattatggtaatgtggaaatcataattggcttgtgaggttaggagagagaagaaagttactgtatttgaagttcagggagcagtatttgcttctaaattgctataccaaagcagggaggaaaagacaaatgctatcctttttgttttaaatctgtaagaactaaagaaatggagcagtatttgatttatcctttttatctgattacaggaaaggcagactacaagttactgagcacctccctgagaaaattgaaagtagtttacaggaagatgaacctgagaatgatgctaagaaaattgaagcactgctaaaccttcctagaaacccttcagtaatagataaacaagacaaggactgaaagtgctctgaacttgaaactcactggagagctgaagggagctgccatgtccgatgaatgccaacagacaggccactctttggtcagcctgctgacaaatttaagtgctggtacctgtggtggcagtggcttgctcttgtctttttcttttctttttaactaagaatggggctgttgtactctcactttacttatccttaaatttaaatacatacttatgtttgtattaatctatcaatatatgcatacatgaatatatccacccacctagattttaagcagtaaataaaacatttcgcaaaagattaaagttgaattttacagttcgtatattcatgtggtcctttgaaagggtattctagaaatcactggaaagaggagaggaaagaaccaggtaggcaaatggtctgtgaaacccttgggtcctggaagcagtgtgagtgtaaatgtgtagtgtttggtttcatctaaataaacaaagatgatttctttgacacttgaaataaaatacaaattcaacaaaaagtagatcagcattattaaagaaa

SEQ ID NO: 107723 - DNA, 1920 bp, Homo sapiens
atagtgacttccaaaacctttaacaagcattgcgggtgcaactgctatagaaaacactattgaggttcctcagaaaattaaaaatagaactaccatatgaccccaaaattccatatatccataagaattgaaagcagggtcttgaagagatatttgcacacccatgttcatagcagcacagtagccaggaggtgggaagcaagccaaatgtccatctacagatgaatgggcaaacaaaatgtgggggggggtgtgtgtgtaatattattcattatccttatgatcatatcattaccattccaaaggaaggaaatcctatcatatgctacaacgtgaatgaaccttgagtgcatcatgctaagtgaaataagccaatcataaacaggctgttactgtatgattctatttctatgagatatttaaagtagccaaattcatacaaacaaacagaatggcaattgccagaggctgaggggagagggggaaaggggagttgtttaatgggcatagagtttcagatttgcaaaatgaaaatttctagagatctgtttcacaacaatgtgaatatacttaacattactgaactgtacacttaaaaatcaataagatgataaattttatgttatgtgtttgtttgtttgtttgtttgtttggagatggagttttgctcttgttgcccaggctggggtgcaatctcagcttactgcaacctccgcctcctgggttcaagtgattctcctgcctcagcctcccgagtagctgggattactacacccgccaccacacccggctaattttttgtatttttagtagagacagagtttcaccatgttggcccggctggtctcgaactcctgacctcaagtgatctgcctgcctcggcctcccaaagtgctgggattacaggcgtgagccaccacgcccagcctgttgtgttttttaccacaatttttaaaaaatgaagagaaaaaaagcattggggaccccaaaaatcaaactggattgatacttagtcactagacacaacaccctaagttctgttactgccgactttggattcctgaccatgcaggaatctgtatttaataaatatacaatcttgttctgtttgcctctccataggtgttatccacgtgaccaaggaagtgaaagaagtggcaacgctgtcctgtggtcacaatgtttctgttgaagagctggcacaaactcgcatctactggcaaaaggagaagaaaatggtgctgactatgatgtctggggacatgaatatatggcccgagtacaagaaccggaccatctttgatatcactaataacctctccattgtgatcctggctctgcgcccatctgacgagggcacatacgagtgtgttgttctgaagtatgaaaaagacgctttcaagcgggaacacctggctgaagtgacgttatcagtcaaaggttggtgggattttctgattttactctaggccggcagattcttaatgcccttaaagacacatggctattgatttaggtgaaaattttaccaaagagggatgtatctcacttcatttcttggagttaagtctctagttgtacaataaactctaactggtttctaaagatgtcctggaaatatctgttaatgtgcatttcttgttctttgacaatccaagttcatgacaatcatcctggggcactataatgacctaaagagcctctcaatcaccaaggggcatctttgatttgatgtagccttgctactaactgcacttgacccagcaatatatgcctgtgaaagtatgctgaaaaggtaacggggctgggtatggtggcttatgcctgtaatctcagcactttgggaggccaaggcaggcggatcacttgaggtcatgagttcaagaccagcctggccaacatagcgaaactccgtcccta

SEQ ID NO: 107724 - DNA, 1333 bp, Homo sapiens
ctccctattagtgagacaatgaatgtgcaggtgctttgtgaactacacattgtgacactaataggaagtgtaaagccttgcacttctaaggccaaatcccagctaagaagagcaaatgatgagctgggtttgacttgcagaatttagtgggcttactactcaccaagaggcaagagatacagttgtagttatgatgatagactttggagtcagatggacctatgttgggatcccagccctgccacttattggctctgtgacctgagacaagtcactgaacatttctcaaactgcattatctccatggtcctccatttgttcatacataaaatgggctttatattcctcatagagcagtgatgaggattacatgagatgccactgatacaatgtctgcaagtagtgagtgctcaataaaacatagctagagtcgttgttttttctgattcttcttgctcctcatcctatttcctttgtcttaatttccccacaaagacaccctctccagagcccagcaattgtgagggactgatggagaagtatgtggctgctatggtgctgagtgcagctggagatgccctggggtactacaatgggaagtgggagttcctccaggatggggagaagatacaccggcagttggcccagctgggcggcttggatgccctagacgtgggaaggtggagagttagtgacgacacagtgatgcacttggccacagcagaagctcttgtggaagctgggaaagcccctaagttgactcaactgtattacctccttgctaagcattaccaagactgcatggaagacatggatgggcgggcaccaggtgagcacagccggtgggaggtgcaaggagggcaaagaataaaacagccttgaggaaatcattaagaatgttgatggagatttaaataacagagacaatagtgtttgtaaatgtgataaaaatagaaataacggccatggtggtggctcatacctgtaattccagctctttgggaggccaaggtgagagaatcacttgaacccaggagttcaagacaagcctgagcaatatacggagaccctgtctctagaatggggtagccaatccctcttctagagacaggtactgatccgtggcttgttaggaactggagcacacagcaggaagtgagtgatgggcgaaggagcatcatcacctgagctctgcctccatcagatcagtggcgcattagattctcataggagcctgaaccctgttgggaactgcacatgcgagggatctagattgtgggcttcttatgagaatctaatgtctgatgatctgtggtggaacagttttgtccca

SEQ ID NO: 107725 - DNA, 1050 bp, Homo sapiens
gagccactgctcccggcctaattgtaaggttcttattggactccataaggaattgggctttggagtctgatggattttacccagccactaactagctgattatgtgattttgaggaagtttcttaagctctgagcttaaaaggcttatttacttaaaaaagagaacaatatacttacttcttaatttttttgtgatgtctcagtaatgactggtaaagattccaaggatccctatatgagtctgctgcctttattagcgttatcttgccaagggttatacataaagaaaggcacattgttgggtggggtttggagttttggggcatgcatcatcatattttttggctctccctttccatcaaaaatacttggagacagagtttagttatttattcctgctggggcctttgctttggttatgctaacccccatcccttatccgactcttccccaggtggtgcctcggtgcacaacgccatgcagctgaagccgggcaagcccaatggctggaggattcccttcaacagccatgagggcggctgtggggctgccatgcgggccatgtgcatcggtctcaggttcccacaccatagccaactggacacactgatccaagtgagcatcgagagtggtcggatgacccaccaccacccaacaggctacctgggggcccttgcgtctgctctttttacagcctatgctgtgaatagcagaccacccttgcagtggggaaaaggactgatggagctgctaccagaagctaaaaagtacattgtccaatcaggctactttgtagaggaaaatcttcaacactggtgagtctgtaagcgcacgccctgctcaaacacggttgaatctgtgcgtgtacatccacctgcacatatatgtcttgtattcagagatcacagcaaccctcatggttttcacccccagccccctttctacccatctgctaaggatttcaagttcccttccagtaatgattctacaaagtagccaagtggatacctcaatgaatagggcagctgtggtgtttccctcttacacgga

SEQ ID NO: 107726 - DNA, 1531 bp, Homo sapiens
taattttgatgtttaaatagtttatgatattactgcaagaagccgaagttatgttggatttttctctgttcacacatccatctggtgctttttgttatgacttttcactttatttttttcaattgactctagattttttcctttctacaggtcctacttccaaaccaaatgggaaaattacctaaaacttagagggattttggatggagaatcagcccctaccttccctgagtctttcggtgtgaaggagagggatcagttctacacctccctgagctactctggctggggtggcagcagtgggcacgatgcccccatgattgcctacgatgctgttcttgctgcaggagactcctggaaggagcttgcccaccgagcctttttccatggtggagacagtgattctacagctgccattgctggctgctggtggggagttatgtatggttttaaaggagtgagtccctccaactatgagaaactagaatacagaaaccggctggaagagacagctagggctttatattctctcgggtcaaaagaagacactgtaatttccctttagggagacgtgatgttcacttctgatggattcttcttttgtgtatttccttttctgctatttcttttcagtttttccaaagtcaagagtcttaaccttgtactcagggaattttgagataacaagtcccttgggcaccttaagctcagttttttcaggctcatcctgttcttccagaatctatcccttttcttacactgaagagtcctttagctcaattgatagggtcagcgtctcgcaagcaaaaaatctcatgacctcatatttgagtcttcattttcatcatctacttgttctaaaagttttttctgtttgtctcaagttgggttcccacaaagtggactttgagacaaagatctgaatgcaagcagtttatatgggagatgattccaggaaataccgatatgagaatggggaaatgaaaccaggaagggaagagagctagtatggggtatgttaatgagcaggtttccactgtgggcggttggcactctgccatctgagtcctctgcctaaagcattcctcagaactgtcccatttgaagggcaagcaaacctggggtatttatccactgacttccatctgacactggttgaggaccactgccagggatgctaactccctggtaattcttggcttaccctttgtacaaaccaaaccttagtgtcttcaggtaaagactcagagatacttgcaggggcaagctgtaaagggcatgggaacagtgagggacatatgtggggtcctaacaatatctgctaggctggtctacctcctaaatatactctgaatctatcacctctattgccttcttgcactgaggatttttcagctggatttctgcaatccaagctactcaagtctgggagatgctgctctgagctgctctcagtactctcctcatcatggcagttaacacattaccaattttgttattgtctgtttgcttgtttgcattatttctaaac

SEQ ID NO: 107727 - DNA, 1049 bp, Homo sapiens
ccacaagtgacctttttgtctgggctaatataaagctggtctctacttattctttctggaaaaacagagacagaatatagatgtttttaaatgaaagttaaaataatgtggtttggcatattagaggcatgaaatgttctttctccataaggttttagaccgtactgtgtgaaaagcaggttcactgtgatttgtctgagtcttgggagacagaacacctatgcatgcaatgagttacaggaatctggcttattacttacagctaggcagcagacaacagaagcctgaaattcatgtgagccagtacccaaggcttaggaaagctgcctgtggcacacggatcctcatctgcacatgcccacttgtaccacaactgaggacccccaggaaggcagcccaccctgggttttatattcaaaggaaacaagaatcactgagctaaagcattgaaggatatcgtgtttgggggtgtggggtagtcgggggactggaacagattccaggatgttggattcccagcacattctacagttattcttgagaactataagccagaaagctgaaagaaccgggcccagtccaagaccttgaaaactgtcttgcactacacttatattttatgacttgttctgagaaggtaagtgtgtgtgcgtgcacgcacgtgcatgtacccatgttcacatgcaggacatacaggacagcaggagtggagagactccataatcgtgctcttcacctcaaattggaatctggcaagattggactttctgaaaatcaggtaggataagggcttcaagccattttgggttgagcactaaaatttcatgacacattctatctgatggaattctatgcaaccttaaaagaagaatgaggcagctccaaagtattttgtttaatgtgaaactcaaggttcaaaagagtttgcgtaagcctgggcgtggtggctcacacgtagaatctgagcactttgggaggcaaaagtgggaagatgacttcagcccaggagttcaagaccagcctgggcaacatggcgaaaccctgtctct

SEQ ID NO: 107728 - DNA, 1064 bp, Homo sapiens
atcattatttcctattcattgtgcatatgtcagtttcccctagatgccatggacccacagacataacagccacctcacactgtctgcccagcctcatctctcactacactttctcttgcactgaacacctggtggtgctaactacttgtacttccaagtgtacatcgggcttcctcacctgtgtgccttggtcctaaccatactctcttcccagaatgccctctctccacctgtcatccactagtcttcaggtcaaacacttcctgcttcaccatgctcccactgcacgggatataaatgtcatgaaaacaactactataggagattggttttgcaagttagagacagattagtgtcagatttcttataataacctgccaagaatgagtcagatgatctgaaaagcatatttccgtttatgtgtgtgtttactgcccactggaccgagttgctgggatcccaggactcaccttagaatacagcacatagtgcgtgtatggtgtagatgtccgtggaataaatgggtgcatgaattaataaacacgtggctgggtgctgtgggaccctaagatagccttctcaggactctgctgtctttgcttctttatttccaggactggtggaacaaggtggtgtcaagatagagccgctccccaaggaagtgaaagtctacctcctgactacttccagtgctccgtactgcagtgagtagggggaaatgcatgagctcagctctgccagggcaccaccagaggagtccagcccagtgtggtagcctgggtgggagtgaatgataagagcaaaggcatcaccggaggtgtggcaacagcccctggtctgaaccaaaactttcagagtgagtccaaccgattgctcttcagatgaggacttgggggcttcttactgtctatctactgatcgtatttcctcttaccctcaaaatttaccctctagtgggtcttctctctcgagtgatgtttaggagtgtcctccggctgcctcctttctgcactctcatttcccacttcttggcgcccaccctatgtggttctcaccctggcagc

SEQ ID NO: 107729 - DNA, 1033 bp, Homo sapiens
aatgccagataaaccaagtgaaattcaagtttcagtcttccaaccgagtttggaaaaaagaccggactaccattattgggaagttctgcactgcccttttgcctgtcaatgacaggtaagccccagtattcacctctgcaccagatgcactcacacatcaaagaccagtcttggcattagatgtgctgcctattgaggttcaatctcatcatagtgattatcatcttagaagcagagatgacagacacccggtgttttccagaacctcctgtgggaccatcttgggttggggaaattccactgtatttgttctgcatatttggtttctatgtaagattttattagaacaaagttttctcattgcatattttctcctctgtggcctccactccaactgtgtcatgggtcacattcatgggtgtggatccagaatccacatcccctttcccttcctctaaaggcatttatgtcattaaccttaccacccctgggcacttggaccacaggaactggctcttaattgtaggtgattgcagatttctttcaccagacatcatgggaattcaaaagccacacaatgccaagccctgtctcctcaccagccactgctctcttattgctcttctcttccagagaaaagatggtctgcttacctgaaccagtgaacttacaagcaagtgtgactgtttcctgtgacctgaagatagcctgtgtgtagtttaacctgggcaggacacatctccctgcattttttttttttttttgagagagaggtgtgatgagggatgtgtgtgtgcagcttattgtagaccattactactaaggagaaaagcaaagctctttcttattttcctcataatcagctaccctggaggggagggagaactcattttacagaacttggtttcctttgccgatcttatgtacatacccattttagctttcccatgcatacttaactgcacttgctttatctccttgggcattcgtacttaggattcaatagaaacatgtacagggtaaacaatttttt

SEQ ID NO: 107730 - DNA, 1224 bp, Homo sapiens
catcatgtacttattggcacaaattcaggcagcctccagggcttcagaggagagctgctcatattcatctgacaccatgtggccacagagtggaaactcatccacttttaccttcttccaccccaggtcaaagatgggaatctcggcatcagcaacacctcgccagaagagaggctttgtgttgttcttacaataatggtaacactgggtggggcagcggcccatggtgacaccagaatcttcagtggcacacgaaagggaaagagcttgagatatcttttgaacttaagagtcatccctttctctaagaactgacccccatctagaagatgggcagccccaattgtactgcatgaccctgtcctcagacccagcttaatggaccagaagtagacagctgactgaatctggacaaggtagatttccttcctgaaagtctgaaattatgactaagaggcagccgtacttgtcttctggttgttggaattgttccatgtgaactcaggagctgagggcaaacatattccaccatgagaacagagaaacagggaagactgctctgttggaaaacagaaacatgttgcagttctcctaagagaaacagaaacagaagatggtgactgggtccctgacagcttcctgctttccctgatggctttctgatctagtcccatattaaaatctagtggcatttctgactttgaattccataagacacccctgtgtccttataaattctcctttgctttgtcatcataattatcaacattgtcaacattatcaacaaaaaagataaaacttcctgaacatttactatgtgccaagtaaagttccaattagcttacacaaattatcttatttaatcctcccagtgaatccatgtattacttcattttacatatgaggaaacagggacaaagaaattaagtaacttgtccactacagtcagcaatagataaaatcaggattcacaccaaggccatctgacttcagaatctgagctctaaccaccatgttatacagtttagcctgctcacgttggttcttagcacttgcaactaagacgtattagctaaatagggctcctcagtctggccctactctgcctaacaaaaattatctgccattttccccagtgtgctgaagccagcattcccctaaaacatactatggtcaatgtcacctccatgcctttttgctccttctccttcccacccaccccca

SEQ ID NO: 107731 - DNA, 1055 bp, Homo sapiens
ataattgtcttattcatctttatatcccctgttcttggaacacatagtctgtcctgaataaatgcctattgaattgaatcagctcaacaaatgagaaaacttatgtttctttccttttttctttcccagttgttttttattgtgttctgccttcatgtttgtgtatttccttataagaacataccattttgacagacaatacattttttctttccttttctatcaaatctggacttacacaagacacaacttttcattgttgtgttctgatcacaggtcctatcctgtgggcatcaatgtcactattactgcaggccactattactgcagtgtaatgtcactattacatgcacccatgattctctgacacgtatgccaccctggcaatgtactcaaatttccagcagcaatagatgagcttgtatatgcacacatgtaaactcccaaaagtacctggtaggatgttattaatatactgtagagaatatacaattcagagacacactgacctaggctttaatccttattcacatactgactagctttgtgaccttgggcaagttccttagcctctctgagcctgctgcttctattaaaacaaaaaataggtatagtaagataacataaaacaatagctgcttgataaatgttagtcccctctgctgagatagcacatatgtggattgacaggaaagcaggctgagtgcagtctggacagcaggacaagtgaaccatagagttaatgggtctgcctgtctctttaatgggtcagggccaacctatttggcaggtctcctaagaaagatgagctgctttgaaattgtatcttgggcagagctttggttgcttcttcatttctatgcttctgacttccctgcttacagctggcagggacagctactctggaagctcaggggctgcatgtctgtgatagaaggatgagcagctgctgcttgttaaagtaggggggttgtttgggaggcaggcaagtgatgtaaaaacagtatatggaaatccccaaaccccactgttaaaatgatgtcaggggtccaaat

SEQ ID NO: 107732 - DNA, 1015 bp, Homo sapiens
tctgccttctactttgtggatcttcgccaggcatacttgaatcagcaaagaggggtttgcaggtcttgtttcttgaatatctgtaaaaataactgctttagccttttttggaggatatttttgagaaatatgtatttctcaaacacacacatatgtattatatatatatacacgcagagagagtttttacttcaaaaacttttaaagagtaaataatatcatgaataatttcactaatgtttttagttaggcaaacctagaattttaaaatgttgattttgaattttatgactgatttggaataattctggcaattagttaattactcatctgaggcattcatttctagtggtcttaattccctgactccatagatctggcatgatgtttgaaatctgactttctaaaataaatatttttctgtaggtggtctgctgtgtgaataaataattcctgaagaatgaagaagattaattttgggagttctttgacgaactttgatatgtggaaaaagtatttataatttattgtaagaagaaagtaaaatattactagtggaagatcttcagttgtgtttcttttttgtgttcctcatttgctcacgtggctttttcccccaaaggatatataccaacaaatcttgtaacataaggttcttatgttcttattactatgtcattctgggaactctggatatctgttgtcaggagaaagcagatactgacctcaaccaatgaaatctccagaattaggtgcatagaagtaaaataaccctttaccaattcagaatcagtgtggtagccatatcatctcattcaacactctttttttttttttttttaactttcttaaaggtaagaacaagcctttagtcttattatttaaaccattattgttattctttactagctgtcttttggaaaagttagtttagattttggaccagattagggtaatttggcttagaagatctcaactgtttggcattatgaatctgtacatgggtagttacatt

SEQ ID NO: 107733 - DNA, 1125 bp, Homo sapiens
gattttcctgaaacctgttccgggcgttttggtacccagaaagtgtgcaacgatttgtacactcggagattcactcaacgttcctgcataaaatgccctacaaaaatgatcttttctctccaactctctgggcaaatccaagttgggcgaaaagaagtgccagtttatcccatgcttgtttttaggttttttgttgttgttgttgtttgttttttttaacttctgcgtcaaagcattgcttatagactgggtccgctggctcctcttgggccaataaaaccccagtttattttaacggcttggttgtccattttatgttttctctctctccacgctccttgagttccttaagttcctgttctacacatttttgtagccttctgagcacctattctagtgctgatacatatactaggcgcttcaataaataaatgtttattgaatttgccgtggcaagaactgtaaccagctataagcatgattttttccaattttgccctctgcaatcccaggtttttcacctgaaccttgcattgctttcagcaatgtggtgttgcctctgggaatcccagtctcctttgtgtgggaatctagggtacacattcctagatagaggctgtgtaatgattgctgacatattctggccagtgtttttctgtatttactcttggttttgtgaaataaatcaagttagctcctgtaaacacatcaccatgtttttttttcacgggtaatttgagaaggaggacaaacatctccccaaagtatttattaagctggttgtttctttgatgccgaagtgtctcttttgcagaggaattgctaaatgtttccatgtcccttgctaagaacagaaattcactcagagtagatcaaataaaagtttggattgttataaaacaatctcgccgctagtcatggacaggaagcgaagtatagccagggcggatgagaacctggatggggaaaatcagaactaagatgctgtgctctcctgctttctttctttgaccttatgacctttcaccttgttagggttgccacatttagcaaataaaaatacaagaggcaccgttaagcttgaatttcagataatgaataatattttagtataaatttttgtcc

SEQ ID NO: 107734 - DNA, 1050 bp, Homo sapiens
gagtatgactgggctgaaccagagagtgggaacagagggagcagaaagaaattagatttgggttgggttttacctttaatttgcaaaattatttctatcatgactctcttgaaacatttgggaatggttttgttcagactttcagaatgaaaatttttctattactttggcacagtgaggaacgcacagcggaaacatattcttgcagcccatcagatcatccacagttacacggaaagcatggttcaaaagaaattaactgagggagagcaagatgaggcctcaaatgctgccatgttacttgagaaagaaactcaaaatgagaacaacagctaaggtgagtttgattttccaccaggaaaaaaagcagagaaaggaagaaaagcggcattgttcagctttgtgctgtgctcaaacaatcataatgtgaagattgctgtttaagaaatggaggacttccacttaaattggcacatttcctctagtttatgttatctactgttgagattattagaaaattagagttgatattacagcaattagactcttgtgatacaaaaaagaggactctaaattatttttatgggttcttttagcatgtgtgtacctcgtcaaatgaagctatagaatgtgtcagtgttacatataaacaatcttgttcttatggaagtagacaaggtatgccctaatgcattgtgctagctgtaagcatggcatgagacacagagcctgcccaattctagctcagacaccttctgcagtgcccacaaggggttggtcttgggctcaactaaaggctgtcatactcatgagactaatacagaccatatttggcatgaatgtacttagaaaaatataagacaggaaacagcttccagcaaggcaacatcagacatttctcttcctgtaggagcccttgccatacccatgcagaacacatagctgttttctttagtccttagtttacggagtgcagatacaatacaaggaaaagaggttcacaccgggtgggtacaggagctgccctggcgtaaaacttcacaccccagg

SEQ ID NO: 107735 - DNA, 1692 bp, Homo sapiens
tctaaaatgctatagtgcaattactagcagttactgcacggagtgccaccgtgccaatagaggactgttgttttaacaagggaactcttagcccatttcctccctcccgccatctctacccttgctcaatgaaatatcattttaatttcttttaaaaaaaatcagtttaattcttactgtgtgcccaacacgaaggccttttttgaaagaaaaatagaatgttttgcctcaaagtagtccatataaaatgtcttgaatagaagaaaaaactaccaaaccaaaggttactatttttgaaacatcgtgtgttcattccagcaaggcagaagactgcaccttctttccagtgacatgctgtgtcattttttttaagtcctcttaatttttagacacatttttggtttatgttttaacaatgtatgcctaaccagtcatcttgtctgcaccaatgcaaaggtttctgagaggagtattctctatccctgtggatatgaagacactggcatttcatctatttttccctttcctttttaaaggatttaactttggaatcttccaaaggaagtttggccaatgccagatccccaggaatttggggggttttctttcttttcaactgaaattgtatctgattcctactgttcatgttagtgatcatctaatcacagagccaaacacttttctcccctgtgtggaaaagtaggtatgctttacaataaaatctgtcttttctggtagaaacctgagccactgaaaataaaagagacaactagaagcacagtagagtcccagactgagatctacctttgagaggctttgaaagtaatccctggggtttggattattttcacaagggttatgccgttttattcaagtttgttgctccgttttgcacctctgcaataaaagcaaaatgacaaccagtacataaggggttagcttgacaaagtagacttccttgtgttaatttttaagtttttttttccttaactatatctgtctacaggcagatacagatagttgtatgaaaatctgcttgcctgtaaaatttgcatttataaatgtgttgccgatggatcacttgggcctgtacacataccaattagcgtgaccacttccatcttaaaaacaaacctaaaaaacaaaatttattatatatatatatatatatatataaaggactgtgggttgtatacaaactattgcaaacacttgtgcaaatctgtcttgatataaaggaaaagcaaaatctgtataacattattactacttgaatgcctctgtgactgatttttttttcattttaaatataaacttttttgtgaaaagtatgctcaatgttttttttccctttccccattcccttgtaaatacattttgttctatgtgacttggtttggaaatagttaactggtactgtaatttgcattaaataaaaagtaggttagcctggaaatgaaattaaaattcacaagtgtgtggtctttatttcagtacccaaccctcttccttcaccctactattttgccgctgcaatatgtagtcacatcaccatttccattcctctaattagggaaacattaatctttgttatacagaacaagatatcaataccacttcttgttctttccaatgattttattccattgtgtagccccaagaggtgcagcttccaccttggaaacctttgga

SEQ ID NO: 107736 - DNA, 1734 bp, Homo sapiens
tgtccagatttttttctaaagttacttcccttggaaagatacacttgagaggacattgtagttaaataatgtgaactgtaacagtcatctactggtttatttttcatattttttaattgaaaattgagcttgcagaaatagccacattctacacatagttctaattttaaatccaaatctagaatctgtatttaatttgttttttaacctcatgctttttacatttatttattgatgcatgtcagatggtagaaatattaaaaactacacatcagaatgatacagtcacttatacctgctgactttataggaaagctgatgatataaatgtgtgtatatatgttatatatacatatattcaatactgcctttttttttgtctacagtatcaaaattgactggttgaagcatgagaagaatgtttcccccacacccagttaagagtttttgtgtctgttttctttgtgtatcagtgaacgatgttaagaatcagtctctctttttgaagaaaaagcaatattccttggaaagcaaggagaattgaaggactatgtttgccgtgaggaaatagattttcatgactagtttgttttatacttttaaggttggcatctatgtgggccttatatactctaaaatgaactttagtcaccttggtgcttatgggccattacttgacctatgaatctttaaggcacaatcagttgtactttacatttaaagatcacttgagtgatggccgcctttccctcctacccgctccttccccacatgccttccaaggttagctggtaactgtagggctgcagagctgagcccatggttgtgtgtaacttgccctcaccctcctcattgccaccttaggtcactttatgggtctcgtcctccagagggttcggaagtggagtctgttggcagccctcctgcaggccctagcaccctgtcctgctccttaactgtgtgtgtgactctccaagagagttgtcctgcctgctgaagtgaaccagtacccagaaagacaactgtgagccatcttggttttcactcgctgtttagctgaggtcttgggccacaaaaggggtttcacaaacctctggatatatcagagtttatgagaaaggaaacatgctcagtcaaaccaaatcaaacaaattgaattttatgttttataaagtgcttctgaaagctaagatttgaaagaagtctgaaatcaaagtatttggcagcataactccttaaaggtagtggcgttgatagaccattttcagacagaatttataaagaatctgaaaaggcaggtctgtgatagagaaatggacctgcattcagatccaactgcccagcaagcgtttggatgcagacactgctctggacgtggtatactccccagagtccataaaaatcagtgcttattttaggaaacaggttgccccccacaactggggtaaaagaagagagaaaagtcacgcttttctctcatttcattgtgtgtgcatgtgtgcgtgtgtgtgtgtgtgtgtgtgtgctgagatgtgtgatttttctttctcaaggatcatggtgggatcacagaactcttttatacaagtgagatccaggtctctgaatatctttttgtatataataataataaaaagctcctcaccaaattcaagcttgtacattatattttctttctgtgtttttaaatttaagttttattgttttgtatgtaaatatgtggacccaggaact

SEQ ID NO: 107737 - DNA, 1042 bp, Homo sapiens
cagtccatctttatgatgggattgtagagattatgaaatgtaactttactcagtcagtaagctgggtggtcttttaaacctactattgagtattgaatttatagaactttgcctttttttgttttactttttccctctctgtactttgtcttcctctgaaaaagagaactctgttcttctcagcaaggacatgtgtgatttgattttaagtggagctcattgcatcaggcaaaagtttttttgatgaatgtctgtaggactgtgactttcgatatcaaagatatttataatcaaaataattagcgttaaaattatgttcattaagtgatttgaaaataattcaagagaaaaatatgagatcattacaggtctgaagagcatgggtgtctatcaaattttattgttcagaaagtgaatttgtttctggttttatgctcacttaaaaggcttgtgctttttactgtgatcatgcaagcagtcgttgaatttatccaagaaagaggagactggttttggcaatgtcacaagctcacaggctgtagtcagtgaaaggacatctgcacattaatgccaaataggattttgctaaagagcaaattaacataaatgggctggtggccatgtagatgaggtaaaactgatgtcagccagtgtagttaatggctgccgtggccagagctgctctctccatgttggcatgggtgctgatgtagtggtcaaacagatagataaatttctgatgatcagtgcctcccataagtcctggggaagaccagaatgacagttctacctgttatcttcccatactgaaaatgagaaggaaatgctgttggatgatggtcatgcataggttctgagtgtcatcagagcatgtgacatgctgcaataagcatgggtttgtggtgttccaggttttctctggattttttttttaatgcagcctgtgcatgaatcatgaaaatgaacattttatctgagaaaggcttggaggaatctgtggtctagacaggaattgatgttaggttattgatgcacagaatgt

SEQ ID NO: 107738 - DNA, 1067 bp, Homo sapiens
aggcggtcagattacttgaagccaggagttcgagaccagcctggccaacatggcgaaaccccatctctactaaaaatacaaaaaaaaatttagccaggcatggtggtgcgtgcctgtttaatcccagctactcgggaagccaggagaatcccttgaacccaggaagcagaggttgcagtgagctgagattgcgccactgcactccagcctaggtgacagagtgagaccctgtctaaaaaaaaaaaaaaaaaaaaaaaacaacctaatgtttccaagtgtacttataaagtgcatgtaaaacacaaaaaggctcatttgatttgtctaaaatatgttattttactaatatgccaacaatataaatagtaaaatgtttaataattttgtagctgagaacttgaaatgtgttgagagcaaataaggaactgaattttaatctttaacgtcaattactttaaataaatagccttatgtagttagcagctactatattagagaatataaatagaacatttctgtggttgctgctgggccagatagtgagcatttcaataaatcagaagaatttaattttttatagacacacagatctagaatactaattcatggtggcagggcctttggaaccctgtctcctatgtttattttctgtcttctcctcccaacccatttccttgttttctactctctttttatttaaatcctttggcagtaggtgtaaatggagaccttccattcactctccttcctgttcctcatttgcacctttgatcaaccacatttgggacagggagtatggacaggaccatttgtgggcggggggtggggggatgcagacagcaaggaatcaaggcaagaaattctgcgtttatgacttgaacatttgggtggggcagtttcctcagtattgagacagttgaccattaatccatgactccattatctagccaactcttacagatctcttgagaatctgaaaaaaacaaacaaacaaaacaaaaaatgctgtagatcctgtcctataaaaagaaattatgataccagatatagaattttacatatgaaaa

SEQ ID NO: 107739 - DNA, 5263 bp, Homo sapiens
ttcaaagaagtaagtacagttgacagagacagcttcccccatgcagataaaaagcctatttcaaacttgtaaaaagtaacaaaaataatcttactgagtaaagaattggataaagacattttcagttttaataaaagcagtgacactttaaacagatgtttctcaaatcctttttccactagtgtctagataagtcttatctgccattggctcataaacagttggataggttggtcagtacatccagttgtacatacatacacatacagacacacattctcattcatattctctttgctatgacaccaccaccttttaaaaacataaagaatatgtttgtacagtatttcctgtagtcaaatattgacatagtaggacaggaaaacctaatatatttaaatcaatgaaagatgcagatatgtcttattaatatacctactccaaaactttggccacatctttccccgagatatttttagttctcagacataattttagtagataatgcctttgttatatatcacagtacttctgtgggctttttctgtaagttgattactaactcagttagctagtttgagatataggtttgtcatgtgggtttttttttcccctgttaaactggtagggtttgttttgttttgttttgtttttgagacggagtttcgctcttgtcgcccaggctgaagtgcaatggcacggtcttggctcactgcaacctctgccttgcgggttcaagcaattctcctgcctcagcctcccaagtacctgggatcacaggtgtgtgccaccacgccaggctaatttttgtatttttttttaaacttattctttttttatgattattattatactttaagttctgggatacatgtggagaaggtgcaggtttgttacataggtatacatgtgccatagtggtttgctgcacccatcaatccatcatctacattaggtatttctcctaatgctatccctcccccttcccccctaccccgcaacaggccctggtatgtgatgttcccctccctgtgcccatatgttctcattgttcaactcccacttacgagtgagaacatgccatgtttggttttctgttcctgtgttagtttgctgagaatgatggtttccagcttcatccatgtccctgcaaaagacatgaactcattctttttttatggctgcataatattctgtgatgtatatgggccacattttctttatccagtctatcattggtgggcatttgggttggttccaagtctttgctattgtgaatagtactgcaataaatatatgtatgcatgtgtctttatagtagaatgatttataatcctttgggtatatacccagtaatgggatggctgggtcaaatggtatttcaaattctagatccttgaggaattgccacactatcttccacaattgaactaatttacactcccaccaacagtgtaaaagcattcttgtttctccacatcctctccagcatctgttgtttcttgactttttaatgatcaccattctaactagtgtgagatggtatctcattgtggttttgatttgcatttctctaataatcagcgatgatgagctttttttcatatgtttgttggccacataaatatcttcttttgaaaaatgtctgttcatatctttcgcccactttttgatgggattgtttgtttttttcttgtaaatttgtttaagttccttgtagattctggatattagccctttgtcagatggatggcaaaaatttttcttattctgtaggttgcctgttctgatgatagtttcttttgctgtgcagaagctctttagtttaatttgaccatttgtcaattttggcttttgttgccattgcttttggtgttttagtcatgaattctttgcccatgcctatatcctgaatgatattgcctaggtttccttctagggtttttatggttttaggtcttacgtttaagtctctaatccatcttgagttaatttttgtataaggtataaggaaggggtccagtttcagtcttctgcatatgcctagctagttttcccaacaccatttattaaatagggaatcctttccccattgcttgtttttgataggtttgtcaaagatcagatggttgtagatgtgtggtggtatttctgagggctctgttctgttccattggtctgtatatcttttttggtaccagtaccatgctgttttggtgactgtagccttgtagcctttgctgatgccgccagctttgttctttttgcttaggattgtcttggctatacgggctcttttttggttccatatgaaatttaaagtagttttttctaattctttgaagaaagtcagtggtagttcgatgggaatagcattgaataatctataaattactttgggcagtatggccattttcaccatattaattcttcctatccattagcatgtaatgtttttccatttgtttgtgtcctctcttatttccttgagcagtggtttgtagtcctccttgaagagatccttcacatcccttgtaacttgtattcccaggtattttattctttttgtagcaattgtgaatgggagtttgctcatgatttggctctctgtctgttattggtgtataagaatgtttgtgatttttgagattgattttgtatcctgcgactttgctgaagttgcttatcagcttaaggagattttgggctgaggcgatggggttttctaaatatacagtcatgtcatctgcaaacagataatttgacttcctcttttcctatttgaataccctttatttctttctcttgcctgattgccctggccagaacttccaatactatgttgaataggagtggtgagagagggcacccttgttttgtgctggttttcaaagcgaatgcttccagcttttgcctgaaacgttcagtaccgtattggctgtgggtttgtcataaatagctcttactattttgagatatgttccatcaatacctagtttattgagtgtttttagcatgaagggctgttgaattttattaaaggccttcgccacatctattgagataatcatgtggtttttgtcattagttctgtttatgtgatgaattacgtttattgatttgcatatgttgaaccagcctttcatcccagggatgaagccgacttgatcatggtggatacgctttttaaggtgctgctagattcggtttgccagtattttattgaggatttttgcatctatgttcatcagatatattggcctgaaattttctttctttcttgtgtctctgccaggttttgctatcaggatgatgctggctgcataaaatgagttagggaggattccctctttttctgttgattggaatagtttcagaaggaatggtaccagctcctctttgtacctctggtagaattcaattgtgaatccatctggtcttgggctttttttgttggtaggctattaattactgccattggtctattcagagattcaacttcttcttggtttagtcttgggagggtgtatgtgtccaggaatttatccatttcttctagattttctagtttatttgcgtagagctgtttatagtattctctgatggtagtttgtatttctgtgggatcagtggtgatctcccctttatcattttttattgtgtctatttgattcttctctctttcctttattaatctggctagcagtctatctattttgttaatcttttcaaaaaaccagctcctggattcattgattttttttttttaagagttttttgtgtctctgtctccttctgttctgctctgatcttagttatttcttgtcttgtgctagcttttgaatgtgtttgctcttgcttctctggttcttttaattgtgatgttagggtgtcaattttacatctttcctgctttctcctgtgggcatttatttagtgctataaatttccctttaaacactgctttagctgtgtcccagagattctggtatgttgtgtctttgttctcattggtttcgaagaacttatttatttctgccttaatttcgttatttacccagtagtcattcaggagcaggttgtttagtttccatgtagttgtgcggttttgagtgagtttcttaatcctgagttgtaatttgattcactgtagtctgagagactgtttgttatgatttctgttctttggcatttgctgaggactgttttacttccaattatgtggtcgattttagagtaagtgcagtgtggtgctgagaagaatgtatgttctgttgatttggggtggagagttctgtagatgtctatctacagaacttggtccagagctgagttcaagtcccaaatatccttgttacttttctgtttcgttgatctgtgtaatactgacaatgtggtgttaaagtctcccactgttattgtgtgggagtccaagtctctttgtaggtctctaagaacttcctttatgaatccggatgctcctgtattgggtgcatatatatttatgatagttagctcttcttgttgcattgatcccctaatttttgtatttttagtagagacggggtttcaccatgttggccaggctgatctcgaactcctgacctcaggtgattcacccaccttggcctcccaaagtgctaggattacaggcgtgagccactgcgcccggcataaactggtagtttaatgcagaatcttattttcactcttaccaataaaatagttttgcatacaaagttaagagtggactctaacatttgtgtcttaaccttctatagaactgtcaagtaatccacctctggctaccatccttattcctcctcatgctcggattcaagcagctgcttcaacccccacaaatgccacagcagcgtcaggtaagaacgttctaagtctcttctataaaaacatattctgggctgggcatgatggctcacacctgtaatcccagcactttgggaggccgaggtgggtggatcacctgaggtcaggagtttgagaccagcctgaccaacaaggtgaaaccttgtctctactaaaaataaaaacttagccaggtgtggtggcaggtgcctgtaatcccagcttctggggaggctgagacaggagaattgcttgaaaccgggaggcggaggttgcattgagccgagattgcgccactgcactccagcctgggcaacagagcaagactccatctcaaaaaaaaaaaattctgtttttcaaaaagatatgattacctttcatttcatttgatgagtat

SEQ ID NO: 107740 - DNA, 1041 bp, Homo sapiens
gaacccaggaggcagaggttgcagtgagccaagatcacatcattgtactccagcctgggcaacagagtgagactgtctcaaaaaataaaataaaaaataaaaaaataaagtatatgagaggctctgtgtaggttacctgtaaatactatgccattttatgcaagggacttaagcatctttggatttgggtatctgaggagggtcttggaacaaatcccccaggataccaagggatagctgactatacattacatattcttgtccagactaagacacaaaactgctgtggccttcaactggcattcagatacacagaaggataggtgatgtggtaaaagagagtaaatatatgggagaaaatggacagcatgggccataaggagagggaccacagaccactgatactcagtttattttaaagattatttttaacagctttgtcaaaatgtcttattaaaaactccggtcctcttttcatttttaggtttattttaggtatcgagcacatggttattgagatgttttcatttgacagtgcccctgtcctaagtggttgcctttcttgccagattgttttttcagttgttcttgtcaatttctgttgatcagacaaaggacagttgtctttttatctccctatcctgggaccttacacatttcatgttcaatattgttggatggatatgtgggtgggttgatggatggttggattttaaagaagcctttctattttagatgcttttaattgagaatggtaaatctgaatttctttagaataaaaaccacatattaatgcttttttttgtacctggagccataaagttttcagccatcacaattgctagcaattattttgctttcctgcatataagattatgggttaaaattgaactgacttgaagtaaaatggcataggagctttctgttccttagtgagaacccagatagctaccaagtctgattgtgagaaaacagtatctcctagaacctgataattagggcagtatcttcaactgtcttcccaggcaagactatttgatg

SEQ ID NO: 107741 - DNA, 1078 bp, Homo sapiens
agggatatatgtttcatttttctttaatttcaaaggcttctcgtctgtttatttctatccttacctttttatttttattctgtaggtggccataatttagaatgaagaatatttttatagtttttgtatttattagctttatttaagacacaaattagtagaaagctatctattcctttaagtagattaatttaattgaatttttcttcaatatagccttcagttgactttttctttgtcttaatcattcttaatgaataatacatttttttctccttgattaaaaccctggaatattcattcaagtgggggaaatctggccacattcatggtaacacctacttgagaaaaaaaatgcaggacattttatcaaattctaggtattcaagaatttcttcaaataatggtaggctctgtttattggaaataataccaaatcagtagcatttatagacctagagtaaatagctcttctttctcttctgtttgattgccaagttttcgaacagtgctgctcatcattaacaattgttcggctaaaaaaacaatgcaaaagaggcaatcttttatttactgccatagcagtgaaaactttaaaatttaaaaaatatttttctagttgtgcttgccaccagaactcagcctttcccatgtgcctgtcatattttgtatgcatgtctgattgttattactttatgattagcatatatagatttttctctgagcatttctcatataatctttaattagcaattcacccctgtgaatcatatgcatttaactctttccattctagaaggtcctttcccaaatgcaaccatgtttctgtacatggtgggaattaagtcattattcacagggtatttgcttagattcttaaaataaaacattaattgttctttccctttttttgtactgcaggtcttccgaccccgaactccaccggaggcaattgcactgtgtagccgtctgctggagtatacaccaactgcccgactaacaccactggaagcttgtgcacattcattttttgatgaattacgggacccaaatgtcaaactaccaaatgggcgagaca

SEQ ID NO: 107742 - DNA, 1028 bp, Homo sapiens
cccagcactttgggaggccgaggcgggcggatcatgaggtcaggagatggagaccatcctggctaacacggtgaaaccccatctctactaaaaatacaaaaaattagctgggtgtggtggcgggcgcctgtagtcccagctactcgggaggctgaggcaggagaatggcatgaacccgggaggcagagcttgcagtgagccaagatcgggccactgcattccagcctgggtgacaggaagactccatctcaaaaaaaaaaaaaaaaaaaaaaatatatatatatatatatatatatatatatatcggaaataagcttataatactggtttattaatagctttaacacaaaatctttgaaaataagaaatttttttatttaaaataactcagcatccagccatcctacatttgaatgttagtgggagatatttatttctacttttggtgctacttttaattccacttatgtgctgccatattggtgcaaaaacattttggattagctagcaaaataaatccatatactatcaaacagaagcaaacttgccttcagggataaaatatgccaatactgtttaatatttttacgaaaattttctgagttttcccactgattattttctttttacattctgtatatgattatggaccttgggagcaagagaggggaccagtaacagtggaagagctaaacatttcaaattcgacagtaactctaaggtttccttgactgaggcgagtcagagtattcaaaagaataaagataaggcaggttttgaccttacaaaaaggtttctttgtaacataaccaagaaattgactaaggcctttctttatgttccgaaataatttcctaagagcctactttacctaatttctcaattttcatggaaaatgtctttttcaataataaattaaaaacaaatacaatcctcttttcactgtagacagcactcataaataatctctggaaagtctaatgagctctgtagttgtaactagttctactaactgtcagcataagtga

SEQ ID NO: 107743 - DNA, 1691 bp, Homo sapiens
ttgttagttggcccagttgagtcttattttgtgctctcagttctttcagtctggttttctatttttgtccacctggttgtgttttagttcatgagagaatttattctgatgggccagattttaatctgtgtactaaattttagtctgcagactaaaagtaatccgcggattatttatttttgaaaaatatttaattcccccactggaaactatcctaaaagaatgttaaattctcttagaatagccaggggagttcacagatactggtgagttctgccattttttgttctcaatacctagacataatagaccctgctacctcccttgcatatttggctccgttgtgcctaggtgttggtatacattactatgcctgtcacctgtaactgtgactgtcccttagttgtattgttaattttatatattttgtttagcttttggtgggtgaattgggcatatttgcagatggaactgtgtttaatttgtagtgctggaagatgtaggatttattttttcagagagtttttccaaagaggaaaaaatgttctctatttatttttcctaagtaccgggtgcaagggtatgagcgggcaaagcccacaatagaaaaagtaagttaatacccgcactcctgaggtgatatgtcaatttcctgatgagtcctaagataatgagaatgtcagcaaagaaacatcttttagcagagaagtcaatccaaaatggagaataatccgcggtggcctgatccttcttagctcacacaaattgaaagtatctggcttgaaatctatagtaatataacttaaatatatttattactttcctctcatcactaataacttagcaaaaaaatgtttatactgtgtaactggaacacattaatagagaaaaaagtagcatattgggaacttgaaactttaaaagcaggctaatatgccccctcccagccatgtctgtggatgatgaatccaggtcatagaagaccattttactttgggaactttacttctagatttcattttgattttaactttttttggttttgtatttttttaataaacgcactggcattggaacataataaactaaaattaaaatgtttctttactgtgcctcaccattgcacaatcaaaaaaaatttttttgcatacactgtggtgaaataatttttaaaacttggacttgctactgtgaagactgatgtttaaagtttataactgtataaacattttctatgtccccccccacaccatggatttcttataacattggatatatttttccttgctggactattctcttttggattgacttcccctgtttggattatttcactgcattatcatctttaggattcgtcaggaacaggacatttcacctcaggagtgcgggtatgtacttaatttttttttcccaaaatttcagggcaggtctataaaacttgggggaaatcttctttgagaggctaaataattactcattcttgaaatgtaatagtaaacaatgtaagtagctgtgatttctgtttttattcactgtatggcataggtttcacttatagtatatttagattgtcagcctcttgggtgattcattgacatctaggctgaagtttaggaattgtggggttttaaaattattatttctattacaagaataaatattgatgaagatccatgaaaccaaaggtc

SEQ ID NO: 107744 - DNA, 1721 bp, Homo sapiens
gtaagacataattttcagattgcttgtgggaggcaaaggatgaggttggggtggatttgaaaagaagacaaaattctatttttaatttatcatttattctttaaatcttgtatcttctatgtaaccagtgctgtgctgggtaccataaagcatgcaaaagaagtaaaatatatagtctttgtccttgaaaagctgacagttgaaaagcttagttgaagcaagtattgaataatgtgagatactatgtaaccgtatacttaattctgtgctgtaagtgttcagaggtgttccacatggctgtaggtgttacaaggcagacttccagtgaggatggtggagggaaaaaggaacccccacttagggataatacatgaggtgggatgttgaaggggaggtttaagatttgcctaggtgtagaaaaggttaggaattgttatagcctgggtgaatatctctcaaggtggagagagctgaatgaaaagaaaatatttctatattcataggagagccaacctgactgtaataattgttttgtgaacaatgaaagattaaattggataagcggacatttggcaaatcccactcctgtgtaggcatgtagtactatttcatcagcacatgatgtgagggagagaaattatgttacatagttaaatgctgatatctacatatatacagccagtcatttaacatcgttagtaggtgcttagaaactgcaactttaagtgaagttatgcacaataggtcctcaaataatgttggttcattcagcgttgatgagggaaaacatttggttttattatacgtttcactaaaagtcacagttttcaagaacctatcaatgacattaaatgaagatttactgtataacttttcttacctatagtagaacttgggaaaactcgataaggcttttaattagtacagctgaaattcactggatgttagatttgtcatggctaaggaaaggattctttgtgtttcttatgctcaaccttctttacctgaactggtatcttaacgaaaaggcttagaaaattatgcagtagacttgagctgaattcagtttgtgtatcctaccctgttagatgccaacttcatagatagcaattttacttgggaggaggactctgaaagttgttttcagtagcctctggtaatcatttttgatagtacttaaagtgaattggattaccttgtatgtcagtgcatcattagatcaatgtagcaaagcatgtgaaagactgccaaagaatatatgtttttttttttttttttttttttgagatggaatcttgatctgttgcccaggctggagtgcagtggcacgacctcggctcactgcagcctccacctcccgggttcaagcaattctcctgcctcagcctcccgagtagctgggattacaggcacccaccactacacctggctaatttttgtatttttagtaaagatagggagaatattttaaaaaatagtatagactaatttgttaagtaattattgaattatgtgctacatatgagcacttaagtagacttgatttctttcttagttaacataattacctattcaacaatccatggcattgtctcacttttaatcctatgtttaggtttacaaattgcatataatttcagatgattaatagattacttgagagtcaatattggagttgctctttaggagtattcatggtttattagtttttaaaactggat

SEQ ID NO: 107745 - DNA, 1580 bp, Homo sapiens
attcttgatgtttttatatcttatactaatgcttttcaaacttgaatcgtctatgtaaagcacatttatttaggtttccattcctgtaccatgtgtagaataatgactcagttctcccatcttttttgtctattaaaaggactgtgaacctttcattcgtctggtgttttttgacataatttggttttcacttcatacacatgcattatgtaataagtgcacttatgttggttcctcatttgtgcatactagagtgggtgttactgggattgtaaacaaaaaagtaaattcagatgcagaaattttattgtttttctctgtcatctagatgattgagaatatgcttgtgttggtttttttaaataggttattataagaattaaaatgcaaaacttaaaattcctagagggaactcagactcctttccctaccactgtgatagtggacagcaacttgagaaatgctcttagggtaagcagccaattgagtcatttaaaaaccatatagaatgtcctccaaagagaagaccattttgcccttggagggcaggtaaacaggagtctggaaacaggaaccactttacctttgttgctgtcttctgttagtcctatctcctgaagctgtggacatgtgaaccctggtttcctgtgctgcagtgttgtgcagctatatccccaagattgggacctggtgttctaaaaaaaaaaaaagtagacagaaataaagaccaaaagagaaaatgtcttttgtggaaacattgaggtaaggggatacaggtgtgtaaaagaaatagcagaaaaataacactgagatgatcccagtgtggtgtatggcagaaatcttgagaattaaaaactccaataagttgccctgggctattacataaatagcaatagccagtgcaacataattcattaataaagcacttgtggctttagtaggaaaggaaataggtgctaatattctgaaacaaggattattattggaggtgaggggatgaagacctatgccttggtgtacgctgtacactgcaaagaagaaaaacacatggaaagaaaaggaagtgatgcaatagtagattgagaattaagcagagacagagattggttggaagaagagaagaaatttaaattctgcatttagtatgtgcaggtgtggttaaatgatgggctattatatacagagtgagaatctagtttaaacactgctcctaatgtttatgcctcagcttttttcttttgtaagatagcgattatctgctgtgtcttttctcaggattattttgaaaatacagccataatatacatataaaggattactttagttttgaataaatgtgaaggatgtagcactccaatggagttttctgatttgtcttctctgtctccactgccctgaccttagtttaggccaccatcatatcatagaattattaaaaacaacctcctacctcctgatttccatcctttggtttcacatcattttaatccatcctcctcatttctgtcaaagttggcttttttaaaaagcacatgtgatgctgtcactcctatttaaaattcttctctgattcctcatag

SEQ ID NO: 107746 - DNA, 1144 bp, Homo sapiens
aactaaaacaggtttctcattgttcttaaactattttgagatcagatagttgcatgaatacaagcagttctgcatgtaaagatagttgtatagatgtacttgagtgtttcattgactttatatagtttcatcctcattgatttcctgtagatagtttctagcctggttttttatttgcaaggtaagggcagtgtacttatatcattaaagtacagaatttgatttaggagtaggatcttatataaaattttgacaacctaaaattcagaagtttatttacatagaggtgtatagtttaatatcatatagcatatcatacatttcaaacattttctttattcttttaaactgttaaaacatatatcttattatagatggcattttgtgtttttcctctcttgtttactttcctactggcattttggaaacaagattagaaagcaaatgtaatcttgctgggagtatacattaaaaacaattgatatgttaactggatgtcactagcctttggaaaaacccaaccttaacattagatagaaccagttctaaacagcatagttgctaatgtaccagggaacttttttttttcctttggtatttaattggaatgattttaaaagagattttattaaaaagtgttttcaccttagtttgatttgtgagattaagtatgaacagaaaaaaaatagaatttctcagtagggtttataagtagagtgaatctctagcttcttcattttacaagttcagaaactctgaccaaagattcaaagtgacttacccaagattacatggatggcttgtgacaaagccgggattaaacttctgtgtgtgtgtgtgtgtgtgtgtgtgtgtgtgtgtgtgtgtgtgtgtgtcacgggttaccaatgatcgactttataatacgtattttaaggagagacttactgtattttaaaatgtacatataacaattcattttatatacaattaaattcatttagttatagatcttttataattcgaggtgaagtcatttagggctataggtgaaataatttaccctctgtagaatcaaagtatgtttctttctctctctctctcttaatcagatatattatgattccagttactttttcttcaagttcttataatctcattatct

SEQ ID NO: 107747 - DNA, 1090 bp, Homo sapiens
tctgttaagaagtcaactgttgataccctgtatataccctgtctataatgtgtttctggcattcttgaagattttcactttgtgagtggcttttatcagttgattatgagtttttatagtattctttgtatttgtcctcattaaggttcattgaacttcttgtgtttgtgggataatcatggtttttataaaatttgggtaagttttggtaatgtttcttcaaatagtttttctgcatctgccctacttcccaccccatacttcccaccatcagactcaagtcacatgtgtacatgttttttccctccatgcttcagctttgatagtttctattgctatttttttaattcagtgattgagtttcttccctgtgtctaacctgttaatcctctcctgtgaagttttaatttcacatactgtattttttaactgtacaatttccatttggttcttttttatatcttctatttctctccttgttataatagctattttaaagtccttatgtgccaattctgtcttctctgtcatttctggatctgtgtctgttgactgacttttgattttttctcttcttatattttcctacttctttaaaaatgttgaattttgtttgtcagccagtttcttagttgtttacacctggagggcagtttcagtgttcgttatttcatcacagctagatgcagaagtctataatggccttttaaaaaaataataataccatgcaagcctttgcatggcattctattaagtatatttcacaaagcattttaaaataagttttagattttttatactcaattttatcttgtttagccagttagatgactgtttcttcatagtattcttctgttgctaaagacctctgttattaacagtttaaaatatttttttccaacttttattttagattcaggggtacatgtgcaagtttgttacctgggtgtattgggtgatgctgaggtttgaggtatgaatgatcttttcacccaggtactgagcatagtacccagtggttagttttgcagccttctttcctgctctggttgtcctcagtttgtattattgccgtctttatgtccatgat

SEQ ID NO: 107748 - DNA, 1178 bp, Homo sapiens
atgatagtgattctattgtcattagactgatattttgaaacagaatacatgttttctatttagaaaaatttgtccttttgaggatatagcagccaatctaacacaacccaacactccaaattccatatgcagaaaataaatgaagatgtttaggtattcaaccatttatacaatgattatgttgtgttatataatttcatttttaaaacctttattgaattcattatctataagcctagccatacatccctttagtctttcaaggtgcataccacattaactacatgcgttaatttagtgaacagtttttactaggtgctgggcaagaacttagaggtttcttgccttcaggggcttcagagactgatggatgggaggagaggaactgagggcaatagggcaagcccagtattattccagatgtctgagcagaatacaaaggcagaagcatttcactcagagtagtgctgtctggaaagccttcttaggagagctaaccattgagctgaatattgaaacatgaaaaagtatttaccagatagggagcggaagggagtggataaatatttagtaaaactaggtttggtgtgtttctttatggttgtcgcttaaggttctgcctggtggggttgatagaatatgagtttaccaggaaggagaagactggagctgttgacagtggccagatcacattagcttgtaagcagttggaagcaattgcaggattttaagcggagtagcgacatttctaataggttttcttttacttcgctcttaaaggctacacatgcacctctattgctgaagtttggcgacctctggtgttgaactataaaataaacaacgttgtggaagaaatactagcgtttcagagcttgtcagttgctttttgtgaggtgcttcttgggccgtagtacttctttgaagacagtaattatcaactcataattcctgtgttgatatttttcagtgtttggataaatttctaactaggtagggccaggaacagataaattgattgatttaatagtaaggggatgaacaacatccccaaaggggtggggcaggctgatcttgatgctttttgcaacaaatgaaaagatcatgagttctagtaatagataactgagaatatgttcccttcccattggtgtgataatttttaaaattcccccctc

SEQ ID NO: 107749 - DNA, 1035 bp, Homo sapiens
aatgaagtccaaaacagtcttgaaaaagaataaagttggaggagccacttttttttttttttttttgagacagagtctcgctctgtcacccaggctggagtgcagtggtacaatcatggcttactgtagcctgcaccttcttggctcaagctgtcctcccaccttagcctcctgagtatctgggactacaggcacacaccaccatgcctggcaaatttttgtattctttgttatagataggttttcaccatgttgcccaggctgatctcaaactcctgggctcaagaagtgatccacctaccttggcctcccgaagtgctgggattacaggcatgatccaccacgcccagccacacttcttgttttcaaaacttactacacaactgcagtaatcaagacaatgtattactggcgtgaatgtagccatacagatcaattaagtagaatggagagtctagaaataaacctttatatttattgtcaattgatttttgacaaggattccaagataattcaatggggaaacaatagtctttttgacaaatggtgcttggacaactggatccatatgcaaaagaatgaagttggacccccacctcacaccatatacaaaaattatatagcttgtggagaaaagggaatccttgtacactgttgttaggaatgtaaattagtacaaccattatggaaaactatatggaggttcctcaaaaactgaaaataaaattacagtatgatccagcagttccacttctaggtaatctatcctgaagacttgaagtcagtatgtcaaagagatatctgtactctcaagttctgttcataaaagccaagatatggaaacaacgtaagtacctatcagtggatgaacggaaggaaaaatatggtatatatatatccactacagtggaatactacttagccttaagaaagaaggaaattctgtcgtttgtgacaacatgggtgaacctggaggacattatgctaagtagagtaagtcaggcatagaaagagaaatattgcatggtcttacta

SEQ ID NO: 107750 - DNA, 1073 bp, Homo sapiens
gaacataaaaatcaaccatttaaagtcttaaaagtgttcctcagaatttgcactgacttaaagcccagtgtctgggagagattgaacctttccttgctgctcctctgtaagtacctactaatatgcagacgttgtgtcactttgacttatttttaagtaagataaatagatagtcctgccatagctttggtactgtaatcctctgtctagttatttgaagacttgaatacctgaaatttgataataatagactttaccctttattagaatattcttattggtctggtttcctctttggtaagtttaacatttaattaaaaagtacattaaggaagtttgatgactttttctctgttttggattgtataatcttttcctgtgatatttactctgtgatcaaagtaaaattagaaaacgtatacaaacacttttcagctcaagctatgaagtattaataaggcttcgttttcttttctctttagatgtatggtctgctggctgtgtgttggctgagctgttactaggacaaccaatatttccaggggatagtggtgtggatcagttggtagaaataatcaaggtgagaaggttgaatcagaatatttgaactggaaggaatttttgtgctactttaataatatatatcacacatgtacacatacgagaaacttaaaaaatggaggaagcaatccaaggtcacgtagcaagttcagctataaagtgggtataagaacgcccccccagccttttggtttttatttgagttactcttctcttgtatgatcctagaaaagctattatgtatatctgatgcaagaaaggtatatatctgttatttaaagtacttaaaagcaaaattagactataagctcactaaaatgtatgtaagctgaataaaagcagaagctgtgtctgcttttgctcactgtatactccctgctcctaatactctgtggagcacataggagatacttgtatttggtcactatttatatttattcagtatttataaaatgaaagaatgaatgcctacctgtctggctagatcattgatagaaacaaaattttgactt

SEQ ID NO: 107751 - DNA, 1070 bp, Homo sapiens
gtgggaggatggcttgaggccaggaggcagaggttgcagtgagctgagactccaccactgcactccagctcggtgacagaatgagaccccccctctcaaaacaacaacagcaacaacaaaaaatagaacagaccttgtgacagtttttttgtctttttgatataaatagaaattctctgatacaagcaaacaccctaatcagaaacacattatcattttttattttgccaaatggcaaaatgccaaagcacattttgatttctgccaagaggccagcagttttacccaccatttcctttgtaccctcagtacaaatgttaacccagtgaaggtgtattcttatgaaaagagttttgccctctgggacatctagaaatgtctagaggacccaggtgcaaagagtacaaagtgtcctctgtagaccacactttgacatctgctttaccagagggtagagagcataataatgtgtatatgtatgtgtatgtaattctcagagtcttagtatggctgtggtacatggcatatatgaatggacagatgaaaaatagtacaaagaatattttgcttgtggtcgacctgggtttgagtgtcaggtcacttgaagtaaagtggagattactgacagttcttttctgagtggctgtgaggcttaaataaaatgttagtgaaaatactgtagaaatgaaaggtggtattcttttgtggcatttttagacttgactctccccaagagcaaatttcagccccttgtctttgggtatgtcattggattttccagctgctttacattttattcaaatatatgatactgattatctgtatataagatactggtgtgagctgtgccagaaacacctaaaataaaggcagtttgattgttctcaaaaagttaacacatcatctcacacattaaggaacagttatataaacaggagtcttttgaaccctagcaagcctaggtttggcttcccattataaacttaggatacttgcctcttaagactgtaatgtttttaaacagaccctcccaaaaagtatactaatattgttacatttttaaatgtttt

SEQ ID NO: 107752 - DNA, 1017 bp, Homo sapiens
tataaactagtgcagctgtgagagtagttttgttagtttctgtcaaaattataaatgtatatactccttcatttaacagtttaacttttaggaattatttccttaggaatacatatttacaatacagtgtatatatagggatttttattatagcattgtttataagcatccattagtaggaaaatggctaaataaattacggtacatgcagagtaatacatgcaaccatgaaaaagaatgaggcaactctctgtgaactgaaagggaatgatgtctaggaaacattaaatgaagaaagcaagatcaagagtatatgtattgtatgccaccttttatgttttaaaaacatacagaatgtgactatatatatatatatgtacacacacacatatatacacaagtacatgtgtggcttatttctgaaatggtacgtaatccataatatttgattgcctgagaaaggatctttgggaatataatgtagttgggaaactcactttttcattgattgtattttagtattgtttgaatttacattaggtatatatactcctttttcagtaagaactaaattttttcaaaatattgattattatacattcctgtgtatctttttaacttcacaattaacctcaattcagggatgagataaaaaacaatgcagtgttttcttcattttcctctataatttaaccttttattccaccctttttcctgcaaatttcatcaaactttctgcttttaaaagctcatttcttggtaatatactgtgaatttgtaatacaactttattctttccattttcagttttcagtactttgtgcctctctgatctaaccttttaacatgtagtcaagcctacattcccatgtaactcaggcagttaccccgctacttcctcactggtgtaatcacctaatctctctcctcatggtccctaagacatctttacataatttggattctctccaatttaattttttcacccttgttacagattcttttcaccatagctct

SEQ ID NO: 107753 - DNA, 1032 bp, Homo sapiens
cctcagcctcccaaaatgctgggattacaggcgtaagccaccacgcctggctaacaaattaaattttgatgatgacttgaacatgacaccagtcagcataattagaggtttctttgcagccatgttgagctctttggtcgtagacatggactgggcagaaagctgaactcaaccagggttgtggaaaaaccacaagctttttcttagatatttttggctttgtgggctatctagtctctgtcacaattactcagttctgtcactgtagtccaaaagcagccatagacaatacttaactgaataggcatagctctgttccattaaaagtttatttttaaaaacaggcagcagactattcctgttgtttgttaactctcgtgttagagaggataatgatggaccgtggaatttaagcaggctaagaagggaagagaggagaacataagtgcgtgaagtgtagagagaaggtagtagggtcaatggcatgatgtttcactatttcctaatctctgctctactcttacatgaccttatgttttgaatatagttttctctctctgcgtgaaatgcttcttttatacacagtttagatgtcatctcttttatacttttatttcctctgctgtggccactgataatatggaaaatgctcagtaaatgctgaaaattgaaattctccacttcagtttgataggtaagattatttcaaattgggagattgtgaaagtttgtttatccacagtatttctcactcagtagccaagcctatgcttgaacatggtgattctcaactttgttttctgcttcaatttacctgatactggccacatgaacaaggtaagggcagtgccctgctcttccttcctacttggtgcttaagttagaatgcctttctttttctccactggtgttgttgagttggtgtctttatgctgcagagcatggatatttaagcataggacctgtaatgagcttgtgagtatggtaacacgttgccttataggttattttttaaatttcagttaattatag

SEQ ID NO: 107754 - DNA, 1062 bp, Homo sapiens
cagatttcatgcatataatatctaatgttcttagatccataatacttgattcctagctcagtgttcttgttactttatgtaactgttttttagtataacagtttttagccattttctattaagctttttttttacagcaaatattgcctgacaacattttctattaaactttatttagattatttccatagaaagtctttttacattacagtgcctattatataggaagatgtcaatgtattaagcccgaattttgatataaatacctacagtcatataattgttgtgtatatacacatgtattacacaatacgttttaacaactatagttagcaaattggccctttattgacacttgcttttcagttgctttttttttttttcagtttaaatgatacctctggtttactagggattgtgaaccctcataagtattagagctttttaaaacctaccaaatggcctgttattatctttattctgatctgttttggcatgtgtttgctttttcctgtctcttcctaagtaaaattgtacagcctctgttaggttcacaagtacactctttgtaatgaaattttgcatcttcattttgttgttgttgttgttgttactagatacatcatgatactcctgggtaagaattatttgttccataaactgctggattacaatagattcatttgaaaaaaggcctcctcccagagttcttaaacattttctctttgattacttactttaatgtatatagcattccttatatgctaggcactgttttaatgctttataaatattaactcatttaactcttaagaagttgaagagcagaaaagaaagactatcaaaccgtttgaatgcaaggcatctgatggcttacttgtctggttttggtttggtggaaagctcctgtcatagtcagctcttgccctgacttaatcctgcattgggggtgacaactgactgcctcttatctgtatgccccagaggataatttcctctctgctgctgttctcagtttcttacttatcttaaaggttcttacagataaagagcaattagaag

SEQ ID NO: 107755 - DNA, 2070 bp, Homo sapiens
tttctattttttttttattacatgcataggtttgtgtatagaccatgatagtaaagatacagaacatcacaagtatcctcttactgcccttttataaccacattgacttctctccctgccattactccacccctaacacccagtgtaacccctggcagtaaccactaatctgtttaccatttccaaactttttttctttcaagaaggttataaaaatggaatcatatccagtatgtaaccttttgggctagctttttttttttttttttttttttgtctcagcataggtttctggggatgcaaccatgttgttgcatggatcaataattgtttcttttttattgctgagtagtattccatggtatggatatactacagtttgtttattcacccagtgagtgacatctgggggctattctaaataaagctgctttgaacattcatatgccggttttaatgtgaacgtaaatttctatttctataaaacatatgcccaagagtgcaattgctgggatcctgggtaagttttgaaggttgagccaacaggatttcttgacagattaatgtgaggtcaagccgggcgcagtgtctcatgcctgtaatcctagcactttgggaacaataattgttattgctaataatagcacttagggaggctgaggttggaggatcatttgaggtcacgagttcaagaccagcctggccaacatggtgaaaccccatctctactaaaaatacaaaaaaattagctgggcatggtggtacacgcgtgtaatcccagctactcaggaggctgaggcaggagaatcacttgaacctgggagacagaggttgcagtgagctgagatcatgccactgcactccagcctgggcgacagagtgaggctctgtctttaaaaaaaaaaaaaaaaaaaaaaaaagtcagagagaaagaggaatcaagacttcatggtttttgacctgggcaactagaggagtggaattgccaacagctgacatggggaaagctatgggtagagcatgtttaaaggagatgaaaaattttacttataacatgtcaagttgatgtatattagacacagaaaaattgtcacataagcagttggttaaaagattttggaattcacaggggtggtctggtctagagatatacaattgggagtctgatcagcctttaaagccctgagactggaagaggtgatagaggcagctgaaagaggtgagagactaagttctggctacttcagtgtttaaaaaatagggagattatgaagaactagcaaagaaaactgcaaatttggccaatgaggaaggattaaaaagcaagataatttagtgtcctggaaagtaattggagaaaacatttcaaggagagagggagtcaaccaatcatttttgtgtaaaccttagttgtagcacaaaggcatattctgcacagtaaccagaggttttagttgtgttgtattccaggggatatataggctgatgcccccgtttctagtttctcctgagtaaggagaattttcgagttttagtttctgtattcagaaagcaaatggtctaagagacaagttgaattctacctgttaagctccaacttaacactcttttcatgaaaaaagtgaacactcttttcatgaaaaaagtgaacactcttttcattaaaaatctttttaatcttcctagttggaagtattctttctgtttttagaattctccatcctttttttttcttccagggtcgagggagagacagggtctcaccctgttacccaggctgaagtgcaatgtcacaatcatagcgcactgtagccttgacctccctggttaaagtgatcctcccacctcagtctcccgagtagctaggaacacaggtgtgcatcaccatgcccagctaatttatttttattttttgtagagatgcaatctccctgtgttgtcaggctggtcttgaactcctgggcccaagtgatcctccttccttagcctcccaaagtgctgggattacaggcatgagctgccacacccacccacccacccacccctttttcgataactctagtggcactt

SEQ ID NO: 107756 - DNA, 1067 bp, Homo sapiens
atttaggcagtttcttattaaggtgaattttagaatgaggggcttgttcaagatggtgatgttcctgctctgtcatctgtgaaatttatgaccctcaatttcactgcctgtaaaatggggacggtactaatacagcaatgcccagcccagtgtttggtacataaaggaactcagtaaacattattgtgctgccttttttctcttcttcagtgttttgtgaatcaaatggaacaaagttttatgacaacattttctaagttttaaaactccttataactaaactctttgtttttattcttaaggttgtaagttactacacactgctatacgtcaaattttttccccctattggttttatactctcttaaatttggtaattctgttttcaggcacctaattattagtattttatatagccatttaagtcacttgtaaaaaatctatttgctgataaaaccgatagaaacttgaaagaaatagtaatctttgtgctatgtgtagcactgttctttaagtcatggaaatttgtagttttcaagtggaggctataattaggtggaagaaaagggaaggacagctacaagttggataggaaaagtgttacattgccagtacagctctaagaaagtaacagcatggcaatgggagtcctcaaaccaaagttaccaagtcagaggagttcagtttttcctgggaaaaggtctccattaagtatgcctgctgttctcagtcatataggctgggaatctttgcctgtccccagcaagagaatggatttgataggtcagcagttgggaccattgataatgatgttccttgcagtgggaaacctgagaggcaggttttcatacaaagtttcattaaaactttcatacagagtttcttaaggatacagactgttttatgctgcttttatagtttctgaagagcctaggtaggttaaatacatttttaaaattttaatggaattttcagggaattaacaaagattgatgtggaagaactgtattgagtttgctgttaaaattatatatagttttattgcctccttgattgttccactgaga

SEQ ID NO: 107757 - DNA, 1028 bp, Homo sapiens
attgggattttatttataaattaatataggaagaactgatatatttgtgagcttgaattatcttagccaggaataagaaatatttttccatttgttcaaatctacttttatgtctttcagaagttttggcttagtcaggctttagaaatttcttaagtttattcttaagtattttattgtttttgttgctattgtatagtttttcttgttttttattctacatgttaaaaagtgatggactgctttataccaagctcggtttttttccttgtatcacccttcctttgtggaatttaagtattctttgttgtggccaaaaaataaaatttgatatattgacctatttgtttctcttgattatcataaaataggaatttctctgacaacttaaaagtctgtagttttaaaatctgtgatttacatagctgctgtttgggattgccttaaattattaggtgtttccagcagaaggttgaaataggatcttctccttgttcaattaaataaaccaacctgcgaaatctcctaatggcagtgagaggctttttttttttttttttttttggtgaatagtaaagatgagagataatggtcaaagataaaaagaaaaccaagaataattatccctgtgtgccaggagtcacataaactgtacctaagacactgggctttttaaaagaatttctggtataatcttcatttcagtggtattttatttttttcccactgttgtccatcatactgtgacagagtacttaaactatcttaacttgggcagtttggaagtgcttgtgataggaaatatttgtgttgtggggataaagattgggtaggtacctaattaatgtaggagacctgtactgttgtaacagggagaacatcagtcaatcccaaacctccttatggtttgttgaggctgactgttccaacttgaaaatcagtaagttgcatgtttattagtgatcttggcttcatttactattcatttctcctttgaagtgagtcataggtttcaagtctcctgccta

SEQ ID NO: 107758 - DNA, 1397 bp, Homo sapiens
aatttaatcagtatttgaaaatgtatggtgtcccttgcagaaatggaattaatgacaaaactcgtagttattacctgctattttattttccatagttaattttaagaggttcttataaagttgtttggaggtactctatcttcgcaacagttaaaattgtaatattttaggcatatctcctcctcctattttgttatacagaaaagctttagctgataaacagattgcattctaaaagttcataaactattttggaacttagaaagtattttttcatagtaagtttagtaaatatgtaaatgcgaataggttcccaggctatcctacaaaagcctagtgaagccatagttagctcaaatatctacatatttacagtgacacataatagaaaataatatggcaagaatagtagttaacaccagaacactgttaagaattagttttgaaaaattttcttctatgtgtgattgatacagggatttaatcagagggaggtcaggcgtagagacttgcgggagtctggcaggcctttctgtgtcctttcaggtactttataggttgctggcatttctttgttttgatattggtatacagcagaaatgctatctttttgcttaccggctatggttaagattgtattttaggttctgagtggaatgaaaatggtagaaaagaaattgtttcctcaggtaaaaaagataggaaagaacaatggaagacagagtaacctaggatgtgtgtttgaaaaagaaattgtttgagatagatttcattgacacacaaataatgcaggtttaagggaataggggtagagtataacatgcaaatgattcctgatggaggagagcaaaggtgttgataaagtgttttgggttagcaatccttatgctggtcagtaagtggttttggatatctttggaagctatttagaactgggaatggggagtagaatgctactatggtatttttatatgaactgtttcagtattttttttttcataacatggtacatcagctcaccaaaaatatttaaatagcttgatatacatttggagtgttttttgatgtattaaactattattaagaaaatatattttttgaatgtatgaaaagtaaaagtaaaatattgtactttagctaattcaacagatgcctaaaactattatgtgatgagagagatttggtttttacattccttttttttgtttgtttattgattagaaaaaccatgcttcctttttcaatttccaaaatgtttcatatttagaagaaagcagtccaaaaagaaaatcaggaaatgttccttctattcctacaaaagtagcacctgttgttaggctatgtattattacttagtattgtgataaatctgttgaagtgtttaaatgtttgctatc

SEQ ID NO: 107759 - DNA, 1043 bp, Homo sapiens
atttctggatggagaagctcatgtttcttaattgcttaagaagttaagcaatttggataattggataagctattacttttaaattattgctttattttatcttgccatttgattcttccttctagagtggatagagggaccatttacaatataatagcgaaatgcatatctgtttttaaagttagaactggaaggccagtaagataaacaagggtcctttagggcaataccttgagtaaaatagcaaagcaatttttttgtttgtttcaagtaattgctagtgaataaggagtatttctatacttctgtatattcagcatttttctttgtgttaggaaacaagatgataattgtttaatgcagtgataggaactgctgttctgctgagttatcacagactttgggttttgtcagttaaaacaaattttgagtgttaggttttgttttttaacaggtgttgacattaattttatttctatgtttgggaacttgtaaatttgtctgacattgattctaaaacttttattgtagcatattattttgatatctgtgtatccaagcttttttcctaaaactgctagatggcatagatctgctttttttttttttttttttttgagtcggagtcttactctgtcgcccaggctggagtgcagtggcgtgatcttggctcaccgcaacttctgcctcccgggttcaagcaattctcttgcctcagcctcctgatgagctgggatttcaggtgcccgccaccatgcccacctaatttttgtatttttagtagatacggggttttgccatgttggcccggctggtcttgaactcctgacctcaagtgatctgcccaccttggcttcccaaagtgctgagattacaggcatgagccactgcccagccagatttgctttttaaattaaatttttgtctctgagtcatttagtaattaagttagtcatggtacccccttctcttagatactttaattggcgatactctgggggtattgcaacaacaaaactgatgatcagaattagtttaacaac

SEQ ID NO: 107760 - DNA, 2023 bp, Homo sapiens
tgtattcccagagttcagggtaatgcctgtgtagttcattgtgtattcccagagttcagggtaatgcctggcatataacaagatttcagtaaaattttttttgaataaatgaatagtgggcactcagtatttgtggaatgattagatgttctatttggttgatgaaagtgaaatttattctaagtgtttacagaagaaggttagggttctatagctgttttgtagtatggctagttcattgtagctccagtaatagagttaaatttataggcaggttggaatttcagaactttgttccctgatacatggtaggtgcttattaagtattgctaaatgaatgtcaaaagaagctaataaagtgagtggggttgggggaaacctagcttgctgtgagattctggcctaactggcatagccttttgggtgaggaagttgaactaagatttcagagctctcttgctttctcactaagattcacctccagggactttgtgtttgtaagtatattcctttggaattcggaagttgtaaaaaagtgaattggatgaaacttgctgtaggattgcttttttggaatcaaaactgttgttgaatgttaattagcaccacagctttgtgtgaaggcttttagacttgagtgataatgagattcattattagagacagtgtgtgttaggtgttccaaggcttccacttttattcatccagcacttgagaccgactatatgctaggcattctgctagactcctgaagatacaaaagtcaaatagggcagtaacgaagagaagaagatataaatgtttgttccagagtgctgctttttgaggtttggggtttcccaaaaggcaggggaatttattttattgagtatttttggttttgatttaatttaaattaaaagtgaatatgagccattaattactgagaatatgtttaatcagaacataatttaatatcaatttgctattgagtcagtatgtatgtatgtatgtcttttttaaggaattagcatttattgagtattatatcttacactcttgacatgcattctttttttttttttttttgagacagagtcttgctctgccactcaggctggagtgcaatggcgtgatcttgactcactgcaacgtgtgcttcctgggttcaagcaatcctcctgcctcagcctctggagtagctgggactacaggcgcatgctgccatgcccggctaatttttgtatttttagtagagacagggttttgccatgttgcccagtctggtcttgaactcctgagctcaggtaatctgcccaccttggcctcccaaagtgctgggattacaggcatgagccaccatgcctagccacattattcttttgacacagtcctcataataatcctgagggagaagcattattacctgtattttacaaataagaaaattgagtttagagaagttaagtaatttgtttaaagtttacagctttataagttgtggatttcaaaccaggtttttttttttgatactaaagtacattaacagcaagacatgctaaagattactgcatcttgagatgtaagaatttctgtatatttactctcaggagactctataactccaccatccaaaattagcaactaattaccgctagtgacatgtggctgttgagcccctgaaagttggctagtccaaattgagactggctgtacgaataaaatacacaacagattttgaatacttagtttggaggggaaaaattcattaataagttttacattgattactgaaatggtatgatttatattatatttttacatagtagttaaataaaatatattatcagtataaaaaagtacattagctttttgtgatgcttctcaaaggaagttattatagtttttttctttgtctgtagataatgttaaataacaagatgtattgactttgaatactgtactgtaactgttccccccaaattgaatctttggctttttaaccagagtatttaaaagtacctttttccttactaaataaata

SEQ ID NO: 107761 - DNA, 1002 bp, Homo sapiens
gtagctggtattacaggtgcctgccaccgcatcctgctaattttttgtatttttagtagagacagggtttcaccatgttggccaggctggtctctacctcctgacctcaggtgatccgcccaccttggcttcccaaagtgctgggattacaggtgtgagccactgcacccggccagcactgatttttgtatgtaaacagttccatattgatggacattagggtattaaatagggaaagtttgatgggaccagatacttggttcttcttgtggcacttaaactttaaaatattttgttttcatttttatcataaagatattttaccacggatactcaaaacagtatagaagtgcacataataaaaagtttaaaatgttctctgattcccatctgcccacttttcctctattcatatctccagaagttactactggttagttcaagactttttattaaaggcatgtgcagcatttatacactgtgaatgcttttttaaaaaaattgggatcatatcatgaatattctgcaacttaattttttaaacatagcattattagttaaccttttaagtttggctaatgagaaaagagtcctgaatataaataagattttacaaaatgattttgggcctttttttctgtgtcattgatactacatacatattttttgcatgtttgtatgcttcctaaatcttacagtattgtaatctgctctaaagtccagaaagtagggtatatattcctctttactttctctgtaggctcaaacttatgtttcgaaagaaattgagaaaacttttattgttgtaatcaattatggtttaatactaaaagtaaatccagatacagttgagatgcctaccagcagagttgaatgtaagttccataaaagtaggggaaaagccttctgatcttgttcatcactgggtccctagcacctaggacagcgactacctcctcattcttcccattctctgtatttgttttacgttttactatataa

SEQ ID NO: 107762 - DNA, 1422 bp, Homo sapiens
attgtattgtgggggagttgtgaaactgtaattttttttctttttttttttgagactgagtcttgctgtattgcccaggatggagtgcagtggcgtgatttggctcactgcaatctctgcctcccaggttcaagcaattctcatgcttcagcctcccgagtagctgggattataggtatccaccaccacgcctggctaatttttgtatttttagtagaagcagggtttcataatgctggccaggctggtctcaaactcctgtcctcaaatgatctggatgctttggcctcccaaggtgctgggattacaggcatgagccactgcacctggccgaaactaatttttacaagacctctttttgggtctttaagatgatgtttgtttgtttgatatgttagtatgtcagttctagagctttcccagagagggtgagaaatattaataaacaatagggtttctattgctaaataatacaacttcttttttttttaattagaggaaagagtgtcgtcgtcttctccttcttccttctaccttcttccttcttccttcgtcttccttcttccctccccctcctcccaccttttttggagacagaatcttgctctgtttatcagattgtagtacagtggtgtgatcttggctcactgcagcctcaacctcctgggctcaagcaatcctcccacctcagcatccacattagttgggtccacaggagtgcgctaccatgcctggctcatttttgtattttttgtagagacgagattttgctatattacccaggctggtctcgaattcctgagctcagtccagccaccttggtctctcaaagtgctgggattgcaggtgtgtgccacctcacctggccataatacaaattcttaaatagtggtcgaatatgactttctgtatttggttttgaaaaataaattgctttccacatatcagcatggtatttccttctgtgattaaatgtgtgcattgtgagatgtttggctggtatagggtacaattcttagacatggaagaaatttactttctctgtaagtagcaaatacttgttatgcccttcttgaaccaagaggatttactaaagaacaaggtataattctatttaaattcagttgaacatcaggaataacttttactgagagactctgaggcctttaaaaaatatgtttatataggccgggtgcggtggctcactcctgtaatcccagtactttggaaggttgagatgggtggatcacttgaggtcaggagttggagaccagcctgagcagcatggtgaaacctcatatctactaaaaatacaaaaattagccgggtacggtggcaggtgcctgtaattctagctactagggaggctaaggcaggagaatcgtttggacctgggaagtggaggttgcaatgagccgatac

SEQ ID NO: 107763 - DNA, 1090 bp, Homo sapiens
acgctttactgtgtagcccttatattagaattgagttgcaggtgtgagataatattttggagaaacagcaaggctgggaaagtcagagattttattccagcagcagagtctaaagagtgggagagctctatttgtgtgtgcactttatgcatagagaaggctgtgaaacatgcatatgttgaccctattgtcacagttccatacttttaaataagacccatgaagttgagacagggttggagatgacagacaggatgtgagattgtggtgcttcttgtgatgctccaccctataatggagaatggaggggcagaacgcttgtgtgggtgagacaagagtgtgtgttggtactaacaggaccaaccgggttccccggatattgttcttctaagaacataatcaccataagtaaattaatttgttggaatgtttatcattttctagctgattttttgtgtgtgtgtgtggggtggtggtggtggaaggggagttttccccgatttcaagaataaaagcattttcattgttcagaagaagagcattttcattaaagcggaggttgcactcttggcattttatcttgagttatacaaatcatccttggttatacaaatcaaattgcttttgaaatttgttgagtgtaatgtataaatgtatatttatataaaaacctatgtgaatagaacagcaaggaaaaactgagtagagttaaagaagtttgttttccctgagattttctgcctttaaatttatataaaaaaggaatattccattttacgttattgagttttctatttttttaaatgagctaatactcagtacataatggacatttttagtaaattattccaatatacttgtgtctgtaatgcatttgatgtggtataagatttagaaacacaatttagttcggctggcacggtggctcacgcctgtaatcccagcactttgggaggccgaggcgggtggatcacgaggtcaggagatcaagaccatcctggccaacgtggggaaaccccgtctctactaaaaatacaaaaattagcgggggcgtggtggtgtgcgtctgtagtcccagctactcaggagg

SEQ ID NO: 107764 - DNA, 1277 bp, Homo sapiens
ttgattgagatttgttttgtcatagtgccaaatactaagttaaatgttgtcactggctcattacatttaagttcaattttggagtgctactgcattcattacctgttaaatgttctggcgggttccttaaaaaggacgatttaaaacactctagcgttagtttccatcatatttagataactgtggatttagttagaagaatgtggatttagtcctttccattttggcttttgcagatggctatggtcctagaaataatagggatatttgggctgtgttcagggttgtggatagactactcttgtcctgggtttgtgctgaaaagtatgctcttgaagtgtttaatatatactaagtatctaatgttccagtgtatctctatttatggagaagttcatgtggtatttaatgatagcttgtttaaacatacttgcagaatttaacaaaaatatctatattgtttccttattgtgggaaagaggggcatcatgagggcaaagacaaattaatttgttgcctagaagaactgagagaactaaagaactgagattttaagaacccacacacacgcaaaacatgatgttatgtgaaattgattatattcttaggcaacataaaatgatcacttttagttgaactcaagatttcaattcatgttggctttgggaactagcctgaaacagggtagtctaggtaatagctgaatgggagataatttttgaaagttaattttttttttttcttgtggcttgcaagtagagaatgcccgggtaggtaaagaggaaagctgattatgcatctttcagggaagggtcgtgctttctaagcacttcatggagtgatttgaaaaatattttaaaattccggggtaattttcagctatgatgatacaaatcttataatagctacttaagagcctcttgtggtactggagtgtttgtatgttttacatcttggtaatatagtttgaaaatcagtcagtctatttcagctaattgatttattagctttatttcagagatctgtaatgctagattataatgctacattttgggacttttcattttcttttcaggattttctttgaaaatgactcttgaattcttggtaatacagatactaactaaggatggagtaactcttgtaaaatatatagatgaaaatgtttaattccgattaccatataggtcaatttagaattttaaaagttggagtttagtgttaattatgtgtttttgacagctttgactttaaaagcatttaaaagaaaggggagt

SEQ ID NO: 107765 - DNA, 1077 bp, Homo sapiens
ttgaggtcaatggagtagagtttttcttaatagataaatgggaccaaagtgatgaagtgacttgctcaagttctcttagatgttgctgtggctaaaatttattcatctgtacccccaattttttttaattgaatgcatacttcagaccaggcactgactgctaatccaatgttttttgcttctccctgtcagtcacttttcttctgaactggaagtgttttgagggtatatgatgttacattcaaatggattggccattttgaagccagttacaactaaggcagagtgttcaccaaattgtggaaaacaaaagcagcaaacagatcaacttgaccagaaacattcgtgaaagaaagacttggtcaaatatttcaggttatggccacaggcaggagacaacctttccatctatgaggaaacccttgtcaagttgtacactggttttattgatcacagataaacacatagctaacatcataaacaacagtaaacagcaagacattcctaagaacgataagatgtaaacatctgcctagaagatgacactatagttaatccataagcatagattcccatgattctatagaaaagttcaactcaactacaaataaacactatgcataagttctaccctagtttctttcagatttagttatgaggctatgtaattattttcctgcttaaatctggataataatgcagtcttaagacctctgtaaatatatggaaagtttaaatggaaaagaaaacttgttcatgatgccatgggaactctatggaaaagaacatattatcgagataattattatgggtattttctccctataaataatgactgagtttaaaatgtagctttggaaactttaaaagttgaactaaagaaagatgtgaaataagtttttcttcttgaaaattaagcttattttatactagaaagctcccaaaattttagtattttgtgttaattttaacccctttgtaaacctgacaatgatttcacaagttctttctaactttgagagtctacaatgatcttgctgaaaagctcctttctatttgtgtaggtctcaaatattt

SEQ ID NO: 107766 - DNA, 2068 bp, Homo sapiens
gctatggtcctcaggctacggtcctcagtattctagtatttgagtagtggaggtaaatccaaaggcgactggttatattttacttctaaatgtgtgctgaagtgtctcttgttcaaaaattcttgatatttagagcttcaagttaccacatttaaaagtaaagacttggcacggtggcacacacctataatcttagcactttgggaggccgaagtggatggatcatatgcagtcaggaatttgagaccagcctggccaacatggtgaaacctcatctttactaaaaatacaaaaattagccgggcgttgtgacgcacacccatagtcccagctaactccggaggctaagacaagagaatcacttgaacttgggagacagaggttgcagtaatctgagatcactccgctgcactccagcctgagtgagagtgagactgtgtctcaaacaaacaaacaaaaaacaaacaaaaaaatttgcattgtaaattgtacctcaaatttgagcagtttttgtgtttgtgtaaattaaagtaaaaagcagtccacaataatgttttgtaatactgcacaccagttctaccagattttgtaactatcagatttaaatgaaaaaagagaaggaagaggctgattgctggagtgttaaagaaatcttggccgggcgtggtggctcacgcttgtaatcccagcactttgggaggccgaggcgggtggatcacgaggtcaggagatcgagaccatcctggctaacacggtgaaaccccgtctctactaaaaatacaaaaaaaaattagccgggcgtgatggcgggcgcctgtagtcccagctactcgggaggctgaggcaagagaatggcgtgaacccgggaggcggagcttgcagtgagccgagattgcgccactgcactcccgcctgggccacagagcgagactccgtctcaaaaaaaaaaaaaaaaaaaaaagaaatctttagaagccacagggctagaagagaagtcaccaaacacctagggacagtcctaggcctagaaagccctttaaagtaatagtgaattgttttaaaattaagttattgagtggcctactgactaccatccaaaaacctttatcaccaaatttgttcagtgtttgctattgggagattgtccatatccctccgtaattaagggccagcaagtaatacgatcttcttacagccaaccttgctcttcccaaagggagaaagtaatacatcattaacctggaatttgtgatataacaggtagccttggttaatgtttaccttttcactatgtaaaaaagaaaaaacacacagcaaatagtgcaaataaaatttggtcttttaaagcattttagcagtagctatgtaaaaaaagttaatggttattattcctaaattttcataagacccttggtagacaaaactatcggttatattatgtatatatgaggttagttaagctgcatttagttaggaacatttaatttttacctaaatgatccttttttcatccagaggtagagattttattgtcattatgaatgttactccccatttagtccaaaatagtgagcttttaagttgtgccaggtacttaacaatagtaaaagctattgtatagatttttattcaatgtgacctataatacatttctgattccttctgtattgaatgtcccagtttccatattaagtgctatgccctgtataacattaatgaatttaatagtgtacaattttgggccaggcatggtggctcacgccagtaatcctggcactttgggaggcagaggcaggcagatcacctgaggtcaggggttcgagatcagcctggccaacatggcaaaatcacatctctactaaaaatacaaaaattagccaggcgtggtggtgcatgcctgtagtcccagctactcaggaggctgaggcaggagaatcgcttgaacccaggaggcggaggttgcagtgagccgagatcatgccattgcactccagcctgggagacagagcaagactctatctcaaaaataaaaataaaaaaaaaattgcgtgcaattttgtattttcat

SEQ ID NO: 107767 - DNA, 4290 bp, Homo sapiens
aaattcgttagttattaaactgtaacttaaacaaaagtacttttatattctcagagatacttttctttgtataatctgaaatcttataaatcacaagatagtgttatactgctttagttcgtagtaactcccataatgctttattttatttctttcatctgttttcaagaagctaacacattttaggggatttattatcggtctatgactgaccaacttattgaatgtatttactttcctcaatcattcagagtaatgtaccacaaatttcgccttttttatacttactacaagatcaaaaaaaaactacatggttagttgagatatcaggaaaaaaatagaagtagaattcattgtttttcctttgcttggaccacatcttttaattttggtcccttatgtgataaacacacagtatttggtgccagaagaaacttaggcagagtatagagcttgagattcctctccagagaggtgattggaccaaaattctagatgttctggttatactgcaaccattgtgacagtctttgtcttagagatttgcagtatcattttaaggaccagctagaatccagaggcacagcaacatctgctttcctctcagctctagctctgtttttacttaactgaagggccacagtcgaggagcactaacctaggaatcaaaagggccagatattactttcagtttacctgacgatgtgtaattgtatgagaatcaagtgagatcatcagtgaaacagatttgaggcctgtagatttacagtctttggaaatgtaaaatggcatttatttctttaaattttgccttcccagtacataagaacaggagtgccaaaagtcatcccctttctgaaaatttttcgtatactaattctttaagataattattaaaggagtttttatgttgttttgttttagtctgtgactgtagggtagtaccaagggggtggcttgggtaatagagaaagggcacctcaggtgtcctaaaatctccatcagccattgccccaagtctcccagagaaaagaagctaggtacacagtgtcctttctgtgcctgctccctttaagataaatgtcctggttacctctttgcacccagattctacctttaagaccttccagtaggcttatagacagctatacaagcaagtactacttctgcttaagattcataacagaagatggtgtatgacatttctccagaacactggagaaagggctgaaaaagaaattgattccttgctttgtaatgattactttctattccttcttctctttaggagtctactttgactgctgtgtcagacaaattaaatttgtggacttctgtgggaagtatcgcctcccactgatgcactacttgtgttcaccagaatgttcttccccttgcagttctgcctctcacagctccacttcccagagtgaatctgactcagaagatgaagctagtgttgctgcacgcagaatgcagaaagttcttcttggttgaacaggagtgcacagtgttgtgaaatacttaaaaaactgagcaaaatggttagacaagaaaatagagcttgaagttcactagaaatcttatcttcatcttaagtgttcatcaaagagtctgggatgatataaaacattttgtgtttcatctacccattcagcaagaatgagtccagtcccatgtttagattattttaacataatttgtgaatgatagtttcacatttggctgatggtttgcagttttcactcaagttttgcatgaatcacaaagcagaatggtaccttttgaagagcagttctgcaataagtcatgagtagtataacttttggacattgagatggagaaagtgagaaattatcaaagctataattgccagagttgcccttgggtttaggtagaacactgtataccatatatactatataccatatatactatatataccatatatattatatgccataaacaggattaaccctcccttttctaattgcctgtatgtctagattacagaactattcaaagaagctcacagatggttacatgggacaaacctttctgacaaactaactggtaaagtaaggcatataacatttacatgagatattaaaactttttcattattatcctttgttctatatgattgctattaaccttatgtaatctagcaatgactgttatagtgccttaatccagcaaggatataaaaatgtattcaagaagtaatgccagagcaacctataacctgacataccatgcagaacattgtaaaatattctttaacagaactaggtaaataactgtgtatctaatatccgatctcatggccctcttaacatttttttgtttaaatgtgcactcatcccttataagcacattacttttacacttaatggtaggccacaatcttcatcaatctgttcatcataagacagagtaagaatttttaacagaaaattctaaaagagatagaagctaggaaagcttctttatatcttgcattaaatgggtagggaaaaaatatgactctcacccatgtcatgtactggaccatctttctctactttttaaagaaaaactaatacaactagaaaaacatcacaacaagccaaataaaaatggagaaaaggagtcattgtccttatacctaatggaacagtttccagaactactttaactatggaagcatttttgaaaataaagtattaataaaatagaaaaaaattattaaatatattgtatccttaatgtatagcaggaaaatagtttcacaaattaattgctattagaaattaccaaatttttattaagtactttaatatgcaatacaaattgaataatagtacaactataagttgatataaagtaagtgcttactggtaatcattaaataactaataacatgacttgttggttaatgttaaacctacagtaagaaatgttatacagatcagataggcattagaacatcaggtgtaccttttctgatttctggcattcatggcacaccatttcttaaaagcagattgttgtataataacatatacatgtattagggtttttttcatatatattttttattttagaagaaactagcataattcagggtttatgtgtttatttgtatattaattcatgaaacatgagagtttcatgaactgcagatgtgaaacgctgctatagaatgaatcccttcacctttaccttgttataatgtagtaagattttgttttccttttgactcagaaattttctatgtctatagaggtaatctaatatgttcctactgcctagaagagtaatacataggtgattatatcataaaatagaggtataaagtctttgcttacttctccatgtgggccacagcaagctgcagactgtacagttatgaaaggtaaagatgacttaggctgtgcctaagtgacaaatgtaaaatgttttgtaaataagtgacttacctaagatacataagatattttcatagaaaataatgtattcatagtaaaatactcaaattgataggaccaattttttctggcctaaatgcttatgcctacttcctaatcaattaccagcttgacttaagtaactgcttgagtagtcttctaagagttagtcttcgtaaaataaatggataggtatgtaaatatataatcttacataccctttccagcttcctagaaaggtctactgcttcatcttttacagatgtaaataggtccaaccagagacagtttctggcctttgcatataagaatatagatgtataccacagtattatttcaacaaaatgttatggttctatgtatagttgaaaactctatgatcagcatacaactgtcttttggtaatttttaatgaagtctacatttagccgtcggttttatctttcttaaatctttgacctaaacttttgtaagagcagctaataatttctaagattttccctgtttctttttcctacctttccttttctcataactgattggagaaattaatcagaagtcaaatacaagggacttcataatctagaaaccagataatcagctcccaagtcatgtagctaactatgcatttaaaataagtctgtctctttagttcttaagtcatatatttgtttgttaattacagtaaatgaactttaattggggtttttaaaagacagaattagcgaagtctaatttttataatgaaataagtttttgatattgctctacttggacgattttagtgaccaaaactatggataaaactgcctaagcataacattaatatatttagaatggc

SEQ ID NO: 107768 - DNA, 2117 bp, Homo sapiens
acaagccctctcctccaacctgaagtgtactctttcttcttgtctaaatgggctaagtccatagcccagctgaagtcacagccctttggggaagcctgttccattcagaactactgtggcctttttaaaacttttatcttccttttcattcaactcctaataccatttatggtttgtctctcttattttggtattgtaatgcctatttttggccttgttttgtgtttcattataatgttatctaacattggtctgtctcgtctgcttagctatagtataagctccctgaaaattgcattgtttctctagagactggatagcacatagcaaatcttaagtaaaacatttgctgaatgaatagatgaaacgtgttttttgtagtagacacaatggggtatctttttcaactttatttacttttttggttttgttcatttatttttgcagtttagagtgtttatatcttggaggaaatttcattaaagaaatcccaccagaattaggaaatctgccttctctgaattatttggtattatgtgacaacaaaatccaaagcatacctcctcaactttcacagtgagtagttccaggcatttgtatatacgcagacatctatgcttagtaattattgtcttgtattcactcacatgtttttatatgtagaaaagaattagatattctcaaagtaagtgatatgttaattatagttctgaggtttgctgcaagctgagtttttttaatttcacttttaaatgctctggtttattcttcaaaatatttgttcagtctattttctgtaatcaaagaattgagtattagcatacatttccctaggttttatgagacttttagtgattttatatttgatatgaaacatttctatcctaattaggctttataatatgaaggatcttaatttctgttgcatttgaaatctttcctttttttagatatctgaatgagaaagcatgcccactgcccacccccaaatcttcaaatctaggttttacagcagttagcacatcagaacattctctaagtattctaaattcgccaagattgcaagggcaaaagtccttcatgacatttacaaatctgcactttgatctagtttcagcacctttttattttacttcaattgaccttaatcttaattgctcattcttaaggggaaatcaagttctgtatacacacatatattcaatatttttgatagttacgttgtttactgccattgatttttctactacatttattctaggttacattcacttcgttccctaagtcttcacaataacttgctgacatatctgcctcgagagatcctcaaccttattcatttggaagagttgagtttacgaggaaatccattggttgttcgttttgttagagatttaacctatgatcctccaactctcctggaattagctgcacggaccattaagattcgaaatatttcctacactccctatgatcttcctggaaatcttcttagatacttgggttcagccagcaattgcccaaacccaaagtgtggaggtaagttaattcagtattcatgtttcccacttatttagctattttttaaattaattaagtcttctttcagacaaaagcagtctctgtttctgttccctttattttttcactcatttatgagaaagacatttcactctgggttttttaaaaaattctttttcataatattttaggattcatacataaggaacatacccaggaagtctcatcctgtcttgacatacgataataaatcaagatggtaaaatgagaggaaacacaaggaagtataaacagttctaattgtttaaaaactgtttctaaaatgtttggacaccttttattatttatttatttatttatttatttatttttgagacagagtcttgctctgttgcccaggctggagtgcagtggcgcgatctcggctcattgcaaactctgcctcccaggttcacgccattctcctgcctcagcctcccgagtagctgggactacaggcgcccaccacaacacccggctaattttttttgtatttttttagtagagacggggtttcaccttgttagccaggatggtcttgatctcctgaccttgtg

SEQ ID NO: 107769 - DNA, 1008 bp, Homo sapiens
ggtgtcattgacctctccagatttagcaagatatctatgttttctataccctattaattctttcccctagtggcaaaatctttttttttttaacgttttctgaagcatcactttcaaagtataacaaataagtagatgctgaaaatcttacttatttttatgattaacttccttcccctcgagtaaattaggttatcaatgtgaaccatgcggttgtggatgtagttactttccatcaaaatgtggttattcttcagcaaataagtgtaattgtttggctatagtatatgggcaaaattttttttgttacataatgctgaaaaagtaggtataattcatattctgacttatttttctgaatcataccttttattcttctcagttaggttagatattaattgaggaagagcttaatagcttatcactcaatggccaatagactttatttaagtaaacaaaagcttctggattgtttggcaaatccagtatgctagatatttggagagtaggtttgagcacaactgagtttcattggtactcttctacaatcttttcttcttaagtaatgccttcctttttctgttcatgatgcctctcaccatctgtttgatgtggttttgaaagattgagataggagggtgtgacaaaacaaaagctaaaagttaatgctctcaaatgttttgaagttagtgtacagtaggttgatatgttagaaaggagacagatgactcaaccagatgatagaatgcagtaaagtttaaatgaaaatgcttttccacatttagagtcacatactgagcttgtcactggctctcaacatcgtccctctgactttttttattgccttaatttggggcaagtgtcaagagatgatgcatctatttgtatgtctacttttgaacatataggtaccttataatcctgtggtgtatgttagtatttgtcatttaatacaaagatgctacttcaagaaaactttctttatccacagatgttcttatctttctg

SEQ ID NO: 107770 - DNA, 1933 bp, Homo sapiens
gtgcctttgagcgtggcgtacaaggtgctctgatctaacccttgctttccactacatttgcagcttcctcttctctgtggcagtaccaactaccatttgtggagttcagtgacctatgcattttcccacgtagagaaagcagcttggagttgctggtaggcactcagtatgtgttgaatggatgcagtgcctctgtacacgtgctgtttcccttgcttggaatgtttccttcacctggcaaacgcctatcatccttcaaaagctatctcaagttaatcatctctgtgattccttttttactactccctgcacaacaatttttttcgttactactccctgcacaaaaaagtacagcctatgctgtactttctctgtgcttcattcatcttgcctttgcatttaccttattggatatgattccttgtttacaggaattatctgcttcacctactagattatgcagtaaatatgttaaatttaactttaggaggaagcagagaaacaggataataaaagtgcccggtgggggagtgggaaatagagccaaatgtattgtacaaaacgaaaaagaggtatcttccatctgtaagatattttcacactttattgtattttcagagataacagaacgttaaaggtagaagggacctcagagttaagtggagcaaaagaatattggcctgggaaggccgggcgcggtggctcacgcctgtaatcccagcactttgggaggccaaggcaggtggatcatgaggtcaggagatcgagaccatcctggctaacaaggtgaaaccccgtctctactaaaaatacaaaaaattagccgggcgcggtggcgggcgcctgtagtcccagctactcgggaggctgaggcaggagaatggcgtgaacccgggaagcggagcttgcagtgagccgagattgcgccactgcagtccgcagtccggcctgggcgacagagcgagactctgtctcaaaaaaaaaaaaaaaaaaaaaaagaatattggcctgggaaaaaagaactcttggtgctccagccttaggcaagtcacttgtatcctaactgtagcgtatcctaactgtagctttctaatctacaaatgaagcatttgggcaagatgtctcttcatttactcttcaatagatatttattgaatacctgccctgtgtcaggcactgtcccaagtattggggatacaatggtgaacatgatccaggagacagacattaaacaactaactatgaacctcattatttaattacagtggttatgagttctatgaagacctacagaatgccttgagacaaaatgacagaggcacatgggaaagcccagaggcaaggagggtaactactaaaattctgaaagaaggacattgtactgggaagtgagcaagagggaaagtggcaaatataaatttgggcaagtcagcccgtgtcaggtcttgaaggctatgataaagtttggattttattctaagtgcacatgagagagttttaagcatgtgtcttgttgctatgcaagaatggagtgaggagagggtgaagagatagagattttgagggctggtttgaaggaggtcattgtaataggatgagagatgatggtagcctataccagcttgatactaggagaaatgctaagaaatggaagatttcgagaaaagatttagaggtaaaattgacagcccttggttccttctaattttaatgttgcataattccagccttggaattttcttaatatactaacaggaacccagggaaagtattatttccatcacatggggagaaaagtaggcaaaaatcccatttatttaatacttacaatgcagtagatcctgtcataggtgctaactatgctttttaatactcacaatgatgccataagatgatgtgctcccatttttcagaggcagaaactgaagctcag

SEQ ID NO: 107771 - DNA, 1097 bp, Homo sapiens
agcgcggccgccgaaacccggtccggctcagatgacaatttggcagcctctgggtgtctgcctcagttctgcgcagcccatgctgcgctcttgccactccgcgccccgcgcctcgtgaggcagagcccgccccggagcggcgcgcgcaccccaggactcgcgtcgcgtgactcggccaaggcgcgcagggtttgcgcccgcccgcgccacttccgactcagccctcggttcaggttccggggcgccgcagagctcccggcctctggaccgcgcgcggcgctctggggaatccggcgccacgcgccgtgcggtggccaggatggaggaggccggagcagcggtggtcacggccggggaggccgaactgaactggtcccgcctcagcgtgtccaccgagacgctggagtctgagctggaggcgcggggggaggagcggcgcggggcgcgggaggcgctgctgcggctgctgctgcctcacaaccgtctggtgtcgctgccacgggcgctgggcagcggcttcccgcacctccagctgctggacgtgagcggcaacgcgttgaccgcgctcgggccggagctgctcgctctgcgcggcctgcgcacgctgctggccaagaacaaccggctcggcgggcccagtgcgctgcccaagggcctggcccagtcgccgctctgccgcagcctccaggtgctcaacctcagcggcaactgtttccaggaggtgcctgcctcgctcttagagctgcgcgcgctgcagaccctgagcctgggcggcaaccaactgcagagcatcccggctgagatcgagaacttgcagaggtgagcgggtgtgtgccggagggtggggaggcctcgggcggtgtccgggaaccctggggcgccgggcctgggcacctcaacgtttgtcacgtaactatttccaagctttctctttaactgtgcggtagtgagttctgcccaaccatctcagcaagttgttgtaaatacctagtatgttcgcatgtgtgactgtttggtgtgttgtgtttggcctatgcagattctcgaggcattttttctgtcttccttattgaatctggggcgtgatccaaactgag

SEQ ID NO: 107772 - DNA, 1074 bp, Homo sapiens
tctaccctgcaacattgaactcccaagagcaaatccacattcctcttgagttctgcagcttctgtgtaaatagggcagctgtcgtctatgccgtagaatcacatgatctgaggaccattcatggaagctgctaaatagcctagtctggggagtcttccataaagttttgcatggagcaaacaaacaggattaaactaggtttggttccttcagccctctaaaagcatagggcttagcctgcaggcttccttgggctttctctgtgtgtgtagttttgtaaacactatagcatctgttaagatccagtgtccatggaaacattcccacatgccgtgactctggactatatcagtttttggaaagcagggttcctctgcctgctaacaagcccacgtggaccagtctgaatgtctttcctttacacctatgtttttaagtagtcaaacttcaagaaacaatctaaacaagtttctgttgcatatgtgtttgtgaacttgtatttgtatttagtaggcttctatattgcatttaacttgtttttgtaactcctgattcttccttttcggatactattgatgaataaagaaattaaagtgatggttttattggtttcctttcccccaattaaggccaaataaagtcgtgagaacattacccatttacttcctaagagtggatttgagtttcaggagccttaaaaaggactgaagagtttctcctgggactacagcttggatggaaagtttactcggggactggtagaacaagtttctttgaaaggatcatggatagtgggtctggagtagaaggtgatgacaagtcagaaagtgtcttagtcccttcaagttgctataacaaaatgcctcagactgggtaattataggcaacagaaatgtattgctcacagttctgaaggctgggaagcctaagatcaaggtaccagcagattcagtgtctgatgacggcttgttgaagcttgcctgcttcaaagaatgcacctttttgatgcatccccacatggtgaaaagggtgaacaaactcccttaggcctcttttataagggcacttacccat

SEQ ID NO: 107773 - DNA, 1254 bp, Homo sapiens
tgccaggcactgttgtaagagatggtactttattactgtggttttgcagttgaagacattgagacacagaagatttcataatatgcccaaggtcacccaaaaagtagcacagccatggttgaagctcaggcagtctgcctccagaacctgttgtacttaacacttctttggacttgttggattaagaacatcttgtagcatttccatttaacatcattttcttcatccttaaaatgggaaccataatgtctgatctgcttgtttcataggagtccaaatggagtcagcttaattcagtaaacagcccctgcatgaccatgtcatgaataggccatagttcttgttctcaaattgttcattgtccgtggaggagcccgacaagtaaacaactaaaattcagcataagcttgtaaatgccaatgctatatagtcttgaggaacagataaattccaacagttgtttaatatttccatgacgcctattttctcttgcatctcaaaggaaacagctgaaaagaccaagagagtgagcaccaaagagatctaatgaggaggcacagaccagtgtctggatcccagcatcttctccacttcagcgctgagttcagtatacacaagtgtctgctacagtcgccaaatcaccagtatttgcttatatagcaatgagttttattttgtttatttgttttgcaataaaggatatgaaggtggctggctaggaagggaagggccacagccttcatttctaggagtgctttaagagaaactgtaaatggtgctctggggctggaggctagtaaggaaactgcatcacgattgaaagaggaacagacccaaatctgaacctcttttgagtttactgcatctgtcagcaggctgcagggagtgcacacgatgccagagagaacttagcagggtgtccccggaggagaggtttgggaagctccacggagaggaacgctctctgcttccagcctctttccattgccgtcagcatgacagacctccagcatccacgcatctcttggtcccaataactgcctctagatacatagccatactgctagttaacccagtgtccctcagacttggatggagtttctgggagggtacacccaaatgatgcagatacttgtatactttgagccccttagcgacctaaccaaattttaaaaatactttttaccaaaggtgctatttctctgtaaaacacttttttttggcaagttgactttattcttcaattattatcat

SEQ ID NO: 107774 - DNA, 1013 bp, Homo sapiens
tctcacctcacatcaattaaatcagaatctctgaaggtggaactagacagctatcttttcaaatgttctccaggacattttgatggtatatgaatgacttgagagtcattgtctcagagaaatctccagtgtcaggatccaagttttcaccataactttttttgtagggccagcttctggctgggatgtgctaagcagttaaaggaacaaaggccagagaggagttggggtagattgctttgttacaatgtgttaccttggaggtatcaattacacagggccccttcatgccttcatactcagaaaatgtgggtaattcacctctccttccacaagttaaatgggagatgaattgagagcctctaggtagatcttggcggattcctcactggcttaccacagctgctactgctctgagctttggttcttcttgcaggaaagaatcagaagggggcccagacccagacagaggaggagatgaccagatatgtccaggagctccaaaagcatcaggtgagtggcagcctccgtgctggttcaggtgttgctgttgccatcaggccctataccattcaaacactgcccagtgccccaggagaccaaggaggctctctctgctcaatacagtacatcttgagtgataccccatcacctgtactatcaaactgtgatacagacagttccctgataaagtcctcacagggcccagtaggtctcaacacatataggttacagctcggtgagtggctgcataaggcaaaatcaggcaggtggtgatttgcaaatgaggtggaagtggtttgcaaatgagcgtggtttaaggaagtgtgtatcctgtcatgaccagtgtccagacccaaagactgtgagctcctgaaagcaggctctgtaacttgctcatcattgtacccttgcagtctcacagggcctggtatgtagtcagcactcagtgagcatgaaagcagtggatttgggccacagcagaaaggatttaagttcaacatcagtctggc

SEQ ID NO: 107775 - DNA, 1049 bp, Homo sapiens
ctgtgttttgtttcaggggactctgtgttgatgctctcattgaactgtctgatgaaaatgctgattggaaactcagcttccaagagtttctcaagtgcctcaacccatctttcaaccctcctgagaagagtatgcctaacctaagaaatagagagctgtagtgaatggaggcattttgtaggagccaagatagagaggattggtggaactctccagagctagctgagaaaatccccttccatgattctaaactgggccccagcccattctccccatggtgaagttagggccccacattctttaggttgatggtagtgtttgctcagatatagtgcttctgagggacaggcaggtcttgtctgggaaaaaagggtaaggtgcacagactgtagcaaagatgccctgttccaccctcacagctaaactgttgccccgtatttctggcccaacagagtgtgccctggaggatgaaacgtatgcagatggagctgagaccgaggtggactgtaaccgctgtgtctgtgcctgtggaaattgggtctgtacagccatgacctgtgacggtgagctgtgcttcaagcagaaagaaaaaacagcaaggagagagcttcatgaaatcagcatgagagaagttggggtggggatgatggagaagagggcggtggctgggagcaaggaacccaggcagacccacacctgtaaggttggagccccaagtggggagctttgagggcagaacatttatcccataggcattcagtttgaaaatcactccagaggcttggaataagagaggaccaagaccctgggcaaaagtaaatgataatggaatagtaacattatggaaatagtaacagtgaaagtagtaataatggaataataattaaaaatagtaattatttaataattaaaacattaaaataaaaacaataattattatttaataataatcaaaaataataatggaatagtaacagtgaaagcaaatactcagcaaaaaccatgtgccaggctctcttctaagcactttacatattaacccattgatc

SEQ ID NO: 107776 - DNA, 1037 bp, Homo sapiens
attctttgctctagtcttttctatattctctaagcttttaattggcatattttattttcatattttatcagaaaataacacattaacttttttatttaaataaaataccacatattaggagaagggaaaattcctctcgaaaaaaggaggggatcacaagaatcgtcacgatgtcaaggcactggatgaaatatccaaggggcaggacttcagggattgcttaaggagaaaaaggtggggtggtaaatggcctttcagagatggcacagacgtggcatacatattaccattaccctctcccttacccatgacagacatttctaatcaatcatagaattctttcctactgaacttggagaaggtttgaaaatcctactcagcaatattctaggtagccactagcaatcagagtctatatgagatgaaagctatttaccatccctgctggatggtaaatcagtccaatttgacaaacattgacacatctttagccaaaattaagataattagaagacagagtttgggactgtatgaaactgacaaaaacaacatagggtaatagatgatagaactgggttagcaaatggatgaaatgtcaggaaaatagcacttacaccagattttggcccaagtttctaagctctttggatgaatctgaacaccttaaagtaagccagaccttctaacattggcccagtcaacaaaaatataacgagaattttcttggctattctgatgaagtaaacagttgctcttgctaaagttctaagagctgctgctgtcatagataacagcttttgcattagcctggcaataacttgctaatagaatgctctttgggtagttggagtacaaaataattcccataaatcttcatttcctgctttggttggaggatttccatttaatcttttcacagactttagatgctcatttggaagccatcaccaataaactattcccaggattagtctgaatgtatgacccccatatgtcccttgaataatcctggacaccatttgtgaccaactaagctg

SEQ ID NO: 107777 - DNA, 1042 bp, Homo sapiens
gtgtgaaatcactcagtgaactggaatgcaaatatgaggtgtgaggaggctgttggttgacttaccaggctgtgtggcccaaggtctggaatctattctaggcggcctgcaagacacacacccctcccaacccccttccacacagggaaaacttatccctggtaggaagttcccccagcagcaatttcctgctggaggtagaagagcatccagtgctctcacataattcccaggcaaactacagggaagaaggcaaaatagagaagtactgagatgtgaaaacagagtgcgttgggggagaaaagaggctgtgaactcacagtgtatggaaatggttacaatgaaaagagtgaggggtaggtatgagctaggttacatttcatggctccaggttattaaggattattatcttttaattattccaacctcctggtgcctggccaagtaagatttggcaagtttttaatccatttaataataatatacctttaacaattgatgaagaggtacattaaccctctccctatgggaattgtaatttggattttttaaaagccttttatcttgtagttaatggtgcttgctgtttaaatttcttccttgttaactctaaggacagtctgcaaaaatggtcacatcatgatatttacagtccttagtgacaatctattttagtaaacttcaaatcgctaaaattgtacaaatattgttgaactttttagaaatgaaatttagaaaataaattgaggcttcttggtgctttctgcttttctgcgaccataaatatttaattcagcatatttttaaacaatttaatcactttacaaatcatgttgatatttgaagaagccagagcctctgtagtaaaccagaatcagaggtgctctccacttgggaaaaggtgattgtcatcagtattaatgccagtctatgtcaatcccatttggttagattcacaaagctattaacaaaagtcataaaggagcctgggctcagtggctcatgcctgtaatcccagcactttgggaggccaagacgggag

SEQ ID NO: 107778 - DNA, 1212 bp, Homo sapiens
atggggggcggctccgcttcctaggccgcgggacgtcttttcctccaggttccagtcccggaccttcccgggccccccacggcaccgcccacctggccaccgccgcagcccgcccgggccgccgccagccagcagcccctcccggggtggggtttcccttccccctacccctttgtggcagggacccacgggacaccccctctgcctccgctccacgtccagggggccgaaggggcgccggacgagggaccgtgcggagagaggggttcggcggcgccaggactcccgcgggctccccggagcaggggtcggaaggagggggagcgggagccgcgggggccgctgcagcagaagggggaggagaatggggaggagctgggggggcaggcaggcggggaaggagaggtcttaaggggcggcgaggggaggtcgcatttcctccgaggctggcgatcggcggagctcccacctccgcttacagctcgctgccgccgtcctgccccgcgcccccaggagacctggaccagaccacggtgagcgcagggcgcacggcgcggaggccggactcttcgggcggccgggggtgcttgggcggccggagcgagcctgcgggacccgagcaagtttcccaggtcagcgcggggcccggcgccttcagactcgctctcttctctcttccgcagatgtggaaacgctggctcgcgctcgcgctcgcgctggtggcggtcgcctgggtccgcgccgaggtaggcgaggggccgaggagtccgaactcggtccccggggcctcttgggtctgcgcgctgggcgggtgggcgcgcgtcctggggatgctctcccggggtggcgctgggagtttcggtccttggggtgtgctggggtggagctggggcagtaatgctgcttacgaaacttaaatctttaaagcaggaaaagtagttcgggccgtaagcgggagccccgccgcggctaacatggagggagagcggggaggaggagaggggacgggctgggccgacggggacgaggcggcgactggagcagcagcgagttcaaaaaggcgcctcagttccgtccttcacttcagaggagactgagagtagttggggacttttccctcccaagtctgtctcctgggggcgggggcagaggaatcgggattcttcttttggggcaaaattaattttcctttctctcttttaaagtgagatc

SEQ ID NO: 107779 - DNA, 1053 bp, Homo sapiens
tagaattaatgcataccccaaaaggtacccaagaagcttgccattttctcttctagcacaaggcttgagtgccatgctaggcttttgggtttttgctacgatgaggcttaaatccactctctgcttctactctgaaatattcctgagctgttatgttaaccttagaagacacagctacattggaagttaagtccactgactgtaatatacttgatgggcacttagttgttcaattattcagtattgttcaatattcaataaaaacatgggaccaaattttgagaagttagatgaatagctggaatctgatgatgaggatggattgataaaagaacaagtagatggaagaagttggaaggaaagtaggtttgtaggtgaaggcagcaaaaatcagttaattttcagtaaaatagtgtaacttagttgcacttaaatattacacatctacaccagaaagatacattctattcacctcttcattattatttatcacagggattatgatcaagaacagtttgctgataaccaaataccactgttggtaatagggactaaactggaccagattcatgaaacaaagcgccatgaagttttaactaggactgctttcctggctgaggatttcaatccagaagaaattaatttggtatgtattttcactaatgcatgcttgtattattatcgggtaaagacaaaactgaagacatattcaaataatatattctagtgaaagaagctttatacttgaaatcaggctatttggattctagtctaaacgtagtcaagattggaatcaacatatctagactgagagatgtgcacagtcacttcagccttttatgttggtctgttggaatgttccaactttattctatgaataatttaaatcataggcttctttttttgaaacagagtctcgctctgtcgcccagactggagtgcagtggcgcgttctcagctcactgcagcctctacctcctgggttcaagcgattctcatgcttaggccacctgagtagctgggattacaggcatgtaccaccatgtccagcta

SEQ ID NO: 107780 - DNA, 1084 bp, Homo sapiens
acttctttactatttaatgtctcacccactctcttatagtggcatatttcttttgctctaataactaaatctcttacaggtaggaagcttacataactaatcattattcaaagaactagaaaattagacatttgaatagattagtctcagatgatctacaggacactattttgtcagctaaagaatagcaattgtatcaaatcagtactattttagtagattttcattacctaatattacttttagtgagtataagtaatatatgtatgtactggtatctatggcagtactgtgtacagtgaagaaacaacataactttttgaatgaataatttcatatgtacttgaagtagttttgattctcttgattaataaagtggttctacaggtaggaacaggcatggagtaggcactcaggaagtgttgaatgaagtaaagatctgctaaaagtttaatgggatttcgtcagcccttgtaaaataaagagttataaaactgacagagaaaggtttatggctatttataaatatttgtagagaaaattttaaaataattgtctctgagttgttagtcatactagaatgctagattcattaagcaacctaatgcttctgtttactaagcttcatttggccaattgtgaaatgaagaggaattgttaagggattaacattgttttctctgattattttaggtattattttcgtacacgacttaacaaataagaagtcctcccaaaacttgcgtcgttggtcattggaagctctcaacagggatttggtgccaactggagtcttggtgacaaatgggtgagccaatttcacaattggtttgaaagattgtagcaatcacaggaatgtacttccctgaataacactttgtaaaatgtttgatttgcaaagatttttctttcagtgtatagattatcttttccttttaacagtatctttcacaaagcaatagttttcattttgatgaagtctgattactcttcttttcttctatggattgtgcttttgatatcatgtctcagaactctttgcctaatcctagatgatgcaggttttctcttatgttttcctcta

SEQ ID NO: 107781 - DNA, 1033 bp, Homo sapiens
actatccttagtttcctaagaaactgaacataaggatcactctatccaaatgcacagtccatattcttagcgataactttcttcccttaataccctacattcttccctctctaatagcctaggctagtaatccttcagaaggaaataatgaagtgtctttacttctctcccttaagattaagatatattatcatatcaccctgactcctttcatctcagccccaccttgattcttctagcacatgttctacaaagcaataactctcagcccaaatgaaagagaaagaataggggaaaagggtactcaaatgcccttaaaagctcaaaagtcttacctaaagatcctcagtaaagtcttccctgtccatctaatagccaacttaggcctttgtaattcttttactcccccgtccaaaattctcacccatagttttgccatatttatagcctggggaaaaggaaagggagaaaatatatgccagttttttgccctaaaatggagattttattctgcttaccaccagtctttactgtcagattacctgagtgcaaattctgacttaccatgtgcccaaggacaagttactctacttctctgaactttagttttctcttgtgtataaagataataataattcttcataggactgttctgaaaattaaattagataacacatgtaaagcacaatatttagtacattagtactgaataaatattagctgtagtctttaatggtggttctttattcctttttttaaatctgtgccactgatgctgattaaaacccctcattgaggaaggaagagtgggtacaattggatattagggcaagtgtcagatctctattagtttcagacaccagaagagatgcaggtttatctaagctggctggaacaagtcagctatagcttgtacaagccctttagttacacagatggctataaaaactgtagaagccagctaattctacctcttctgcttttctttttcaaattgacacataccacctcttgaagatggaggaatcattgg

SEQ ID NO: 107782 - DNA, 2540 bp, Homo sapiens
tgggagaccgatgcggaaagccgcgaaggcaaaagacccgggctccgcgacccccacccgcgcgacgacgccgccgccaccgcgtcgtcacacggagcaaagtcccctgggaagtgtagtcttcaggccctgggagggacttcagccacgggccgaggagccaggaagttgagggaaggaagctaaggggagggttactgggtaactcaaaagtgtctggagccccagaggtagggtaagccgctcacctgagtctcccaacaccagtaccttcacccgatccagggacgccatcttgccactgccttccctgggttaacgcctgttcctggattgtaagccaatcagagttgggcatggagggcagagccttcaatttcattggccactcggagcgtgactgtcttgatcgaaggtttcactgaactcattggctggtctggtaaaaggtagcggggtgcttccccagctggtcgcaggaatagtgcgttttctttgtcgcgcaaggggcgtggttcatttaagccggtagttgaagcgctgggggcagctgtagtgggagtgttccaggattcgccttggtaaaccttgttccctgttccttgttcggagttccctggccgggcattgcatttcatgatttcttcttcctttcgctccctcttaactatcctcccctaatgaattaccctgttgccttggtcctcttggtcctccaaagaaccattgaccccggagcggcccgtgtgcgacctcgggtagggcgggcttggctgcgccgagtgtggccctggacccaactgggagagtccgagggagtttggggtctcggagtctcgcattggggaggagtgcatatcaccgaacgcgtctcgtggagggcagctgggtccggaggtttcgcggtagtttgccgctgtgtgtgtgaaggcgtggaaagtgccatgaaatgtggtaacacaacaccgcagttagatgtgtagaatcccaagttgttctagaactggagtggcgatttactgaagtaatctaactggtctcttcgcatccacttttcttgtttttttctccactctgcagtcagtacaatcttttaacatcctgaatttgatccacgcacctcccgcttaaaactgttttaaatttaagaagagagtgcccagtagcctgtccgattctaccttggaaacaagagtggaggaagtgaagcagggggaagctggcaagatgagccatgttggaacaaaacgtgcctaggagacatatggaaagttttatggaagtacttgtctggctatgctagatgctggaaattaattggtgaacaagatgaagtctggtcttagagatagacatggagaaagtacaagaagggggaaagagccatggaacacgtgaaaggggatgattgtatgctacttaatggggagtctgggaaggcctccatgaggaaatatcatttgagacttgaaggatgattaggagaagggggtttgggcttagctgtaggggcagaaggaacagcatgtgcaaagccttgggatgcagggaaagcacatgtggctcatggaattgagaatatgctggtgtggctggttatgaggctgacagggtagacagagggcagagggtgccttcttttcaactttgtttctctggctccgtgcctggtgcacagtagtccttaaatgttgatatgattaaaatacacgtgggtctgggctggggtagggaggtgaggctgggatctgactcatggactatggagatcaaaggaagaaacaaaggtcctaggaggtcccacgctcagaagtctccagagaccagccatactccttccctaataacgccagctgctattcggcttcagcttattgtttccatgtgggaacatgggctcactttttcctcagatatttccaattttgcaagaggagctggaagttgaaatttatgtgaactcttacaatttttaaatgttgacaactaattcagaaaatttttgaaacattctttgggtgatacaatgcgtggggggctgccagtttgagaactcttacctaagacctctagagattgagtaaggagattcagcgtgagtgggaagtgatggaggagagaaggtagtggtcaggaaggaggattttagaatgcagagattttgaacaaagtggcacagcttgatttcattcctgagctctagtttcatttgttcagctacctgctgggcatattcagaggaatatcctatggtatttcctcaaagacacttctaaaagtgatttcctcatttcttcctgctcctcgtcaggggtcacctatttctcatggcagtacttttcctagctacgctggctcaaaacagagagctatttaagatttttcctactctcatattctgtatccaatatattttgttgggtccttttgatttttttttctgtaataactttcattcattctgttctcttcttgcaatttttttgccttcttagtttagattttatacccccaatattccacactgcctccaccttcac

SEQ ID NO: 107783 - DNA, 1031 bp, Homo sapiens
ggatttattatgaatgccagtacttaattgaactcttatgccagccctgaaagcagaacactttgcattaattatctcactgagttcatacattaactgtgtgagcagggcaccattaatcactttttttttttttgagggtcctgtcctgtcaccgaggctggtgtgcagtggctcaatcatggctcattgcagccttgacctcctggctcaattgatccacctcagctggtactacaggtgcatggcaccatacctggctaagttttaaaatttttgtagagatggggtcttactatgtttcctaggcttgtcttcaacttctgggctctgacagtcccccaaccttggcctcccaaagtgttgcaattacaggtattagccactgtagccactgcacttggcttaatcactttttatatatgaagaaactgagtctgagaattttctgaggtcagggggcctaagaaatactggaactgagatttaaaccccaaaactgttggattgtaaagtcctcatatcactcccttattttagtcttcacagctccctagggtgttttaggcaaaggaaacaggctgagcaataagtggcacagggacctctccatgcaggatgagcattggcaggatatataatagggacttttgctgcatagtagagtcacctaaagagctttaaaaatttgtgtgatgcctaatctggctgccccagaccacctgagacaaaacctttaggagtggggcccaggatcagtattcttaaaacgttccctagatgattctgccttacaaccaggcttgagaactattagtctggggcatggcatgtatggggcagggaaggagaatacaatagtaggaaataatcctggaaacaggttatgttgacatttttctgctgttctttgttgaatgtttctgaagccatatgttgtgttctgacaactgttgaggatgtaaaacaacaaaaaatgaaaacggggttcaagtacaatgtatagaccaaaccgaaaaggagagaaaagt

SEQ ID NO: 107784 - DNA, 1705 bp, Homo sapiens
ttgtgtttctcttctgaagtaaagtagacttgacgtaatatattgttttataaataaaaagttactttttaatcaaacacactatagatcataaaagtagccatttaagaaatatgtaaagctttttgggtgtaatcttttgtgcattctagaggaaaatcttgttctgctctgttaaatgcttaggtattagaaatctttttaaacactttgggtacttttctggcactgcaaggatagtggatatgattaccatgttcttatacctggctaattttctgtttttttttgaattcagtatatttaaagttggagttcgttgctaaagatggcagacccagatgtcctcactgaagttccagcagcattgaagcggttagccaagtatgtgatccggggattttatggcattgagcatgccttggccttggacatcttgatcaggaactcctgtgtgaaagaggaggatatgctggagctgctcaagtttgatcggaagcaacttcgatcagttttgaataatttaaagggagacaagtttatcaaatgcagaatgagggtagagactgctgcagacgggaaaaccactcgccataactactacttcatcaattatcgtactcttgttaatgtggtaaaatataaactggaccacatgagaagaagaattgagaccgatgagagagattcgaccaaccgggcttccttcaaatgtcctgtctgtagtagtactttcacagacttagaagctaatcagctctttgatcctatgacaggtgaggtttatccagtttgtgaatctttaaaataaagtgtgtattaccttttttcttaaattgattcatctaatttttaaaccatcatatatattattataaaagtgaatggatcagtgtaaatcacagcatacagtcagtcttactgtcctgtttggctgtcgcactactttgagaagcctttgcaaagcgtttctcctttacaagggagtttctcacttatggccctcctgcctctgcccaccccaccttgtttacaactgcagcctaatctgaagggttgatttctctaccactttgaggctgttctaattttatttttgacctctagacagttgcaatacagtgtatttaaatgctttgttagtggaagtagaaagtggtatcaggagtatataactagggcatataatctggatttggggaaggcctctggaagaagttaacatttgagacctaaaagatagtaagagttagctagatgaaataagaggggaattctttccaagataagacatttagtgtcctttagatacacattattgttggaagaaaattgtcaacaagatatataattggcctgatttgattgaatagttttaaggatttttcataacacaatttagaaagcatgcattatctgaaaatacaatatgtctagcataaacatgagaaactttaaagttctgagttatatagttattttatcttgttatctgtttacacaataaaaaagagactagttttgctaaatactcgatcaattttgtcttattttctacaggtaaaaatctatagaaggactcagtgctattaaattagattaagtccctttgttatggttgaattcaggagtataggctactttttagttcatagatctgcttttttaaaaacttcgtctgaaagtttaaactttgacccatgaa

SEQ ID NO: 107785 - DNA, 1029 bp, Homo sapiens
tcataagattgtccaggaaagttatgcatgccattatctcttgcttagattttgcaaagctctcttaggtagtttccttgctttcactcttggttcccgtgtagactatttgtcatagcaactagtgatccttctagcatatcagagcatgccactcttctgttaaaaatcctccagaggcttcttctttccctcagaaaagtcaaagtcctcaacagaatttataaagtcttctatttgcttcctccccaatttccccttttggagactatttctatcattattcccatgttcacagcagccaccttatttgtgctttgtgtgcaccaggcatgcctttactttatttgcctttttgcatgctattttcccttgtccaaacatttgcatgacttgctcccatctttaagtctctgcttttacattgttatatgagagaggcctaccctgagtttcctatataatagagcaacacccctttcccttcaccttcttccttccctgctttttttcccctgtaatacttatatactatggatgtgatttttttgtgtcttgactacccccaactagaatgtgagggccatgaaagtagctcagaagatgattggctggacttgggaaggctgaatgtcagaagccctggggatatcaaacccactgttctggggtgagagctctgcagcagcagacatttgatcttccctgtttccttggccagccttgaggacatgggctgcaataggagtcccacttgagcacttaagcaccctgtgccatatcaaagcatttgagcttattttgattttttaaaagtttgtgggaaaaatgactgaataatatttcagttgcaactgatacctttgacaaatatttgtcagtgaattgtgggcattagctgatggcttattcattttatatactggactgaagagagaaaaatataatgctaagtaatgactaattgaggatttgactaataatgtcttctgccctagtgtcacgtatctgtgtcctttttgtcagtta

SEQ ID NO: 107786 - DNA, 1050 bp, Homo sapiens
gacaatgttcaggatgactagaaactcttggttttaggtatttatttggctttccccataacgtaggcccaaatgtgtaatgtgaaaacaaaaaagactaaagctgccaggaaagggtacaagttgtggtggtaagctgtaaagaatttggctttaagttaaaataaatacatattagaaatattgtgattaaaaactatgctgaagttagggatgaaattactttgaatacatcaaaaatgatagatggatagatatgtgatgaatagcaaaatgctaattgtagaatctaaatggtggtcacatggctgttcactgtgaaattctttcaacctttgtgtatatttgaaagttttaataataagatattgggggagggtggaggtataaactatctgctaaagtcttctctctgacctgagatacttgttttctctgtaggaactttccgctgtactttttgccatacagaggtagaagaggatgaatcagcaatgcccaaaaaagatgcacgcacacttttggcaaggtttaatgaacaaattgagcccatttatgcattgcttcgggagacagaggatgtgaacttggcctatgaaatacttgagccagaacccacagaaatcccagccctgaaacagaggtgagtgtaggccctgtgctcttactaagaacacatttcaacctgttcttgttttaactacctgtaccttggagaacaagagtgggtaatttactaggagactcaagactgtaatgttacgtaggttctcagttgtgccacatttgtctgattaacgtgtgcctgtgatgaaattcgtttgttctaaatgcagaacactgtggacttcaggcaaaaatctttaaatatttaggtttgacttcaagtactcattctgcttgggactgcagcaactcagccaattgttagctaatcctaaattagttgtgccgcttggggatatttgaattttcctagccagcttctgaaggctgaaggcctttaaggaattcagcattttcttttttgtttttgaagcattttaatca

SEQ ID NO: 107787 - DNA, 1042 bp, Homo sapiens
aattttaaaatttgtttgacttatggtcaaatgtctgctgcctcaaactagaataaaacccatcttgaatttctatgacagaatactaaaaacaaaagactttttaaaagtactcttgtgttaacatttattttaattctgttcttttctctctagctttcttgtttttctcaaagtactcctcataccttcataagacagtctttgtagtcaatgctaaagatagagaatagagaaaaactctgtgttcaggattatatataaagagaagcagtaacctcagagtgagtgagtcatttaagtctgaatcaaggaaagataaggatgtggttggccagatcagagaaatatgcctattctgtctctcccaggtgggtttagctaactcagggagaaacattttggggtggcagatatatagagcaggctcagcacatcaagatggggatgttggctgaggatagaagaggcattgaaaggagtcagagagacaaatgggtgtgagaggagaggccagaatgtagaataagcacagaaacataaaaaaccagatcagaccaagagaaaagagaaagtaaagtgaatgctgaagaagagaaaagttcgaaaagccaacctatacaaagtaagcagcatcatattacagtgaaggcagccacatagcctttaaaagaccacacagaacagatagaagatagagaatgactagggacagttaatggttaaattgagatgaacaagaaatgatacacaaagtaacatcaatgaatgcagaaagaaatagcagagagaaaccagttatgtgcaattgtagcataagacttcagaatatagcaaaaaaaaaaaaaaaatagatggattggatatatttacagagagatgcctcataggtctagacttagagtggagagcaaataactggtagaaagtaggagcagtgaggaggcaaaagaagtgattgagacatggaacaggtagaacaggcaccgggaagaaaaaggctgtgggagaaagtggtttacaaagtagccctgggcacaga

SEQ ID NO: 107788 - DNA, 2575 bp, Homo sapiens
gttagagaactgcaagattttactttctaagttttagtctaagttactgcattcaagactttgagtgatgatggtttaggagtatgtagaaaatgggaggcaaaaatggatgacgatgactcaagctggaaagtagagaggaagggtgtctctatttcttgctgaattttatcagtgtaacaatcaatgtgccgctactcccaagttaatatatcattactaacatatcacgtgagtttggtgatatgttagtgccaaagaataatcagtagctgaaaaccacttgttttttggcgtttctcctagcctcttttcccttcataattagcatttagtatatgtatatactagaaattgtgaaggtaacgtggagtttggtagtgatggtaaagcagctaatacctctactgtgattctctttgatatattaattttaataagaaaaggttttccaaggcaaccatactttaccctccttcttcctcactgattagcctgccatgttagtttttttgacggagtctcgctctgttgcctaggttggagtacagtggtgcgatcttggctcactgaaacctctgctttccgtgttcaagtgattctcttgcctcagcctcctgagtagctggaattgggcgcaagccaccatggccagctaatttttgtatttttagtagagacggggttttgccatgttgtccaggctggtctcaaactcctgacctcaagtgatctgcctgcctcggcctcccaaagtgctgggattacaggcatgagccactgtgcccagcctgttgtgttatttagattgaagttgttttagattatacagtagttaggctatactactacttaataaatttgttttccccaacttggcttcttgcctgttcttaaagcagccttcttttctttgaacttaggaagaaaactgaataaaataaaattattattaaccaacattatatattaagctcataagtttaacattctagtttacagttcctaaaatgatagaatatgaatcatatgggccttaaataagttatctggtctacttaagttttgtaaatatttatttctgcataaaataggatagtatgttgtcatgtctgaatttatcctaagtttcttgatagtagagcagactctatccagtgaatgtatgaagtgggtcttaacacttgattttcctcaaacttcaagtcatgttgatatctttcacaattgtatcgacttcaatcatgttctcattactatactgaagaaagttctaattccttttgattctgttttccttaaacagttctcttttccactgctgccacctcctacagtttttgtttatttttgtctttttctggaccatctctaattgtaatatactttacttgagacatagtgaccagaatgatacatgttgttcatgcatggattcaccattgatttgagttttatttccagtatctttctggtttttacttgagattttgtttgttgctttggttctggaagcatgttaagaccaaaaacttctagaaacacgtagaggtactttttaggttcttctgtgccttgaatccaatagcttggatcatatctttcagtatattttagattatttttctgcaggctgattttcttgcacttgctgaaatagaaatagatctgctacttttctgcccacgtatacaaccttcagctcttcctatatttttttgctgcaacttggcctttcagtacccacaattgcttagcatcaattccgtgaatatagtttcccagtatacatcttctttgtaatttataactctgttgaaaaaggctgttcctagaaccactgtttctactttaccatccagaaatttgctcatttatccttgttttttgttttctgtcttcatctgtaacagaataattcttttttctccaaacctctcaagacccttgtcagaaatctgttacgtgtgacttaatttagtttacaaaactaattttctttttccctaatttaatacttaaacattaatcaaaatactgtgttgatattattaaactatttggaacattcttttagaagcaattattgtcttaaaggcttgcatgcattccttaccttcttttctttctgttgtagtgctgcattggcagtaagctctaaggaggaggttcagcctttgacaatattttgaagtagttaagtttgattttaactctcattttgacagtcatgttatcaaaagcctcttttctctgacctaaacttttaacttgtctgcttctgtttccctttctctctcttatctgctcagtatctcattttaggagttctgtgccttctaaaatgtccagggatttagctaattcattttaatgtgttaatgagaagatgctttcactttatccatagtcagaattgaccatttctgagtcttctcttgatgacgatgatgatagataacactattctaagtgccaggcccattctagacacttcacagacattcacttaatccccacagtaatctagtgaagtaaatactattttccccctttctgtacttgagaaaattga

SEQ ID NO: 107789 - DNA, 1561 bp, Homo sapiens
tgcttcatgaaaataaaactcacatttattcactcatttgtcagatgtttattcagtgcctaacagagtggcaggtactatttaggtaaatgggatatatccatgaataaacaagataaatatctgttgtggtagaacctacatccttggaaagggggtgacaaagacaatagatgtaagttattcattatgttaggaaataagtgctatgggggaaaaatagagcattgggaatgtagggataggatacatttaaaaggtaacatttgaataaagacatgaaagatggaagggagttagctgtgtgagtacctaaaggaaaaatattccaggcagagggaacaggtaatgcaaaggccctgaggtaggagtgtgtctgatatgtacaaggaataccatggaggctactgtggctagacaagaatgagcaggggaaagaagtaagaggtagatgatcaggaaggattccagatgatgtgggaccctataggccattgcaaagcttttggcttttaccttgagtgagataaagagccatgttttgattttctgttatgccagctactctagtcgattcttcatagacattatcttatatgtttttattcagaaccttagaaagtagatgcttttatcacctcattttacagaaaaaggtattgaagtttagagattaaataacttgcccaagatgcttgtgtgtagaagaaccaggattcaaatctatgctataatactcttaaagccaatgtacttgaccattatgctacttaagctccagtttgtaagaaatattttgaatattttatggatagcagctcaaaaatggaaccagtgaagtctgttattttatcgtattatttaaatatatgttaaaatattgtctatatgctataaagaaatgccatttatatttaaggatattgactttctgagttttactccccagggggcatagatatggacgcatttcaggagcgtgaggaaggccatgctgggcctgatgacaacgaagaggtcatgcgagcactgctcattcacgagaaaaagacttcctctgccatggctggttcagtgggggcagctgctccagtgaccgctgccaatggcagtgactcagaaagcgagaccagtgagtcagatgatgattctccaccccgtccggcagctgtggctgtgcataaacgagaagaggatgaagaggaagatgacgagtttgaagaagtagcagatgaccccattgtcatggtggctggccgtccgttctcctacagtgaagtgagccaacggccagagctagtggcccagatgacaccagaagaaaaggaagcatatatagcaatgggacaacgcatgtttgaggacctctttgagtgagctttccctaattctttctcctttctctaatgctcagttcaaaaaggaatgtctcatctttgaagaaaagtatttaagtggctttctgcccctcttgatgtaagcaactgtccatccttgtgcaaagattgatggtagagagtttgacttttatgccagaaactttcccagcaaggtagggtgc

SEQ ID NO: 107790 - DNA, 1048 bp, Homo sapiens
atgctaggatttttgggtgagtagaccctcagttaagtaaaatgaaaaaatccagagtttatcattttctcggataaacgtctctaaatttatactcaaaatcaatgggaagatataatttaataggtaactacctccctttcagtgacatctaataagactcaatagaatttatattactttatcagataggtttgtctcttgagtggcacaataatctggtgaggagagacagtcagtgacagaaggaccaaaaatgggagccctgccgattagcctctgaagctctagtaagggcaggctcacacccaaggttggtagatacatgtagtcactgtgtttcttgaccccaggaaaactagagtcaccaccacacacagcccataagtgatgatggaggaacttggtttccctgaatgcggttgactatattcgtgtatctcaagtgtcagctgaacaagtgtcccaactttcccactgtcctttaagatttaaatagaactttttatcctaacatgttggactacttcttctagtatcatttcttttgggagatgacagttcttttttgcaggtggtaggggaccggggagagtaggcagggagcttgtatcctctggcttcgcctttctgcttccctggttttccatctgtcctctacaccacctgtcctttactccccctagtaccatcaacacaagtttgtgtagcagatcttccctgaagtttttacagtagtgagcaaagggagcggggcaatgagggggatttttgtttctatgttcctcttatttttagttgacacaataattgtacatatttgtgggatgcagagtgattctttatctcttccaacttttaggctcaggggtatatgacgtgcaggttttctgtataggtaaattgcgtgtcatggagtttagtgtacagattattttgccacccaggtaataagcattgtatcagataggtagtttttcagtcctcaccctcctcccaccttccaccctcaagaaggccctctttgtgtccatgtgtactcagtgtt

SEQ ID NO: 107791 - DNA, 1034 bp, Homo sapiens
ttggctctttctgctacaaaagaagcaaactaaacagtgaacaagataagtacaggtacttttaaaacatctaatgcaaaaatgggttgggaaggggaaagagttatgaaattttacttcttcctttgaagagctaaaggaatgaacctattttggcatgtcctcagggcaggaacaagtaccttagcttctcctcagaaagagcttcatgaccttctgagtatcagaggtggcctttcctattctagttgcaaagcaggtaggcctagtacacaatccagtttcaacagtcaaccagtcaacccacgtttcccataatgcagaagtgcataatggcctacctaatgtaaataagtctgagcaattagtctggaaagaaggctggtgccaggtctgaaaatgccttgaatcattggggcatacaggatggttgtacagttttttgttaatgttttaattatttaaaaattcattcaataggaaatatatatggtaaaaaatgaaaactccccagcccaccactatcttactacactgaggtaatcattgttgatagtttaatgtgtatcctcccagaccttttctaggcctttagaaaccacacatacatactacagtgctttttacacaaatggaatcatatcatacacattgccatttggttttgaaatatcttggagagctttccattcagtatgtttagatcttcattttaaaaaacaaaatagaattttatagttgtataatggtttacgtaaaaattcctttattgacgggcatttagatagtgtccagtttttcactattacatgctataatcaattactcattttcattctcttcgagtatttctacagaatagaatcataaaaaagaaatagccaaacaaagggcatgtctattttaaactctgatatatactgctaaactgctcttcaaaaagattgctggatgattttaagcagaggagtaatttgtagtattgatactggattggagtttaaacctagagattattaaggccatttcaatag

SEQ ID NO: 107792 - DNA, 1022 bp, Homo sapiens
taaaattaggatttaattatataaaaaaagaaagttattacttctccattaagtaaatctggaacctaaagattgaagattctgtgtgttgccagaatcacaactcgattagaaaggttaagaggtaaaaagaatgaaatggaataggccctctctatttctatggctaacctttgggaaaaaaattttatagtaacagaagcttcttcattagccacctatggatagattttaggctgagtctaattcacagtgattacccctctctaagaaccatgggggaactagtcactcagcttgatagagattgttaggaaagggggaaaataaatctggaaatcttggataaaaatcactagagaagatgttagagaatgtcctacaaataaataccacatataaatattctttaagcgtttggtagaaagttggccaagatgacccctagcaggtgcacaaactaaattggggtgggaatgggagtgaggacaggtaaaatttggaagcagcaagagcttcccaggcaaagtcaggaccttttggggaatgcaactggaaacaggggcagtgtaagaggaaaagagctcagcactacgagtccagagtgtcaagcccaaagagtccaaaagctgaggttctggctttgccaagataccaacatggaaggtaggagtgcatagagatgactggggaatcccaggtaaccaaaagattcaggctcagaggagccattagggcttcaagggaagctttccttgtacacatttcaggattatttggcccctatattaacaagtactttttagcttcaagtaaaaaacaatctaataaaaagcgtggcttaagtaaaatggaaatgcgcctttctctcaagcaatgtaaagtcgagcagttgttagtccagagctcgtatagaagcaccacaatgtcagagaatcccacccttattcttttagatgccaacatccttagcatctagttttcatcttcagtattgcttcatggtcacagttaattgctgc

SEQ ID NO: 107793 - DNA, 1049 bp, Homo sapiens
ggcggaggtgggcagatcgcttgagctcagatgtttgagaccagcctgggccacattacgaaacctcatctctacaaaaaatataaaaattatcctggcatcgtgacgcggtgcctgtagtcccacctaggcaggaggctgaggtgggaggatctcctgagcctggggagatccaggctgcagtgaaccatgatagcaccactgcactcccacctgggtgacagagtgagcgagatcctgtctcaaaaacaaaaaaacccaaagagttagagtatttcatttctaaagtctcttttatttctaactttttgagtctagaaaaagtgaatgaaagttcgcatgcctgatttgacgatatgatattaatgttaagaatcatcgtggggttttggtgtattttgccatatttaagccagtgaatgaagtgaaggatagactttggttctaattaattatttctgtattttctttgtagggattaatcaattcatgacagagacagtgaagaattgtaaaagagacggatttgttcagaccattttgggaaggcgtagatatttgccaggaatcaaagacaacaacccttatcgtaaagctcacgtatgttgaaattttttaggaattttaacttaacatttcaatgacatgtactttttcagcagagtaaatactacaaatatccgttttagggattactggcatattaattggattttctgtatagacaacgtcaaccattggtttcattaaggacttctgaagtgatggcacatgccagtatttgctgaacagagtctgggggattaatgtaaacatgtgtttacttaataatactttaaacatgttctgttgcagtaaaccaattatttattagcttaggtactaagttgtaaataaacttaatttttacatttgctaattattctttgtttcctataccatatactaatttatcatatcataccaaattgctaacattcctcagagattagccagtcactaaattttgattaatttttggttcattctacttgtttgcttattttaaa

SEQ ID NO: 107794 - DNA, 1034 bp, Homo sapiens
ttaaggttcttttgtttttattatgtctgaacttcttatttatagtttgtcttttcctccacaagtaacaactcttcttatgaaagggcaatgagtcttttgtgagatcagttgcaaatatttttctaatttttctttgaccctgcttttatttttttaactttgtttttgttttgtcatgcatatctaatccacccatttctaatctataggtaaattattttaatcgttttaataacttgctcacctgttgaccacttgatttttttcactgaatgactttgttattgtcaaatcagggcacacatttctctccagcccacttaacatttgcacacattggacaccagttttttcattaattaattcattcaacaagcatttgttaagggcctattatctatcagcaactgtgcaagcttttctgtagaatgaaaaggaaaattaagcttcctattcttaagtactcagagcaaaataagagaggcatgaaagcaccattttggattatgtgccaggtgctgtaggaacactgaggaacacactccacggtgggcagatgtcagggtggctttacccatattatatatacttgaaagctacatggaaaaaaatgacctaagatacagagctgaattccatcatattaagaggaaggttttaacttttgacatgtgatttcaaagttctaagttagaacaaaatttttgtcatcctgctcaattatatgatatagaacttggattgtgtgatatagaaactttgtactagcttttctgaaatcacttctacttcaggtggttcaatactggctgctgactactctcagcttgaactgaggatcttggctcatttatcccatgatcgtcgtctcattcaagtgttaaacactggagctgatgttttcaggagcattgcagcagagtggaagatgattgagccagagtctgttggggatgatctgaggcagcaggcaaaacaggtgattttagtgaacatggttaatataaaggagaagaatttagtgactcaaa

SEQ ID NO: 107795 - DNA, 1486 bp, Homo sapiens
cgcctcacttcttttgatgatgaaagaactaaatatacctaaaacctcacaggcccatctttattacagtagcttagcccaaattagccttagtggaggagtccatcttcattttcagacacatggtttgagtttgctgagacacacttgtttttcaagcctactgctaaactggatcggcctgagcattgtaggaatggaatagttacaactttcctttctttgaaagctactgctgttgttgctaccaaaaatgagtcctgttacaattattctttccttctttcctgggaagaccactgaataaatattaaatgaaaatgagtgaggttagaaatgagctttgtttttttcccttttcatttagaggtacataagtgtctttgaaaaaaatcaggaaaatattctcattgctatcccattcaggtggcatgctggttactagatccagattctcaggagccgactcttcatagcatagttaccagttttcttcctcatgagcttccactcctagaagggatggagaccagccaagggattcaaagcctggggctaaatgctggcagtgagcattctgggcgatacagagcatctgtggagtccattctcatcttcaactctatgaatcagctcaactctttgttgcagaaggaaaaccttcaaggtaaaaaccaagtttctggcatttttatgttatagattagagatagagatttagccactctttatcaaaaatgggtaaattacacatttatgcaaatcctacctttggattgtctagtgctttttttctgtaaaaggccagagagtaaatatttttggctttgtaaactaaacaatctctatcacaaatactcaactctgccattgtagcaaaagagcagctgtagacaagaccaaaacaaatggctgtcttccaataacactttacaaaaacatgcatctaatgttagtttggccataatttgctgacttctggcccttgtgtgaagaagagaattacaaaatcgcatttatgcagttgttggtaattttgtatttgaactttatcaaaggatttttattcacccttagaagacatccttaatggatttcaaaaagttaactcttttctttttggaactattaacaaacagatgttttttcacagcaagggataatcatgagagtctcttttttccctcatgacaaataacatgaatttattgtcattgttatctgctggcccagatcaagcaccctgactacagagagcttaacggatgcttatggtagagatgtgaagtagaacaaatttggcttcattgtgaggagtgaccgaatttattgactaatcaataggtactagaaaatagatggatgaattcatacagactagggtttggatctgggttatccacttatgagctgagggactttgggcaaactactgaaactgtaagtctggttcttataaagttgttctaaggattaaataagatag

SEQ ID NO: 107796 - DNA, 1053 bp, Homo sapiens
agggctcagtaccatgttacagaggattggtaactagctgaatgtcttggcctctattccttagcaacctgctgactatcctcctttctgttttccttttctttttcctgttgcaagaagaaacagaaacaaagttctctgtggtctcccctttctcattaaggtactgattgccgggcgcggtggctcatgcctgtaatcccagcactttgggaggccgagtcgggtggatcacgaggtcaggagttcaagaccagcctggccaagatggtgaaaccccatctctactgaaaatacaaaaaattagccaggtgtggcggtgggcgcttataatcccagctactggggaggctgaggcagagaattgcttgaacccgggaggcagaggttgcagtgagctgagatcgcaccactgcactctagcctgggtgacagagcgagactctgtctcaaaaaaaaaaaaaggtactgattaatccatattgttgaggagaaggacggaagatggagagggatttctgaactcctgtctgactgttataaaaatgatctaaggaaccactggtctgccttaatgtattaaaccctaagcaaacgagaaattctgggtctgattttactaaggaatccttacaagcccttaagaaggaaactatgggctacaagagggtgtgttatatgtataataggtttcatcgtgaagatatgtgcttatgagggagtactgcggggaagatgagaagagatagtggtaggaagggaggcactcactcttttttttttttttttttttttttgagacagagtcttgctctgtctcccaggctggagtgcagtggcgccatctcggctcactgaaagctctgcctcccaggttaatgccattctgctgcctcagcctcccgagtagctgggactacaggtgcccggcaccacgcccggctaatttttttttttgtatttttagtggagatggggttccactgtgttagccaggatggtctcgatctcctgacctcgtggaccacccgcctcggcctcctaaagtactgg

SEQ ID NO: 107797 - DNA, 1050 bp, Homo sapiens
gctctgttgcccaggctggagtgatgtggcacagtcatagcttactgcagcctcaaactcctgggctcaagcgatcctcctgccttggcctcctacagcattgggattacaggcatgaaccaccacagtcagccattttatttattttattttatttcatttttttagagacagagtctcacctggtcagttgagctagagtgcagtggcacagtcatagctcactgtggcctcaaacttttgggttcaagcaatctttccatctcagccttctgagtagctaggactacaggcacataccatcatgcctggcttttgtctttaatatgaaggttgtatataatggttttttgtaatataatagttttagttaatgaataatacttcttccttttaggttacacctatgtttgaggattggactactattgattggtatcgatttttctgtttatgggagaagttgccaacttcaatgaaaagggtggcagagctagtgggagttgaagaggggttcttggcccgttgtgtgaaaggaaaagtagtagccagaactgagagacagcatcgacaaatggccatccataaaaggtaaacgtcaaggtctctgggctctccggtatttaacacagtgtcttgcatgtagtagacgcccagtttattgtagtcactttcattgtcaataaaatcaaaattttggcagagtataagatttttcagttttcttttttttcattttctttttttttttaattttgaaatggagttttgttcttgttgcccaggctggagtgcaatagcgcgatctcagctcaccgcaacctccgcctcccaggttcaagcgattctgctgcctcagcctcctgagtagctgggattacaggcatgtgccaccatgcctggctcattttatatttttaatagagatggggtttctccatgttggtcaggctggtcttaaactcctgacctcaggtgatccacccgcctccgcctcccaaagtgctgggattacaggcgtgagccaccacacccaacaagttttctgta

SEQ ID NO: 107798 - DNA, 1065 bp, Homo sapiens
ttattggaacacagtcatgcccatttgttctgttgctgctttcatgtcacagtggcagggtgggatagttgcagcggagacctgctgttttccacaggaacaggaaaagtttgtggacccctggtctagaaaataaggtagaggtatactagaggcagcagattctactctttttttgttattgttgttgttgttttctcgctctgttgcccaggctggagtgcagtgatgtgatctcagctcactgcaaactctgcctcccaggttcaagtgattctcctgcctcagcctcctgattagctgggattacaggcacccaccaccatgcacagctaatttttatatttttagtagaggcagggtttcaccatgttggccaggctggtctcgaactcctgacctcaagcgatccacctgcctcagcctcccacactgctgggattacagacatgagccaccgcgcccggccagattatgctgttaaagagatagactgtgatgactcctttgtcaacagtcataacaatagtttcaaaaatcttcagaggcttgaagcagactctcaaatccatttgtaagtgaacacgtataatattttcgttatatatcaataaatatataaaaacctcctttttttaggtcttacttttgaggagagggatatcattgaaggagcctttcgtcaaggtctcattcgggtcttggcggcaacttctactctttcttctggggtgaatttacctgcacgtcgtgtgattattcgaacccctatttttggtggtcgacctctagatattcttacttataagcagatggttggccgtgctggcaggaaaggagtggacacagtaggtaagtgagtttgaatttaattgtagcagcattgctgaaggacagtgtctacttgaaatttgactagtgtctggcaacctgtttctcatcatgctgtatttctttattatccaatgcactagtgtcatcattttggattcacttaatatttatagtgagtatgagttataattttctttttttttttttttttttgagacggagtctcgctct

SEQ ID NO: 107799 - DNA, 1067 bp, Homo sapiens
cactttggcctcccaaagttctgggattacgggtgtcagccaccgtgcccagccatatatttactgtttatgaaaagttttacaagttcaaaaatccaaaagtctggaaaatttttaaagacaacatataagtatgtaaagcttttactgcatataagaaagttaaggctgggtggtggctcatgcctgtaatctcagcactttgggaggccaaggtgggaggattgcttaagcccaggaatttgaaaccagcctgggcaacctagggagaccctatctctacaagtgaaaaaaaaaaatgctagctgggcatagtggctcgtgtgtctggtcctaactaaccaggagactgaggtaggaggattgcttgagcccaggaggtcaaggctgccatgagcagggattgtgccactgtactccagcctgggtgacagagtgagaccctgtctcaaaaaaacgttaagctcttactgggggagaagacaaaaaacagagggtactatttaattagctaccagattaatgccaaagaggcaagaataatttcacagaggagtaggctttttcgtgacgggattggtgaaaccctctgatactgctactgctggttggtggtacacaccttgagcaagggttttgattttggggctttgagtggtaatcagtatccgtaatactctgcttcctcagcaggttcctttgatcccctcctgtgggcttcgtcttacccttacacagtttcctaaactttggcgcacattggaattgcctggggagatttaaaaattcttcatgtccaggtcacatcccacaccaattatataacaatgtccaggattaagaaccaggcatcagtattcttaaaagatctccagccgggcgcggtggctcacgcctgtaatcccagcactttgggaggccgaggcgggtggatcatgaggtcaggagatcgagaccatcctggctaacaaggtgaaaccccgtctctactaaaaatacaaaaaattagccgggcgcggtggcaggcgcctgtagtcccagctactcgggaggctgaggcaggagaa

SEQ ID NO: 107800 - DNA, 1042 bp, Homo sapiens
gaggcaggagaattgcttgaacatgggaggcagaggctgcagtgagccgagatcatgccactgcactccagcctgggcaacagagtaagactccatcccccaccaaaaaaaatattagcggtgatggtgagagaggaaatgtagttgtacctttaatttaaataaatagttgtttcctgatatataatataaacatttaaaaaaaataactgatcttgtagcgttttctttttactgggaaaagattttcttatggtttagtttacactaactgctagtgtgcaagattaacttttttgttaaatggtaggtataatatatagtagagtgaaaatattatttttgtagtctgatagatctacctctgatacttaatagagatacttgatatggctgagatagtagttgaatcacaaaacctatctgaacctcatatcttcacctgttaaataggatattataatccctatcttgaatattgtaagaattaaatatgatttttaaaaattatctggcatctagaaagttacttgataaataagtaccctcccatactcccaaatacactttaatcctgaggttaaagaactgactcatgtacattggtggagtgaggcatctgctgtttttgtgcagagttgtgcctctgagtactaaaacagctaagggtcattttagaattggaaatagaattggaaattcatgtgtttcactaactacctaggtatgcatttgtagtttctgcatacttggtatggaatcttgcttgctttgctctgtgccccatatttcgcctggctatgccttggttacttcaatacatttatgtgtgaacacattcatttgctctcctgttaatttttttcttcttttaccatgtctgtgcctccacccttttgaaccacttatatttcttacctggattattgaaatatttcctaattgttctctctgcttctgaccttgtccctttcagtctgtgcttacaggagctagtgatctatttaaaatgaacatcagatcatgttacccttcttctcag

SEQ ID NO: 107801 - DNA, 1035 bp, Homo sapiens
cagtgagtgggcaacagagcaagactccgtctcaaaaaaaaaaaaaaaaaagggtatccacatggttcatacacatgaagtgatgctcagtagtctcattggttatcagggaactgtaaattacttcttcaaagaaatactggctgggcacagtggctcacacctgtaatcccagcacttcgggaggccgaggtgggtaaatcacaaggtcgggagttcgagaccagcctggccaacacagtgaaaccctgtctctgctaaacatacaaaaattagccaggtgtggtggtacacacctatagtcccagctacttgggaggctaaggcaggagaatcacttgaacctgggaggcggaggttgcagtgagccgagacaggtccattgcactccagcctgggtgacagagcaagaccctgtctaaaaaaaaagaaatactaccacgtactgtctataactgccaacattaaaaagattgacaataccaagtggtgacaagattatggaacaatagaaaacacagattgtggaggtgttactttggaaaacaatgtgggattatctactaaaattgaagatcttctgtgactcagtaatctgtggctcagtaattttattcttaggtatatatcctaaagaaatgtatgcatgtgtgtaccaaagggcataaccaagaatattgttagcaacactaattattaatgtattatatatcttttaatgttcttttcatttgtttttttacagtcaggcagatctagccagttctctgtctaatgctgtgcaaatcgttggcatgagtgctacccttcctaatttggagcttgtggcttcctggttgaatgctgaactctaccataccgactttcgccctgtaccgcttttggagtcagtaaaagttggaaattccatatatgactcttcaatgaaacttgtgagggaatttgagcccatgctacaagtgaaggtaaatcaatatatgtacatcactactatttttatctgtgtgtttgatttcattttctagcaaattgcta

SEQ ID NO: 107802 - DNA, 1110 bp, Homo sapiens
aagtagacggttatatgggcagcacctctccatcaaggcatttctcttcattggatattgcagtctgcacaattgagagagccaatggtctgatcaatcgcctcatagaggaaaataagatggatctgttaggtaagaaagttagaaaataagtaaatactttctattgctatttttgatggaatgaagtggagctgttgtgatttctctaggtcccatttgttttcctattgtctattatctacttctggaggcaaggattggcatctgtaatgttaggaacgctgtgtttataagttttgtgtcctgctgctgttattgactccgttacgttgcatttttgtactttacaaaacgtagattatatccttgagccctcaataatttctccttgcttctttcctatctaaactctaccaggaatagaaggaggcctgctgggccagatctgccattttgtggttagtgtatatgggtttttgttattatattctgctgctatgatgtctattttgggcttggacccagagtctgtcatttagcatggaaatggtaggaagctaaagaaactgacactctatttgagcttgggattgtgggaagattttctatcttaatgcatttttttgccattatggaaaggccattatgtagaggtagcaacaggaatagaaggattgcagcagcagaagtagcaagaatatcagctaattattgagaagctggtgaacttaaaaataccatggtaaagttatggtagggtaggggtggagggtgggaatcagacataggctatgctccataaagcttggagagagaaattgcaattgatttgtatcagaattgtcttattacttgtgaccccattggactttaaatatttgagagttgcaatagactcgtagtaagtgctatttccaatgtacctagcacagtgcttggcacacggcaggcagaatacttttttttttttttttttggtgaatgaatgagtaagtgctaaaataactcatcagacagtacaattttggagacagcttattgataggaaaaagaacatcatgtgtcattaggaagtttcctattgtctccttaaattccttttcacca

SEQ ID NO: 107803 - DNA, 1798 bp, Homo sapiens
accacgcccagctatttttttttttgttatttttatagtaatagagatggggttttaccatgttgtccaggatggtttcaaactcctgacctcaagtgatcccccggccttggcctcctaaaatgctgggattacaggcatgagccaccatgcccagcccttttcttcaacttcgatcatagctcctatcataataaaattgttcatctacttcctcaaagcaggccttttacccatttggtacttaaaggaaaggatctttaggtataaactaggtactcagtagtattcatcatattgctgatataaagatttatttactctgtttttagttgagactattaagacaggtggtttaaagtaaagggcatttcagggtataaagattttaagtgctattgggcccttagtgattggttagccttaggctctgtagtactacacatggcttaaaacatttattaatgaattgtaccgaatattacttttttcttataatcttgtggaataatcatgttttagctcctacaagtgctgggaagactcttgtggcagaattacttattttgaagcgggttttggaaatgcggaagaaagctttgtttattcttccctttgtttctgtggctaaagagaagaaatactacctccaggtaatgttttttactaagtttgaaatagtgaaaggctcattattggcagtcttggtttcattcatttgaaatagaattataaaagcaagtggaaaacaaagtttcttcattgtgccctatgtagctttaagaggctactgccaaaagcattaaaaatttacagcaaggggctgggtgtggtagctcacgcctgtaatcccagcactttgggaggccaaggtgggcggatcatctgaggtcaggagatcgagaccagcctggccaacatggggaaaccccatctctactaaaaatacaaaaattagctgggtgttgtggcgcacacctgtaattccagctactcgggagactgaggcttgaacctgggaggtggaggttgcagtgagccgagatcacgctattgcactccagcctgggcaacagagtaagactctgtctcaaaaaaaaaaaaattaaaaaaatttacagaaggaaattaaaagaaaattattattgcattaaggagaaggggccatcaaatcaaaagaataattggtgaaaattgtgtaaaaatttgtaaaccttttcttaggaaataaacagaatatttaaactagcatataaacacgcacattaagaatcagcatttaactgaacagtaggactagactgaagcatagaaaggaaagagtgtttaaggaagtgtatcctgccctaattgaggactatttaggaatatttaggggatgaaggtcaagatccattggtgcttaggtaaagctccaggtatgtgatctgttcctctgttctgcaaaaatgactaatagtagtttacatcaatatgatgctcacagtttttagggcattttcacaaatacaatattttattaaatggaataaatttactgttgtgatttctgcagtgaaaaatatgtgcttttgaaatggaaagattgttatactgattgttaaagaaatgtgggttctagtcccagttttgccactaactatgtctttaggccgggcatataactggctgggcctcagtttttttatttgtaaaattaggatgttaacccttagccctgtgggttaacttagtaaacactcaggaaaattttattgaatgaatagctctaaatttctatggttctataaatcttttt

SEQ ID NO: 107804 - DNA, 3019 bp, Homo sapiens
tctatacatggtcaatttctcataagattcttgaagtcaggatgtgctttaaagagcttcatttcaacacataggaattccaacacacggtgaagggctaactgtaaaactcatatattagaagtaaattaaattttaattttttctttttcctaaaaggagaatgcaagcctacagttcctgactacgaaagagacaagctactattggcaaactggggacttcctaaagcagttctggaaaaataccacagttttggtgtaaaaaagatgtttgaatggcaggcagagtgccttttgcttggacaagtcctggaaggaaagaatttagtttattcaggtatccaaatttatgtaaactaattactatttttaagatatgaatgtaaagaatactctattgaggtagttgtggttcgtttaaaaggtgaatgaggcagtgctttataactagagaaaatcgtacaatatgtgtgaaaagtggagttttatttatatttaaattacaaaagttttattgtttgactggggtggagggaagcaagaaaaatgacaatttaaagagtgggcaattctgcctgccattattctcaacaaacatatatcccagtgagtgtgcaatgggagatgtaaatctgcccttcccctgtttgatcctggttgcttttcagggtatgagcattatcattacatgtttgttaatttaccttttttttttcttgagatagagtttgtctccaggctggagtgcagtggcgctatgtgggcttactgcaacttccacctcccaggttcaagtgattctcctgcctcagcctcccaagtagctggaattacaggtgtgcgccaccaggcccagctacttttttgtatttttagtagagatgggatttcactgtgttggccagactggtcttgagcttctgacaagtgatctgcctaccttagcctcccaaagtgctgggattataggtgtgagtcaccgtgcccagctatagattgacctgtttgtacagggttgtatatacaaacaacaagtaatatactttatataaaatttttatgggttttcttttttttttttgagatggagtcttgctctgtcgcccagactggagtgcaatggagttgtctcggctcacggcaccctctgcctcccgggttcaagtgattcacctgcctcagcctcctgagtacctaggattacagatgcccgctgccatgcctagctaatttttgtatttttagtagagacggggtttcacatcttggtcaggctggtctcgaactcctgacctcaggtgatccacgcacctcagcctcccaaagtcctgggattacaggcatgagccaccatgcccggccctatatgggttttcatgggcaactatggcatacacaatttttaacgcatgcttactacactgactttaaatctaatcatttggtaagatgcaattcctttgtgtcagttttctccgaaattatgagtcacacagatttttcattatggctgtaaggacgaattaaataattatcagcagatataagttcaggcagtggaattagactggttggatttgaaaactatcacttactggctatgcagcctcacagattacttaggaagagtgagagagtgtatatgtgtttgtgagtatgtgtgcctcggtagtacttagagttgattaaattatttcatatataaaagctcagaacagtttttggcacatagaaagtacttgtattgtgaaaaggcattacaaaaaataaaatacttgtaaatgctaagaagtcatagttagtggcagtggcataattgcttgaccatttcaattgcttgaaactgaaacttgggtatcattcagaactctggtcaccagcttatacaattaatcaccaagtcctggtgtctgttacctcatatatctcttgcttctgactcctttctgtttttaggtccattacctggtacagctcattatcatctttcttctagattatgcaatagctttgaaactagttcattcttttcctctgatcttgccctgctcctgcagccaaagtggtcttttttttttgatggagttttgctcttgttgcccaggctggagtacaatggcacaatctcagctcactgcaacctctgcctcccgggttcaagtgattctcctgcctcagcctccggagtagctggaattacatacaggcgcccgccaccacgcccggccccaaagtggtctttttaaaaaaaatttttgtttaaattttttgtagagatgggggtggcactgtgttgtccaggctggtcttgaactcctgggctcaagtgattctcccaaagttttgagattacaggcatgattcactgtgcccagtccaaagtgatctttataaagtacaaatatgatcttgtcactccttttcataaaactcatcagtcacactgcattgctttcaggacaaggtttaaactccttaaatggtgggattataaacctttcttgtggcactttcatatctcttcttttatacccctggggtactttatactccatgcttactaaattaccttctgtgtcatctgaacatgccaggctttcttctaggcctttgtaccatatgctgtttcttaggcatggcattcctttcctcttcctttcttttttctttttttggaacagagtctcactgtatcacccatgctagagtgcaatggcgtgactgcaactcactgcagcctcctcttcctgggttcatgtgattctcaggcctcagcctcccaagatgctgggattacagacatacaacaccttgcccatcgtggcctcctcttgctttcttccttaccttctcataaattctgtttcatttccataagattccttgcaacttttttccttccacttcttttttttttttttcctttttgagacggagtctctcactgtcgcccaggctggagtgcagtggggtgatctcggctcactgcaacctctgcctcccaggatcaagcaatt

SEQ ID NO: 107805 - DNA, 1051 bp, Homo sapiens
taaaataaaatacaattaagtttctggaaaaataaatggttaaaaataacatagacaatacaaacacagtttttatttttaaattcaacagatataaaatcacgatgttgtcaggcatgctagtctgtgcctatagacccaactactcaggaggctgaggcaggaggatcacttgagtccagtagttctgggctatagtgctctatgctgattgggtctccacgctgaattctgaatcaatatagtgacctcccacctcccaggagcaggggaccataggttgcctaagaaggggtgaacttgcccaggtcagaaatggagcaggtcaaaactccagtgctgatcagtagtgggattgtgtctgtgagtagccactgtactccagcctgggcaacagtgagaccccatttctaaaaaagaaaaagaaaaagaataaaatcactatgtcaaattgctataaaagtttctaaacacatattctcaatttttattcttatttccctgtgaaacagaaacagttcagcttgtggaccacacactgagtggcactgctctggaataatctttcagcacttcctggaaccagtctggcctttagattaaatctttactgagctataaccataggatgtctgcctcagtggccctgtcctcttctcgtgccctgacattttatagcaagtggaaataaagaatggtgtaatgccaagagtatagaaatagaattctggagctctagggactgattccagctctgctgtaaaaaggcttatgatgctgaggagagtaataatattttaccatcctatcttgatttccagcgctgactggagattatagtaccatccctgtttacctcacaggggtactgggaagagccatggctataacttaagaataatgactaacatttattaagctattatatgtcttgcaaaacacagagtactttttaaaaacaatcctatatcatagatgacgttggcatcctgatttcacagaaaagtgaatggatatattaatgtttagcaatttgtccgaggatacagag

SEQ ID NO: 107806 - DNA, 2094 bp, Homo sapiens
tgaggagaaggaatgtggaagtccagccactgagcagcgaatgagtctaaggctggaagggcgtggaagattagaacctggtggaatttgccaagttgttgactctgaggcaactttcctctcagaatacccctttctacagtggttgggtcagctttgcttaagtgcaagactagtaggagggaaagcaacatagccctatagggtgaaaactctctgactttcacatttttctttcagacccggagtggcgttggatggaagcgagtcctgcgttcactctgtcattcacggacccgagtgccacttctagcagccatctactttctaatgattcatgtcctgctcattctgtgttttacgggccatctatagacttagttgttactctttggaccactcccctcaaaacttggaattctctcacctctaacatcagaacatcaattccagtggaacagtcttcccatttacaggtcttctctccaactcttcacggaaagtgcctgcaaaaacagaggtggatacgaggacaggttggagctgcagggactggcgagtctgctttcttctactgccctgagcctgaacgcttctgcttaatctgagaatcacatttggtttgttgagcctaatatttgttgagattttgcaggaccctgatcttttgtggtcctgtaaaagatactgaggaatgtctttcagccaagccaagaggatggtttcaataaacctaataatctgaagttcagtatcattttgattgataactttctttgccttgtttgcctgtattttctcctgtttcagggggaaggtggctctgccataaacagagttcagggaaatgaacatgtcacctcataggacatctgatttaggtctcttgcagaatagggtggtgaaagctgaaggaactccctaggggttttagctgttagatcacatgggaggacagcatcttcttccctgccaatttcagatataattggagggagaatttcaggtcttagactataaggatagaatccctttgcttttgcccttgatcacatgtatactaaggtattaagtggcccaagtctttcctttcaccaaagggcagggagaagtgtctatggacagcagggttccaattcttgtcattccaggaatatctgaatattcctggaatgtggaccctgagacagtgctcaggggccactgggagccaatattaggcattgactctcagccaggagtctgactggtctaacaccacactgcaactcctgacctcttgaagtactaagctactttgctgttagtgacagttattacagtttctcagccccattgtctctgccctctgtggcaatggaaggagaatatagagaagacaaaattaaatatagatagacctgagaaggacagccaggatagaattccatttgtgcctattccctgcctcccctcccctcccccatcctaccagttggttattttctcattgcatacgtgatgtgttcactgcctagcctctccctaaagaagagagaagacaagtgggctgactgatctgctctaaatctactgtggtgattaaatcttggttacaacatcctgggaagtttcctgaacaactgtaaaataataaaattattttcagaatgaagagtttgtgtgtatgtgtgtgtacgtgtgagtgaatggatatgtgcacaggtgtttcggtacctgtgtttgcatgctggggggtggaaggtgggtaagggaagtagggaaaggaggtagccaggaatggttataggggtagaaagctctacatattcaggctttcttctcactggccaatatcagtgacagctgcatgcatttttccagccttagctgctagaccccaggtgatgaatgcagtgaggaaattctatcctaatactgaaccaaataagctgggccttagggcatgaaattgatgcaggtccatgcatggtcctgggagaactcttgtctggcacatagtgaaaacattaggcccctagggatccctctgggtgggaatgggagaagagaagcttaatagcatgtagcaggttagataggcattattatgtt

SEQ ID NO: 107807 - DNA, 1033 bp, Homo sapiens
ttgacactgaagtatcagagaggagacatttgcagtttttaaagtctgcaggcccaaatgaattagttaaactgtagactctttattggtagatttgtctgggagttttcaaagggactccagagcagctcccatggagttccccttccagcaaatcagctatttccggaagttccaccctttacagctctagcctgtctcttttttccgtcaactaactcccgtctcaggcctgttacatttgctctccaaacattagactctgaatcacattgggcatttgtctgtctaggacagtgttttaaactgaaattcaggaccattaataaatgatgaaatcattttggtgggcaacaactaaaaaaaatttttaatgttttattgaagtaaaacatacagaaaagtaaacaaatcataagtacagcatgatatattttcacaaagtgaagatacccatataatcagcacccagatctagaatcagaacataccagaactccagaagtcccttgtgtcttctgttcactcctacccacttagaactacatataaatggagtcataccttttcttttatattgcttcatttattttgtgagattcatccatgtcgttgcatatagtgtcatttttccactctcatgctgtgtagtattgcattttaggcatataccacaatctctattctgttgaaggacatttgggcttctccagtttggggctattacaaatagtgcagttggtgtttttacaaaaaaaagaaatgaggtaaaaacacgtatgtaatatataataaagaatatgtctgtctttggaaaactttagttttaattgtatatatttatatactgggttctaagtcataaagttgtgttttttaacacctttattgagatatgtaattccacttaaagtgtgagaaacactgcataggtcactgtcattctgagtgagaaacagtttttcctttagaactcaactgtaagaaaggcacctcaggccgggcgcggtggctcacgcctgtaatcccagca

SEQ ID NO: 107808 - DNA, 1091 bp, Homo sapiens
aggactctatcatgcccagttaaaagtaaaagaagaagaggtacacaggttaagtgctttgttttcctcctctcaaaagagaattgcagaactggaagaagaattggtttgtgttcaaaaggaagctgccaagaaggtaggtgaaattgaagataaactgaagaaagaattaaagcatcttcatcatgatgcagggataatgagaaatgaaactgaaacagcagaagagagagtggcagagctagcaagagatttggtggagatggaacagaaattactcatggtcaccaaagaaaataaaggtctcacagcacaaattcagtcttttggaaggtctatgagttccttgcaaaatagtagagatcatgccaatgaggaacttgatgaactgaaaaggaaatatgatgccagtctgaaggaattggcacagttgaaagaacagggactcttaaacagagagagagatgctcttctttctgaaaccgccttttcaatgaactccactgaggagaatagcttgtctcaccttgagaaacttaaccaacagctcctatccaaagatgagcaattgcttcacttgtcctcacaactagaagattcttataaccaagtgcagtccttttccaaggctatggccagtctgcagaatgagagagatcacctgtggaatgagctggagaaatttcgaaagtcagaggaagggaagcagaggtctgcagctcagccttccaccagcccagctgaagtacagagtttaaaaaaagctatgtcttcactccaaaatgacagagacagactagtgagtagctagttctttctttctgatctgtttaagagtttttgaacctttctttaaatttatttttatagaaaaggataaacacattcttatacatattatctgggaacgcagggaaagtattatgtatcccacaggttctgtttggtcttagagaagcacagaaacatgatttaaattgctaaacctgccaataccattagaaaaaaaatcagaaatttccttggcacaaaactctccattggttataaaaggactaagaggtggagaactgttttatatattttatata

SEQ ID NO: 107809 - DNA, 1179 bp, Homo sapiens
catatcaagattatcccttagagaagccaaacgttagcttgtctggagcaaagtagaataaaataggagaaaatgttacttttcagtgttgaaaaccatgtcactaaaataagtgacatattttggagtttatgacttaaatatatgaacccttaagtatgatatacctttaatacatagcactcagtagataaacatgtaggtgcagagaattaatacctcttcagtaaaatatttaacacctgttatgaatgttaattcatttgtaaatctattgagtacatgttatagtatttgttccttgggaaacacagtttttttcttgaaatctgtaactaatgaccttctctctgtttcaggcttgaacatgacaagcagatttgggagtccaaggcccagacagaggtccagcttcagcagaaggtctgtgatactctacagggggaaaacaaagaacttttgtcccagctagaagagacacgccacctataccacagttctcagaatgaattagctaagttggaatcagaacttaagagtctcaaagaccagttgactgatttaagtaactctttagaaaaatgtaaggaacaaaaaggaaacttggaagggatcataaggcagcaagaggctgatattcaaaattctaagttcagttatgaacaactggagactgatcttcaggcctccagagaactgaccagtaggctgcatgaagaaataaatatgaaagagcaaaagattataagcctgctttctggcaaggaagaggcaatccaagtagctattgctgaactgcgtcagcaacatgataaagaaattaaagagctggaaaacctgctgtcccaggaggaagaggagaatattgttttagaagaggagaacaaaaaggctgttgataaaaccaatcagcttatggaaacactgaaaaccatcaaaaaggaaaacattcagcaaaaggcacagttggattcctttgttaaatccatgtcttctctccaaaatgatcgagaccgcatagtgggtgactatcaacagctggaagagcgacatctctctataatcttggaaaaagaccaactcatccaagaggctgctgcagagaataataagcttaaagaagaaatacgaggcttgagaagtcatatggatgatctcaattctgagaatgccaagcta

SEQ ID NO: 107810 - DNA, 5512 bp, Homo sapiens
tttagcagtgttatggtacaaagaaggttttgaccaaaaagtctgaagttttagaagatgaaatacaagtttttagttgggctatttttttaatgttataaaacatttgattacagctttttttttcttttttaaaaatagatcagcattgttgatattgccaacaagaggagctcttctgctgaggaaagtggacaagatgttctagaaaacacattttctcagaaacataaagaattatcagttttattgttggaaatgaaagaagctcaagaggaaattgcatttcttaaattacagctccagggaaaaagggctgaggaagcagatcatgaggtccttgaccagaaagaaatgaaacagatggagggtgagggaatagctccaattaaaatgaaagtatttcttgaagatacagggcaagattttcccttaatgccaaatgaagagagcagtcttccagcagttgaaaaagaacaggcgagcactgaacatcaaagtagaacatctgaggaaatatctttaaatgatgctggagtagaattgaaatcaacaaagcaggatggtgataaatccctttctgctgtaccagatattggtcagtgtcatcaggatgagttggaaaggttaaaaagtcaaattttggagctcgagctaaactttcataaagcacaagaaatctatgagaaaaatttagatgagaaagctaaggaaattagcaacctaaaccagttgattgaggagtttaagaaaaatgctgacaacaacagcagtgcattcactgctttgtctgaagaaagagaccagcttctctctcaggtgaaggaacttagcatggtaacagaattgagggctcaggtaaagcaactggaaatgaaccttgcagaagcagaaaggcaaagaagacttgattatgaaagccaaactgcccatgacaacctgctcactgaacagatccatagtctcagcatagaagccaaatctaaagatgtgaaaattgaagttttacagaatgaactggatgatgtgcagcttcagttttctgagcagagtaccctgataagaagcctgcaaagccagctgcaaaataaggaaagtgaagtgcttgagggggcagaacgtgtaaggcatatctcaagtaaagtggaagaactgtcccaggctctttcacagaaggaacttgaaataacaaaaatggatcagctcttactagagaaaaagagagatgtggaaaccctccaacaaaccatcgaggagaaggatcaacaagtgacagaaatcagctttagtatgactgagaaaatggttcagcttaatgaagagaagttttctcttggggttgaaattaagactcttaaagaacagctaaatttattatccagagctgaggaagcaaaaaaagagcaggtggaagaagataatgaagtttcttctggccttaaacaaaattatgatgagatgagcccagcaggacaaataagtaaggaagaacttcagcatgaatttgaccttctgaagaaagaaaatgagcagagaaagagaaagctccaggcagctcttattaacagaaaggagcttctgcaaagagtcagtagattggaagaagaattagccaacttgaaagatgaatctaagaaagaaatcccactcagtgagactgagaggggagaagtggaagaagataaagaaaacaaagaatactcagaaaaatgtgtgacttctaagtgccaagaaatagaaatttatttaaaacagacaatatctgagaaagaagtggaactacagcatataaggaaggatttggaagaaaagctggcagctgaagagcaattccaggctctggtcaaacagatgaatcagaccttgcaagataaaacaaaccaaatagatttgctccaagcagaaatcagtgaaaaccaagcaattatccagaagttaatcacaagtaacacggatgcaagtgatggggactccgtagcacttgtaaaggaaacagtggtgataagtccaccttgtacaggtagtagtgaacactggaaaccagaactagaagaaaagatactggcccttgaaaaagaaaaggagcaacttcaaaagaagctacaggaagccttaacctcccgcaaggcaattcttaaaaaggcacaggagaaagaaagacatctcagggaggagctaaagcaacagaaagatgactataatcgcttgcaagaacagtttgatgagcaaagcaaggaaaatgagaatattggagaccagctaaggcaactccagattcaagtaagggaatccatagacggaaaactcccaagcacagaccagcaggaatcgtgttcttccactccaggtttagaagaacctttattcaaagccacagaacagcatcacactcaacctgttttagagtccaacttgtgcccagactggccttctcattctgaagatgcgagtgctctgcagggcggaacttctgttgcccagattaaggcccagctgaaggaaatagaggctgagaaagtagagttagaattgaaagttagttctacaacaagtgagcttactaaaaaatcagaagaggtatttcagttacaagagcagataaataaacagggtttagaaatcgagagtctaaagacagtatcccatgaagctgaagtccatgccgaaagcctgcagcagaaattggaaagcagccaactacaaattgctggcctagaacatctaagagaattgcaacctaaactggatgaactgcaaaaactcataagcaaaaaggaagaagacgttagctacctttctggacaacttagtgagaaagaagcagctctcactaaaatacagacagagataatagaacaagaagatttaattaaggctctgcatacacagctagaaatgcaagccaaagagcatgatgagaggataaagcagctacaggtggaactttgtgaaatgaagcaaaaaccagaagagattggagaagaaagtagagcaaagcaacaaatacaaaggaaactgcaagctgcccttatttcccgaaaagaagcactaaaagaaaacaaaagtctccaagaggaattgtctttggccagaggtaccattgaacgtctcaccaagtctctggcagatgtggaaagccaagtttctgctcaaaataaagaaaaagatacggtcttaggaaggttagctcttcttcaagaagaaagagacaaactcattacagaaatggacaggtctttattggaaaatcagagtctcagcagctcctgtgaaagtctaaaactagctctagagggtcttactgaagacaaggaaaagttagtgaaggaaattgaatctttgaaatcttctaagattgcagaaagtactgagtggcaagagaaacacaaggagctacaaaaagagtatgaaattcttctgcagtcctatgagaatgttagtaatgaagcagaaaggattcagcatgtggtggaagctgtgaggcaagagaaacaagaactgtatggcaagttaagaagcacagaggcaaacaagaaggagacagaaaagcagttgcaggaagctgagcaagaaatggaggaaatgaaagaaaagatgagaaagtttgctaaatctaaacagcagaaaatcctagagctggaagaagagaatgaccggcttagggcagaggtgcaccctgcaggagatacagctaaagagtgtatggaaacacttctttcttccaatgccagcatgaaggaagaacttgaaagggtcaaaatggagtatgaaaccctttctaagaagtttcagtctttaatgtctgagaaagactctctaagtgaagaggttcaagatttaaagcatcagatagaaggtaatgtatctaaacaagctaacctagaggccaccgagaaacatgataaccaaacgaatgtcactgaagagggaacacagtctataccaggtgagactgaagagcaagactctctgagtatgagcacaagacctacatgttcagaatcggttccatcagcgaagagtgccaaccctgctgtaagtaaggatttcagctcacatgatgaaattaataactacctacagcagattgatcagctcaaagaaagaattgctggattagaggaggagaagcagaaaaacaaggaatttagccagactttagaaaatgagaaaaataccttactgagtcagatatcaacaaaggatggtgaactaaaaatgcttcaggaggaagtaaccaaaatgaacctgttaaatcagcaaatccaagaagaactctccagagttaccaaactaaaggagacagcagaagaagagaaagatgatttggaagagaggcttatgaatcaattagcagaacttaatggaagcattgggaattactgtcaggatgttacagatgcccaaataaaaaatgagctattggaatctgaaatgaagaaccttaaaaagtgtgtgagtgaattggaagaagaaaagcagcagttagtcaaggaaaaaactaaggtggaatcagaaatacgaaaggaatatttggagaaaatacaaggtgctcagaaagaacccggaaataaaagccatgcaaaggaacttcaggaactgttaaaagaaaaacaacaagaagtaaagcagctacagaaggactgcatcaggtatcaagagaaaattagtgctctggagagaactgttaaagctctagaatttgttcaaactgaatctcaaaaagatttggaaataaccaaagaaaatctggctcaagcagttgaacaccgcaaaaaggcacaagcagaattagctagcttcaaagtcctgctagatgacactcaaagtgaagcagcaagggtcctagcagacaatctcaagttgaaaaaggaacttcagtcaaataaagaatcagttaaaagccagatgaaacaaaaggatgaagatcttgagcgaagactggaacaggcagaagagaagcacctgaaagagaagaagaatatgcaagagaaactggatgctttgcgcagagaaaaagtccacttggaagagacaattggagagattcaggttactttgaacaagaaagacaaggaagttcagcaacttcaggaaaacttggacagtactgtgacccagcttgcagcctttactaagagcatgtcttccctccaggatgatcgtgacagggtgatagatgaagctaagaaatgggagaggaagtttagtgatgcgattcaaagcaaagaagaagaaattagactcaaagaagataattgcagtgttctaaaggatcaacttagacagatgtccatccatatggaagaattaaagattaacatttccaggtaaatgagtagtgaatttttcctcctccagaggtaacttcaagcaaagaaagtctctaaactatttctgtttccttttagacaatgggactaattttggcataaatgtccatggaagatatattctctctcacttctgacttttttttggcaaacaacaatcctgctacaactgcatgaac

SEQ ID NO: 107811 - DNA, 2107 bp, Homo sapiens
tttgctttacccaaaactagtataccacctggcaaataatggctactgaataaagttttgttggattgaactgaacttagcattttatcctattggattgtgtgtgaacagttagtgagaatgaagacgtgtctccttccacttatcatatgcttcatgtagactttatggatttagtagcgtgtcgttaatgctttattgatctaattcatctttaactgactactacactttatcatctaggagtgagaatgaatagcaagtaaaggttgtaaaacttttattaaactctagagccagtatttctaacttaaccattttacagttttccacttagatctaaatggaagcttatgcacttgtattagacgattcccactatttctaataagtaaagaacaccacaaattcagctcattatttaacccattcagagcacttctttgagaccttatccatgatgcttattttgcagttttgcaaacagtctgtatcctatccatgtggcttcacatggtttggaggtattatatgggttccattcctttgctctttcctgcagggatcactgaccttaaggttttctgtattggtttttgtgtctggcctcatagattacttttaccttgtatgtcatgttgttttcaactcaccttttgcactgacatttctaccactgtactcctttttcaagtaatcttgtgaaatgtctgaacatatatactgtcttgaattcccttgtctcatctatggtggctttcctatgtgccaggcactattccagttgctgggtatatagctatgaacatattggaggggaagacagactacaaacctgtttatacacataagaaaatttcagagaatgataagtattaggcttaaaataaaacagagtatttcaagtatgccttggagaagaggaacgcagaattggagtagtgagagtaggcctttctgaggactttaaacctgaatgatgaaaaggggacagccatgcaaagaggctaagcagagagcattccaggcagagaaaaaagcagtacaaatgttctcaggtgtgaatgaacttgataagtttgcagaagagaaaacagaccagtgtttttagagcagagtgaacaaaaagggggcaatacaagaagaggaggttggagaattagtagggtcaaagcatgagggttcctgtaggtcacattaagacatttggatacagtgtaaaaaatatatatatttttttcctttggtgtatctgtgttatcttctcagaaagaatataagcttcttgaggatattgatattgatgctcaatatatacacattgtcacagaacttgggttaaaactctgaagacttggattctaatcccagctccctgaactagctgcgtaacctttcgggttgtgtcatttctttgtttccttatatgatcattgaggagataggatagctcccttttagtgctaaaatttgatatctttatgaacattgaagaacattgtaagtgctatattaatgcaaaatatatattacaaacatagtaggattatggataaattatatgtattgtcctagaagttccagattatgccacagaaatagctgctttatgtcctgcatcctggcatccttctcctttcaaaccttccactatttagtatacttcattcaggttcattatcatcacctagtactgttctatcttatatctcatgtaatcatatcctcttgccacttctttaataaggctttcacctctcccaagctattttgtttattttttaaaaaattatttcatacaattcaaatagcttcacatgcaatcctgttttttcacacactccacatatatcttctaaagatatttattttgtgactttcagaaaaactgtcttctcagattactctcctagaggctcagaatagaactggggaggcagacagagaagtcagtgaggtaagtgatgtgttcttaatataaccagaacatgagctagattaagagaaggtagcttcatatgaaaatacgtccataattttctagtgttgccagagaagtacattacctatagagtaagatctattaaagagattcataatggttatt

SEQ ID NO: 107812 - DNA, 1036 bp, Homo sapiens
gaatttttattatacttggaaaacaaaaaacaattttataaatcttcttcctttcttaagaggtacatattcctttgcctctattcctctttgtggaacctctcttcatgttcattctccttcaggagagagaccatgttacttggtgacattaatctaatcttgtaatactatttgtttgtgaacctgaaaatgttctttcttatgctatagacttgggatttctatctttgtaatccaggcttcaatcttaaatttaaaagccaatgaacttgatatttgtgtgaaatattttatttctttttctaaatctttagataaaacacttttcttcaaagattacctaggcagataagtagatgttatttttaaagtattttcatggctggagaacttctagaagacaaaaatgctggaggctatctgggcgttagtgtgagaattttctgctggagaatcattaatttgttgtctttctacaatttaggcagtcactgaggagaatattgcttctttgcagaagagagtggtagaactagagaatgaaaagggagccttgctccttagttctatagagctggaggagctgaaagctgagaatggtatgtataaaagaaaaccataattctctgtcttcttatcccacaagtgcctctacttttatcactaattatgtataacatgtagaattctctgattccgtgataataaagatttagataatagagctggtaactatcaaagataatacacattaaacaattagagcatagtatcagtgtttacataagtataacattttgcaatatggactatacatgctgcaggatttctttataactcataatcattttggaatggtcatcgtatcctataggaagtatggcttgaacaggaccttaataagatgatttttaaaataggtaaaatgaagaaagaaaggacattctggtaataaatttgtgggatgaggtaacagagatcagtataaaggtttaaaggtagaaactatgttgtgagtgagtggtttatgctc

SEQ ID NO: 107813 - DNA, 1050 bp, Homo sapiens
ccagcctggccaacatggtgaaactccatctctactaaagatacaaaaaaaaaaaaaaaaaaattagccaggcatggtgacgcatgcctgtaatcctggctacttggaaggctgaggcaagagaatccttgaacccatgagtcagaggttacagtgagccgagatcgcaccactgcactccagcttaggcaacagagggagactccgtatcaaaaaaaaaaaaaaaaagtgcctaggcctattttattttacttttgaaggaagtgatttactgaggtgtcctttggttcttgagaacatttaacatttagctaataataatgttgtcattggcatcataattttaactaaggaaactaaactagtaaacagcatacagtgtatctttagaagataataataactacatttcagacttgaagcaaatattacatttattttttttcttttccttagatcagctccagcaaaaatccaaagaaattagccaatttctaaatagactgcccttgcaacaacatgaaacagcatctcagacttctttcccagatgtttataatgagggcacacaggtaattaaatgtgaacttcttatgaatattaactgtttgtctttgctgtatctgtacttcggtgctctaatgaggatttattccagagagctatataaaccttctgttttttctgcctgaaaaaatacttttttgaggacaattctatttgaaaggaatcatgaaaggcattaatgcagtgtttcaacaataaagaatgagaaaataatagataacaaataccatggtctcagaagcctttctgattctaaggtcttaacaatttgtatcggagatgaatcattacttttgcttctgtagttaattttcccagttcggaagtcttttttttttttggtaaactaagatttgatcaggtttagtgaacacgagtcagtctaatcaaacttaaaagtctactatggaaatcatattgttcccattaattaattaacagtaaaaaagtatataatggccaagtagcttcttattggccagt

SEQ ID NO: 107814 - DNA, 1078 bp, Homo sapiens
cagcaaataaatacattggctgtttagggctgtccctttctcagacccatcagatttcactcttttgctgccttctttttcttacacaatgtaagactctaatacaatgtagttcttgtgggttttggtggtttgtccttattagcttatattttagggtttttaggacggtctgcctaatttaactgtaaatgttatctgtggtttttttggttttactatcttgtgctgtctctatgtgaggagtcagagaaattgaaaaattgccactactgcttctgtcttcttctgacaaataaaattttgataatgcatgcaatttccttttgggttcaatggaaactagaaggaaatatggtaggcatttaggttaagcaagaaagggaggtcaaagaattaataatgctcattcttttgcttaaataattttttttccttctatgtcttcggtttgataagagttctacagagatggaagaatttgtaatgatgaagcaacagctccaggagaaggaagaattcattagcactttacaagcccagctcagccagacacaggcagagcaagctgcacaggtagggacctcacaaaattaggataaagagctatgaagtccagtgggttattacgcacaagtcaattcagtgagtcactttaaaaaatcctagtagataaaagtatagtagcatgggtgttgcactagaaattagaaggatatgtagtagaagagattaggagatgtgtggtaggtaagtgtgtcattagggaacaccagaaaacctcacaatgtgttatttaccttgatgaattttctatagcctaattgatgactgtttcttagttctgcatgtccagaaacttaattttaatagcagacagagattcagtcttttgggaatggactcatgctgagttcaaaagagaccaataagtaaaccaaaagaaataaaaataattaggttcattctttcccaaaataatatctatcttaataggaaataaattatagttagattacttagtgagcctgtaatgagaaagtggtgtaggtcatgtgattttatgttaaatggcacc

SEQ ID NO: 107815 - DNA, 1090 bp, Homo sapiens
cagcctcctgagtagctgggattacaggcacgtgccaccacacccggctaatttttgtatttttagtagagacgggatttcaccatgttggtcagactggtctcaaactcctgacctcgtgatccacccgcctcagcctcccaaagtgctgggattacaggcatgagccaccacgcccggcccctgctgagggttttaaaagccaaataacattttatcacaaaatgtaaaattaggcataatcacgtaaactaatgctatgcatagtccagttctattttgatttttcctatcaaagcattaatatgcttctcattttcatggactttatggactagcagttgacactgatctgaatatgtagcctacacagtggttataaaagtaaattgattttggaataaccttagatttacatacaacttgggaagattagacagacagttattgtatacacaaagcatcctctaatgttagcattttacacaaccatggtagctttttcaaaacagagaacataggtgcaatgccataaactaaactataggtagacttcattcagatttcaccattttttccagtaatgtccttattgtgtttcagaacctaatccaggatactgccttgcgtttatttatttatttatttagaggcagggtctcactctggcacccaggctggagtgcagtggtgcgatctcagctcactgcaacctctgtctcccaggttcaagtgattctcccatctcagactacccaatagctgggactacaggtgcatgccaccacacccggctaatttttgtattttttagtagagacggagtttcaccatgttggccaggctggtctcgaactactgacctcaagtgatctgcctgcctcggcctcccaaagtgccaggattacaggcgtgagacactgtgcccggcctactttgcatttaatcagcatgtctccttgtcttctctaatctgtgactgtttcttagttttttgttgtttttcattactttgacagttttgaagagtattggtcaggtatttttagaatgtccctgaatctaggttttcccagtgttttctcatgat

SEQ ID NO: 107816 - DNA, 1033 bp, Homo sapiens
tcctggaagagagccccaactcttcagttctgagaattaataaaggtccagactgcctcagctctttcagccctcgtaggcccctggcaggtacctgttattggaatgggaagacccctccttgtatcaactactgttctgtaattggcttggcgcatttgccagtgaatgcccactggctcttttgaggtcctcttggtgttgtactcctctggcttccctcaatttcctcccagttgaacaccagtgacacccagatcttttgactattggcggtttgtctatatccacgtttattttggggtttgtaggaaactttgttaagtagttttttggtaaaggctgtccatggatcttttgttacctagttgctttgtctgtttttatgtgggaataaaggaagatacaaaatccatggggccccttgctactcccatcttctcagaatcccatcagttggttattttgttttctttgttccaaagtggtctgaaaaatctgaagataaagtgattctgtttgataagttaggttccattatgattttctttgattagcagaaatctatatgtttaagaaactctttagtgatggtattcatttccttcattaaaagttaaccaaagaaaatatgatctctaaagttgaaaagaaagtttagaatctgtatactgctgaattgtgattttttaatcctgactatagctgtggttctcatatcttgaataaatagttatatatggccctatgtactcatgtatgacactgtgttgcccttccagtatttagatatgaagttatatatgatcctgcgctgccttcctagggaacagttcactttttctatttctgtctcacgtatcttttccaagtgatgtgctacttagattacccaagacaatctattaaaaaaacaggtatctctcatcacttctttcttaagaaccatggctgccctaaacactattattatccccagtagaagaaaactgtagcagagcctagtttcatttaagtgtttattttgtacaat

SEQ ID NO: 107817 - DNA, 1489 bp, Homo sapiens
ccttggacagtatggcccagtgtgctgtaattcttattcatacatattcaaattatccttttagccaatgggaacctgtgtcctttgaaagcttcctatcttgtatgacaagatgtttcaggatcattttgtacatttccactttagaaatggaattagccatttctctaagaaaaccttcttttaaaaacttttttaaaaatgggaaagagtatttcaagaccccaatctaggcactagagatattcattgcttctcagtttgtcattacttttaagcctttttggtggacagagctaggaaaatatgtgaacaaatataaaatactgaattgtcatttcacactgagtgttcctattcagattcaaagattagtttgtatttcggggttcttaatttcttctgtattacatctgtatcttcttttcataactgaaaatacagaattagtgtatccataattatcatttgctttaattctacatttcacatatagtaatctaggagtgatgatacgaatatcaccaccacaaccactttagacgagatcgggtgtgttcaggatggtatggccgtagacaacaaccacttttaattattgaaaactgtttaaaaatattttttattttttgcatatgctattcacattcttcccgattttttttcatggttgtcctatatattgtcagagcatataatcattacatactatgctgtctctcctccagtctttacttagtcttaattctgttagtaaccgtatatttaatgctcaccactagttcttataatgatgtttctttagtcatttggattgcctcaagttttgcctctagtaaattctttaggaaaggcttaagggaatattcatatttcatgaattttcttgctcgttcataacattttgtctgtgttttttatatctaaagtttgtgtttgccagaaatagaatccttggctcactttttcttttcttgaatatcttaaatttgtaactcattttttttttctggcaaaaacattgctgttgaaaaatctagtgcttttttttctttatcttactggtcatatgatcttttagcctaaagcctaaaggatttttttaagtccagtaattttactagagtgttttgttggtcattctgagttgacattctgaggtacattgtgggctctttcaagatgtagtttcaaatctttttaaaaaaaattttcaaataaatattcttggattatggtttttcatatttgtgctgtttctttgctttgcttttcttcttcagggaatcctgttattcacattacttatcttcaatatttatctgtttctcgcaaatcctatgtaactcttaatttcttacattttttaaaaataaacaaattattaggaattatttcagatcactacagaaagtttactacagaaaatttgcaaagatagtgcagaagtctggtgtatcctttgcttagtattccctaagattaacat

SEQ ID NO: 107818 - DNA, 1856 bp, Homo sapiens
ccagaggggccgcgggagctgcccaagcagctacaccggagtcccctcctcgccccgcctctcccggattcagtcctggatccggcccttcacccgcctccttcacctaccaggcctagttctagtagcccacaagcctcggcctctccggtgggccttcggggtcaccctgcgcagacttggaccacttgctcacggtctgtcccctccccggtacgtttctcctctgggagcgacggggaaaagcgcctaggtcagtcctgtccgcacggccttgttcctggagcggcctgcctaagtcggcctccgtacgcagccgctgacgtcggaaagaacctgctgggcccctgtgctcaggccctaaacaaacttggtgtcccgaaggggaggcgcgaccaaaagaaatcaaaggtctttagggcggagatcacagaatcattggagatattaatgcaaacggaggcctgtccaataatcctgctaatgctaatgggttactggaaagatgagaagagaggaaagatcccaacgatcccgtcaacacgaaaatcccaggaatcagaggtgggcaggctgttagagaaaaaggaacctctaagagagttctcgaggaaaaataacttggtttgatggtgtggagtatgtttaatctgcacaaccggaatgtgaaagggagggtgagtcctttgaggaatgaggaatatatttgtctgacttatttaaagagctccagttggtctatggggagcggacagtttgagagtgggacagggatatttacaatcatgggtaagtactttcacttttggagatagttggaagctgtctgagcatttaaaggacctttttacagttctgtgcaagatgcaagcaagtggagggctctttacataagggccagaggcctttccaaaagcgtgaattgataagatttagatggtcagaatggttatgaaggggcaaactcaggaaatatcctattggaaaaatggcaggatttggttttggaatagatgcaggaaaaagttgaagagtactcaaaagttgcaggcattgtacattaactgcttcatagcttttacttctcatcccttgaccacagaatgaccatttaatgtttttcttttcactgcatcaatattttttactacctcagcagcttccaaaccttttaattgcactccctatcagtaaaacatttttgagcatgcatctccccaaatgttgtgtgtttaattatttatagtgtatgactaccactgtaaatatgttgtgtataatatgaaatatgcaaaagtataaacgtaaaagaatgaagtttttaaaaagccttgtccacaccttgggacctcccaacccaatttgacaatcacgtaaagatacttccttgtttttcaagaaggtcgttggcatttctggcatccagactctgggatgcagcctttcttaaacatgatctttagaagatttttttcaaccttctgcttgagttttataggccccctttctttttctccctttgattaatggattaattaaagggatgttgactttatccttgtttataaaataaatcattcattaatttctctaggttaattactattaggaataccactgatcattacataccagtctgtggttagaaaccattatgtaaaaggagactaagctctatattgctgtatttttaattaagctattttaaaatcagctatatgcttttgataaaaggaaatttaatacagaaggatacaatgtaaaaaaagtctttttcttttctatctactgatctacccatctccattccccacttcccagaagtaagcactgtaaataatttcttggttatattt

SEQ ID NO: 107819 - DNA, 1052 bp, Homo sapiens
aaatttgtcccatataatgcctattacaaaatttctttttaccagagtccattctgaaggacatgagaaggaattcagacagaaatatactgtctccttggtgtttacaatcatctaggctgtgtagaattaagaacccttttttctatagacatagaacctgtcctctagagatcaagtgccttgcccagaatcatagtttataagggactagaattgagactagaatctattgcttttttttcctcttcattgcttactgcacaaataatacgtgactatatccttgtaaaaagcactacagaagactgtatattttaaaagtcactgttctcctgcattttgtcacagtcccattcccctccttatacacactcagagttaatcattattgcaatgtgatcactaccatatgttgtagtgagaaaatagttctattagttaggggagaaaaatcacaaaccttcaattttttttcttccaggcgcttaaattcctagcgaagtgccgtaagaaaaagaaactatttgctccttggcgaggactccaagaactcactgatgcacgccgagttgaactgaagaaacgagtggatgactatgtcagaagacatttggtatgaagcttctgtaccatatcagtattacattattccaatgcatgatattgataactgtacacacacacacatatattgtgtgtgtgtgtgtgtgtgtgtgtgtgtgtacatttattgctggtataaggtaatgcattggctttaccatagaagtaatggtatatctttttctagttacatagccatagaggtatagtcagtagtgaaggagactctgctttaaatcagttttttcccatactatgtcaataagacttgttcattgcttcttttgcaatagtactgtaaaacttggactattttgaaccttccagaaagagtatatgtaactgtcaatcaatgattattcattcttacatttgttggactactaatgtacctccagaagccaataagatatagcatttgactatttgcctcttatgatcttacc

SEQ ID NO: 107820 - DNA, 1052 bp, Homo sapiens
cattagatcatcagtatattctcatgtcactaaatattcttcgaacattttatgttttcatagttcatagaatcccatcccatcaggtgaatgaaccagtatctgtttatccaactcgctgttgtgagacaaagtttgttttcaacttgttactgttgtaatactgtggagaacatttttgaacataaatttttacatatatatctgattatttccttaagaaaattatttgtaatagaattaattggtcatcacttttaaggctttttatttatatatttcaaatatttttccagacttttaatgcatatattcaaatatttctacagaaagattgcacaacagcagcagatgacaagctattttatcataccttattaacactagaaattatcttaaaattttttctgtttacatttatttgattactagtgaggttatgcattttttcatatgatttatgaaaattatgtataacacactgtttccatcacagatccaaacgatcaaagatgttgctggagataaataggcagaaggaagaagaggacctcaaattacaattgcaacttcaaagacagagagccatgagactttcccgagaattgcagctgagtatgctcgaaatagttcatccaggtgagtggcagtatcaactttatcaatataagaatatttaggttatcttttaacaaaccaacttttctagctacgtgatgatttttttttaaatttggacttttgtcctttttctctgtttttcagataaactttattagatcttctgagttcaaaaacggttactgttttttcaattcagacctattagttgacgatgaacaatctccccaccagttttttttcttatccttcagataatttagtgaaacataaaaatgtatgcataaagatagctgttagagacacaaagatacttcttgaactgaaacaaggagttggaatattattacattctgccatcagagtttaactcattccttagtacaaatgttgtgacatcttcttgccgcctttgacagactaagctgaaa

SEQ ID NO: 107821 - DNA, 1050 bp, Homo sapiens
aatctttttcaactaataatgactaataataatctgcataagtgcttccacagggcaagcatttactgaatatgtgtctgtagtaatttatctttaaaatgtctccatttaagtatttttgttcaaataaaaaaaatttatctctactttttgatttaccacagtgattccatcccactcctttttttttttttttattaaagagattgtctagacagatttttttttttttatcagataccacaattgagcacgtaagaattctcaggagggaggaatatcttaaagatttcaacctggaattctctgagaaaaggaaaaagaaaaatcatatgattaatcttgttttcatttgtttttaagccagactttttagcttcaaattaatactgattagataacaaaatcatattttattattataataatagttgtaccttttgctattccatttcaggactcagacgtctactaagtaaacaggaaactgggactgaattcagtcaagaacttagacagcttgttggccttttaagcccaatggtctatcaggaagtagaagagcaggtattaagttacaaaaaaaaaaaattgcatgatatttgctgactatattaaaccttagttttccttaaatgttcctcactttctttctcttaagatttcaagcaaaatacccccaaaacagaaatatctttaaattttttactcaggaggttgaggcaggaggattgcttgagtccaggaattggagactgccctatgatcacacccatgagtagccactgcaccccagcctggtcaaaatagcaaaaccccatctttaaaatataatgttacaaaattgtatctctccgccattcaatctgctggaaaacataatttcaatctcccatttacatctgtttataaatactgccacatcagtttcattcatcatttctcatgaaagccccatctctgatgtttatcttcttttatctataagctatttaaacttttaaaactgtttttccaaaaaaaatctctaattgtagcaaactgtattta

SEQ ID NO: 107822 - DNA, 1006 bp, Homo sapiens
tttttcaacaaaaattctttattgtcttggtaacaaaagaagcatactaaaaattctcaataaggcacagtgtctctagaagcttgagcattcaacataaacttctaattaacacgaacttgtgctcttatttcagccattgctgtgtgggcttggagccaggagaagatgcagaggaattttacaatgaattacttccatcagctgcagaaaattttctagttttggggagacaattacaaacatgttttatcaatgcagctaaggtatgtgtttatttagtcttttgtagctaaatcagtttaattcttaagaagctgttctgttattttttaaatgtgcaatatttggctgaaagtacaattaaagtagtgaatttaaacattttcaaagttacaaccttccaaaaatcatctctatgtttgaaaaatttttaatgctgactgaagcttgccatttgattttttgaaggatctgccttgctactttacttgttgggcagcacccatagacaattatttccataacatctttctaaacatactttttacttaaattaacagtagaggaaagtatgttctctagggctagggcttttctaagtagctccagtagtgaagaataaaggtgaacttcctatttgatctctcatatcttctccagtcaaaatattcaacccaaacataggggtcttttcaagtatttcttggttgcattatgctagatgctatacatgtgctctttttttgacccagggatttagaagtgtgttgcttaatttccaaatatttgaagatctactagatactttattgttatcaatttctaatttaattatgttttggtcagataacattctctatatcatttcaatcctttggaattttttcagacttgttttatggccctccgcatatgttttatctttgtgaatgttcattaaaagaaacttttgtgggctgggcgcagtggctcacacctgtaatcccagcagtttgggaggccg

SEQ ID NO: 107823 - DNA, 1040 bp, Homo sapiens
gctatgatttattacagtgaagggaaataaagcaaaatcagcaaagggaaaaagcatattgggggaaatcaggtacaaacttctgagttctctcccagtggagttacgtaggatatgcttaattcctccagcaaccagctatgacaacatgtttgaagtgttgtctaccaaggaagctcaactagacactcagtgatcagaatttttattggaggatggccacataggcaccctctgtataggtactctcgactggcatgtaccagaattctaagactcctggaaggaaggcgggtattcagcatgaaccacattgtttttcataaacagttttaggcacagggagccactcttaccagagaatggcagaaaccctcctgaaatctaagttctagatgccagtcaaaggccaaccttgtaagcacacctttgaaagtatagtagtcttaggcctgtcatgttagctcttttttgcagttcttcttgtgtgattaaaggaagttaattcctatcctagaattattgtgcagattagagagagaatgtgaagctcctatcacagttcctgactcttagtgagtgcacaataaacaatacctgctatagctgttacatgtgaggtataggaatcttgagctcttttacactggttagaaaaaccagttttctataaggaagaaatgaaaaaatctacattctgcctctcaaacaaggcaagaaaagctgtttttatttatattgaaattatatttcaaacattatttaggtagtgaacatttcctggctttttgacctttattctctgattctgttaaaatataggtaataagagaaatgaagccaacaggtacagacccaaggatcttatctatagctgctgaagttgcaaaaagccctgagcagaatgtccctgttatactgttgaagttaaaaggtaagaaaatctttttgtgattagatagcattttaagtgaaaaatggttccatcgttggtacaattttaacatttcttttaaatttgttcagagaggtcttaacac

SEQ ID NO: 107824 - DNA, 1033 bp, Homo sapiens
ccttcccgcgtcgcgacgcacgctgccccggaaggccgcggcgctgtagtgcggcgtgggagccccaggttctttagtggaagaacgcgaagcgaggatgaggtaacttatctgaggtggtggctggggagggagagggccccagggcgcctaccaggaggccaggaccccaggctcctggacgaagtcagccggcttgtaagagctcttaacgggagaatcggcctgccctcacgcccactctgtagagatctggtgtggaaactgaggcctggggaggtgcagtgtccaggcacagggcctagtgtcttatccaaggcctggtagcgcgaaagccgggtctagaatctggagtaaaggagcccagaggccccagaatctcggtccttagacttgaagcgacgctgttacctcagtaatcgttttctgacctttttgtaccagaggaagtttcttgtggtcctaggactggagaaggggatgtgtagtggggaggagaaagaggattcggagatagcaactgcagacatttaggatcagccgcaacaggatcgcactgaatttccttttcatttattttcctcacagtgatccgtggaggcagtaacaggcgcggcgagggagaagtgattcccgaagaatcaaggctgggccggacccggtggcctggcaacagggtagtagccttaaaatagataaataattgtctttttgtgtcaaatttcatgaatttaatgtaaagatgggagaagtgttgaattataggagaaacactcgagaaagtttacagatggtttccataacaggtggtttttcagggtaattacgcaatccaactgcactccctcaccttctgccttaggcacatttgtcaattgattttggggtaggtggttatgtctccttcaacctgtctgtgtaaatcctaccctttgaaggtgtgccgaagctgtttcatatcgtagttaaatgctttaaggcagatggtggctctagtttgaacccctgctttatacttaacagtgtgactttg

SEQ ID NO: 107825 - DNA, 1033 bp, Homo sapiens
gcatgaccacagccaacacaggctgcctctcattccaccacagagggtgcctcctccctgttttgcccaaattacactgtgggctaggtggactacctcttgtcagagctaaagaaatcaagcgagtgcagagggcaggggagagttcgctgcctgtgaagggccttctcaccgtcgcttcggctgtcatcgcagtcctgtggggtaggccaagcgaggtcacaggagaaaatgaggctcagcatgattaagcaccttgcaagccatgagctaggacttgaatgcaggctgttgtggctagagcctcaccttccttcacagctgctttgctttctttacttagcaacccatttccataccccaaattagaacactgggcctgacagaagacacttgttaagtcagcattgcaaggccctggtatatatgaggttgggaccctctgagacatcccctggaaaggaccattaaactgatttttaaaaccctgatattccatatatgggccaaaacattaagattctgtgaataggcaagatgccaatgggtgccagacatagttaaaaggggaacacagaaggaagtaggcctttagggcccctagaaacagatcttttgtatttttttaaagaagtgactttaaaaattatttggggctgggtgtggtggttcatgcctgtaatcccagcactttgggaggccgaggcgggtggatcacctgaggtcaggagttcaagaccagcctggccaacatggtgaaactgtgtctctactaaaaatacaaaaaattagctgggtgtggtggcgggtgcctgtaatccaagttactcaggaggctgaggcaagagaatcacttgaatctgggaagaggaggttgcagtgagctgagatcgtgccattgcactccagcctgggtgacaagagcaaaactctgtctcaaaaaaaaaatttataattaatacatccaaatgacagcagtcctttaatgttgccactttgcaaagatatgttgccattgctcaaaaacattaat

SEQ ID NO: 107826 - DNA, 1029 bp, Homo sapiens
aattagcaaattacctgaacagtttctgaaggatggaaatccccatagtagctagtccctgctcttattatttttttttttctaaaaacgtgaaggtaaataccttccactactcccactcccagccacctttggctcaaaccctgcttcattcttactaccacaggaatgcattagtattctcctctgtttttatttctgtctccaggcttgttgtgacttcctgaagcccttgttttctgacacttttttgcctatgcctgcatcatttgagatgaccctgtcaaatcagtccttagatcctttaaaatattaacatatctgaaaactcttcttactctgacacccctaaaatactctttatgtcaccaataaaaattagagcagatttacaatacacatcatgccctgagggggagttttttaaaagcactttcatcatttttccaagtctggggtaagcttatttctgggaaaggtagtgggtttggaaaatagcgggtaggaaaaaaattgtagatattgacgtagaaagagaaggaaacagaagtcaaagttaggtccactggtgcgtgaccttgcatttttgtttcatttcctcaataaacatttcttgacaaacagataataaagaattgcagatattaccaccaacctagcaggagcaagtctgtaatgctaaggttccgtggcatttactgtgggtgggggagctggaactgcctgccgctgcacttcacacggaggctgccctgatgcctttgactggattttaaaccctttcaggacagaagagggtcttgtttctctttacatctcctcggtgcctgacataatgctggacccacaaaagggctttagtgaatatttattgactttgctaaacttgaacataaatattaaccattcattttaaattccttgtagatgctggatattagacatttgtcagatggatagattgcaaaagttttctcgcattctgtaggttgtctgtccaccctgatgatcttataagtggaagctgga

SEQ ID NO: 107827 - DNA, 1009 bp, Homo sapiens
gatctcaactcatcgcaacctctgcctcctgggttcaagtgactctcctgccttagcctcccgagtagctgggactacaggcatgtgaccttatgttttaagggcaggtggatgaattccatgggagcagagagaggctggggtgactctgaaaatgagacaaaggaagttggaataggagatggggagtagagccggcatgaaaatgatggtcaggagtctggctgctcaaaatgtggtgtctggtatcacacagattctcattagaaatgagaatctcagaccccactctagacctgcagaatcaggatcttcgtgattaacaagagtcccaagggatgaatagtcttgggaaaaattgagacacttcactgtgtctcacgcccggagcaggaagggaaccttttttttgtgggaaccccctattgctgtgtgactctagtgtgccctctctcctcagcataccaggcagctttatccctgggccaggacccatccaatgactgcaacgacaaccagcgggaagttcgcatagtggcccagcggcgggggcagaatgagcccgtgctgggggtagattaccggcagcgcaagatcaccatccagaaccgtgagtgcgggggaggtgtcaggggaactgggggtggggggaggtgcagacaccaggcctggcaggctgagtcagcatgggatttcccatttctttctgctgcctgttggtctacttggtcactgtcattgtttgaggaaagtgccagcttcatagaatgtgctgcaccagctgaagtgacttccctggaagttggtctctggaccagaggttgttctgttgctatctatagctttggctaaaggtctaggggtgaatggttccctttgctttcctgagattcagggctaagttgtggatcaggtttctttgattccttccacaaattgctctcagggcctactgaaaccccaggtccctgagtttccttccggctattcctgttgttcacatggaagg

SEQ ID NO: 107828 - DNA, 1013 bp, Homo sapiens
gacgagaagggcagtaggctgacctaacgggtttcgtaggcctggttagggagcttgaactttatccttaggaaacgggaaaccattttaagaagagacatgatgtgaggaaaaaaatatattagcagtgtcacttctgtacaaatgtggctttattttgatacaatccttatattgttgttggatatgtcatcactgttaatgcactgtaaattcctgggagttttcctcactcctttcttcctatgtccctctgaggctgctgagtgcgttctcaccccaccccacccatagcctgcccaggtgagtaagaacccagactctgtctgtgagctcctagccaggtcaggcaggatggcaggcaatatcttttgcccatttgcattgtttttcttacccatgagcagagtaggtcaccttcagcattttctcctgctcttggctttagggtgcctgtccttgcttgtgacggtccagcacacagaacgctatgtcaccctgtttgcctctatcatcctcaaatgtgactacaccacctctgcccagctccaggacgtggtggtgacatggcgcttcaagtccttctgcaaggaccctatctttgactactactcagcgtgtgagtatccttacccccttggccctctgtgggtcccagacacctctgtgacatactgcggttagggttgagggattatttaggattacaaatcttggtagtgaggagaagacacaaagatcacctaatgtagttcctctgttttatagataaacaaacggagcccaggtagatgaaataatgtattcaaggtcacatactagtttattttaaaattttttcctgctttgttctcaaaaaaatttaaagaaacttaaacattagggaaaagtcctgcctccctgtccattcctggttccatgccaatgtgctgagctgatgatgcaggcccgcctcccctcacccccaccaccttagaatgcaggcaagaagactctacactcagcacaaatga

SEQ ID NO: 107829 - DNA, 1019 bp, Homo sapiens
tctgagattagtgtgtggagacatgagtcactaacctgggtgaatgactttgggaaaccccaagcatctgcccctcaaccaggtcttggcctctcccccggtaaccaaaaggatgttaagttcaaaccacctgagtggctatttatttcacttagtagtttatcaaaaaaaaatttaaagattgatattttcctcttttgaataggttgtggtgaaacatgggactgtcactggctatttatgggaatatacatttctttcctgaagtatctattcgaatagaaaaggtttattccctttaactcactttgagatatatattctactggaataaaagaacgcatgtgaagacgtacttatataatcatattcatttcagtaattaatgccagcattgcttataatacttaaaagtcagaaacaacctaaatgtccataatttggaaaatgtgtaaataaaagtggctcattgatggagtgaaatgttcatgcagttactaaaaaaaaatagatctgcatatactgatatacaatatatcattagtttgaagaaaaagtcacaaatcaatgtacataatatgattaatttaaaaaaaacaacataggaaaagatgtgaagggatgtagaccaaattgtcaacagcagtacctctggaaagtggaattcatggtgagcaaggaggaactttttacttgataccccctccactgtttgaagtttctcacttatttattttgtattaacaaacaaaaaggaagaagagcttctgtacaaaatgattaaaataaatttgtgaatgtcccttaagtgcgtgaatattcctcaaagggttaaatctcaaccatttagaaaacttatccagaagacatggtagtgtagtggaggtctaagcttaaatccagctttgctactttctagctgtgtggccttaagcagattacttaatctctcagaattttcctcatcaatgaaattgagagaaagtaaagcttatctcatcagtttcttgcaaaggtta

SEQ ID NO: 107830 - DNA, 1052 bp, Homo sapiens
tgcttaatagagtgcctgaacaaagtgagggaaagcttaatcaatattagctagggtgataatagtagtcaggaattagagccaggtaggattgtttaaagctaactttaaggaaacaagtttctctattcctccttcccctatggctaagaaatgtgagctatagtaacaggtgattatcaggttggaattctgaatctccttcttactagttgtgactttggatggattacttaaactgcctttgcctggaaaacaggtgaaattcctgacaagccaactccctgtgccctctcaataaggccaactattgttgggtggattaaggtcaagcacagtgtcaatgacacgctgcaactgtgatatgcactttggaaaaccctgtactagagtgtgttcattttggtccatcaccttgttctctcctgtctctgaagaagagtcaacccaattctctgattagcctccaagttcccacaattgcaaagtgtgaggcagtagtaaaattgtgtcatatttaggtatttgctggtcactgtggcttggggcccctaatgaagcttctgaggccagggagtcttgtgatattatcacagtccttgtgctctgagctgtgtagagatcacttgtcagaagtaggtgtgtgtggtcttcactcaggaaatactgggcataagtccttctctactcccccaccttttccttaatttttaagccaaacttcccaaagtgtctgtcaagatcaaactgaagatcaagcttcctctcttgctctcaatatctatcaaagcagtggtttctgattttttttcacagctcccagaaagatccaagtacattgtgacatgtatgcacacatatacagtttataaaatggaagcaaaatgatcacaaaaattttattactaagttgaataaaataataacaatggatattacatattatcttactgatattaaaattcatttaaaaaatcatccccacattaacaatatcacaagtgatatgtgaatatctgctccttaaaacattaaaataaggctaaagtaag

SEQ ID NO: 107831 - DNA, 1211 bp, Homo sapiens
ctaaatctgttgacttaggacaaaaatggtaatagccttttggagcctactaaattgaatttagttccaggcctgatttacgcaggataactcaatgacttttgtttctgtttcaatattttaggtgtttaatgaacgctgccgaattcacttcaagcctccaaagaatgaataaagagagattcttttttttttttttttttttttttttttaaggactgggtcatctcataagagctaagcatgacagatatcaacagggcgggctttctaggatgatttctgagccaacagtccaagaccttttgttgatttcagccccacttagccaagacctcaagtataaataattctgataattatggagaaatcaactgctattttatactgattctgtaaaaaaaaaaaaaaaaaatttttgtaactattaaaataattttctgactcagtgtacatatttatttgattgttttctatgttgagacagttctctttttatttatttattgaatttttagtttctatttttttaatatcctgtcaggttgcaagacagttctcataagataatttgcatgcactttcaatatctgatttgtagtgtattttttaatttttataaatttattggcatggatgtggacctttttggttattgataagtttattccttgatttatctttgtgggttgattataaaagggcagtattataagctggacaatgcccaaagaagttttcttttagtaccttaactgatcttattttcagatataaaaactaatttttggtggaattctttcctggacagtatttccatggtcatggaaaaggaaagcagaaattcaggaaagggaagagcagggaagagcttgcatgacagcaaatgagttagtaacaaacctgctgtaattacaggatttggtccttgcaaaaaaaaccactttctagtgtatggagtggttatgttactagttttctgttgctgcttaacaaattaccacaaacagtatcttacagttctgtaggccagatgggcagatttgactggaattttttttgtttagggtctcaaagctgaaatcaagctgagtcccaggctgggctttggtctggagtctaggggaagagtctgctgctaagctcattgagttgccagattgttgcatcgtggtcctgaggtccccatttccttgctgactgtcaggtac

SEQ ID NO: 107832 - DNA, 1054 bp, Homo sapiens
ttacaggcatgagccaccgtgtccagccggcatatagataatttatataaaactggtgaaagtctagtaattttggagtttgtatttcaacgcccttgaaggtgttgacaaaggaaactgcagggcaaaggctgttaaattggaaactgaaaagtcactgtttgcagatcaagtcaaacaacagagtgactcattagtggagagcaaagttcaaaactctactgagtgtttgggaatgattgtgacacacaatttgctcagccttgagatctgcccttgtgtctttagggcccagatagaatcaccaggatgaccactgcaaggagggtttagaaaccaatcagtgagttgcatgaggtttgctttctagcttgataacatatagggttgggggtaaccatggggtagtacataagcaaataaggaaatgtgaattttttttttcaattttcaagtttgctatgaagattatggaatcagagagagctcttggagatggtacagctctacctcttcattttctatctgaggaaaaagactcagagatacttgagatactaactgacacccccaaagccacaagctagtaagtggtagaactgggactttaacccatctcttctgaccctgcattcagtcagtttctttaagttgtgactaatagtcagatactttagtgagtatatttcatttatagacagatgccagtcaaaaaatccccactagtttacctgaatatttaactcaaaaaaagcaccttcgttgctggacctctataactgctgtcacatgttagtggccttaagtttacctgttgaagacctacagtctcaaagacaactgtctcaaaggtgacagtttgttggtagcactgataaaattgtattagaaattggctgtaatatctgcaatgttgtagaattttaaaaaataatccaaaggcagacagctctgaggaaataaatcccacctaccttggtggctttgtaaccttgtgtattaattgttctgaaaagtctgattttgaatctgtaaaatggagttgatacctaat

SEQ ID NO: 107833 - DNA, 1105 bp, Homo sapiens
ttataatttctttcacttgttgacaatgtgagacaggaaaaaatatgaaaggacaaagagaggaagaatagccgtttaagtggccaggtgtgtgcgggtggttgtagaatagaggaacacatgaatggaatcatggggaaagtcagtggtgtagggcagaggaaactgaagtgagaaaagcccagcttggggaatgcagaaggaaagctgaagtcaataccaggagcatattgaggaagaggacagccccagacctcataccttccaccctcagagatgctgccagttatgtttttagatgaggtagctgattcaacacaatcttctctttcatggtttcagtcgtcagaaattgttttagaaagtattgaatttctatagtctcaaggatttttttgaaaaacactaaaatgtgataaatttatgcagtttttttttctcctttcattcctttgttcttttagttgatggcagctcatgccagtagagacagagtcataaaaaactgtatagcccagacttcagcagtagtaaaaaacctccgagaagagagagaaaagaatttggacgatttaacgttattaaaacaacttagaaaagagcagacaaaggtaagttgaacagaattaacatttctcaggcaaagtttttccaattgtagccttcaaagtaagatttttaatatgaaaattttggcatataatatggcagttacttaaaaaaatgatcaagagattagtgcttcatttttagtgagctttattttattatgtttagttattaattggtaaattaatgtgcacttcttgaacaaatgcagcatagcagctttgtctaaaataagcacagtcataatttattttcatttctttgtttctttcccactattaaagacaagggatcactacaggtgaagtaccacatcagaaattctggggaaatcacatctgtacagtatctgccttttgagacataacctgagaaaaacatctctaatatattttggaaatagctccagtttcattgtgtagaaatctgctgaaatgtaatatagactatttaacttcaggatattaccctcgttagccataaaaatatagtatga

SEQ ID NO: 107834 - DNA, 1067 bp, Homo sapiens
tatactgccagaaacttctcccagagtttaactgaagacgagatgtagctgatgtccagcctttctctagtgacaagtgaaaagaagtacactgatcatatgtgggtaggaggggttgtgctgtgtaggtacttactaccagtctttttaagttccctgcccttttgatattatttttctgttggttttttttttttttttttttttttgagagttggaggctttctgaggtaagatggatccttggaacatatgagctatggttactaagaaaaaataaaaactagtagtacactttattggctgtatgctggaggtggaaggagcatacactgtttgctaaacaccgtgccagcaaatgggatttcaacatgagtaaaacagtcttaacccttaagacaatcacatttgagccaaggaggcagagttggtgcccactgttaggattaccattacttaacctacctattgtccttgaacattttcttatggttgcatgtatttggcttggtttcctcactcctgacttaaaggattgtaaaatatccaagagctttattttttacttaaatgcttattttttgtcactaactttccatttgggttatattcttttattttaaatacatataggaattactcaaggtgatgaggacaattgatgacagaatagtacatgaattaaacactacggttccaacagcttcctttgcagggaaaattgatgccagccaaacctgtaaacaactttatgagtctgtaagtgtattttttgagtcttttgcttctttcatgcctttctttgcaggctgaataagaaatcagttatcttgtaactcgactgtgactaaaggaatgacatcttttctttgcctatacctgatggtgtatataagttttgatctggttactacacattaaagaaaatgtgtgaccttacgcttgtgaaatcttaccaaacctgggaagaaatggttctaaagaatgggagcagttgttttgtagcctttaacttaaggagaccttatgtacaaaggaatgaaaggaggagagtgaaacagtgaagt

SEQ ID NO: 107835 - DNA, 1031 bp, Homo sapiens
aaaaagttgcatccatactgaacatgtacagacatttttcttgttatcataccctacacaatacagtgtaactaacacctatttacatagcatttatattgtattagatataagtaatctagagattatttaaagtatatggaaggatgtgcataggttatatacaaatattgtgccattttatatcagggacttgagcatccttggattttgttaaccataggaggacctggaaccaaacccccatggatactaagggatgacagtaattatatgaagaatgagttaataaataatgagctctgtgatactgtctcttactgctgcattatttaaagacaaatattgctgagggctttcataaccaaggaaacctctatccaaaaggcacaacttaacccttggcctcagaagatcagttcagtttagatagcgaaaaggaaggttttgaaagagaatttaaagaggctttttttttaaaaaaaaaaaaaaaaataggccagtcataggaggtaaagtggcaaggtaggtccctgtcttctacttacctatttttttttttggacttcccaaatagtactgccatcatttgtttggaatttaccacttaagcacaatacatatatccttcactatgtgtggtggttgcccaatgaatgcattgagattattccttaagaattccagtttacagagaatactattaaaaaaatagaaagatacaggacgagaagataatgaacttggttttagacctgatatttgctagtgttttattagtctgaattatgagccttctgcaagccgtttcacttctagattgaggtatagaaaaggccattaaattcactaattaaaaattagtggaatgatagaacagaatctagactacagacttagattgaatgggctaaatggtttataattggaaacaacctaaatgtttgttaatgagaaagtggccaaatgagttgtgcttgaacaggatagaatacttaaacgcaactatttaaaatatcttcagggctggg

SEQ ID NO: 107836 - DNA, 1114 bp, Homo sapiens
tcattcaccttcgtttgctcacaatgtgtgagggcagcccgaacttttgcctagaacctcttggagttgccttaacagctttggcacttttttccctgtgaagaaatgtgagcctggtgagacggtttacagttcttttccttctcccttttcaattttgaaagaaatcacttcctgtctcattacaccacaaaaacactgaggggctactatgttggacagaacattcactgttctcaacaggttcctataaataaaattcgaatctccttcttttcatagctgaaatgattgactaaatggcatgcctctactacttcatcacccacactttatttcgctacaatgtttccttccccaatcattttacctccctttttttctttctctttagcttttctggtatctcttctgtgacatttaagaatggcatacagttttcagcaattcctgaacaagtacattatcagtttaggggttgtcattatattttctagaatatagcactgtccagtaggactttctgtgatggtgggaatgttttgcatttatgctatctccatatgatagccactagcaacaggtggctcttgaatacttgaaatgtgactagtgcaattaaggaactaaattttaaattgcatttaattttaatttaaataatctcacatggctaatgtctgccatgttaaaggcaagctctagatcatatattgataattctctagtacacacagaaaaattgatacagagtcatgctccacataatgatgtttcagtcagtgactgactacatatacaacggtggtcccatgagattataacaccatatttttactgcaccttttccatatgtagatatatttagatacacaagtatcactgtgttacagttgcccacagcattcagtacagtaacctgctgtataggtttgtagcctaaaagcaatcatctatactatatagcctaagtgtgtaagtaggccataccatctaggtttgtgtaagtacactctatgatgttcacacaacagaatcacccaatgacacatttctcagaatgtttccttgtcattaagcactacatgactatttgataatccataggttccac

SEQ ID NO: 107837 - DNA, 1054 bp, Homo sapiens
tttggaaaaagcgggcaattcaaagctcttttctcgagccattggaggtcatggggggcgcgggtttggccttagggagcgaggctgctctgtaggaggagggaggaggggggtcatagttctctccgcggctctccggccttgtctgggaagctctgggtaatctgctgtggtaaagctcgggatgcgtggataaggattgtaacaatcttgtagcagttccctgaactcagtttccagcttctgccattcctctcctacttttgtaagtagagtttttgtgggagagaagaaggtgcagaagagctatttagttgataaaacatacttggtgcaatttactatttttgtgggacaggacgtatggaagcttggagggaggattaattatagtacctgctctagtgtcattgcccattagagaagatgtaatatttagaggttttgcctttttatgttcaaatatcagagacctagggctaattattaacacctgaatgcaagaatagggatctggttttgaccaagttgccattaaagttatctgttccaattcagtcataaatgtgcttctgtttagttacaaagttgaattccaaaatcatgatcttaaatatgtattgcattattaactaacccaagatactgaaaaattgacctatctgtagtaagctttgtactttgaacggtttgaaggtagtggtattcttgaatactgcctcagcctccctgtagctaggactacaggcacgtgtcaccacgcccgggtaattttttaaaagaaattttgtagcgagagtgtctcaccaaataatcctcttgcctcgtcctcccaaagtgttgggattacaggcgtgagtcaccacgcccggcctaaagtgtttaaaatttttgcaactcttattttttcattataaaaattagatttagtacttctgtaaaatatcctatttccaaattgaaataaaatccagaaaagagtgtttaaaatcgagtgcctagaatcccattttagcatgcattcaagaatttattagatactgtattagtccgc

SEQ ID NO: 107838 - DNA, 2082 bp, Homo sapiens
attgaaaacatacatgttaatttctcagattagcctgagggatgctccaacaagagatagggccactgagcagagtccaattatgtgttttctgataaaagcatatgttcattgaaaacactggaagagcggcatactggaatactggtttatctggtgtatttcgggagtttacagatcacgaaagttgcacatttcctttctatttcacacaggtactcccatgggtacatatccgctagggcaagggcccacggcgccacactccacaggaccatctccgaggctggctcaggatgcggcgccaggggcactaggctggcgccgcgggtctccagcgcgtggcgcacgtcctacacgccccgcactggcgcaggcctgtacaccgcgtcgcgcacgccccgccccccggcgccgcctgcgtccttcccactccaacgctgggtgacattgagctcaccagcgccaccgtccccggcgaagttctgcgctggtcggcggagtagcaagtggccatggggagcctcagcggtctgcgcctggcagcaggtgagacgccggtcgggatatgggaggtaggggagctggcccggccgctgcgggtgggggaatcctgaagccttcctgggccccggagtggctccattccatgacgcactttctcggttcctcagaatcctacctacttagtagccatgtgggagggaactaggtgagcagctgctgataggcattggagactgcccgtgaattaccctcatctccatccacccagctcccaccaacttaactgcccacgcgcctacccttctccccacccccgtcctcagcctcccctgagctcagtctgtaaagcacctactatccctagacctcccctttacccatgcattcagctttccaccctaacctcccctatctattgctctccttgagtcttccctcttccccctgctccttcctctctggagtttatcccagaaaacctccagtctgaagtttccccactcattaaatgtctgattaggccaaggatttaggtcttagagattaataataattgttttcttaaaatggaggatacattacttttaaacacttatacaattaattgattcgaatttcttggaggaagtgtgtaattgaaggatctgcagtttgttttggtggtagacatttgtgtgatgactattttggacttaggtaatgaaagcttaattctttttttttgggagaaccagcagagccttggcatagtaggggttgagaaatcagagggcttgcattttgactcttttctgggtaccagagatcttttgttcaatggcacacactacattattaaaaagttgttaattaaatttttaaaggaaaaatagccccaaacttggctattcaaataatataaatatatattgtaatgtaaatgaagtaatgcaaaaaaaaagagtgaatgttgcatagtttcacaagtttgatacataaccttccccacctcaagattatcctttacacagcttatctagtgttccggtagagaatggactggaaaacatgtctcaaactagagagtattattatatttacttcctttaaaagcaaacacttcttccactaaaatcctcaatactatgatttcattgattttgtcagttttgttgaactaattcacctaaaatatcttctgtacatcctattaacattatgaagcttttcaacaaggcaagtgaaaggatcattgctctgtaaaaaagttaaaatggactgcatgaaaagaactttgacatcttggaactactttgacatctttgaactaatactgagtatattgtaagtagttcatcttcttgctttgagaatatatttatgcatcttgcataaatatatttttgcatctctgcaaacttctgatgtgtaaaaacttcactattgaccacttaaccaaagcagaattccttgagtgatttaagaacaatttattttacttcagatataaaatttttaatagcacactaaggatgttatatgagcagctctctccatatgatcttccacgaatgtctgatgctttgtgagcaactc

SEQ ID NO: 107839 - DNA, 1155 bp, Homo sapiens
ataggaactgggaaagaagacattaaagaagattggtcatagaggttggagatgaagtgagagaatttggtggtacaatgtaaggaggcattgaatccttgtagaaagatgagatcagtcgaatcaaatggccacaaaaatgggaagagtagagtcagaagggctaatgatgagaatctaaaaaaatgtattcatgaccgggcacggtggctcaagcttgtaatcccagcattttgggaggccgaggtgggcggatcacgaggtcaggagatcgagaccatccttgctaacacggtgaaaccctgtctctactaaaaacacaaaaaattagccgggcgtggtggtgggcgcctgtagtcccagctactcaggaggctgaggcaggagaatggcgtgaagccgggaggcagagcttgcagtgagctgagatcacagcactgcactccagcctgggcaacagagcaagactccgtctcaaaaaaaaaaaaaatgtattcatatgactagaaagaggtcactaatgttggtagagtaattttagtaaaatgattggagaaggaaacattgtagcaaaataaagtgtgggtggtgaagtgaagtagtagatacatgccatttattcaatcatttgagctatgaaaaagaggaaataagaattttattaatagtacctgttgagaacaagtgaatgctttgtccaacatagtggaccttcagtgttattgtagagtaataagacagaattctcagtaactactagtagaagttactggagaagtagtcagcctttctggaaagtagtatagatggatagatagatagatagatagatagatagatagatagatagatagatagatagatgagatagatagatggaaacttaaaggggttcatacccttttacccttcacttccaggattttattctaaggaaataatcagaaataccatcaaagatgtatgtagagaactgttcattgaaacattacttataacactgaaaaattggaaagaaatcaagttgtagggaattactacattcagattatagctgtgtgtcgggttttatacagctattaaaagtattaatatcttggaaagtatttgtgacatagcaagatacagtattatctgattatgaaaaatgtatat

SEQ ID NO: 107840 - DNA, 1017 bp, Homo sapiens
ctaagaggtaaatagttttcccaaactcacacagctaacaagtggcaagataaaaatctagacccaagtttgcaggttaccaaacctcatactatactatcttgctattaagccatagttatttttatattcagcagctttggtcaaattcttcttttaataccatgtataattctatatatcacagcttccatgtggaaagtgatgtcttacaactactttaagatactaaaaaggtccttctatacacgcactcttaactgactttcttatcctcagtaattccagagtaaaaggaaatgtacttttggctgtcttcattcttgcagttaaatggaaatactgaccattttaggctgacctcatgggagtacgaaggggcaaatgtgctgagctgggtgaagttctcttgaaaactctgttcccaccccacttcattttttcttgtctccctctttgacctctcatgcatagttctcagattaaaaccagcagaaacatgtggacaggactgtgagcttctaggattctgagaaatttgcattgcttttgtatactcgattgtactagctgagtttaaatactccagaagcaaattattcacctggaatctcttctagcatcatccaggggtatatgctgtgtattttagagagttcttctcctgttctttaccataaaattgtaacattttagttttatggaatttctgtttccataaatactactggaatggagaacttttgaactcaatgtgatttggaagagaaaaattagccattgtatattttgctctcaccatcaacttccctttctccccccgctcccccaccccccgccacatacccaattcttttacatatgaaattacacagatagaaggaaatatcagcttagggtgctagtttcactatttggtataaaagtgttgaaactggcctgtatgtaagcttcatagaaatctgaccgtttacatggagggaaacaagggaagaggacggttgcctcccccactca

SEQ ID NO: 107841 - DNA, 1691 bp, Homo sapiens
ttctaagtccttagaaattcctggctggaccttgtcagaatgtttaaaaaactattctcctaaaagcctccatctgccagcatgttcaaagattatagaatgtggtctggctgcttctcagcgctcgctctattagggggcagcctccccaccagtacaccaggacatttgagaaggctggccctccaagctgcacctgggccatatactcaactggccttccttatctcctcaaaatgagttcgcctgtggagaggttactttgataatgggaagagaagtaagatatggtacctgcttctctgaagagttggtattcaagttgaaataaattgtttcatttttctccaaaaggctgagaggctacacttgacttggatcaaaacaataaaacacagtcattatttaagaaaatttatttctacttctacagcagaaatacggaaatggtacaggtttgggcaaatcatactttatgaaatggatcctcataccacatcctttttaatacaggcacgttataacataattcctggattttcaaaatccagccaacacggatacctctgctactctgttttggccttcatagctgcttcctctttcagacgagctttcttttctaagttcaagcttgttaaagtctcgtgtctttgggcagcctaaagcaaaacagatttgaacaggtgatttgtatgctggtcaggggagggtgtctttaccttgcactgatgacagcaggttaacagaggcatggaggcatggagtcctctgctgcttgcacactgagcacggcagtttcctctatgtgcttcaacttcctcgtacgcttccaagaacagcagctcatccactcaagcataagtaagaagtgccacacctctcctttttcttcccttctggcccctttctttcagtctttatcctctccttttctcttatactttcttctcattccaccccacttctcttttatactaaataccttctcattgccatttctatcccgtttttcttctttcacttttctctgttgctgccatttctccttccccaacttatctgcatactcagatccttctagttcctcacttctcttttaccaaaaacattcagctttgggaatcccagactttacccaaatactaccattgatgatttccacgagtatctgtactacaattccaacctttgagtgggggaggcaaccgtcctcttcccttgtttccctccatgtaaacggtcagatttctatgaagcttacatacaggccagtttcaacacttttataccaaatagtgaaactagcaccctaagctgatatttccttctatctgtgtaatttcatatgtaaaagaattgggtatgtggcggggggtgggggagcggggggagaaagggaagttgatggtgagagcaaaatatacaatggctaatttttctcttccaaatcacattgagttcaaaagttctccattccagtagtatttatggaaacagaaattccataaaactaaaatgttacaattttatggtaaagaacaggagaagaactctctaaaatacacagcatatacccctggatgatgctagaagagattccaggtgaataatttgcttctggagtatttaaactcagctagtacaatcgagtatacaaaagcaatgcaaatttctcagaatcctagaag

SEQ ID NO: 107842 - DNA, 1042 bp, Homo sapiens
cctcccgggttcaagcagttctcatgtctcaacatcccaggtagctaggattacaggcgtgccaccatgcctggctaatgtttctatttttagtagagacagggtttcaccatgttcgaggctggtcttgaactcctggcctcaagtgatccacctgcctcggcctcccaaagtgctgggattacaggcatgagccactgtacccagccattttttgactttttaataatagccattctaactggtttaagagagtatctcattgtggttatattttgtattcctctgatgattagtgatgttgagcatttttttgtgtgtgtttgttggccacttgtatgtcttctttgaaaactgacttctaatcttgaggcctattaataatttcatttgtctgtcactggacaatttctcattcctctcagtgactatcctagaggatcagtgtatttgagaaatatttagaagtaaagttgacaggacaggatgattgattaaaagaggggagcaagggaatttgaaataattccagggtttctggtttgggagatcagatgaacaagtgcataagcctgggatgctggtggaggactggagagacatggcagatgctacctgcacacttttggtaatattctgtgtgatgggatatgaaatggtccatagaaaaaaaccggaaaaatacgccaaggttaggttcattctaagagtctaaaaatttcaaaaaccaaaacaacattataaatggtgtttctcaaggacctttcactacctttttagattgtgcttgtgattttcaggcaagctaaatgtctgatgaagactgctcttcttttgttctgtgtctgacctactaattcctgcccatgcttcaaactcagttcagaaatcactgaaggaaccatccactgccggcctgcctgcaaccacagctgacagctgagttagttaggttttcctgtccctattatttaccagtttgtactgaaatgctttcatgggctgtgcttccagattatgagttctgtggaatcaggaagta

SEQ ID NO: 107843 - DNA, 1392 bp, Homo sapiens
ggtcaggagatcgagaccatcctggctaatatggtgaaacctcgtctctactaaaagtacaaaaaactagccgggtgtggtggcgggcgcctgtagtcccagctacttgggaggctgaggcaggagaatggtgtgaacccaggaggcagagcttgcagtgggtggagattgcgccactgcactccagcctgggtgacagtgcaagactccatctcaaaaaaaaaaaaaaaaaaaaaagctgatgggtatattttacagtaaagaaaaaaatttattaatatccaaccgacgtggaagctgctggttgccttaggctattacacagggatttttcctttttacatattgtatgtattgcataagtgacagatgagtagaaacaaagatgatttatttcttcactccatgactgcttctcttctattttgttgaagagattccactgaccaagtattttattctgaaaacaaagaacatttgaggcaaaacatagccttagttcctgcagactacattgttttataaatcgtacaaaattactgggtttatgtccagacgtggtggctcatgcctgtaatcccagcactttgggaagccaaggcaggcaaatcacttgaggtcaggagttcgaggccagcctggcaaacatggcgacaccctgtctactaaaaaaaaaaaaaaaaaaaaaaaaattagccagccatcgtaccacaagcttgcaatcccagctactcaagaagtcgaggcaggagaatcgcttgaatccgggaggtggaggttgcagtgagccaagattgcaccactgcactccaacctggctgacagagcaagactccatctcaaaaaaaaaaaaaaaaaaaaaaaaaaaaatcactgggtttacaagtttattaaagatagcttgaatgattgttgccccatttcacttgcattttgaaggagtcattgttttctctaattttaaattaatatacagtcatttctgtgtttttttgcagaaagtaaaattactcattcttattcatatccacttaacctgcagaaggccaatgtagtccgctgggagtcctcaataaggatcactgctttacccatcacttgggctgggcattattaagatacagtgatgggtaaggagaaaacagaaacgcaaaagaccgtaatgggtggtgagagaacagtaccaggtttgggagagacctgcgcaggctgaggtgtaaactaccagagtgtgaaatggttgcaagattaagttacgattatgaggagtgtcctcttgggaagtcaaaagtagtgtctgctgggcacagccccagtttacatttggagatcagctaacacctgtgaattattttactgccccctttcacttttaaaaatgtcccagtttag

SEQ ID NO: 107844 - DNA, 1057 bp, Homo sapiens
aaattaaggtaacatgtctttatttgatcatctattgtacaccagatacctggctaagggctttccttttttctcatgtagtcttccaaatgttctttgataattgtcactatattatagatgacaaagtgaagacttacgagaaattactttgccccaaggttacaacacttagatggctgtccaagggcggggaagagccctgcaaattctgtgtcttgaagaaagcagtggccacgcagtagttccgtgcccaggatctcccagaactagacttggcaaccacagctgggccagccttttttgttagaccattcttcctgactcctgcttaccatcagcacccttaaaatgacgaaatcaggcttaagttgcttttaggttacacagactggagtgtaggccctctcaggccaaacatctttcctcttctgtggtgctaaaattctgtatgaccagacaagtatggtaataggttttttttttttttttttttgtgcaaatgattttgtgtttagtaaaataatggctaaacacatggatccattcaaacgcacaaatgtggaaagtattgacacggaaggaaaggctttgaagaattactgcctcaggaagcagtgccatggatgcgaatttaacacagtctacttcttcctaaaggaatatcatcccaaggaatgtcaaaaattaaaatcaccttttaatgtactggttgttgagtgtttctgctttacctcaagtcattctgaccactctacatcctgcttcaaagtgttctgacacttagatttggaatggctctaatgattctttgtacttgaatgtggtctgtcaggccatgggtgagtgccttgcacatagtagacattcaataaatactaaatgaaggaatatgcatgcatctttgtgatgttagtaaagggtgcttgataaaagaaaattcaaaggaattcccttatgctgttacttgaaaccaggatcaacatcttaagcaaatgtctcaacgtgttttatatgcagttacttttcagaagacatgatttgacctgaagtttac

SEQ ID NO: 107845 - DNA, 1051 bp, Homo sapiens
gcctctcagattctgttaacttagtttaaattcactgaataccctaccactaaggcgttgctcattacaaaagcatgttaatttcaatacaggaaaactcttttgtagttttatatatggattggggaaagtgactttgttttacttttcctttttattcccctccatcctccaaacttccaatctatattatttgtaatgagaactttggtgggggaaaaaaagcattaagagaattttggatgtaaaggcatctggtatctgatggaccagcaggtagatgtggttggattgagaaattttgggtaaggtagatgatagaagaaagagattttaggagacacagttctctgtggaacactttctttcatgttcctgtaactaattgatcaagacccttttaaacgcttatctttgtcagttccgcttttgaaaaaactattgccctaggattgtttcttccatatgacagatgaaggttattggctctgagtcatttttggcattatcgtcacagataaaaagattggcaattaatctcataaaaaatctgaattattccagattgctgccgatttttgcctaagaaacaatatgtaagtatattttataaaccaaactttgtcaaccaattctattgtacgtctacccacaggcaactttgaatttacttctctagtgctaaataaacatttcagcgatttaatcccccaacttgggggatgcattatgaaaaggttttcctggagtcaaggggtttttctttctcgctagttttgtgaaaatttttatatcaataggcaaatcattataactttttaggggttgatggtttttaagtatattggaaattgtggtgtctaaggatgatgttcagtgaagaaaagggatccacttttagaaaccagcattgtttgctttcaactttcatactgtatgctaactcctacgttccaaaatgtgctcatttgcagacacaggtatgcctatatacatggaagtctcaaatctgaatttttatccatctcaatatgaccatttctctctgttg

SEQ ID NO: 107846 - DNA, 1483 bp, Homo sapiens
tgttgctggtatgaggatttcgaatacttagtaatcgaaaaccatatcctgtaatttaataaaaaaaactaaggacgaaaaaaccctccaattttcccaaatgcaatcagtgtaactaggggctgtgtttctgcattaaaataaatgtttcaggctttgtggtcctgatcaaggtcctcattaaaaaattggagttcaccctaggtgcttttcccctctgtgactggcagataacacatacttttgaaagtaactttgggatttttttcttaggtgcagctcgattctaatcttttcatgctgcacacgattcctttaatgtagcatccttatctgaaagaaataaccatcttctcaacatgacctgcttaacccaaataagaacagtgatcttataacctcattgtttcctaatcattttatttcatctcctgctagtactgtgccgcttccccctccccccacacaaaataaaaacagtatctgccttctggctcatttaatgatgactgcaatctgtacctgcaaatggcgcttccagtactgtgttcagtgatccacatttgtgcttggactggaatgaaaaaatacgcttaattgccaagacaactgcaaatgagttcaatacgacttctcggtgctagttggccatcttgactcaatgttgggatacactaccagagaagatttttttgttgatgtgctgttcaaagtgaattctgaaggaaaaggttgctcacctctgtttcagagcatacccttttaaacctttttagacttgtcctcttctagaattcattataaccccaaagtgtaaaaactatttggaagttgcccctgacaagctattatacatctctggtaaatcctgctgaatgtaagggatattcagagcttttcatacctcatcatgatgttatttaagcagccaacttatgtgacctgatttaaacttttaaaaaatccacttcattcaaactagaaagagtcaaagacaaaggacatttatcagccaagagtgtgacgcattcttcgcatctagtctgtagtagtgtctgtgctctgggatggataccgtctgatgtctgtttgttattgatggcgcagccactgcaaaactagtcaactcccatctataactgttactttttctagtgctgctttgtgctgagagaacattttagtttactgcacttgacctgtaaaagactgattctttgtaattttagggataaattaggtggttaatttaaagaagaaatttcaatgttgcctttacatcacattaaaatataacttctttcagaaggataatagaagcactgattcatagtaaaaatcttgtttttagctttgacttttttgtggctgttttttaaaattgtaaattactagtaacatgtcatttctataggatgttttaaattatgtaccttccattggatagttaaaataatttcattttataagccaatttgagtgg

SEQ ID NO: 107847 - DNA, 1734 bp, Homo sapiens
ggtattaataagtaagtattcctgtttttggaatgcataaattgtgaagagaaaagaatggagaaaggtgccagagaactggtttgggataatttatttagagggttttttgtttttgttttgtgaaaaggtatagcttgtatggttgaaagagtgcttgttttttgtttttttttttaagtctctgcagtgaagttgaggatgacttgctcactaatttcataagtttaacaaaattaaaagttttgtttgactacattattctttgtatttaggtacctagtagaactgggttgtatcaagccgctctgtgatctcctcacggtcatggactctaagattgtacaggttgccctaaatggcttggaaaatatcctgaggcttggagaacaggaagccaaaaggaatggcactggcattaacccttactgtgctttgattgaagaagcttatggtaagatgctttggttgaagaagtttatggccaagaatgaattgggtcatagatagagttcagtaaaaacaatactactactgctaggcactggatgaaaagaggactgttaggaaattgctgcttctgcagactggatattacttgcatatgtatttaagatgtcagtttataatactagctttcagatgtaatcccagcagtcatttctgtgctattataaaatacttatgagatacaaataatctttctttacatcaagaacagagatatatgacaaaatatagtttaggaatatatagttatggaatttccaatatttattgaagttttcaataaagattttcctttattcttcattttaggtctggataaaattgagttcttacagagtcatgaaaaccaggagatctaccaaaaggcctttgatcttattgagcattacttcgggaccgaagatgaagacagcagcattgcaccccaggttgaccttaaccagcagcagtacatcttccaacagtgtgaggctcctatggaaggtttccagctttgaagcaatactctgctttcacgtacctgtgtcagaccaggctacccagtcgagtcctcttgtggagcccacagtcctcatggagctaacttctcaaatgttttccataatactgtttgcgctcatttgcttgccttgcgcacctgctctcttacacacatctggaaaacctccggctctctgtggtggaatacccttctaataaaagggtaaccagaacggcccactctcttttacggaaaaatccctaggctttggagatccgcacttacattagagttatgggaatatacacatattaatgtggctccctttttcttgtgggggaataaaagaggactcctcctcattccctttaacatgggggaaaaaactgacattaaaagatgagactaaatctttatcttgaattttacacaactacttacgacaagggagatgtttagacctgttgtgtatacttcagagtacttttcatgagttcttccacagtgaacccttggattacctggtggctttttctagccagatttgcattaatccttactgagattggatggttttctttcctctattggcgccattcttcagatattaaagttaaaccatccactccctcaccttcagccttcagtgaatgtgctttctagttgtcaggaatgctgaagaattaacactttgactcctaaatgtgatactggtttgtagattcccttagagcagaaaggag

SEQ ID NO: 107848 - DNA, 1005 bp, Homo sapiens
tccttagcccactttttgatgggatttttttttcttgctgatttgaatttcttgcagattctggatattaaaataaatgggtatttttgtagttgtttttaatttggaatcatttttcactgaacaaaaccttagcatttttggtctttaacaaagtatctaaaatacagaatttcctagttttcacatttgtgaaagttcctttacctgtttagtccacaaagaatgtgttttgatagggagtcttactccaagaattgatgtatataaaactttgctctctgaaattattttccttgggctttgactacagattagtgcaagatcactgacaacattgccaaagatggaaatgccacttaggtacttgctgcttcatctttagaagtgtaaatcaccctagaagtcaccaagtacatgcctggttgccttcttgagtatctcacctcacttctggcttttagtctattgaatttcataatcatcattttccttttacaggtttctccatgtctgaatgtgctttcctggttgctgtttgtcagtgacactgatgtactggctgatgcctgctgggccctctcatatctatcagatggacccaatgataaaattcaagcggtcatcgatgcgggagtatgtaggagacttgtggaactgctgatgtaagatatcttttagaaagtgtgtccactttctctcccttggtactagttttctagctgctaatacttaaatattaatggattgtacatgataattgatttattgtgctttgggctactgtttttgttacttgtttattttgatgtcagatctgtttgtcttgttttattgaggcttatagagaacctcttagtcctctgctgttagcaggcctttagcagaaacattgggaaaactctgatatgtgtagttccaggctcatactggatggcctgagatcaaccaccggacatcagaaggcatactgccactaaaatagtcattccttatctgtctgtc

SEQ ID NO: 107849 - DNA, 1026 bp, Homo sapiens
ctgggctcttggcaacattgctggagatagtaccatgtgcagggactatgtcttagactgcaatatccttccccctcttttgcagtaagtttcttcttccttcttcctttttttttctttttgagaataaaaatgtaagagattcctcagaaagcattacatgtttggaaatcattttggattttctagtgttatttttaattccagatattttcttgtttagatcatttcctcaagcaccctatctttttccatgccaaaattctgaattctgaattacttgcatcagaattaatgaagttttaatgttctggagaaaagctatctgaagacatctctttatcaaaagtattattatttagtatttatgtcatcagataatcactgtctgttacatagtttaccattgtaccatcgtgcttttaggttattttcaaagcaaaaccgcctgaccatgacccggaatgcagtatgggctttgtctaatctctgtagagggaaaagtccacctccagaatttgcaaaggtaaggactatgcttttgggacattggcagaaaaaatacaattaaaagagtattgcaaccaatggtaaggtgaacaggaagataatttttgttaaaatttaaaatgttagaattttatctgtttttggagaaacagggttgttgttgtttttgttggttctctttattatttaaaaagcaaatttagagcatagcttgaaggtgcacatttacgatgggactgcaaataaagcatagcatgaaggaagaatttgtaaagcttattgaaattaggcttcatacaattagtatactgtttaggagactatcctttcagttctcttaaaacagtggttctcaaagtgtggtctgtgagttctctgggagtccatgagattctttttttttttccaataggtttttggggaacaggtggtgtttaggtacatgagttacttgtttagtggtgatttctgagattttggtgcacccaacacccaagcagtgtacgctgtacccag

SEQ ID NO: 107850 - DNA, 1050 bp, Homo sapiens
ataaagctttccagtgaaaagtatctttttcatccttattccctagttaccatcacctttctatgcaggcaacaagtatttagtttcctctaactcattctgaagataatctgtgcaataagtaaattaatgcatatattcctttttaacgcttttagaaaatatggtataatgccatattaatgtacactgtttgcattttgttttcatttatatcttgggagatcataccatatcagcatatgtaacactctctcattctttttatggtgtcatgtttactctttcttgaactgaaattttagacaccctgaatattcttctaggttgaggtatttcttctggatattcttcttttaaaattaatatagtactcaactgataggttatgtgcaaataatgatctcagaatctttttttcatgtacagaaaatgttactgttataagtaaacaaacttttacattctaaaaagataatgaaaattatttttatctttatagtttgaatcagcttgggtactgacaaatattgcttcaggaaattctcttcagacccgaattgtgattcaggcaggagctgtgcccatcttcatagagttgctcagctcagagtttgaagatgtccaggaacaggtaaaaatgaaacaaaaagaagcaggtgaaagaaagtttttggctgggcatgtcgctcactcctgtaatcccaacattttgggaggccaaggtgggtggatcacgaggagttcgagaccagcctagccaacatggtgaaatcccgtctctactaaaaatacaaaaattagccgggcatggtggtacgtgtctgtaatcccagctacttgggaggctgaggcaggagaattgcttgaacccgagaggtggaggttacagtgagccgagatcgcgtcattgcactccagcctgggtgacgagagcaagactttgtctcaaaaaaaacaaaacaaacaaaaaaagaaaaacaaaaaaaaccacaaaatttcccaacataataaggggctgagtttcaccagttggctttggtaatctat

SEQ ID NO: 107851 - DNA, 1034 bp, Homo sapiens
tcctgaattgcattgagaggttatcatcattgtgtactacttagtgataagcataactggcatgttattcttttgctaagatgtaataatttcttttttttaccatctgtattcaggctgttattcacttacttttcattttcttagtcattgtcacttgaattgttttgcttctctattttattaacttgtgtagcttctggaattctccctcatttcccctgagatctttggtgctaaactcaaaatagcagtttgaacgctggcaccaattagaattctaagtaattttttctcaccaataactctgtactatatccctgtatacccaggttattattataatttcttttgcatccaaatctcactgtaatctttttcttgtatacagatggtatgtattctgatcttattttttttccagattgcttttccttagagttttcatttatttgactttatgtttgcagtatctgatgactgtttattgaactttgagcctgccttgtggtgggacagtttgcttttatacttacatcatatgactctggtttacaaattaattttcctagtaagcaaaagaaactacatcttaggtgaacttgttttttcttttttagtataaataatctggcatactgttatttaaaatttcttgaactagatatccaaactacaagcaaatgaaatatttctgggtcagcattatgtttcaggaaactatgactgggcttcgtaatgtattagattaggaggctgtaacttagtccttgtctttgactgtgtaacattactcgagtcattagtcaaattgttggattttttttcagatagtttcctcatttgtacacaagaaaagccagatactttacatctctgggttgttgtagggatcatctgcgagtatgtgaatagtactttgaaaatataaagtggccgggtgcggtggctcatgcttgtaatcccagcactttgggaggcctagatgggaggatgacttgagatcaggagttcaaggccagcctgacaaacat

SEQ ID NO: 107852 - DNA, 1035 bp, Homo sapiens
gcagagaacagagcctgatcccctaagcaacctgccgagaaccagagggaccaaatgaggaaccttactgcagtttatcatttgaaatgctttgtaggaagagggaggtagggaaaattattttgttcatgctgaaaaaagtgtttctttcctgtctctgggaatgagagtagatgagagatactgaatttactccttgatctggcggtttttattaggtggtagttcttttatgcattaaatatagatggtatataacctttcagatctaaaatgaaaaaagtcggagaaatggatctttccccatctctgcattcccttgtactccttaaaaagtacaagtacattctccgacagtgccctcttctggctaagacattctacatctttttttaattcattactctgtaatcttggaacttgtattttaacacatctgaagatgaaagccttcagaaatctctaatttgcttctatgtaaactcccagattccacccttgtgcaaactaataattaggctgaaatattgcaaaatgattcctccggaagtgataacctcatgattttatgaggatagtcttagctgtcctaactctgagaaataaccaactgtttgttatctaagggccatctctagcttttttatgtgcacatttaaggacaccatggtgttctccctccactgtgactagtggggacctttgaccacctcagaagcaagggggcaaatatatcgagagagaccttaaagccaggagacttgatgatctaccatgctttcaaataattagacatgctctgggaagcttggaggttactccttcctctgccttcttggagagcagacagatgtaagctatccctgatactcttacctgcttactagaacttgaataatgcacctttggaatagggcttttgtcatttctcttccagaaggagagtcatgctatgtggtgccaagaggaaatttgatggctcagctcactaataaatcttgtggacaaacttaatttcttcattccatagataaa

SEQ ID NO: 107853 - DNA, 1046 bp, Homo sapiens
aagagcagttagacttaaaactcatgtacaggaaacaggctagaaggaagtataccagaacacttaacaatggtcttttgaggggttttttgccccctgctttttaggttttctaaaaagtggaggcagtaatttaatttttaagaatttttcccatcctttattctcatattgagacttgtcttcattgtgaaacatttcagactaccctgtcctcaaagtgataaacccaatttgacatttcatttgttttaggtagatttccagcatgagagatggtaaatggagggagggatgttaagaagttttgagctgttaagttcttgcattgaaatcaaaggattttttttttcttttattttatggggaaacagaacctaaccctcctattgatgaagttatcagcacaccaggagtagtggccaggtttgtggagttcctcaaacgaaaagagaattgtacactgcaggtgcgaataatttttatttattgcctcataacttaattccttttgaaaatttttattttgtacacaaatttgttactaatttttatctgtatgaagaattaagtttgtttataatgatattcctgacaactacattgcaagctgctttcatagctttgttaacatgtaggccttcgttatactctttattattattataatttttaatcatttaaaatgtttatgattgtggataatacttctctaatagggaaatgtttacagcagaggagccattacagccaggaacttatgtgtgggctacataaaatttggtgttgagggagttttagatgatacttggtggctttctcaggatggtgtaacatgggctagatcagagtcttattaattcccaaatctgttcctaattaattcttcctccaccccacaaaaagccgataaggagataactttgtcaggaatctgtgtacttattgctgtgtcaatttaggctttcagtactgtactatataagggattccaagaggaaattttgtaatctctggattcagaattttcttttttttttttttct

SEQ ID NO: 107854 - DNA, 1034 bp, Homo sapiens
tacacgccaccacccccagctaatttttgtattttttttttttttttgagatggagtctcactctgtcgcccaggctggagtacagtggcgctatctcggctcactgcaagcgccgcctcccgggttcacgccattctcctgcctcagcctcccaagtagttgggactacaggcgctcgccaccgtgcccagctaattttttgtatttttagtagagacggtgtttcactgtgttagccaggatctcgatctcctgaccttgtgatcctcctgcctcggcctcccaaagtgctgggattacaggcgtgagccactgcgcccggccttttttgtatttttagtagagataggatttcaccatgttggccaggatgatctcgatatcctatcatgatccgtctgcctctgcctcccaaaatactgggattacaggcatgagccaccgcacccggctggtaagtactttttttgatataattagtgtagaatggaatctgatacttgttatcaacctgggcaagtaaaaagaattctgaacccgattataacgttggtagtaaatacttaaaccccccagtattaagttatggttgtttagagtcattagtgatttaaaaaaatttaatatatcccttgaggttaagtggaataaaaaactactactatgacaaaaaaatattgtcttttgcagaccgcttattaaaaatatttgaaggaaatgtacacttcctcaccccttttaaaaaagtcttatctctttcaacatgctaagcttaatggttttcttctgtaatgtgcttttttttttttttaagggctttcaccattctgctaccttcctgcatgtattctggtttgccagcatacctcttaaaaatgtgataactagaatccaatatttcagatgtgttgttattaatgtagggtatggtgagaggttaccttctttgccctaagagtgtctattttgataatgtagtccaaggtagctagttattttgatagtcatggcatagtaatattttattgaattt

SEQ ID NO: 107855 - DNA, 1061 bp, Homo sapiens
agagtaagacagacagggtcttgggcttacaaggaagttacagtatactggaggaacacagaaaaatatctgggagtgtaataagggctggggcatacgattgaaatatggtgctgtgatagagataaagtggctactttaggcttggaggtcttgaaaagccatcttttaaaacttaacatttaattttgataagaaagaatagccagctatgtgatgagcaaggaggggaagagcaataagctccttgtcttatttactagtaagatcactttctactgtgagctttttaatgatagacaaagaatttggcttcattatattattaataatcttacacgtttctatatgtaaagattgtcctacctttatgtaacttctggggaagtatgattaacttaataacttggccatgatatctgttatctttctttcctttgaattaagggtgataatttattatatgttctttttgtttgtgatcgcagggtggtgtcatcacttctgacatgattgaaatgatattttccaaaagcccagagcaacagctttcagcaacacagaaattcaggaagctgctttcaaaaggtgagctatgaatatgttcagtatattttttcatctctctacaaaattactttcccatagtctgtttttcataccacaggtaatttgtgttggagtatttttatcaataaaagaataaaaatacagacatatatgtaattgtgaaccatgcctaaattttaagtttcctatttatttgtgggatctcaccaggatcagaaaacagaattattttcatttttgggttattttataaaagactttatagtgaatagtagtcagtatcatgttaattcaaattgagagactgacttttttttatagagtgactttaaaaatactccttgaaagagttatgattgttgattttaatgttagcaatttaccactgaaagttaggaatgcatttactggtgggcagggtgattacctttttttttttttttaaagacggctctgttgccagtctggagtgcaggctgggcgcgatcttg

SEQ ID NO: 107856 - DNA, 1095 bp, Homo sapiens
aaaactgttgaatagcacattttaataaaactgttaaagtaacctggccaggtgaagtggctcacgcctgaaatcccagccctttgggaggccaaggttgggggatcacttgaagctaggagttcaagaccagcctgggcaacatgatcagaccctgtctctacaaaaaataaaaaaattctctgggcatggtggcatgcacctgtggtcccagctactcaggaaactgaagtgggaggattgcttgaacccaggaatttgaggctacagtgagctatgattgcaccactgtactccagtccgggtggacagagcaagaccttgtctcaaaaaagacaggagtgggggaggggaagtagccatttctgatgtccctttgggatatgtctgggcatgtatatgtttaaaagactgagctcttagaataacagagctcttcacagtaaactcatttgttctctccccacttgtattgtagaaatcatgaccaccccaggaaaagagaactttcgcctgaaaagttacaagaacaaatctctgaatcccgatgagatgcgcaggaggagggaggaagaaggactgcagttacgaaagcagaaaagagaagagcaggtaaatcctttacctttattcatttcttttaaagaatttaatgttccattttaagcctgaaactatcttcattttagcaaagttggggtgtgtgtgtgtgtgtgtgtgtgtgtgtgttttccccttctcccctgtaaaatcaacacttttttggagtggggatgaggaggtactgaaaagtggtatacaagaatggggaaatctctcaggttctcattttctcagcataactacactattcaatattttcacctatttgtgtttagtgtattttagttttctaagggtgcaactttcttctttaagatttttttgatgtatgtttgttaattaattcacaagtgaccactaaagtgttgctgttcattgtaaacttaaaattggaaatgtaaaaatatacacaaaaagaaagaataaacctcatacataaaccagtcctttggattcagtaattgtcaacagtttgctacacttgcttcgtgt

SEQ ID NO: 107857 - DNA, 1066 bp, Homo sapiens
gcaaggtgctgtcatggtccgtttgggttgctgtaatgaaataccagagactaggtggctaacagacaatagaaatttgtttctcacagttctggatgctgggaagtccaagatcaaggcactggcagattcagtgtctggtgagagcctgcttccttgtttacagatgccttatcttttctctgtgtcctcacatggctgaaggagcaagcaaactctttggggggtctctttttaagggctttaatcctattcatatggactctaccactaagggctaatcatctctcaaaggcttcaccttcaaacactatcacattgggagttaggatttaacatatgaattttgggtgagacacacattcagtctatagcaggtgccaagaccattctgtggagaaagaggagtcttttcaacaagtattgttgggacagctggatagacacatgcaaaaaaatgaggttggactctcataccatgctacaaagaaaaattaactcaaaatggatcacagacttaaatgtatcagttaaaactcttggaaagaaacacaaggttaaggattcttggatatgacaccaaaagcatgaacaacaacaacagcaaaaaacagattaatttggacttcatcaaaattaaaacttctgtgttttaaaggacaccaagaaagtgaaaagacagtctatagattatatttgaaaagcatatctgataagggacctttatctagaatgtaaaaagaactcttacaactcaataataaaaggacaacctaatttaaaaatgggctaaggcacttgaatagacttcattttaatgggagatacacagttaccaaatacgtatgtgaaaagttgctctatctcattagtcatcaggggattgcaaaccaaaaccacaatgagttgccactcacacccactaggatggtttcaatgaaagttttaatagcaaagtgctggcaaggatgtggagatactgcaagcctcatatgctgctgaggggaatataaaatggcacagccactttggaaaaacagttgagcagtttcttaagcaattaaac

SEQ ID NO: 107858 - DNA, 1111 bp, Homo sapiens
ttgcattattttctttattctctgttgctctcaatggtccttttaccttttcccttttccctttacatttgagaataggattatatcttattctttgcatcttcagtgttttagcacagtgtttgttgaattaatgataaaatagagttttaatgatttatgatgtctgtgcttttaagtctaccagattgtttttagatgtatgagtactgtgtataaaatcagttaagacctttgattggtcttgcaagtaaagatgactgacctagtgataaagataactccttgttttgttttaaggtatctttgtactttgcatggtgttatgaatttagccataatagggaagaaaacactggaaatggtaaacagttaaattagctgatttgggctgatttctgtcttttgctgcagtaagcaggagatggcctgaggccaactgagggccagatagggcctgcattagaaaattttgaggttgtacattggaagagtagggatgaagactgtgggaatgtatgtttctttctttcttttttttaaagatgttacaaacctacaaaacaacatgaaaaaatggttctgtccaagtgttgtagactaattgggacagttcttgaaagcaggcagtaatccagaatgtggataatggagataatctccttcatattaacaagaataatgctgcccttcatatacaaagataagtctgcttactcatcatgattgtttttccagcgtgaggagggatatgtgctgagtccatgagtgcctatatactctgtgagcaacaaggcaggttggggtcagaataggcagcttggggtcagaataggcagcttggggtcagctagggaacagaaagacccgctgaaagtactctgacatctattgatgggtcaggttctgcatcaggtgctttcacttacttgttcttgcaaaaccattttgaggaggtgattacgtgtgcaaggtgattgggtaactcgccttacttcacaaagtagtggagttgggattcaaatagggctgtttgtactgtgttcacattgatcgttaaagattggttttagccgttcagtctctttggcagaacaaactagatgtagtt

SEQ ID NO: 107859 - DNA, 1100 bp, Homo sapiens
cagatccgggcagtcccggagggactcaggagaggccctggggcgagggcgggtgccggcagggcctagagccggggttcctgggccggacgctcgcgccgcgtccgtgcgtcacgggcccggctgtcctaacggccacaaggccggcggaggagagggtgggggtggggagccctggtgtgatcgccatcgggaacgccggtcgaggctaggcggggcggggcggcgtggcgcggcggcggggctgtaagcggcgccggggactgcggggcgccgaggcagcgggcggagaggaggcgagcgcggagcctgcgccgcggccgggcggcgggcgggaggcgggggtgggccgcgcagagcgctgtgacagaggcaggaaggagcaggggtggcgtgtaaaaattctaaccctggcaaaaagggaccgtcttgggaattcacaagttacagaccgggtcggagccggcggcccggagggaggtgggggaagcggggggtggagacggccggctgcagtttaccgatgtcataacaacatgggcctggagcggctgatcgggggtgtggtaattatagcaatgacagaacttggtctgcacgccgcgtgtgcgatgcgagggaagcagcgaggtatcggattaagctcaaaacgggaggaggaaacaaggatgactggagtcaaggaagtcgtcatgaagtaatgttttaggattgggtcgtgttccacttttaaatgaaagcgttcaaaatatttgatttttaaggtttcaactcagaacaaacgattgccgagtttttgtttgtattttaaagagatggggtctcgctatattgcccaggctgtactccaactcctgagctcaaactgtcctcttgcctcagcttcccaagtagctgggactagtcttgggcaaccacacccagctctgcagagtatttttttttctgaaacgtactgtcaagtaatattaacttgaatttcacccttttttcttaaataaacggttgcttaaaaatctctattagtagatgaagtgatttcccccctcctgttttgtttttttttttcttaagagatggagtcttgctttgtttcccgg

SEQ ID NO: 107860 - DNA, 1009 bp, Homo sapiens
gggcatggtggtgcatgcctgtagtcccagctattcaggagactgagatgggaggattgcttcagcccaggagttcaaggctgcagtgaactgtgattgcaccactgcactccagcctgggtgacagagtgaaaccttgtctcgaaaaacaataaaattaaatttaaaaaaagaaatgcatcggcccctagggaaatgacatagggccaatgtttgctggcacatttagtattttaagtgtttcgggcatgcagatttaaaaaaacacatgcttcctgccctcccaaacacagtgctttgagcaggatttccattgcattgtgtttactagggtgtattggttatcagtaagctgtagtcattccacttccattttttaagaaagccattctcatttttcacaggtggccggagcagcagcttacaatgaaaaatcaggtaggattacctcgctctcactcttgtttcagaaagtctttgctcagatctttcctcagtggagaaaggggaatacagaagaatgtctcccctacaagtgctcaggtgcgtgactgcagacccttgtggggacccccgcacatgcttcagagttggtgtggcaccgaccagcaggcatattctctcaaggcctacaccattcctctcctttgcccgtaaatgtgagactcttttaacgacagcctatggctgaattgaccagatggggtggccaactgattgtctccttgctcaacgagtactatacaagctaaatagttctggcctaattccaggggtcccccattaaagattttcaaccaaagctcaggccaatagggcctgactacccaattccggcttcgtttgggtaattgaggccacaagaggtctttctaggagactcagattagaaatgggagttgaagcaaaataaaagtaatgatcacattttatctattttaggatgcacatttttttttcacattttaacaatactgaaataaggtagtgtacctgttatcaattgatg

SEQ ID NO: 107861 - DNA, 1067 bp, Homo sapiens
atgcaaagaaagtaagtttctcctgtgtttcttattctttgtaactcttactgctgttaccactattatttgatcctaaaaagtaattcacattctgaatccatgttaaacttacccatttttgaaaatttgaatgtgttcatctggtaattgtgacctgttaccccttccctccctccaactctaccctttagacgggcttctgcgggcttttctcctccattgcttgatttaaccaacagcactgaattgtttcttgctgcccaaagagcagagcaaggccctgatgtcaagggctggtgaggggaggcggacctgtgaaccaaggagcaaaacttctccaaggcctccaaggggaagtttcaagcagaatcttaataaattgagtgtggcggcgagatggggaggacaggattggggggaaaagcacctgaggcttagggaccactgtggtctgaagcacagagtgggcctggggcctgggaggagaggagatgggtgaggggatgaaggagggagagcctacctagatgggcactgtccagcagaaatacaatgggagccagtaggttcattctaaaatttttgcagccatattttttaaaggataaagaaacagatgaaattaattttaatgatttttaggaaatttttaaaggataaagaaacagatgaaattaactgtaatgatgttatttagcttgacatatccaaaacttaatcatttcagcatgtaatgagatttttacattctttttatcataccacgtctttgcaacccagtgtttttcttatacttacatcacatctcgattcagactggccacatgtagcctcagtagctatgtgaggctgatagtccaccctggacaggacatatttagatggtgaaaagccttgaagagcagtgaagatgacctgaagggctttaagcagggaaagcaagaaaatgacttgccagatttgcattttagaaatatggtgctgacaaccgtgtggaggacacatttacaagcagggatgagtggcggcagagaggcctgagataaggtttttgcacatggctg

SEQ ID NO: 107862 - DNA, 1335 bp, Homo sapiens
atttttgtttttgtatttttagtagagacagggtttcactgtgttagccaggatggtctcgatctcctgacctcgtgatccgcccgcctcagccttccaaagtgttgggattataggcgtgagccaccgcgcccagccctggagtgatactttttatggaagacaaaagccccccaaatctgtgtaaaatctgctgcaaaggtgtcatccctcttgtgtcatcactggggttagaggtgggtccgaaataatcttctgtgtccttcagttggactctcggctgccaattgatctctttttcattgccatctctggggtggttctttggttttttgtgtgttttccccttcatctctacctgtgaaagtgaaattctattgtaaatgggaggaaaaagggttggttgtgaaaaattaaagacccacattctgctttcttactcatggtaagaaaagtggccatgagtagagattgggcaagcattggtaataaatggaataagactattattattattatttgagatggagtctcactctgtcacccaggctggaatgcagtggtgtgatcttggctcactgcaacctccacttcccgggttcaagcgattctcctgcctcagcctcctgagtagctgggattacaggtgtgtgcctccacacccggctaattttttgtatttttagtagagacggggttttgccatgttggccaggctggtttcaaactcctgagctcaaatgatcctcctgccttggcctcccaaagtgctggaattacaggcatgagccaccacacccacacaagactatcatttttaatgaccaagagcctagtatatagttggtgcctgtcttagtctgtttgtgttgctataaaagaacacctgagactgggtaattgataaagaaaaaggtttgtttggctcacaattttgctggctagaaggttgggcatccggtgaaagcctcaggctgcttccattcatagcaaagggcagccagtgtgtgcagaaatcaaatgacagagaggaagtgagagagagaggtgtcggggaggtgccaggctctttttaacaagcagttcttcaggaactaagagtgagtcactcccatgagaacagcaccaagccattcatgggggaatctgcccccatgacccagacccctcccgttaggcttcacctccaacactgaggatcaaatttcaacatgagatttggaggaggtcaaacaaactaaactgtagcagtgtttcataaaattgtttgcctgactcaggttgctagtaagccagcagagggatatttgcctcctaaatctttggcagaggcag

SEQ ID NO: 107863 - DNA, 1065 bp, Homo sapiens
ttgttgattttaatgcagttcctcattaatgctataccttatatttactctgtcttaaagccacgtttagatggatagccatctcattcttgtagccaagcatgtttattgtaatttttcttccatctctgaaataatttgcttgtcagactctatagggattattcctctgtatgtggtactttaaaaaaaaaactttaaacatgtcaaataatggaaaagattggagaaaatatcataaggtgattcatacttaaggccatgacttatagatagaatacatacttaaatttgattggtgaaatattctgcagctcttctagatggcaggtgatagtaaatacacaaaaattgtggttctaccaatagcatattcattccttctataacaaagcttatattaatgagagaacagaagatgaaattaaaacagactttattatctcttaaaaagccatgagacttaacagaagttaaaagcgtgtttttttaattcaggaagaggatcacctagcccgggtagaagaggcaatcacccgtatgcttgtgtgtgccctgaaaactgcagagaatccacaaaataccagagcctggttaaaccccactgaggtaggcggcttctggtcttcatcatggcagttagtttcctgtggtaaaccagccctgactagaacatatgttttccagtgtaactaaatgtatgtaaccattttaaaaggtttttctcttcccttaggttgaggaaacgtcccatgcagtcaactgttgctacttaaatgcagctgtttctgcattttttgatcgctgcagaacatctgaggtagtagaaatccaagcactgagaacagatggagagcacatgaaaaaggaagaattaaatgtgtgcaaccacatggaggtgggccaaacaggtagccagaacttgaccacaggaacagacaaaccggaggcagcaagtccctttggccctgatctggtccctgtagcacagaggtccgaagaaccgccttcagaaagaggaggcatatttggaagtgatgggaaagactttgtggacaaggatgg

SEQ ID NO: 107864 - DNA, 1015 bp, Homo sapiens
gagaatcaggcagggaggttgcagtgagccgagatggcagcagtacagtccagcttcggctcggcatcagagggagaccgtggaaagagagggagagggagaccgtggggagaggggagaggggagaggagagagagaggagagaggagagaggagagagctgagatctaattttatcttttccaaaatggtaataggattgtcaggaccatcatttattttacagtttgttttcccttcatgatttgaaatgtctgtttaatcatatactagatacctgaacatatctgggtctattttgtccattggtctttctgcctatttatttagtgaggtcttatgttttaacatcagtaggactgaccattgctttgttttgcagggtttttctggctattcttgcctctgtttttttaatgtgttctttaaaatcagcttgtctagctttaggaaaaaaaaaaaaaaccttttgattttttttttgatccatattaaattttatctgagctttatgatgttgaattgttctgtccacaaattaggtgcctttccatgtatccaagttcagttttgtttgtttttgtttttacagctgtgttttaaagttttcctcacataagctttgcacatttcttttaaatgtttattcctaaatacagtagtatctccttatcctcgggggatatattccaagatccccagtggattactgaaaccccgagtattaccaaacccgattgtaatcagtcaacacttttctgttcatgccttccacctacaaatgtaatgtcttagctaagatgcaaacttaatccattttaactaagcacttatgcactgtggctgcagcttttgcagtttgaggtgtgatagcaaaactaccataattttttctcttgacagttttgtagatagaagatttcttcttaccatagaccttagtaacctcagcatgctggttttccttctccttattaagtcgagaactttcaccttttcacttaaaggaagcact

SEQ ID NO: 107865 - DNA, 1044 bp, Homo sapiens
aaaagtagaaattgctatgaggaggagggagagctattatgtcaagaatagttctcttaatatatagtgcctaaaactgaatatcagtaggccttatttggtagagtataagatttctaccccacatgatctcgatcctaaatatctccagtgctgcttgtaatattgggttagttttttaagtaatctcatctcactttagtttcatattcaactttaaaatatctgtgattttttttcacatgatctgctgtcaggcaggttgaatcctatcctgtacctataaagctgattttaattctaaatccagtatttcacagtcatccctgttaattttcatcatattggtttggttgagcattccagcttgacaagataattttaaatttgggtcttatctgtcattttagtgaaacttcaagctggcctgtgcccttttgatatgtccccgttaattagactttgagtgtatcctggctttctggcacaggaagatatcccaggataccctttctcctttagtgccccacacttggaagtcaatcatttctccaggtagccacagttctttttgtaggaaatggcatttagaaactgagatctcagctctaaatctgttcattgctcctgggtgtcagtgtttctaggctctttcagtgatgtagctagaatgtgagatagatagatagattagatagatagatagatagatagatagatagatagatattgatgtatttatatttctaattcatgtgtttaaaaaatatatctagacaggtaatatgctgacgtcataacaaggcttaagggaggcatgtctcacacatgagcatgacacccaatcatcagacttatgaactataaaagtatctaattcaagtttaacatgatagaattttttatttgtttctgtatttttatctcttctcttaacactgaaaatctgggtccttaaaaacagtaacataaggccgggcacggtggcttacgcctgtaatcccagcactttgggaggccgaggtgggtggatcatgaggtcaa

SEQ ID NO: 107866 - DNA, 1063 bp, Homo sapiens
tttttttttaagtaagtgcaaatcatgcttttaaaagatatataaggtctggctgtacaactgggtaattaattttttttaaccaatgcttcagtatttttttgttgcagtgcactataacgtatgcattctgtcttctgttaatggatgtttaggttggaaattggaattttagtggtgtgccactctctttcttttaaggacacagaatgcgcctgatgctggcatgcagggtcctttcccttgaccagtgttgttaggaaaattgtattgggcctggccagatttgccgatatgtgtcccttgttgccgctcctctttcacaccatctgggctggaaatacctgcttcttggttcagggtcattactaattgcagaattctgtcttggcttctacatattctcaaagcggagtctttctttcagtgctaggtttttatcatttcatttctgccagaagcctttccctctgatgtgttaagcttaatcctggttgcctgctctatttgacaattagaatagctgcttgttatgctcaagtctgtctcttcaactggggccttaattgcagctgcctctctttaaccagaggccctgactgcatctctgctctccttgacctgaagcctggattgcatctttctgctctgtttgacagccgtatcctctccctagtctagtttttcctatcctttgctaataggaatggctttggaatcagtggaacagaaggaatattgttacagaaagctatgttgtgtgggcttagtgaagagttgtagcccttgaggcttaagtgagaggtatggcaggagatcagtagcgtcacagaaatttcgcctatagcatgctgaactggagttgcagcagatgtcaaggtagaatccatggagaacttccactcccaatgccaaagtcatatctacaatagccctgacaggtgcttcacctcccaaggaagttcgcttgttgttaaagagtagagctgtcatctttttaaaatatttgaaaatacctccaagtttttccataatcttttcttcttccatgctcaaaacctct

SEQ ID NO: 107867 - DNA, 6104 bp, Homo sapiens
tatgtacacaaatatctgcactgcttagaggaaatacggctttctgacttcttcggttgtgtctcagagatatttgaaataatgccatttccgctgcattcactgttctaactgcccaaaacacgctttccctaaatatcagcataatcctgtctgtttattgtctgtttccaactctgaaatgtaagcttcatccgagtaggcattttgtctcttttgttcattgattcattacaagcttccagaacagtgcctggcatgttgtaagtagtcagtaaatatttgttgaatgattactattagtgtggttattcaaatatgttattggctaaaaagatttcttgaactgccctggaaacctaacctcttccatctgtagcattttccataatagaatattccaactgctaaataacagatgtgcaagtgaaaatgggcagcattaccatacagagaagttggttagttcttgatggattgcaactttatttcaaaacaggatgtgaaatggtctgacttcgggtttcctggaagaaatggacaggaaagtacattgtggattggctccttgggagcccacacaccctgtcatctggactcctatggttgtaacttggtattccaggtacaaggaaggtaatgtgtgtgtgtgtgtgtgtgtgtgtgtgtgtgtggaacgcacatgtgcatgcatgcaataggggtggcagagagaatagggcaataccccaaggtgtagtcccagccccatcctgtcagcctgcctcatgattagggcagacctcttaacctctggttttggtttctcctctgtgaaatgaggacagttaaaatggtggtttacaggtgcgtgccttgtcatgatcaggattgtcttcagagagtttattctagaactctgagattccactcccaggtcagctagacagctctctgcttggtcttttttttttttttttttttggtaaattagagacatttgagacagtcttgctctgttgcccaggctggagtgcaatggcatgatcatagctcctggacctcaagccatcctcctgccgcagcctctcaagtatctaggactacaggtgtgtgccagtatgcccagctaatttaaaaaactttttatttagagatggagtctttctgtgttgcccaagtatggcctcaaaccatactcctgccttggcctctcaaagttctggtgtgagccactatgcccagcctatgcttagcttttcttttttacataagagtttgtagttttcaaacttttatttaaaaatgggaacaccctttcttcaaatctaaataaataagagcagagcagtttgttgaaaggaagaggcttcactgttgccctcaagctcctctccaagggatgccagcgatcctggtttgaaaaatactggacgctttcaactctaaattttagtttgtgcctacttgacacaatacagtgtattgttaccttaggtcagtttttgtctccatctatctgtggactctagaagatacgagggataggcagtgcttttgatatacctggtttctggagttctatgagagtctaagtgtttgtgccacttggaggatgtactcagatgtatgtgcagccttattttcccctaattaatgatgccccagtcttttctcctggtcatgtgggacatttacagggcagcacagagagtaaaacagaaaaggtcatgtgcaagttctcagacctattagatgtgaaaaggattatgagcagattcaggagaaatagtcagtatgtctgtggatacatttcacatgtgaagaactctgagaattacagaatggtagaagttagtccactctctgatgcattccgtctttattaaagggcatagaatgtgtcaggtacatagctacacgctgtggatgcaagagtcaatcagatgagtgtggtctctatccttgtggagttaacaggctgaaaccttaaacttggtaagagagacaacattttaagtagctgctgtccatgtgttctgaattggaaacaagccaaagaaattcaagttggaaaaacatcaaaaaatacctgaattctctctatgatataaagttaatatcactttattttaactttgtaataagacattttctggccttatataactctggaataataaaatagctttagtaaatatccattgagtatccttctgtacagggaccatgtgttacagtaggtacagaggtgagggagtaagacaccctctctatgatgggagtttacagccagagtgcaaggcaagccgacagacatccatgatacaaggcagaatacccatgctctagaggaaggtttcacagagctgtgggactaaaaagtagaagagatcatgttcctgttgtaaagatcagggaagatttcacagaggagctgccatttgtggtgggccttgaaggatggataagtgctcaaaagacccagatgggaagggcagagggaccctgagaaagcatggggtgtagagaggaccccttgagttgtccagtatatgttgtgcattggagacagagggagtagaccagaaaggcaggtaggttgagtccccagggtcttgacttccaggcagacactgttattctctgttctttcagcatccagaaccatgagaagtttttaaagcaggagatcacatgatgattgaataccttttctaatagaaggattcatgcattttacattttttaacccaaacaaagcagattggatgggatggttatcattatggctgttcctttgggaaatattgctgtggtgcaggggaaggaactgggatctggagaagccaggagatctgtgacctagctctgaatccaccactaccccagtgagtgacactgggcaagctctgagtctttctgccactactttggaaatgaaattagactgatgatctcttcagagcccttccaactctaacattcgaagcatatcaatactgaaaactgctttcaaactaatcatacagtggaatggagcagctcttaaagcttaaattaagttaaagctttaagattaggcaaacagcttttgaacctcaatggtttttaagctgatggccgtgtaaattgataggctgccttatagctccgaaatgaatttttttttttttttttttagatacaaggttttgctttgtcacccaggctggagtgcagtggcacaatcatagctcactgcttcctcgaactcctgggctcaaacaatcctcccacctcagcctcctgagtagctgggactacaggcacacaccatcacacctggctaattttttaagaaaattttttatggggatgaggtattgctatgtttcccaggctccgaggttgttctctatcctggcctcaagcattccttctgcctcggcctcccaaagtgctgaggttacaggcagtgagccaccatacatggcttgaatgtaaatgtttactgaagagtaaagaatttcactatttctataaaaccttcaaatttccaaagcaaaataagacttcagcatatacttcttagttcgaaaacagcagccgctgtttcttggttctgaaaggacttgatagccccattctaacaactgcaaggggtcactagagggctttgggcttcttttctcagaactaggtttttccctcttttctctttgcctccccatctagacatctagatgtctgggtctcatttttttctcatacttctctcgcttttgcctcagatgtcttccctctattggcataaagcataggagtgtctagtgttttgtgagttagaatttattacctccattttcaaaactgttttaaatgacaaacattttaacagttttctttgaaaattcctatattatactgctttatttatgtggcattatttgtgcatgtccactccctaatggatcaacttaacaaatgtttaacttaaggaatttataacccaaacagggagaagtctggaaactatttggtggatagaactatgagtgtttgctctgaataagataagaatacagatatttgaaagggtgggggttattgtgaatagctctagagtcagggatgaaaactatttatgagaaggcagactttgatttgagataagaaagaatgatcttatgaactagattctatcccagcaatgtaagaggctgcctcatggatgtcctgagacatccatgaggcagccccttagttgctacacaaccttccacccggtatctgcagagggattctagcgctgagtcagagatggacaggtgaccactgatggtgcctatattcccttagggattgaatttaaacaagtaaaaatgaacacttagcttttgtcttcttccatgttttgtcttaaggtcagagtactaacttgtatcttttttttttttttttaattaggaaacgatggcatctctttcctcctgaagatactcctttcctttatccaactagaatcccttatgaagaatctagtgtgttcagtaaaatcaatgttgtcaatcctgatttaaagcgttttcctcagttccggaaagctcaaagacatgcggttacactgagcccaggacaggtaatagggctttaaaacattaatgacctgccaggggacaccacagctgtaactctctcaagtccttatgctgtgtgcttcccctccctgcgcagtgcaaatgagaatggcttccttccctctgctctgctgttggaaggtagcttccccagttgtaggcttcagacacatacacctctgcttcacaggtcctggaaaggaaatggcaagagggaacacagctcctcctattggtaaagaggagaatggactttggaggaagacagtctacaagagtcattttcatttaggtcaggagaaaatgttcaaggcatgggtactcgagcatctctggaacatttaatcacagttagtatctgttcaattatgatagcactgaacccagacacataaacacaggtcggaatgcctccaggtgtgggccaacgggcagaaggaaccgagaatgtttgcttttaagcaaaaatggatgttgttttcataaattactaactctgaaacatttccaaaggtactgtacatagtgctgcttcccagtgaggaaaatttccttttcaacattggcacttgctgtctgatatttcattaataatttgaaaggttttcttagtcacttaagaagattttattctctcgattatccctctcccttgcctgtcttccatccattgtaccggtctcactggctcttttcctgcttccttcactcaagtactatcaactcaaacaatttcacttgactgagttgcctcgacctgttagtcactctgcattcccctctccccacagcccctgacaacaactaatctttttctatctctagatttgcccattctggacatttcacacagtgcaatattataatacagggccttctgtgtctgacttctttcacatagcataatgtattcaagggtcatccacgtcatagaatgttactagcacttcatttcttttttatggctgaataatattccattgtatggatatacaacattttgtttatctgttcatcagttgatggacatttgggttgtttctgctttgttggctattataagtaatgctactttgaacattcatgtacaagttttgtgtgtacatatgttttcaatactcttgggtatacctaggagtagaattgctgggttatatggtaaccctgtgtttaactttttgaggagttgtcaaactattttccatagcagctgtactattttgcattcccaccagcattgtatgagggttccaatttctttttatctttcccaacacttgttttgcttttttatcattatttttacagccattccagagagtgtgaagtggttgccaattcattttctcttctgtgtttaatagccaaatttgagtgattggttttgcctattgtatcagttttccttacatcctatccattctttaatccactcaaacccagctctttctgtcaccactttactgaaactttactctgataggacatgcataacctactaatgac

SEQ ID NO: 107868 - DNA, 1032 bp, Homo sapiens
tgttacatcatattgaaaggctctgtttatgggattatcactcattattagacttgaagggttggcctgtgttatattaatttttgtatccccagcacccagcatcataccacgtatatggtaggtactcaaaaatgtcattggcctgaactattttaaccatcataagtcaacagattcttctttccctcccaagcagccagtgtgttccaagctgtaaccctgagccaggtactaaattaggcattgagaaaacaggggtaagctcccagtatggagcttataggctacatgcagagagaacaggatttttgccacccactggaactgccacatgtgagccatgtgcatttacagtggtgctgaccttgcaaaaattcccccttctatgacagacattaattatgtgcacgtattcagccattttcatcactcaaagcaaaaatgaaaaaaaaaaatgctctttctagtcttcctcaaaaccatccattaaatttctctttaaaatcctttctctttgaatacagctgttaatgttttccctctaaaaatagaaaatttagactgtagttactgataaaaggagtgtcagcattgagaacgatgttctgcacatagaagtggggtgtttttttttttgcttttattttttaaaactgaaaggaaaacctcatgattaaaataaaaataaggcagagccatcatgcctggttcactagtatgttttttttcttttctagcttataaatctgtttaatcacatggatttgggtttatgtgtgaccctatttttctgtgctgcaaatgcgccatcggcttctaaaagtataggcttttcccagtagttgacttgggcaggatttgctcacagaaccaggcatatggagagtcttaagtccagagcactatgctgtctctgttctaaagatcattgcacttaagaagttcatgactttggggagtatattgaaagccatccatggatgtatatttcaaaagatgtattttgacaccctcatctgaagactgatc

SEQ ID NO: 107869 - DNA, 2741 bp, Homo sapiens
gctcccaaactgaaccccagatacagtctacacagaacctgtatccatggaattgtaacattccatgacccgcacatcataccattaatgcactgtcagacggcacttttctttttaagcaactaaattataccaaggctaatattgggcctccctgtctcttacttgcagactgttgcttagcatatctcttcagccttgacttatagtcaaggactagcctaatatttcctaattttccttgtgatttactatttgacttatggattatttggaagtgtaatgtttaatttcaaatttttggggatttttcagctatctttttgtcatgaatttttaatttaattctgttgtggtgagagaacataatttgtatgagttaaatccttttaaattattgaaacttgttttatggcccagaatataatcaatcttgataaagattccatatgcacttggaaatagtgttttctgttgttgggtggagtgttttataaatgtcaattaaatcaagttgattgttcaagtctcctgtatccttactgattttctgtatatttgttttacccattatagagacagaggtattgaaatccccctactataattgtgtatttgtgtttttctcattttaggttggtcagttttgttcatgtattttgaaactgttattgggttcatacacatctgggattattatatcagcttggtgaagtgaccttttattgtgatgaaataccctctctaccttgggtttacttgttctgatgttaactatgtctgtctcctcctttgattagtgttagcatgaaaaaggagtacttactatatgattccatttttatgaaattctagaactgccaaactaacctgcagtgacagaaagtagatcagtggtgtctgagaatgagggtgtagggagagacaggttaggaagggacactgggaaccttctggacatgatcaaaatgtctgtcatcttgaatgtggtgatggtttcttgggtgtaggtatatgtaaaacttaatcaaactgttcacgttaaatatatgctgtttattacatatcagttataccccaataaagctgtgtgtgtttttttttaatacaatactattagtacactttggtcccactgtctcgacactagcagttttgttcaccattgcatttgtattatcagtgcaaatgtcaacactgtgaaataagcaagtatcatcttagaagtattatgaaaataattttgatctcaaagatcctctgaaagggtgtcagggacccccaggggtctatgggccactctggtttacaacatcacaactgtaattactctatttttttctgttctgactcctcctctaagtaattctaaaacagtttcttatgaaaatacattttaaatcatactccagattaaaattaaaatactttaatcatgttcacaaacattttataagttaaaattatataaggatagcatttaagaccctcccaagtatggctgatgccgcctgtctgctccacgcaaggccctgtccaatctccccactgacctatgttctctcttccctcctggcctctgctcatgcccccttcaatttctgcctgttaaagttctatgttttagggcctggctcaggttcagccttggctatgaagccttctcaaccgcttgtccccatatccatctgtcccttgccttccttcctatatgttttatttggattactatttaaatggtaagcaacacagaacgtttgtgttctgttcctttaacaatattgtaagctctttgggcaatgttttataattttttattcctgcaaactgctaacatagtgctgaatacataataggtatttgaatgattatataagtggattttttcctactctatttcttgttttgatatttctctggtctttaggacccctcagagaatgttttgacttaaacccctagcttcacctttgtcaaattttctgtggcttctagttaatcagtgtagcatttgtcagccttggtaagaaattcttaatctctctggccctctactagttttttaagtttttacttatagcctctacttgaagtttcctcttattaactcttttcttccacaaattaaattcatccatgaaaaatatgtacattgataaacatactaatatgattggaaaatatcctgtagccttgagatggcctaaaagtatgattttgacacttaactgacttttgtgtatagcaaataaaattaatcttattattttttagttatacatcatatcattgactaaataaagcatttgttttgaacattttgttctctactttcctagaaaggtagggaatttgtgacagtacaaaacaaaatttcttgctctcagactcattaggtaagaatgacaagttttaccttttgcaattatcgtaagtatcatcataattgaagttattaagaatcaacatgtaacaaaagggattttgccccaaggatgcttctcaggtagattccatttgatattgtgatttgaattggctactgaaggtcaggagcctcgttaagtcaccaggacacagaatcccaaaatacagtagatggaagattagttgtaacatgtcttggactttaaaacatagctatgagagcatgttgaaattgaggcaggtgatttggtaatgaataatggcgtctgatggccagtgatgctttctgatgagacaagttggaatgtaagaat

SEQ ID NO: 107870 - DNA, 5332 bp, Homo sapiens
gtagagacagggtttcaccgtattgcccaggatgatctcaaactcctgggctcaagtagtcctcccacctcggcctcccaaagtgctgggattataggcatgttccactacgcctggccaatgttggtatgttaagagtttatgtatattgattgtttactatgtgccaggcactaagtgctttacaaaaattgttaaaatttaaatagttcttgaatatgtacattttaatcttttagataaatgtgccctagttaagttcttctgcttctcaaagtgaggtgacaagttaaagtggatgaattaggatgattcgttgacatacaccctgcctctattacctctctgccattctgtggcttaggaaaaagaaggtaaaggaaaaagattattggataattctaagcagttacaggcagaaacgtaagaaaagataaaagctgttgaaagaagaatgtgaatattcttctcttcctgctactgattcagctaacttttaaagggttccaagtaaatatatgaatggataagaagtactaataatagtgcctaacattgactgggcacggtggcccacacctgtaatcccagcactttgaggcccaggtgggcagatcacttgagggcaggagttcaagatcagcctggccaacatggccaaaccccatctctactaaaaaatacaaaaattagccagacgtggtggcacatgcctctagtcctagctacttgagaggctgagacgcgaggattgcttgaactcgggaggcagaagttgcagtgagccgagattgcaccactgcactccagcctgtatgatgagcaagaccctgtctcaaaacaaaaacaaaaaataaaaaaatagtggcgaacatttattgaaatctgctgtgtcaagcactgtgctaactgatctacatcacatcctgaaaggatttcatgttttgtaaaggaagtcataatcagatttcttaaatattaacttcctctgttcatttaagttgcaaaaataaaattaatttcatcattcttttagaatagtttttgtgtcaatccactgactccaatcttgactcattggagtcatacccataataacaagccactgtggacagataatacatcttttattgaagctttcctgatcaaccctcatctctagtggtctttgccttttccaggtgtcagcagcataaaattttgcatttaactgtatggtgcctcaagtttttatttactaaatcctcaagtttggattattaaatctactcatagggtagtctttaatcttaaggttaaaactgctttatacttttatgtttaatcctgagtattgtgaattttgtaaatggcactcattatataacaagtacaaattaatttttaaattttttaattaatttttttttggagatggggttttgctctgttgcacagactggtctcaaattcctgggctcaagccatcttcctgcctcaacctccagagaaactaggattacaggcatgcaccaccacacctggctcaacacgaatttttaattagtcttcaaagttaattttttggttgaaattatctttattttaaaaaaaaaacaataattaggaaatgtgttcattatacatttaaggttgcattctcttacattgcagttcctcagtttgaaactacatgtaattacgtagaagctacactcgaagagtttctgacctggaactgtgaccagtctagtatttctggaccatttagagattatgaccattccaagttctgggcttatgctgactataaatattttgtcagtctatttgaagacaagacagatcttttccaggtaagtcagaaccttccttctaatcttggtaggaatttgtttttgagaaaagaacacaaattagaatctccctggcaccttctctgcctttttctctcataagtaatcgccatgaatcttggatatttcacccactcaaaccaaaagatttgctgaagagaagtgtaccatttggctcacacagatgagcaggcttccttgttttcctactcccaaacttcctacacaccctcctttgcttttaaacagtgcttgagtcggtttggagtatgttagaagcatagattgtgtataaaacttcattgcctcctgacctccatataagttcttgtcctgtcagtgaggcagatgaaagcataaagctgattctgtgaaggagcattccttgggctgtgaccaggctgctgctgcaatttctacctgctctaggggttttggacagctgttttctctggcagttcatggcctgaggcagagaacacttggctcccagtatttggtagtggaagccctgtagaagtgtgggagtgacttgcagaagtaaaattatggaagttctttgccgtatgttgacataactgacaacagagtttccagactaccatatcctcttttaagtgttttctaccttaaactggcagtttattttgtgagataattttgcaaactccctgctcttgttgccatgtgtcttaggtgtggggcaggaatgggagccatcctggaggctgtttggaggactctgccttgccctgactcaggccaaggctccagagtccttcttcctgccccttctttgtggagagaagtatttcaccatccctgcaggctgttcaccccttctcctctctgccaccacccactctctggacttggctttcatataggctgatagttctttggctcctcagtaattttccattcagtgtatatttttcttttttatgttgagtcaagatgtaaatgctgatgttaacatagttattataatagatcctcccatctcagtctcccgagttgctgggagtataggaatgtgccactgcgcctggcttaattttgcttttttattttataaaaaaggaaaaatgtgtcaccttgccccatagttgttttttttgttgttgttgtcattgttgttttgagatggagtctcactctgtcacccaggctggaatgcagtggcgcaattacgactccctgcaacctctgcctcctcccaggttcaagcaattctcctgccacagccatcacccaccccctgaccccagtagctgggattacaggtgactgccgccatgcccagctaatttttgtattgttttgtagagacagggttttaccatgttggccagggtggtctcaaattcccgactttaagtgatccaccagcctcggccgcccaaagtgctgggattacaggcgtgagccactgtgcccgtcctgtcatagttgttagttgagaatgtattttcattctcatacccatgaaagaaatgcataggttttaaaaacattcagtaaatgactctgaattcaaagtcaataccaaatctactatttactcatttttaaatgataattttaaggtagatgttttttcttacaaccttaattgtgatcactttatggttctttaattatggaacttacaggtttcatagttaactttaaaagtgttttgttatgtttctcatacccacgccccaccattccgtaaattagactagtactttactccatatttcaggtaaaatattgcttaatagtaacattgatcatgtacttactttttgggggaatttttctaatgttttacacttataatcctcaaagtaactctatgatttaataattgtccccattttaagaaaaatgagacccaaagaggttaagtaaaccttttctaagattatacaacaaggaaggggtaacccaaatagtctgccttcagagctttaactactacagagctttaattactgctgtgcctacagagcgtgtgcatacattcggtcctgttgggactctctgtcctgagtgtaggctcactctgccttggatgagtgtttgatctgaccccattagtagttctgtcccaccccaggcaaggcagtactgtgcagtatgtgacctgtccattaagtgcggatataaagggcagccttttggcaatgtgctggaattctgactgagcccttataaaatctgatattttgagttgaatgagttttctgtcagctcatattatggcaattaattctgctatgaataaccaagtccattaagattatatcatcttttgtctcaaaattttctgggcaccaagtcttcttacatcacaggtacctgtgttggtttaattcattcagccaccaagtcttattacttgctgtttcaagctttcttatatctgtcataaaatggtgggtagttaaacattaaaatgggtacattttaaaaatgtttattgatttatttaaaatgacacaacccactatacgttaacataataatatttttgagaaaataactatattcaaaaaatgtttaatgtcattagagggatagattgttgtacattttggcatgtcttcttgatgtctggctgtaagaagacagctggattctctgcttctccattcaagctgttgcaatttgttggtttgtttaaagtatatgaagaaaattttgcctcacacacatatgaaactgaaaaagggaggagtatttattaataacagccttttcagataattgtggatttttttataccacacacaccaaacttgatgaggggtagtttcttaaaggttcattagttgcagtataaaaatctgaacctataatgaatgaactctctactcttataaaatccattggtctgtcttgcacagaatggatcttatgtaatgttattcatggaccatttggaaaatattgacttactgaattagtagatcttccaaatgttgacacattttcagtatacttgatacatttcattattcaaaaagtcacatttgttaataccactgttcttatcagaaaaatagtgttaggaagctttcaggctcatgtatttctttttttttttctttttctcttttttttttttttgagacagagtctgactctgtcacccaggctggagtgcagtcacatgatctcagctcactgcaacctctgcctcctaggttcaagcaattctcctgcctcagcctcctgagtagctgggattacaggcgtgcaccaccacacctggctaaattttggatttttagtagaaacggggtttcaccatgttggccaggctggcctcgaactcctgaactcaagtgatccgcctgcctcagcctcccaaagtgctgggattgcaggcatgagccatcatgcccagccaaaaatgcaacttttaaaataatataattaactataattactatccaaaacttacgaaggataaatatttcaatccaaatttcaaacagcccctt

SEQ ID NO: 107871 - DNA, 1006 bp, Homo sapiens
agcatcatttctgtccctgagctcaggccagacaagcatttttcagtttctgtatttccagggctttgtttcttcctacttcagggcctttgcatgtgtatgtagttccctgtgtctagcctctcttttctcacttccctttccccctactttacctaaataattcatctccttctgtcagatcttagcttaaatgtcatttttcctgaccaaatctatccttccccataccccaaatcaggtgtgactattcaattacctcagaacactttgtatttcttagtaacacttagcacagttgtaatcacatggttgtataattacctgtttaaagtctcttcccctcaagaaggtcacttctgtgagggcaagggccacgtctcatcatgggctgagcacctaatggacattgaatttgtgaagtgaaagaatgaaagactttgaaacatacagctaagggctttgcacgaaggcggtttctatttacattcttttcagaacatgtgagggttcctgttttgctactctttggccaaaactgaaatttatcttaaagatctttcaggctggccatggtagctcatgcctgtaatcccagttctttgggaggctggagcaggaggattgcttgagcccaggagttcaagaccagcctgggcaacatagcaaaaccctgtctctacaaaaagtataaaaaaattatcttggcatgatggtgtgcacctgttgtcccagctacccaggaggttgagatgggagatcacctgagcctgggaggtcgaggctgcagtcagctgtgatcatgctactgcactcaagcctgggagacagaatgaggccctgttacgtgaaaaatgttatctcattattttaattaacatttatttggccgggcacagtggctcatgcctgtaatcctagcactttggggggccaaggtgggcggattacctgagctcaggagttcgagaccagcctgggcacgtggcaaaaccccgtctctgct

SEQ ID NO: 107872 - DNA, 1571 bp, Homo sapiens
tgtatacccttggaaaataaaaatgtctagcttgacggttaaaaaaaagaaggaactgaaatgcaacagtggttgtttttggtttgtagtctataggcaaccaatcaatttgttcttttcagtattttccaaattgtatttaatgtgtgtgtattaacttataattggaactatatatactttttattgttaataagttaaatcataatttctaagtaagtattttggaaaacactatacacattaaaaaaaaaaaacaacaaaaaaaactacctgttgagtactgtgctcactatttgggtgataggttcaatagaaacccaaatcttggcattctacaatatacccatgtaacaaacctgcacatatacccctggatctaaaaaaagaaaagaatcaggtcttttgaggccacatgtgtatataaacagcagtaaatgacgtatacattattgtaattgtagagaatgatttgccatgataaaaacaatattagctattttttctccatattgtatgaaaaaacttgatagttttctatctattgctgtattcatttctctttctaggtgaacatgtcaaaccttttaagccagagaaagcaaaagaaattatcatgtctttacaacaacctgcaatcttctgtaacatggtgtttgattggccagcacgacactggaatgctaaatacctttcgcaggtccttcatggcaagcagatacgattcagaatggggatgaaaagcatgagcacaggtatgactataggtaatcaccatcataatgtctcttcaggagcatccctacattctcagcagtggcctcctgatctcttgagaatcctttctttctaatcctttttttgaccattcactgcacatacaggaacattttattggaaggtttggaaaacagtttggcttaagtgttttttgtttttgtctgtataaactatagactgttttgtctatagtttataaccccatacaaaatgtatttgttcatgtatcttatatgtatattgctagacattattgtggttcattaaatgttagacacttaataaataaatatttgttaatgtgctcttattcatgttcctattagaccaatactaatctaatagtcccgtccactttttactcaagtagaatgtgtccttttatttgtggcttcgggcactatttatagttgtatataattacttggttgtaattttatccctctgctttattgactgactgacctgttttgcattgcacaaacatgaaacatatgtaaagctcgctcttttattctcttaagcaaatagattctgcctcttcttttctgaaatcaaaatcataacattttgatttgtttgccctattttcagataaagcaattaccattaactctaaaatttaggtaatttaccattaactctaaaattacagtttctaatctaagagagtctataatcatttttctgatgtttaacttgtatttcaatatgggtaagtttggtagtctagaatttcagttttttaagcattgaggtaaagtggcttattaatatctattaatagctta

SEQ ID NO: 107873 - DNA, 1582 bp, Homo sapiens
tgagagacaagttaatttcaatttcaagatttttgttatattctgttaatattcggagtgtcctggacacatggtaaatgttccttattcttgtcttaaagtctaaatctcagatacaaatccaggccaggtgttaattgacagacaccagatagttggcgttctcagagaaattaggtttcaaattatcttgtactttacattaattttaaaaaattactgagaaggacgcaatttatttttgatgatgtttcactatctccaaagaattagttgcaactcaggctgtaataaattgactggagaacatcctacatttggagagagaaaaaactattgggtaacacccagatcactaatctgttttttttcagtagtttctaaatcatctagttaaaaattactacctgctgcaagtttagacctaaatacccttatcctttgaagactgttgaggttgcttcagaatttttatagctctttgcaaaatattattagcatggaataactgggtgcatccataggctgtttaactaatacagggtagcattgcattcttctttaaaggaaattgtaacatttaaattcattaatttaatggcccagtttattgttgattaaattatcagaagctaaattagttttatctcacaaccagctgattgttttatttcacgatgggcctgaaattctgtaaatatgctaatttcctgttatggtgaacatcctgctactctgctttgcacacacttcatagtgctctcattcatttagcaaatgttttggcatttaatatataccagtcactaggccaggcactctctcagcaaattttagtgttggaggtctcctattaaataatctctgggatgtgtgggatttttagatcagataattacattttttaaatttaactttatgctagagaagaaatatttacttctttatagcttttttgtcaaaatactactcatgtgttactgtcgcctgtgtccatatttatagaaggctacccagttatatctacccaagtatgaaccattttgggaataatcaaagccatgtgatctattggctctaatgtaaggtaagtagaataaataaatcgctaccccaaagtaactcatgcttctgtttttctctgccctttaaagttccagaagcaaaatgttcaaaggttgaatattttacaagcttggaactgaaagaatgctacagtgtgtcagaccagccatgattcatccagcccaagccacagaacagtgtagagggagaatatggttatccttgaaaatgatggcctcagaaagcaaggtgttataccagctatgaattaataacagtctagactagaaggaattttgtttttttttttaatctaaaaggattcaggaggtagtagttggttcagtagcacaaagatgaacatatttgcattcttttggttaaggtttgcgatttcctggacctttcatttgtctctcaagagggctaatcatcatgtctgcttttcaggcagtatatagaaaaggatgagggcaaaaaggctgactcgcaacttccatatgtgcgcgcgtgcaca

SEQ ID NO: 107874 - DNA, 1018 bp, Homo sapiens
gccgaggtggaaaggaaggatctgactagaaaaggagaaacagaaacgaagctaagactacaataaagaacgctaaggtccgggttaggtaaaaagcgccacaactcagaccacgtgtttgtatttccacacccggggtatcaaaacaaagctgcgtggtcccgcccagcatccgtcacgtgacctccacgtgagagccggcgtttccgtaggagccgggcgggagtcgccggggctccttcctgtggtgcagcttcgggtctcggagtttggcccctactctgaccccaccccagctccgctccgccttgggttccggcagaacccgccttgcggtagccatggcagcaggctccgaggcgaccactcctgtgatcgttgcggctggggctggaggggaggaaggtaggtgccaggctgaggtccgaccctgagtacaaacccaatgccagttgactctcgtggcacccctcgtggggccgtttgccttagccccaacccaggtctctctggccttgcattagactatgaagaaaaatctatattttctagtgagcgtggcatttctcgaattgtggcatccagatttttgatcgtcgtagggtagcctacgagtgctgtttcacgcatggggtgttatttttgttttgttttgttttatatttgcccatcattagctaaatagaggtgttttgaacgtttagaggggattaaaattaaatttgtgaaattgaaggcaacctttgagattaatggaagttatctgagacttttgtgaacagggattatgcgcttttattctatttcagtgaaccctggtttagcaagtggggatgaggtttggaggcccatgagcctgagatccctgttattatttattgaatgattgcaccgtgcagggctgtgttctgaatactgtcgcaggatccagagacttttgaatatttataacaataccttttccaaaggagcctagaaaggaaaaagaatgacttactatgtggtcacctgaactatt

SEQ ID NO: 107875 - DNA, 1055 bp, Homo sapiens
gccgccgccgcctcccggcttctccaggaggcccccagcccaggcccgagcccgggccccagcagcggctgcctctcctcttcgctgctccagcgagagcccatggcgacgcgtcgcccgcgaagccactgccgggcgcagtccgggtcaccgccgactagcccagcgcagaatagtcctgagcagcaggaggcggaggctgctgtggtcgccctcggcctccggaccgcgcctggtgcgcctgcgcggcccgagccgggccggcggggaggcggggaggcggggcaggcggcaaggaggctggggtccgccctcccctccgcgggtggcgaggaaacaccggcgagaggaaaggagccaggtcccagacggagggcaggtagcgctgaaaaggcagggaccagcgcggctgagtcggggagagggaaactcccagagaggctgtattcgaggaggttgggcaaggaaccctggggtgtttggaggaagtgtccaagttaaatcttgtgcctaataaacaactcagtgacctgttaagtgacgtcagttaacctgatgcttgcttctattttgggcttattctcatttttgttgagttagtaacttcagaaattataggcgaaggataaagtttaagcgtagttggtcccaggggattatctcataaaaatcatttcttacgtgcaataagtactacctatttttgttacttttttgtcttacatatccaaagaggagattccaaactagccaatttcattcatatatatgtaaactttacccatttcgcctgccaataggcgagcaataaaggtatgtccagtaaagttggaagatttttgccccaaagatccatctccagtgattatgatttgaccacagggtaaacgagaagaaaggtggttgttgatctcttcacacagctgtttgtttattttggtatacaaattcagaagcctgacagctgtggattagtgtccttgaaaacctaaagtcaagcaatttggcttgtctggatcgggaaatgagtcacagggaacgcaatcacaggattc

SEQ ID NO: 107876 - DNA, 1049 bp, Homo sapiens
ttccctctccccgactcagccgcgctggtccctgccttttcagcgctacctgccctccgtctgggacctggctcctttcctctcgccggtgtttcctcgccacccgcggaggggagggcggaccccagcctccttgccgcctgccccgcctccccgcctccccgccggcccggctcgggccgcgcaggcgcaccaggcgcggtccggaggccgagggcgaccacagcagcctccgcctcctgctgctcaggactattctgcgctgggctagtcggcggtgacccggactgcgcccggcagtggcttcgcgggcgacgcgtcgccatgggctctcgctggagcagcgaagaggagaggcagccgctgctggggcccgggctcgggcctgggctgggggcctcctggagaagccgggaggcggcggcggcggcgctgcccgcggcggtcccgggtcccgggcgggtatacgggcgccgctggctggtgctgctgctcttctcgctgctggcgttcgttcagggcctggtctggaacacctggggtcccatccagaactcggcgcgccaggcctacggcttctccagctgggacatcgcgctgctcgtgctgtgggggcccatcggcttcctgccctgcttcgcgttcatgtggctcctggacaagagaggtgaggggtcgcggagcgccagcccgcgctgtctctcctccgggagcaggcgcctgcccgcgctccaggcctgccagccgcctcccttggccccggcataggggttgtgtgaggtgatagagtgttgctagcattccatttctgacttaggaaccctccgtccccaaagcgacaaatatggaaaggcaaccttgcaaatatttatgttttttatcaaggccctttatgcaacaccagggatttaagcgatctctaaacgttcaagtttttacacattgtgaacatcagagcatccccgtgcacgtgcggtgtatgtgttttacacctgacaaaaatgactgatgctttgacttcaaagggatatggggatgttgaggatgaa

SEQ ID NO: 107877 - DNA, 1046 bp, Homo sapiens
attttggagcagatggcgtggagatgagggatttgaaatgcctattagatacccaagtagacagattaaactgtcaattggatatacaagtatggagttaaggggagaggcctgtgcagtatatttgggagttgtcagcctacaatggtatttaaagtaatggggctggttcaagctcattcttattggttaaaaaaaagaaaaaagaaaaatataaaaagtgtcttgtggctgggtgagatcacctgtggagaagggtggagcttccctggagtagaggactgagccttggggcattccaacattcagaggttggggagataagaaagaaccagctagtaaggactgagaatagagcactggatttagcaacatcgagatcttttggtgtcctttgaaagaatcatctcccttgaatgatgtggtgagtttgaaataaaatgtaacaagaggaatcaaagacagtgagtgtagaaatttctttcaagaatttatgccataaagggcagcagagaaataggcagtagccagagggaatgtgggtactaaggaggtttaggttttgttttgttttttcttttttttggtaagagatattaaagtatatctattaatgcagcatcctaacagttctataaaaaggggaaaattgatgatgccggagggaaagggaggaactgctgtagccatgtaggcaagatgggatgtggtcctccagggcacaggtagacaagttggccttagatagaagcattgacagttgattctttagtagtaacgggaaagaagatagagtatacacataaggtgcagatggtggatgataagagcttgtagaagttatctttgcttttttcccctcagaaaaataagaaacaaaatgatcccctgatgagggagaataggggaacagttactggagagaggattaattatgaaactattttatagaaaaatggagaacacatggtttacgaaattgtagtaggattcttgggtagcactgagggcctgctttcagtgactgattattaatttgaagtcag

SEQ ID NO: 107878 - DNA, 1050 bp, Homo sapiens
tttttggaaacagagtctcactctgtcgcccaggctggagtgaagtggtgtgatctcagctcactgtagcctctgcctcccaggttcaagcaattctcatgcctcagcctcccgagtagccgggattacaggtgtaatccaccacacacggctaatttttttatttttagtagagacagttttaccatgttgcccaggctggcctcaaactcctgagctcaggtgatctgcccacctcggcctctcaaagtgcaaggattacaggtgtgagccaccatgcccagcccatcatttcattttcagcatgtagggttcgttgtttttttttttttccatttttaaagttatacagaaaagccataatattagcatataatgtcagtatgattgactaaaaataatctttatttttaacattggacttaggagaaaatcaagataatttcaatgtctttgtttcattttaggtctccggataactgtgctcctgacatccttccttatggttttgggaactggtctaagatgcatacctatatcagacttaatccttaaaagaaggtaaatcctgtaaataacatttctcccccatttttcattttattatgtgtataaatttttaagaagatcagtaaagggtcatatttatagaagcgtttatttttttactctatatgatgattaatttaattgatatttatcagttgtcatggaagacactagttgttgtggaaataaaaagagcaagttaatcttcatattgtccaggaacaataataatcatgtgaaaataatagtataacataccatttgtaagtataataatataacatattatatatatatatagtgtagttaatgctacagaagaaatacaaaattgcctcgagactaggagaagttttggctgtgggtatcaaaaagaggagttcataaaggtggtggtaattaaactaggcattgaatgatgagtagaatgttggtaactatagtcaggggaagggtattccaggatgggggaatagcaagagtgaagccatggaggcaggt

SEQ ID NO: 107879 - DNA, 1095 bp, Homo sapiens
taaggaaaagtgtagcacccatttaaatgatactgattttgactgggtatggtggctcacgcctgttatcccagcactttgggagggtgaggcaggtggatcacttgagctcaggaattcgagactagcctgggcaacatggcaaaatcctgtctccaccaaaaatacaaaaaattagctgggcgcggtagcacacgcctgtaatcccagctacttgggagtctgagatgagaggatcacttgagcccaggaggcggaggctgcagtgagccaagattgcaccactatactccggcctgggtgacagagtaaggccccatgtcactcacacaaaaaatgatattgatttggcagatctgtgcttcatgttgtaaaccctaagaagtccttccaagtatctttcttggtacaaactctgagagagatagagaccctgaatcatatcagttattaaataaagtagaatttaaaattacatgaaagcaattttttaaatttttaaattaagtattgggtagaattgtattaactagggcaaatgtcatgaacaaagcaagtagaaaagtactaaatgttctgaaagtaccagcatcagtacagccagatatgcagtggtccttaacctagagcatgaccccactcacctagaggatagaaggaagtgtttgtgggagcctagtgggcgttggattatagataccagatgtgctgcaatgagaggagtggtcctacagaacagagaattctcttgcctcaaatgccaatagtgtgaaaaactatagagcgataatttaagcttcaggatgttatccttctcctgagagccttcatgtttgcttctggcagcaaacaccaatagagcaaaagactcatataaagttactgtatcgcttagaataggctatgctcctgggagaagtagacctccaaaattctgagacttaagaaaaatttatttgtcattcacattgcaatctgggacagcgtgtgtaatctaggacagttgtccagtttggacagctcttttcctcacactgatttaagagaccgaggctgcttccacttgtattctcttctgtcccctaggaccttgtc

SEQ ID NO: 107880 - DNA, 1026 bp, Homo sapiens
agggctggaaatgttttctcaagaggggaacaagctatacttttgaaacccagctcaacttctttttctctgtctactctcttgctcagccccacatttctccctgccttccacctcctgatacatttttagttgttgccccatgttttagcatctcattattacctagcagtttcctatgttggttatatttaaactttttcaggctgtgactatcttccatccttttcttattttaagagttcctagtccaatattaggcatgtagtacatacttgaaaatatttgtttgatgacgttgattattttgttttcaatattccaataaacagttaatcaaggacatattttagatgtttgtatacattagttacacatgaattcttttatttcatccatttagctactaacatattgattatagaggactttttttcattccttttatattgcagtatgattgtcttgtattaaatgtgtctgcttctttcttaacaggtagatgctggctggattggattttggtccatagttggaggctgtgttgttggaatagctatggcaaggtgagaatattttgttaaacttgtgagtggacagagcagggggaaaaagcctaaagataaataggctcccctaaataaacattacaattcagggaaaagtaaaacaagcaaaggtcagaaaggggtacttgttcagagtacaagaaaattcatatgcgttatatagaattgctgctaacaggccgggaatggtggctcacgcctataatcctggcactttgggaggctgaggcaggcggattacctgaggtcaggagttcaagaccagcctggccaacacggcaaaaccctgtctctactaaaaacacaaaattacctgggtgtggtgatgagcgcctgtagtcccagctaccagggaggctgaggcaggagaattgcttgaaccccgggaggcagaggttgcagtgagccatgattacgccactgctctccagcctgggcaatagagtgagactccatc

SEQ ID NO: 107881 - DNA, 1038 bp, Homo sapiens
aaaatattttaattggtatttttcacatggaaaagaagtataatctttagccttaacacatagagcatggaaatgcttatatttgtttaaaatttctatcagagcataatacaaagatttttatcttggttatagtcattatatcactgttaaataataataataattaacaaggcaaaaaactatggtatacttcagtaaagttatttgaaccagcccctataggtttattttacatttagtgttattccatcattaatacaaagcaaaacttactggaaatacctgttgaaagtatattacagccagcttacttagcttatctaatggacctgaaacatttttagttgctgttgtttttcttgtcattattaatatcatcaattcagagtctattttctattgctgctgtaaaagttatgcaaatttagcaacttaaaacaacagaaatttattatcttacatttctgtagagtagaagttcaatacaggtctcactgggctaaaatcaaaatgtgaacagactctagggaagaatctttttccttgccttttccaacttctagaggtcacccacattccttgtttatggctctgtcctctgccttcagagccagcaaccttgggtcaagtccttttcacgttgcattatctgtgcctttcttccatcgttacatctgcttctgaacccttcccttctgccttcttctttcttcctcttccacttttaaggatgcttatgattacattggacccaccaagataatttggaaaagtctgtcaattttaaggccagctgattagcaaccttagtcccatttcaaccttaatcccctttgtcttgtgaaataacatattcacaaattccagagattgtcatgaatatctttaggggagggagggcattactctgcctaccatgggatctttttaaaattactatgacagattattattggcttataaaccagagactctgttattactccttcctttcttccagcaaaatattaagatgcatattttatattatttgca

SEQ ID NO: 107882 - DNA, 1040 bp, Homo sapiens
aaaaattagccgggcatggtggtgggcgcctgtagtcccagctacttgggaggctgaggcaggagaatggcgtgaacccaggaggcagagctttcagtgagccgagatcacgccactgcactccagcctgggcaacagagcgagactccgtctccaaaaaaaaaaaaaaagtattcacacatagttttgtttccctaaagtttagtaatttggttttttacgggcacaagggtggggaggagtattttcagggttatgatccaagtcatgtgcttgaaatacattcatttttaactgtagtttgtgctacacaggactttgttttttaccatttaaagtgtgggcccatgaaattttattagctttttattagaaaaaaaactgcatcagcacttcagttgtgtttgttctgctgaattaccttgaatttttaattgaaaggcagttgattgtaattttagtatcagtattatacaaagttatggaaatacttaatgatcatgtagtttgaaccctctatgacaagcaggaaattatcttgtctgcctgacttttaatagatgacattcacccactgaatgtatgagaactgaaaactcaaatggaagtcaaattcagacttggaataatcagcctctgctttatgcatgccccagaacactggaatatattaaatcagtcctgacacagctaccttcccccattctgatgatgaagatctcaatctaaccccttcctgggtaaattattgtgattctttactttctgcatttccacatgtccaagtgatttccacatgtctatccattgtaatagaaacctcttggtcatcacttttatggtaatacaagaagcaaacaccaagactgagacaattgaatgaaaatctctaatttttgattactggcctctgaagttatatcatccgtttatcctacatatagtagcccatttgtcctccatataataggcattctaacaaatgggaaaatcttcatgtcaaggatcctgcgccaaggctgtgttatgtggctcctggg

SEQ ID NO: 107883 - DNA, 1062 bp, Homo sapiens
atccttttaattatatgatagtggtaaattgttttgtgctctggaataatccaccagaaaggtaaaggagataaactggtacccatccagcaataaaatggttttgtatctactccagaaaactgcagcaaagagctggcagatgtgtgatgctttgtcaaactttatcaactacctttgaaaagaagaaatttttgagtcaatacttaggaaagagaacaccccgaagatctatctgatatgactcactgccgctagtgtgaaactaaaatgtttgtgtttttattttagtgacattgtatgcctcctgtattctcctgggagtgttcttgaatagcagcgtgcctatattttttgagctttttgtggaaactgtctacccagttccagaaggaattacttgtggagttgtcacttttttaagtaatatgtttatgggagtacttttattttttctcacattttatcatacaggtaagaaatttgattttttatttactatctaaatgtgttacaagaaaagtttgggtcactagtgtatagaagtttttatatggagaagtctcaccaaggcaaattactttatgtgaacttccattgccagtaaaagaaaaattcctcagttgtttttcttaaaatgcattctagctcaagtgcaccctcactcttctctgccccgcccctgtactcccccacccccgaatttctgaattaattaacctgggctggagcccagtatttgtatttttaaaatcctccccacccccacgccttaccctaccaggtgattcaaatatgtagattctcattgagaacctctggtctattgctttttaaaaactacttcgaatctctcttaacacagggtgtaaattaatgttaggggtgtatatggagtttaaagcctgagggatgaatgacaggatgtcacccaatgtaaggaatgctctaaaatgtgacactccaagaggccgaattgtttataggagtgtttctgacagggttataactgaaataataaccgtgctaacctccttgactggaaagcaaattttgaaactt

SEQ ID NO: 107884 - DNA, 1983 bp, Homo sapiens
tcagatgattttcgtatttgtctttttaatccatcagatatttataaacagggacaagagtgatgatgatagagggtacttaaaaaataattatcaaactaacatttaaaggtgattgattttttttctttgaagtaatttattttgtaaccaaagtcaaggtggattaaattgatgaaaagttatgaacaatattgattaaaaatattccacatggaagccccgtcatatattacacacatcacttagtctccagattgtcactatttattgaaagccagtttctaggccttccagggtacatttattataagtactttttaatgcagagcagattccttccggcatacaggtggtggtctgctggtgatacatgaatgtttaaaactgcatgtttttttgtcttacagagttgtcttggttcaactggtgccttcccgggtcgtgtttgctcagtctcctcctcattctgtgcttcagggaatcctatgacagactctatcttgatgtggttgtctccgtttaatagcacagacttgaaggagtttaaaaggaggctggaaatcaatactgcacactgcacatttgctcagaattgcacatctaacaggaaaagagggagaagaaagaaacttcattcagaggttttgttaggttacagattatcacattaatttaattactactaggtaataataatgggagacttgagtgataataggggattttaaaactctacagatggcatacctgtgcctgcttctggggttggaagtgtgacttcttacacataaagcactacctaagtaattctctctctgttttgtgccagtgctaaactactgattacttgtaattatgaaaagaaataaagggtgtctatcatatgaagataacgccttccctaagtcacatatcagaataggaagatatgccactaacttctaaagaagttcaaaccctgtatccaattttaatgataaaatagccaagaggtatatcgatgatggaaattagccacatgtacactacattttttctaataaagccatttcttatatgactccttattttaatcaggtcagaagcccttggccatctttactatggtgatcaggtgctttccagtgacttctgagcataggcactgtgtctccatctcaacttatccttgtttctgtgaaatacaatttcatctactaggcccttaaataattatgtgagggtgtctaaatgtttaatatgattacattaaatattgtatgaaaaaatgtaattccattaggatctagcactttgttacaagtgaaatgacaagtcacatggacatactgtgtcttctgcctgtatatggtggcatgagatgtaatgtccagagccaacaattatttaccagggttagattttattcagtgacccttgtttaaaaataataatttatcacattgaaactttcagctctgtcgaatgatttctgaattacatcctgtgtttcagcttaggttgtaaaatactccgttctctgtggagtcagcatatttgagagggcagcgttttgccagtacctatcttctttctacagaagatagctttttaagaaataagagttccacattgagtggctgtcagacacagatttcactgtgacgtaaaatacactgcagtgagaatatggtatcaccactattcatatttacatcattcccctcacacagaaaaaccaacccttttcccaaaaagtcaagaatactgctatacctttattattctcagcttcctccagcccttcttgtttttcctcacttgaaattgaaccttcattgtcagctaagtatatatacttttgtgttttcctggacagagtgcaagtggctcttatcagccaaggtggtgaaggttcaggaaagctgggcagcactgggccctgctcctctctgcacctgtgtgcgccatgacacacccacatgcagattcccaagtctg

SEQ ID NO: 107885 - DNA, 1056 bp, Homo sapiens
gggttgagggacggcgcggggctgcaagcttccggggccttcaaggccaccttggtctggctccccctctcctccagagtcgggcaccatcctgaaggcgctgtccacggcgagccgcagcctccacggctgctacctggaggagctgcacgtgctgccccccgggcgccgcgagcccctgcgcagcctgcgcatcctgcacagcgcccgcgcgctcttcgtggggctgagagacggcgtcctgcgggtcccactggagaggtgcgccgcctaccgcagccaggggtaagccgggacggggcggctcccgaggcctccactgcggaggaggcgcttaagaggcggggctttggacccgggagacctggggtcggtccctgcagtctccactagtgtgccttaggacaagtcactccacctcgctgaaccttggttctctcctcgtaaaacatcttgcagggtttttgtgagggttaattgagataatctccataaagcacttatcagtacctggaggaagtgtgtgcttagcaaattttggtgggtggctgttgttatccctgttgtcaaacacatagctagggccagtcaaccatctctagcccacttgatttattctcagtcctttctgtacagagagttctttatctttgaagccacagcacttattgcccagatgtggggacagatggagatgatgctttgagtcagccccacgtttttgctcctcttgcttccttccttagaagaggtagagagggctgctgcaggtagggcagaggtgaggcgccacgtggaggagttgccctggcttcccactgcttctgaacttggttcttcatgccgtagcttcaagcggactcacagatttgacaactgtggcatcagtgtttaagggggaaaccaaagcctattccaaagccaaatggaaatgtagcccagactcctaccacccgaggctctcccaggctgcatggcctcattttcatgatactcagaagctggcaccaccacagccatgcgagcttctgtggcctttgcaaccgagagtcctgg

SEQ ID NO: 107886 - DNA, 1372 bp, Homo sapiens
cagccatgtgatgtctgtgtgctcctatgttcctcccccaggccacagagtgggcctccagtgaggacacgcgccgctcctgccaaagcaaagggaagactgaggtacgtggtctcggcggtccaggggccccacctggagctggaaggaggcctgtggttgtggggatggagcagcactgtgtggactgaggtcccctgctagagaggcctggccaggatgagctggggctccttgggcaggtgaggataacagccctgtggcgagctggtcctgagcatctgagtgagcagtgatgcggagaaatgaccttggtgggaggggacgtccacagacgtgacccggacgtcgggacaggtggatctggggtcaaggggagtgtttagaatacttgttggcatccatgacgcagtggtgtgagcgtgagatatccagcatcgcacctggagagctgtgctgtctgctcctttccttcctgcctcaggaggagtgtcagaactacgtgcgagtcctgatcgtcgccggccggaaggtgttcatgtgtggaaccaatgccttttcccccatgtgcaccagcagacaggtgggcacctcagggtggaggagactgaagggggcaccatgccgggggttctcctgcctaggcacacagccttgaaggggggttaccaaattttgcaaacagacacccaaaacagaaacaaaaggacacccagttagatttggagttcagataaacaataagtgatattttagcataaatgtgtcccatgaagtgtctgggacaaacttatactaaaaatttactccctgttcgtctgaaattcaaattgagctgggccttctgtattttgttggtcagccttaccttggagggtcctgactggggctggaggcagatggagctactgggaggacctctccctcactgagggctgctccctcagagggaccatgagctgagcagtgagatgacgctggaggaggggagaggcccagagagactggggcacaggaggaaacaaaactcagatggaaagaacaggcagccccagggcctcagggaaaagtgtccccttctccccattgtccccaggtggggaacctcagccggactattgagaagatcaatggtgtggcccgctgcccctatgacccacgccacaactccacagctgtcatctcctcccagggggagctctatgcagccacggtcatcgacttctcaggtcgggaccctgccatctaccgcagcctgggcagtgggccaccgcttcgcactgcccaatataactccaagtggcttaatggtaaggaggccccagtgccaggggtggggactcccctggttttgagcccaccagcccaccct

SEQ ID NO: 107887 - DNA, 1063 bp, Homo sapiens
ttgatgtgatccttcaacctaattctgatttcactagttttacatgtgtacttcaacaaacccaaatggtagcatccgaagactctactctgaaccttgtgaaagcatttcaaaagctgccatttattccgcaccggccatgtgccaggcactattttatatgtcatatatgtagtaagtcagttactgcatgtagtaaaggtagtaaatcacacatgtatttaatctaatacatgtagtaaatcatgcctgcagtaaatcattgaatcttcacaagtgggtgaacccaggaagtgggttctatgtacccccattttatggaccaggaaactgaagctcagagaggttatgttaccctgtgactgtggtcacactgttcttcctcatccgctctgcggcttccccagaaggtggttatgttttctgtctggaggcttcccacacaaagatggagggacactttttcctgcatccttgagcctggctatgccctcagatggacagggaaactcaattctagacctggtcccttaggcttcttagagccaatgtagtgggtctttggccactttcttttcctgtctccagctcattttccttcctccttttcttctgcctgacattgtcttcccttcttcttgacccctggatctctggaattcaggctagggaaattttttattcatttataaccctcccttgttccgaaagggatttagggtgggtcaggctacagagatttctctctgttctcatattccagctcccaggagagttgactgcgatgttgtgatgaatgatttttgatgggataaaaatgaataaagtgatgcaatgtttcccctaatttgttaaagctgtgagcagatgcctgtgttacctaagcaggcagctggggcacagccataagctggagcttatctgttcccaggccaggagggtgggatagggagagctctgctaaggacttggggagggggttggagaaggacagcagaggcctggagccaaggtcacctgggaggcccgcccagccccaggacagcaaagaagatgagtgggg

SEQ ID NO: 107888 - DNA, 1036 bp, Homo sapiens
cagggtggacactgaccgcccaatctctgcacctcccacctctgcagaatcttgtctgaaaatccaattcccctcatacaagaaggaattgaggattattcatatattcgttcaaacactgctaggtgctggactgagcctggagatctaggaagcaaagtctttcttggcccccagggcaaactaccaggctagacacacagtgtggcagtaaagtagaagactatgggagccctttagcctggcttgaagcagtcagagaaggcttcttggaggaggtagggatgggggtgaacaggaattgttccatcaagggagaacagaagcacaaaggtttgcaggctcttgtgggatggatttggggaagtgtgaagtgttttagtgtggctggggtggagagtttagggaatgtaaaaggtgaagcatcattctttcaggggatcagtaaataatcactgtgccaggcactggacttgggaggacagtggaccagaacccaagggccttcgcaggagttggacttttcctgggggtagttgggagctatggatgggttctgggctggagagtgacatgaccacatttgcatttgagaacaagcgttcaggttgctttgtgggaaaaggactcgaggggcaggcctggaagccaggctggttaggaggctgttggcactgctccagacaagagctggtggtggcttggatgtaggtgggatacagtgggaaaaaagtggatggatttcagaggcagtgtagaggtagaacaggcaggatttaccagtgtgtacttatgtggctagtgaaggtctgggggaagtcaagggcgagtataagtatcccttcatgcctctgtggggagggtagtgccctcctctgagctaaggagtgtggcagaagaatgactacaacacccactcccaagtccctaggggcacacagaggtgggcaggtggcaccaggtctcccgggtgccaccgccccacttccccctgactttcacccttctgttctgtggtctgctgcgatgcagctgg

SEQ ID NO: 107889 - DNA, 1087 bp, Homo sapiens
ctccttactccactgctcctcacccctggacccagggcccaccctccatctctccttgtctggtgctgcccacgtctgcctgcagaccacacctgtgagcacttgactaagtcttctggtaagaaaatgacacggtttcccactcccttccatttctctgctgtccttgtgggcctgagcagaggacacttccaggctccctccccagaattcttgcatttcagatgctcctccaacaggcctctatgaagataactctattccagttccattgtggaaaaggagagctgggggtgggggctgggcctgcagggtgagtcatagataaagtcctgcaaatagtaagcctgttagctgttattcttattataactgagctctatgaatatggaacttaaggggcttggcaccaatggccaggtttaaagagagacattcattaagcactggaagggttttgtcagcccttgaccatctttctgtctccaagaagggcttcgtttataccagatcagaaagagctcactgtgcttctcttaaagacccccctccccttctcttcccaccccctggcccagggctggaactctctattctgcccacaaccaagccccatggcctgctcagctcctggacaccatccacctgagaagtcctcaggcacgtgtccctgcctcactctccccaacccatatacccaaacccagaaggaccagtcagctgccttgtaggtgctcagggctggggcagcagtgaggctgcatcattgcacctgcaaagaagctttgaaggaatgatctggatctcaggcatgtgcgcaggcgagtgtgcacccacgtacacattcctatgtctggggcagtagtggtggtggagtcccaggcctggccttcactcagacctgtctttcacctgtgtgtgtgcaggagcgagggggctcacctggcaatgggagtagggctgggagcagttcccagaaatgcttctggccagggctggacagtgggtttgtgctggtccttgttctttctcccagcctccactctacatcagccaaccacctgccggcttctccctccccgcctgc

SEQ ID NO: 107890 - DNA, 1018 bp, Homo sapiens
gggagtgttcttttatgtctaaacattaccaccctctcattcctcatgcttttctgggtgggaagttctgctttatattttattccaattattccattatagtttagaccggggatgcaaagagaggctggaatatctggaaatgcagctgggattgtagtgggagggcttgtttgtggtgcaaagcagctgcccttttcatctaagcagctgtgtttctgttctgagaatgggggtggtggtggtaggggatgtgtatggagcagaactgaacatagatggggggagggtggtaaggatgattggatgattctgtgggttcccaggcctggccgttgctcaacacagaagaccaaggcttcccttggcttaaaaaagcccaattgccatcctggctctctcagcctcctgagtgcctgttcctccaggaaaccaaagtagcccagagtaagggaaagggtttgccccaccccaagcttccaaatctcccaattcctaatttcagcactcagggcagcaccagcaagccccttagaaggttgttgtttaaaatagggatttccattcagtttaaaggttgaatgtgttcagtgtttatttaaattggtatgggaaagctttactaacatccttttctaattggagctgaggtgactttaaaaagtaactaatcagtggtgtgggccactatttggggagcatttgttagttcctggagactgagggtgacaggaaaggaaggacatttcttcttttctctctctttcttcattttcacgctcctgacttgtcagttactcccatcctgctctgtcgtcccctcatttggttcatgtaccacccagcagccacctctcaggggtcatttaccaacaccagacattggagacgcaaagatggatgaaatgcttttcccagctgcagacactcctagtccagtggacagtgacccttcatgagtggacagtgcttttaggttgacagagcacagtcacatttgttgtgttttgagtctcgt

SEQ ID NO: 107891 - DNA, 1020 bp, Homo sapiens
gagatgcgctttgcctgacaggactttgctaccaaacacacgctgtctactggtgatctcagctgcccttctcaaatgcccactagccttcgtttagagtctctgcaggaggcacattgagttcatctctgtggtttgcaaaacccacctcagacccctttctggtagtgaggactgtgtggcccactggaggcctcccagccgccctagtgcttgccaggatcctgtcaggattcccatgagatcaggaatctacagctgttctgagcctcatttgcatgttccctgttccctagatgtgtgtcccggccaagtggcttgaacacattcagagcagctggagcttctgtaggcctctcaccagcctccggcttggccctcctgtgcccaaagctcctctcaccgtttccttcctgtggaatggggaagacagaagccaagctggagacagctgtaggatgagccagagaagcctcccagatcgatgagcagcagccttgttccccgtcagcatcctttaccctccagctcccctcttccctgaagcctttccctctctcctttctattctggctctttgactccgtggggaaagcacataagtgaagatggggtgtgtgcttccagaggctggatgggaatgcgtgaatctggctagattgggagcagggaagagagctagatgtgagggcctcagacactctgctgaggagtggggcttggaagccagcttggagtgggaggaaaagccgggagccacacagactgggtctcaacacctgctttgccatttactgttagagtggcctttgggcaaattatttctcctctccaaggctcagtttcctcatatgtaaaatggccatcatacctacttcagaaggttgtcatgggaattgaatgacacaagttcctttctgtatagcaggtcacctggaaaagtacctgggacctcaaggtaccaagtgaaccggtccttttgcagagtggactagcgagctggagcccaggactcagcag

SEQ ID NO: 107892 - DNA, 1054 bp, Homo sapiens
tcaagcaaacaagctaaagagcggtgaatatagggggtgacggagtttttaggattcactcttgacctagaaattccaaacttatcttgaactaaggttgaaagagtttaagaaatagatccaaattctcatgctcaagagcaggaaagggtggaaaagctaggagcacaacactgtcttcttcctcccacctgagggcattttctgggagataaagctaaaaaatgagtgcaggctctcccaagaggccatctctctctctctctctctctctctctctctctctctctctctctctctctctctcccctctatgtgtgtgtgtgtgtgtacacatgcttgtgcatagcccaggcacaaacacaaaccttgtcttgcagcaaaaggcaaacagccagtcatatactaataggagacagagaattgaaaataaaaagacagcacgtataatgtccaaattgttttctgctcccagaattgcctgctcattgtgcctggggatggcaaagaaaaaagaaaattcccaccccagaagtcattgtcaatttgtgaaccaaaaccttgctcaggtcagaggaactgaagtgtcactgaatgactgctttgccattgtcctgaactaatgtgaaagaagagatcttccttccttccttccttccttcccatttaagtgtcactcactaagctaggcagagaggtcataggaagagcttcacaggcaggcaggggaggcagacgtaatcatagcaaatgcaaggactgccacaggatgggagctctgcgggcacatggagagccagttaccatcctaccaaacaggacaaagaagtcttcattggaaatggccattctagctgagaatggaagataaggcaggaatttgccagacagagaagcaggaggaggcagagtattccaggcagaggaagtagcatgtataaaagcacaaggcgatataattagatttctgtttgaagaattacttgcccctggttaacagattcagagagagctgaagcagtaaatgtgagcaggtgtttcatgtggtggaaag

SEQ ID NO: 107893 - DNA, 1546 bp, Homo sapiens
ttccataacttatgcgctcccttattttaggaccatcctggtccttttcccctgaagttccagggaacttcctgttcctggcaccctccccccaacccagattttcccgttcttttccatttgggtgtggcaaggacactgggcaaatgggaggagaaaagtgtgggttgagttgcttgaaacacttccatctcccaataccctggccttttggatcaccagtgaggagtggcctggtactctctggttggaagtgggtggggaaagaagccccctgttctcttcggtctgtgttctccctcttggggagaaccaggctggagtggggcagtgtcacttaattgcgtctgggtttgttgaatgctggtttgccatcagttccctggagccagttggtctgggcgggtctctgggccaggaggagggagctatctcctgaaacgccccccatcggtctttgcacttgggctgagtaggaggtcctgctttcctccctttcccctcccttttgtgaaaacaaacggcttgagaatctgaaatttcattcggcagacatttatttgtcaatcacattgtttggattgatattttgccctccactgggttagattttgggcggagagcaaaacacacattgtacctgccgtctggtgttgccctggattgggcaaaggagtcagtcctgtgagcaaataatgacagaactgcaagtgctgtgaccttaagtactagtatccttcactgaaccggagccatacgttgatttaaagggaggtcagccatggctttcctgaggtggtagggttgaacagagtctgaaagatgtgtggtagttagctaggcagtggagggctgcaggtccccttcaccaggaggtgcggaagagcaggtaggtttgctgaaagcactagaacctgggagtcctgagcaagcaatttctatcttctcctttccctaagccctagagttggcttagcgggtaggaggtggagggagcatgccaacaggagcagtggtgagtgattgctggacagcgcgttgggtctttgtaaatttaaatgctgtatctatctgataagtgctccccaggttcctggaagccggttgggtttctttgttcactcaatatttactgagggctgatatgtgcacaggactgggctgtgacctgaagggtataaaggcatctgcagggattcgtgtacagggatatacacccaccacattttttacaatagcaaaatgtggaaatgggttaaatgctcaataatagtggcatggttaaataatatctggccttgtccatatcatggaaagtgatatttatctttttcagtttggcctgctataagaaatatcccatagactggtggtgtagaacaattgaaatgtatttttcacagttctgcagaccaaaagtccgaaatcagggtgccagcatggttgaattctagtgaggaccctcctccagaagactcttgacttctcactgtattctcatatgatagaaagaagactagacagttctcttgggtccctttttcaa

SEQ ID NO: 107894 - DNA, 2412 bp, Homo sapiens
acactgctaccctaattactactgtaatttgttatctacattcataaatgtagaaagcatttatacatttataaatacattcataatacaggaaaggctaaatttcagttagaggttagtgaagataaagatgtcatttttctccatccaaattcgtagactacagtggaaaaaaattatataacacttggaaataaaagatgattttgtgacattttagtatcatactggagtattgtataagaaaccacctaaggaccagctgtgttctaggggatgtaactctgtttattattttttatgggccatactttgtaaagttaagtaggatgcaaattatttctgtttggtaaagaagagaagcacaaagattattgccctgaaggacattaacctgttggtatctaatgtagcaatcttatatcaggattatatcctcttttttagggtctcttattagcgagttaagtaaaactttgaaatatgctcaatacctatttgtatgagaattaggcttttaacattttagaactgtacttgactccagttcaactgctgagtgagcaggacgtaaagatgtgttgcttagaagagaggtctgatctggagatgttaatttaggggtgctgttcaggagagtgggtgaagttggctgggggaccatatagggtaggaagagagggtagactgagtgagctgtggaacttcaacattgaaagaatggggagaggagggtttacaaagaagaaaggaatgattgctagagaggtaggagggaaaccaagtgtcgcatccagttcaagaggccaaacaagatgagaactggaagtgcctgtagggtttatctataggaggtcattgttgagccttcaccaagagccttttttgtggtggttgtggggagggcagatttcagagggatgagcaatggaaggagggaggagaatgggaggagcaggggagatggaaaattctggctgtgagtggagaggggagtgatatggggtccagagagagagtttttaaaagatgggtcagtgatggagtttcttcaccttaaggagatatgtgtaaaatggattcctgggctcccagcccctggagatgtttttcttcaagaataaagcccaggaatctgtattcccagaataccgagctctgcggtaaagctacaaaactagacacatttccaagttaatcttatatggctggtggtattttgccagccgaggtgggtgctctcaattgagtgtgtagcacaagttctgctcacattggagctgtgtcaccattgtctgcttggtgtcacttggcctgagcatgtgcttttctctgaagggatttgggggtttgtggacatgctggtagcagagggaagatggatcaggttgtcattgtagctcttttcagcaggtcacgctcaatagctggattggaagggacagcagacttgccagcctctcgggtattattctgggtggagcaacggggagtggatgatgctccagggatgtctgtgggaactattcacattgacagcccaagagaaaagcatcagatctgtcctggcggggacctggctctactgttttaggcttaatccgaggcaaatcccttctctgagcctcagttttcacatctctaaagtggggatagtaccacctctgcctataaacactcattgtttatgacaatttttcaactcctgcaagaacagttatacattttacagtgtaacccagtacacactgggctcactgaatgcatagtgttgctacctgtgctactcactgatgttttctagtcaatgtaattttttaaaaatgctactgtaactcactgattttatgactagactcctgggttgagacctgaagggtggaaacagtggcttagactctcagcttcagaggatgaaatgagatcatgtgtgtaaaagcatggatgtacaccgtgggtcatgaacactgagttgttattttcttatcagttaacggagcttggaggcagagttgatttccggagtgggaattcacctgctcttcctccctccctgctgcctaattcaatgttccctctaccagttcttcctcgttaacaggcctggcacaccaagctggcggtgatccagacccctcttggctcaagaagaggttttccaaaacattaaaagctttagggacttaagtcctggctaaatgcactgcagttgcaatttcaggataagaaaacctgttttcataagctctcagataagttgccctgcccctgaattgtccattgttgacagcaacatttgtgccatggggaataaaaaggggagacactgtgctgcgtagccccaaatgtaaggtgtggctttttaaaggaagcaaaatataagaaatgcagctggacttgtatttacagcag

SEQ ID NO: 107895 - DNA, 1010 bp, Homo sapiens
gtaaccacagtacaacgatcaaaactaggaaggtagtatttgattcaggacccaaaccagaatcacacactgcatttaattgtccttctttagtctcctttaatctggaatagttcctcagtctctgtcttttgtgaccttgacatttttaaagaattttcctcaatttggtttttgatgatgttttcatttagtgcattatatcagggggcacctgacgtcaatttgacccattactggtggtgttactgttggtcccttagttaagggggtttctgccatgttttcccactgtaaagatacattttctggtggggagatactttgaggcagttaattattttcataatggtagccaagtggtggtaatttttttctttaaacatttagattggacatgcttattatggcaagttgaaaaatagagaaaagggaagaataaatattaccgagggcaaatcctcagtgtttttctgagcatacttttgtttacttatagttgtggttataccacgtatattttgaattctttttttttttttttttttttttgagatggagtctcactctgtcgctgaggctggagtgcaatggtgcgatctcggctcactgcaagctccgcctcctgggttcacgccattctcctgcctcagcttcctgagtagctgggactacaggcgcccgccaccacgcccggctaattttttgtatttttagtagagacggggtttcactgtgttggccaggatggtctcgatctcctgacctcgtgatccgcccacctcggcctcccaaagtgaattctatttttaaagacattaaagcaaatatttttgcattgcgaagtctttaaaaacaccatttaaataaaataccatctaaatggcttattcttctattgagtggtttactctgtgtaaccattctgttgttgttggacatttaggttgtttataggttttaactcttatggttagaatggttgtgagtcatacgtgtgtcagacctct

SEQ ID NO: 107896 - DNA, 1160 bp, Homo sapiens
gtgaggaattaggatatttcacctagagaatcctaaaagagacgtgtttgctgtctttggagtgtgataggctgacagatgggtgtgtgtgtgggggggatttaacatttctaatgaggagccctccaagatgatatgggtatggtgtaggacatgggacttctacatattagcatattgagttcccacagccttctgggtccagctgagttgagtggtctcaggagattttgagtccttggctctggagggctacctggaggctggagacggtatgtgaggaattttgaggggatttctatatttttgggaaactcatcagcccaactcaactctgaattgaaagagatgtcctagcttttctgtctccagcagtggtcctcttaccagaaaagggctgaggtaaggaaattggagagttcccgggctaattcttctttcatttgtgaatagctggcaccaggtgaccaaagtacctgataagaacaggcacactgaaaatttgggctactgggaagaacactgggtaaatcaatcccttgacagtctctctgtctccttccttataaataacatatctaaagttaatgcatgatttggtgcttgaggcactttgaaatatcccagttggaacagatgtttgtatttctttctagttaaagcttttgttcagtgggcactcaagatctatttgtgtgtgccagaacacccagaatgagagctccttaaaaagatcatttatttcacccatgcagaagcctgcacagggatattccagggccagagtatccctctgtggtgtcagggacccaggtaacgtctatcttattagctcctctttagcaggcccttcctccccattgtctcaaggtggctacttgagttccagccatcttgtccaaattccagctggcaggaatgaggcagggactaagaagactcttatcagatgtctgttagggacagtttctaaaagttgccacatcacacttaagcttacattccaagggctggaacatggcccccttgctgcaagggagactgagagataaggcttttattgcgggtggccacatgcccagggaaactcaatggtttcttcacaaggtgtgattacctcacagtacttctctggtggtggtcgtgagaatgggtttacc

SEQ ID NO: 107897 - DNA, 1048 bp, Homo sapiens
aatcatctctagattttttatgataccaaatacaatataaatgctaagtaagtagttgttatactgtattggttttattgctattattttttactgttatcccgttattttttatgtttttcaaatgttttccatccatggttggtcaaatctgtggatgcggaacctgcgagatagagggctgactgtatatatctgcagtccatacagccttataaaagtgcctggaggggaagggagactgggagtgggctggggagtgtccctagaggtgaagaagtaggtgtggtgcatgagatgtgttggtttgccctcatcctctggaagtaaagcagctctaggcagcacatccatgggcaccgattcttctggggcccagccagaagctggaactcacagtcgttggctccttgatccccaggtggtcctgccatcatggctgtcctctgcaaaggtctcctcgctcattgagagaatctctgaccccaaggacttgaaaaaactgctcagaacccggaataatgtactggtgctttactccaaatctggtgagtgtcccttcctggccttgaggtcaaccatcggggtaggatgggattcaggggaaggagtgggaggcaggagacgttaggatgaaaaccacttagggagggtccaagggacatggggtttgtcacctttcctcagaagacagaggcagaggcacacagaggcattggctctgccactttctgatccgagggggtggttccatttcttttttatgactgtttgttgggaaagtcctctggagcccctcactcctcaagagggagagggcgtgtgtgaagtaggacagaggatcacagtggcggacactgggcatggatgtcctggcttcctgcacaggcatggggccgagccctgccagggcatgcttcaccagagctgttgattaactggccaggccggcctgttgccagctgaatgggtcccaggcttggaagtactcaccccagctggcagccctggccctgcccagtccatctgtcctgctctggggtcagat

SEQ ID NO: 107898 - DNA, 1039 bp, Homo sapiens
ccgccccattgcatggccctttttgtttttgagatgaggtctcactctgttgcccaggctgcagtgcagtgtcacaatctcggttcattgcagacttgacctcccgggctgaagccatcctcccagctcagcctccccagtaggcgcgtaccaccacgctcagctaagttttgtattttttttatagagaccaggttttgccatgttgccccggctggtcttggactcctgggctcaagcaattcacctgccttggcctcccaaagtcctgggattacaggcatgcgccaccgtgcctggcctggccttcttttggcctcttttcccctttctcctttctatatggatatatattttcctttttttaaaaaaattttttgcttttctgactcttcctccctattcctttatgtgcacctataggaacacacaaacacttctctgctggttttctccccggtccaggccctgtaacttgttgctctggggtgtctgtagggcatctgacttctgtctagggttttgtcagctttccttccccctcactccactcttggctcagacctcaacagccacgctcagtctggctggtgatggttgtccggctgttaagcgggttgtgtgtgcgggagttggtattcccctcgtgccctgccagctgggcgctggggctcgggcttggcgtggagtgctgctgtctgggaagctgagctggagccagcatggagctgtgcctggtttgctaattcccgaggctgcgtctcacagggggcaaggctgtcctatcaggtgcttgctactttcttttcctcggggcttaaggtcattgcttaaccacatctgctttctttcctgctctcctccccatctgcttgatttctctggagcagtcacagcttcccagatgcaagactgggggcctgccagagcaggcataacatattttaaagacttatgttttttcctaaaaactatttgaatttagcatttgctcctaagcatgttcaacattacttaccagggggtaaaacagactccc

SEQ ID NO: 107899 - DNA, 1016 bp, Homo sapiens
gctgaaacttggaggccacgctgaagaacaggcaggggtgcctctgtgcccccagctctaccagccaacttagttgttttggagtcttggtcctaagccttgcctgggccctcagggaacctaagactgctgtcgtgggacttttccatggaggggtttcccacagagtggaccaggattggcgtggaaatgaaccaagcccctgtttcctccctctgctttgtgatagtcacaggcagaggctgccagccaggcttgatggaagagagaggagcatggggtggggattctcctgtccagttgctgccttgcagcgtctgagcccccaggcaggaactgcagtgtgaacggagaggcaatgagcaagcccttcgcagctgctggtgtcaggatggggctgatggggctgagggaggccatgcacatcccatcccagccttggcccctgccccagctgctgtttgttgttgcagttgggtggacggtaggtggtcacagaaacagtggagcatagcagaacaaaggccagcgaggaaggtgccatgtgagtggttgtaaacatcctgagttgagccctgtgtcccagggaattaactcaaacagggaaagggcacctcgttcgcagttgttctcaaacagacccaccacctgtccatgcagcttcaccacagagtccctgcgggacggggcacacctgaactgtaatagcagttgtcagaagaggcatgcgtggacctcagagggcttaaggataagaaagttttcagcgggtgccctgggctgccttctccatttggagagcccactcccagcttgccccttctctctggactctatcttaaaatgtccttgccaccttggggtaggaactattgcagtgtcattagcctttcctctctggattcctcatgcatttcatgagtccccactgtttgccaggcccatggctggaagctgcagtggctgcagcgatggctagacagctgggactagtagggaggaaacccctgggcctg

SEQ ID NO: 107900 - DNA, 1868 bp, Homo sapiens
cagactgtgaactttgcattaagtcctttccccaggggccaggctctttccccaccccccacctccacctctctttactgaggcatcatcaggcatcttcctcatgcacccttcatcctctccctgcccaccagccctgtccagtgggctatgctagctggtggccaaaggctgctgacttgtctcctgaccacagcattccctcatagctcgtcctttctgcttcgagagatacaactggtttgagggttgctttcttacttagaaaccctcgggagctctccgtcacttcctgaatacagtcccgatttcttaggtatttcaagcctttcccaaagtgatcctggccaactcactcagccttttctttcatgtcttctcctttctgtgtatcctgccttccagttagatggaaatgtgctccatttcttgggccacatctttctttgccttgcctccagttccccatcccgggacgtctgttgaaatcttactctcctctgagtgcaagctcacatgcagcccacgctaagaagctgccgtgatggttcctggcagcagggctgaacacacagaagagcatgtcacgccagctgagtggccccaagcatgcagatggcagtggggagcagggaggctgtgttcttatcttctccacaggccgagaccaggtgtgtcacctcatttgacttcacaaattctaactccagaaagtgtttgtatgtagtttttcaaaaatttttgcctcattaactaatagatgcccccaaaatggcacaaaagtgctacagaaacttggagaattaagagctcaccccaagcgaaggtggtttgcaaaggctgcccagagacgtgaggtttgatttgccttaagggatgggtgagtctggagggtcgccaggaggcgggggatgggcagcctcagtaaggggactggaaggcaccaagtgggggccaggagagaacagcgagtgttccagaagtgtgggcagaaatagagcacctcctagtcctagtaacaaaaatagctaatacattttgtgttattgattatcttgtattatttcattgaatcttctcaacaaccacatgaggtggctgcagatgaggaaagtgagacgcagagacaactgtgactcattcaaggaaatgcgcgaccccatggggagttgggactcaaacccaggcatcctgagtccatgcttccagccactgcatgttgctgctgcactcagcaagatgtctgagaaggcagacagtccaacttccttcctgtgcagaaatctcagactgtcttattcctgggagaataaaaaatctagaccctaacaggtgtacaatgaagagttttgtaagaaagaaagattcaaaaatgaaataggtaacatatgggcattgaatgtggagctggattttagcctatattcaatggaattggaaggttttgtgcagggaagtgatgtaatgagcgaggaggacgtgtaagattaatctgtggtgaatgtgcactgacactggggagatcaattaggcagaaaaaaaaaggacttttaaagaagacaaatattactggaacaggccgctggagcagtctgggaaatgagcagaatgacttttatagagcgttccagggcttcaagtaaattcgaattcaaatttattcttcctgtattatttgctgcatcctaaaatgggctaggaaaaaaaaaacagtgaatttagtgagcatttattgtgtccttgctgtatgtgaggccttgtgctagggacttaaaacaattggaaagatatccaggtgcccctaggaatggagaggccagaggcacagtggctcccatcaccaggaagacttggtaggaagatgacag

SEQ ID NO: 107901 - DNA, 1022 bp, Homo sapiens
tggcaaaattttaaggtgcttaaaaagaatacattcaaaagtctcgctttcacttctttcctccttatcctccctcctataccctagaatttacaacttagaccagtttcttttatgttcttagagtgtttctgtatgtagatattagcaaatgtgaataagtatattttatctccccccttttaatgcaaaagttagcaaattctagactgttccatccatctccagcagtttgtccacatcagtgcatagagaacatcattctttgcagtgctcagccctccctcgtgtagatggacagcagtttacctaacccgtccttccaattttcgctatgacaacctgcagtgaatgccttcagatgcacataattttgtatgtgtgcaggtgtattgtaaagataaattgctctgaagtgtaattggtggtgttttgaggggtcagtagtttgagcccaagtataggaacctagattgcatgatgtttgtctaggaccattgtctggctggtgactcattctgaagcttgattttgtcaccagtcccatctgacattggatatgcatggactgagattgatttgccctctccctgcctccttccatttcttgggacctgggaggccatggtggccagtggggcccagtcagaagggccagagagggcttctgaaggcgacatcatacccggctgcggagggaagtgggtggcagagttccattgtgtcagccacttcactccctctggattttccagccctggctgctggaactttaaaatatttcctcctgtaggctctcaaaagtgcgacacaatggttgtcttttcacatttgtcatccttgagggttttttcaaagctgcaattaaggtgctctggcaaaggtagttgtgacagtaaagcagcagggagactgtgtcaccaccagccaccttgtcctgaactttggggcaagggagggcccctgcgagcctccctcctcctagcagatgatgacctaggactggcacacagtcacgctgc

SEQ ID NO: 107902 - DNA, 1116 bp, Homo sapiens
tggcctctctctctcctcctcaccccctcctctctgtaccctcttcctcccctccactgcccagtgggcagttttaaacacaacagtgagcttttccaaaggtcaccattcactgttgctatttattctttccagtttgctgaaagtttgaaataggttgagaaagctaacaagcccctagattcccaggaggaagtgagatttcttaggctatctagagagctgtagccagaagccactgtttgtaacaggatatcagctaagtacctgtctggggctttgcggggaaggtggaggtgggcagggccacaccactcaccccacggcacctccatgagggcagtttctggtttgttaaaggctgagcccctggagtgggccgtcccgagcccatggggagctttgggtccaggggcctggaattagaagggctgccaaggccccagggcctgctctgagctctgcctgtttttggtcttccagtccgcagccgccacagccccaggtccctgagactccctgggcagatgagggcggctccgtttatcacctgaccgatgaagactttgaccagtttgtgaaggaacactcctctgtcctcgtcatgttccacgccccatgtgagtggaactttgctcctccccctccacaccctcccctctctcagagtaggatgagtgtggcgctttgcaatgtgaacccaggaagcacttattttttggatgccaggacccatgctaagccaggggatgcagtggtgacaggcgaggtccccaccctcgtagtgcacatggcctaccccccattgccatggaaacaacacagaagtcctgatcaggctttacttgtcccttagctagagctcagtgagtctccaccacccctagctctgagcatcttcctcccagtcagcatgaattggagaaattaagctggaagcaccctgagatgttacctagaacagactgggcctggaaataaaattagggctgatacctcatatgggggctcatacctataatcccagcactttgggaggtcaaggcaggaggattgtttaaggccaggagttcaagaccagcctgggccacatagcaagaccccatctctacaaac

SEQ ID NO: 107903 - DNA, 1722 bp, Homo sapiens
cctcagactgccttctgtccagagaagatgatgatggtgatcacagcatggtgccacaacctacacgctgcctgcagctagggcctctcaccagatggttgggttttcaacccagctctgtgaccatggctgtgtatatggccttgggcagtcacctgccctcttggtgcctcaattgtctaatccatagaatggagataatgtcagttcctactttgtggggtagttatgaggctgtaaggcactggtcagtacctggcacaccagttgcccgtattatttatgcagttgttttatttttgtgtctggggtaccttcccactaccccaacccacttctggtggattatgcaaaatatttcttttctttgagctggtgctgctgctgcttttctcaggtgtctgggaatgggactgagctgccttacagaggcggcgcaggggagcatcccgagggcctctgtgccataagaatggtttctcttgatctctccccacagggtgtggccactgtaagaaaatgaagccggagtttgagaaggcagcagaagccctccatggagaagcggatgtaagcttcctttccttccccctcaccgttctctttgaaagaatcactgacaggtggaatcattatgactttcccctgcaagccctgctgcagctcccgtggtccgtggaggccagcagtacctctgtgtgcccaagtagaacatcttagacagatgggatcctagagggggcagaaagactactggcccatgttcccgtgcccatccaggtgacctctgcctgctccctcttttctctgggaccctggctaacaggaacaggtgccaatctactcaacgtggctggtggggcagattcaaaagcctcatctcagctcataaatgagaaatgatggccgtgccaatgttcagttgttccctgggatatgggagcccactgggctagccaccccagttaaattccagcaggtccaggatgggttgtgggggcagcgtctgggctcctgtgttccaccagcaccgcatctgaggctgtaatgcatggttggcctttcccccatcccagagctctggtgtccttgcagctgtcgatgccactgtcaacaaggccctggcagaaagattccacatctcagagtttcctacgttgaagtattttaagaatggagagaaatacgcagtgcctgtgctcaggacaaagaagaagtttctcgagtggatgcaaaagtaagtgttacgatctcagtagcacatcctaactgccagctggcggcccctggagaccaccttgaggaggtgaagtaaactttatggtcaatgtcctgggctcatgcccgtaggagtcaagacggatctgacttcctcaaccctaaaaccaccgttcatatgctgatcacgtgtcttgatcaggtcactgctggcagtccttctggacgcagcttcatcgacgcactaaaccgtgtgttgctttttctctgtctcagcctccttaggcccagatcttattgtctgcattttattccactccctttgaataaatgaaggagacacagctcttcatagccagagctagactcatttcgtccaggtttgctagtggttggctgggcctccagtaatgtccacagggcaggctatggtggtttgcaactgaggataaagattttgaagagccccctcagcctatgtattagtttgctagtgttgccata

SEQ ID NO: 107904 - DNA, 1009 bp, Homo sapiens
tgggggacaacttccgggagaccctgaagaagaagaaacacaccttggtcatgttctacgccccttgtaagtagcttgggtgctcactgagtggcacagtaagaggggtttggccccaccaaaccaaaaagacccgcacacccaccccagggaccaaggcagccgctgatggatcccagggtcatctccattatgaaccaggctctccaattttattccaggctaagaggtccttcaaatccagggcctccttttgtcagactcgtcgggctctccttcctttggggcagcctttctcgtgtctgtcctaaagccctctgcctctgtgctcgtcccctcttgtccctgggctcctccatgcccctgtcccctacctgcacacttcccacccctcagctgtccccgccccctcttccttctccagacactgacttatcttcagcaccttggaaccccctctccctgcccttccagatggctctggagccgtggcataggcacagccacattcgctcctgagctcctgtgctgtgctcgttttaatcagagctcaagctgaggaagtgacacgtctgccgacattggcatcggtgacctcaggtttctgtgtattcccattttgaagttgttaattgatacttacaatgaaaggttcttagaatttcccactctctgctgcccttctctctctcccccaggttacagctcagcttaatggagtgaggataataaaagctgcagtctacagagaagccaggcagctccatctagccataaacctgctcagttgtagctggccctcctgttggctcccccgtccccacctttcaagtgtcagtaatccgtggagtctgtgtgttctcagggtctgagaggggccgccacagcctcagcccctccttgaggcagcctccctgcccatctctttctgcctttccttctcagagtgggacttgtcctctcccagtcccttacagagcttccggctgtcctcttcggtctgtagagt

SEQ ID NO: 107905 - DNA, 1074 bp, Homo sapiens
gccttccttcctgccctccttccttcctgcccgccttcctgcctgccttccttcctgcctgccttccttcctgccttccttccttcctgccttccttcctgcctgccttccttcctgcctgccttccttcctgccttccttcctgccttcctgccttccttccttccttccttcctgccttccttcctgcctgccttccttcctgcctgccttccttcctgcctgcctttcttcctgccttccttcctgccttcctgccttccttccttccttccttccttcctgccttccttcctgcctgccttcctttctgccttccagcctgcctgccttcccgcctgccttcccacctgtcttccacctacccatcaaatatcagctctgtgctgtgcagtgtctagggcccagggtacaagggagggagacatgtccctgccaggccttgaggggctcactgtctaccctgacaaaattctaaacacaatccatccagggcagggtcactgagtgactcaacctctggcagagggcttggtccttagagtttcttcatttctgttactgcgtttttctgtccctaaaccttgccccagggacatacatctttatcagtgggttacagggggaagactttccaaggacaaaaaagatacatcttttgactttttaataatgaaaataataatacctatttttatatataaatatggcatatactatatactttttatatatgaaggatctaaacactacagaaatgtcaaatagtaaagtcaaatgcctgatagaggtctaaaggaaaagcagcatacccacacgttcctgctccccttctagctgcctcaccccaacatcttacctcccctcacatctctccacctcccacatcccttctcccaccatgtctgcccctgcatcctgtctccccagcttctgcacagctcttcctcctgctgtttcattgttccttttacgctgaatggtctggtcatggtgactgcccttctcaggccagcttggcggagtctctagaactgcaattgtccagcctgtcctcagtctttgttcctcttt

SEQ ID NO: 107906 - DNA, 1915 bp, Homo sapiens
gtagctgggattacaggtgtgcaccaccacgcctggctaatttttgtatttttagtagagaaggggtttcatcatgttggccaggctggtctcaaactcctgatcttgtgatccaccctcctcagccacccaaagtgctgggattacaggtgtgagccaccacacctggccattttaattactattcttatattactagtaagttgaacatttttacatatgcttatcaagtttggctttaatttttatgtaacccaaattgttcattttgttttaggtcttctctgttggttgaaatgtctatgattttatctgcctcagtcattcgtgtcagagatggactgccactttctgcttctactgattatgaacaaagcacaggaatgcaggagtgcagaaagtattttaaaatgctttcgaggaaacttgctcaacttcctgatagatgtacactgaaaactggacattataacattaagtaagacttcagtttgcttcatttgactcatttgcccagtagttgtcattttaatgaagtttaagtggttgcaatagaaaggagtgattaggaaaacctgttcaagtcgagcatcatattgttctgaacttatactaaatagtcatcatgtcagcagcagcctttttgtagtttctttgtatctggctctgggaaattttatagttgtgcagatcatagatatccctcttttaagttgatcactaaatatttatttgcattcttacatacctagggttgtagtaagcaaactataattggaaataaaaattttttacctgatatctgccctcaaagaactgaagcaacttacgtctagtgggagggggtagcacttatcactgagtcacatacaaatcaagtaaaactgggcaatgggatagagagtgactatttattgtggtcaagacactctctgagagggtgacatttgagcagagacctaaaagatgagagaggaggtaattatatgaaggatgctgtggatgaagagcaaggcagaggtagcagccagtggagaagcccttttttacatgccaagagacagaaagaaaaccagtgatcctgaagaattatggacaattaatagagttgcagaaagtgaggccagaaaggtaggaatggggcaagttatgtagtgagtttggagtctattagtctgtttagtctaatgcagtaggaagccattgggtagttttaagctatagagttacatgatttcatttggcttagagtagatcattctgcctgcactgtgaagaataaaggaggaagtggaagcagagaggtcagatggaagactcagagaagttcaggtggaggtgctgattgtaacgagctagggtagtaatgaatagaagtagttagattggggctatattttgggattaataccagcaaatcttcctactggattgaaataggatgtgaaggtaaaagaagaataatcacctgtagttttttggcctgaggaactggatgaataatgtagctgaaatgagcaagaaaggagaggataagtgcgtctccttggtaaaaagtaagagttctgtttggacatgttaaatctgagatgcccattagacatccaaggggcactgctaggtaagcagctggatatatgagtctgaagcttagtgaagaggacaagtatagacatttagatttggaagtcagcttacagtttgtgattaaaaccatgggaatggatgagaccaccttggaaagcttagacgtgaaacaattagagaacaattaatgtctgatatcaagctggatattgattatgcatacagaaggaaataaggtaaaaacacagtccatataggatataataagcagagggcttcgttgttgagatgagacatgagccatgtcctgaagaattaataagagttg

SEQ ID NO: 107907 - DNA, 2862 bp, Homo sapiens
cattcttccagcaactataattatgagagtttaggagtgggataaatcagcagaagtctaatctggtctagttcaagaatacaattcagataaatgcatttcagagccatgcatagaaaaatgtctatgcatgtttttttgtaccaaaccttcaataaggattggaaaacagaagttctagttctagttcctgacaaggacctggatttcatatgttttctatcattgataagagatcttgtggtttagtttctgtttaatgaggttgttaccttatatgacattgagcttagactgaaatgcgtaaaattgagaatttgtgtgtgttacctgacttaaaattctcacaccacaactgtttttctaacaactatgagtttgctagataaaactcacaggtctgctgtagcaacatcatagcacagcctgaaattgccaccatgctgtccctcttttctcctagccatattaaatgcttctttccttcaaaccctacttcttttgaatcaccttctttctcattactattttatgtctctaatgatctcactcctttcacagatcacctgtagaactcggttgactgcctttttcatcacttattaaaatttcttatttttaatttaattttatttctccatcctctctttataacagggttgtaactcattgagggaattgatctgccatggcttatactatttttgattcctcaactcttggcattgtggttttcaaatttgtgtagaaattgagatactctttctttacagaatctcaaaatcactaagtatataattatgtgccaaatcagttgatacctcacattaaattctagttgaataggcaagggaagaccagagtttgaaggaaaaaaaaatcaggggagtaacatttaaaattgagataattaggctgggtctggtggctcacgcctgtaatcccagcactttgggaggccaaggctggcagatcacctgaggtcaggagtttgagaccatcctggacaacatggtgaaaccctgtctctactaaaaataaaaaaaataaaaaataaaaagccgggtgtggtgatggacatctctaatccaagctactcaggaggctgaggcaagagaatcacttgaacccaggaagcggaggctgcagtgagctgagatcgtgccactgcactccagcctgggcaacagagtgagactctgcctcaaaataaataaataaataaaatttaaaaataaaataaaattgagaaaattcctttagttttcttctcctctgtattgggaaaatgatgaatttcaaatgaatgtagtagctggatacttctgtttcgccaatgaaggacattctgtggagcatggcttgtgctagcacagttccttgtgcatgtcgtagtagctactaaatgagggatggttgttttaggaatatgacagcattcagagtgccagagaaaccttgttgattgggcaggatggtgtgtagtgtggggtgttcagttttgtgatttcttctcacattctatagtgatattccaattctctctatataaaattttaaggaattcatctgttttataagtcgaagggtactttccttagactgtaatgaatttttaatgaataaacttatgttaccacttaagaaaaaaacatggctaaagtaagtatgaaccatatggaaattaggttgggtcatctgagatctttaaaactttgcagttggctttagagatttaaaaatcatagttgtacattttgaaatctctttatttaaacagtaagatgctgaaaagacaaataccttttgggaagccaatcatatcctattgtgaattttagtgcaagaagtaaaattttttagttctttcactgtgaattcatttgaagccgtataatcgctgtgagcctcctaatgttttttccttgcctgagggttcactttctccctacactgctacctccagccaggaatactgttttaggcttacctgcattttggctttagtgtctagcagtgtttccctttcactctttcgggaaattttctgattactagagtaacaacttaaactataacccaattattgagtacttgctattgccaggtactttactgacattatcattaagctttctaacagctctgtgaagggctattaaatagagctcttttccattgccaggggcagacacacaactcacattagcttaaggaaaaatgggtattttgaagggtagtggtggagctggcttcacagatgttatcaggaatctttctcatttctacagtctctcaccttttgcagatagatactctctacgacttgaaagcactacacagacagctccaggcttacttcagtccaactgagcaactcctctccatgtctcaagaacaagacattgtctttgcttgtataattgaccatttctagactgattaatcattgtagtcagaggggatgaggtactcttatttggctaagactgcatcacatgtccttacccctttgagctttaccaaagccatacagaatggcgctgaaggtaattccccaaagggaaagagggaagggatgctgggcaggtagatgctgggtagtgctatcactaccctattttacagataaggtaaatgagacttaggaatgtaaaggagctccttcaacgtcacaaaaatagtaaatgatatatatgaaccacaatcttttggattcaggcatcgcattattatctggtaaaaaatggctgctgctctttacccttaacccctttcttggcagcatgtgttcctaattctcccaattcttttcactttttatggagagagaaatgaaccagggaagagaatgaagggaaa

SEQ ID NO: 107908 - DNA, 1097 bp, Homo sapiens
attttaaaaccaatgttttttacactgtagttttattagctctctgggagtgagctacatgatgttgtgcactgaaaattacccaaatgttctcgccttctctttcctggatgagcttcagaaggagttcattactacttataacatgatgaagacaaatactgctgtcagaccatactgtttcattgaatttggtaagggcctgatttttttttcctttttattctgtctgcatccaatcataagcaattttaaatctaatattgggtggaggggggacttctgctatcttgcttttgatataataatttggtaaatgatctataaattatggtaactttttacttagatgcttattagaaaaaaattgtgtttgagctgtgaaggggattgtgagtattggtccgaagaattaatgccagaggataacttctcaatgagaaatttataagccagagattcagacttttgcgtttctgtaataatcttttatagtctgcttcatgtagaataggggatggcaaacatttgctggaaaggaccagatagtacatattttagactttaaggatcatatagtccctgtcacaactattcagccctgccgttgtagctcgaaagcagccataggcagtacgtaaatgagtgcagttatattctaataaaactttacagaatagtcagcaggctagatttggcctgtgggcagtagtttgctcaacttctgatgtagaagaaaaaaaaaaaacaccatgttgtaaatagtaaaaataaaattccacttggaaaatatttaggaaatgtcttatgttagttttattcaatttattctttaaaacctacattctaatggtgtaagcaataaaaaacagatttataaaaacatgcaacttctagtgtgtgttcttatgtaattgcagctggtaaatctgacagatttaatatttcatgagataggaatctctataaaaatcaagactttgggccaggtgtggtgtggctcatgccttttatcccagcactttgggaggccgaggcagtaggatcacttaaggccaggagttcgagaccaccctgggcaacatagaccctgtctg

SEQ ID NO: 107909 - DNA, 1104 bp, Homo sapiens
agtttgaggttacagtgagctatgattgtaccactgcaccccagtctaggtgacagagcaagaccctgtctcaaaaaaaaaaattcaagactttggtttaaagttaaagctgttttttgtttttgtaatttcttgaagtggatgtaatacacttaggtagtgttaaatccttagtttatttaaaattactgatttctagagggtaaaactgatgattccatgatacattaatcattaaacacaagtaatattggactatttcatgacgaattgaacaattttgaataataaactacctgtaatatttactatccataaacatcatattctgaaatgattaattgacaagtgactgcaaggaaatttattttttattttacatagataacttcattcagaggaccaagcagcgatataataatcccaggtctctttcaacaaagataaatctttctgacatgcagacggaaatcaagctgaggcctccttatcaaatttccatgtgcgaactggggtcagccaatggagtcacatcagcattttctgttgactgtaaaggtgctggtaagatttcttctggtgagttctggatctcagttattttattttaaaaaaatccttgggaaaaactgagaaactcttgaaaatgaattactttattctaatattttaaatcaagtacatgagagaatatagaagttcaaagcaatcctttcagtgatttataaagtaagctaccagatgtgtgactaatcgggaaaatactttcaaatagcaacctcagaggatctctttgctagaaaaacatttttttaaatttaaaattaaaaaaagttaattttcatgggtacatattcggtgtgtaatatatttatggggtacatgagatattttgatacaggtatgcaatgtgtaataatcacattagggtaaatggggtattcatcacctcaagcatttattatttctttgtgttataaacatgtcagttgtgctctgttaatttttaaatgtacaataaattattgttgactgtagtcaccctattgtggtatcaagtactaaatcttattcattttagctaactatattatgtacccatta

SEQ ID NO: 107910 - DNA, 1078 bp, Homo sapiens
catttctctgatgatcggtgatgttgagcaccttttcatatacctgtttaccatttgtatgtctcttttgagaaatgtctattcagatcttttgcccattttttaattggcttgttagattttttcatatagagttgtttgagctcattgtgtattctagttattaatcccttgtcagatgaatatagggattcacattcccttctcagtttgcaaatattttctatcattctgtgggttgtctcttcactttgttgtttcctttgctgagcagaagcttttaaactcaatataatgcaatttgtccacttttgcattggttgcctgtacttgtggggtattactcaagagatctttgcccaggccaatgtcctggagagtttccccaatgttatcttttagtaacttcatggtttgaggtcttagatttaagtctaatccattttgatttgatctttgtatatggctaggaaaacatttaaggtttctttgtaaacatttttctagaaatgaaaaataggttctttgtactgcatatttataggcatgtaaagtgctttgcattttgttaaaatggctacattcaaggccagtgttcttgactgtcacggaaggtgtaaatactttagtgatcgtctgctcaaacctcccatcccaaagaaggaatactatcgtcaacagttgtgaaatgatataaacttttgcttaaaatgaacacctcattattttataaggtagcatatgccattgtcagactatttgtttaagaaaattattccaacctaaggctttaggaaaaaaaaaaaacttccttatataattgagctaaagtcagcttccctatgtctactagtttgttttgtgatctgttcctcccttccttcagcagaaccagaataacagttaagtcagcaactgtgtgtcctttccatcctcttagactagtctacttcatataaatatctccaattcaccaatgagaacacatggacacagggaggggaacatcacacacgggggcctgtcaaggggttgggggcaaggggagggatagcattaggagaaatacctaatatag

SEQ ID NO: 107911 - DNA, 1819 bp, Homo sapiens
tactgatatctttatcaggtaaaagtaaaatgcttctgattttctctatttattaggatagagaaaaatgtgttaccaaattagtacctacaacaggtcagagaatgaattgctttgttccataagaagactgcatttgaaaaagcacatgcagttgaaacctacaatctgtcatcctccaagacacatccattttggagacttatactggacagttaaatgggaatataataggaattgctacctatacatcttttaagacttggatggtggcactgatctctgtaattaccttgatgatatttggattgggggagctcaaaaacttccattggaccttccttctctaatagttctaattccatgggtctggcagtcaatattgcaaaatatatccgttcgttaatagacactcaggattcaggtatataacctaaattaggggtgggggtccaacttgacttaccaggaggtagactctgttagaaactccacgtatcacctgacttccataagtccccaccctgacctgtagctggcagtggcatcctggatcaccaaacgttagacacttggaaaatggggagagtctggtatttgttattgttttaaggaagaggggcaagatgcagtggttcacgcctgtaatcccagcacttgaggaggccagggtgggaggatggtttgagcctaggtgtttgagaccagcctggacaacaaagtgagaccctgtctctacaaaaaaaattaaaagattagctagacatggtggcacgtgactgtagtcccagctactagaaaggctgaggcaggaggattgcttgagcctgggaggttgaggctgcagtgagccttgatcatgccactgtactccagcctgggtgacagagtgagaccctgtctcaaaaaaaaagttttaaaagtaactcacaactagaatttattttattttatttttatttttgagatggagtcttgctctgtcacccagcaggcttgagtgcagtggcgcaatctcagcccactgcaacctccacctcctgggttaaagcaattcttctgcctcagcctcccgagtagttgggatacaggtgcatgccaccatgcatggctaatttttgtatttttagtagagacagggtttcaccatgttggccaggctggcctcgaactcctgacctcgtgatctgcccactttggcctcccaaagtgctgggattacagacgtgcgccaccacgcccagcctagaacttattttaatataactttaaatttacttttaattcagaccaagcctacataatattttctatggtccccaagttaaaatatatttttatgttttggaacttctaaataaaactattcagtttattttagaatctgtttaatagttacttgataaacatcatttttcagggttttcctccctctgttacagtatcttactctcagtatcttttttgtatttcttgacttttttctctttctaatcttttgatcctctccccacagtctggcatgaatgtttttatcttgccatacttattttctgaagtctacagatgttgttcatggggttaaaatattaaatgaagggtactgtgttctgcttttacttcttttaaaactgtttattatggaaattttcaaagtaaacagaatagtataaataaacagaatggtataattaactctcatgtactcaactataacaacgatatcaacattttgccattcttttttcatctgtacttctacctactccccactcatccactcactaatttatttctatatttttttcttgtttaaggg

SEQ ID NO: 107912 - DNA, 1031 bp, Homo sapiens
aggccaaggtcagaggatcacttgaggccgggagttcaagaccagcttgggcaacatagtgagactctgtctctataaacaattcaagaaaaaattagccaggcatggtggcacgtgcctgtaatcgtagatagtcgggaatctgaggcacgagggtcgcttgagcccttgagtttgaggcttgtagcgagctgtgattgtgaccctgtctcaaaaaaaaaggaaaaagagaaaaataagttaatttttcagggaaatgaagcttttatgttgtcaagcatttttcattttataacagtatttaattgtgaatatatggtgttaaataattctatgaagtatctgcttgacccatttaagttgagcagtgaatttctgttttacctaagttcatctttgtgaggtattggtgttcatttctaactatttcttttattttccagctcaccagcgactggaaccagcaactctgtcagggattgtaggatttatccttagtcttttatgtggagctctgaatttaattcgaggctttcatgctatagaaagtctcctgcaggtactgtgctatttttgcaatttcaggtgactgtgcctcttcattctactggttacataattgatttgaattggattgggtattagtataatttacagtgcatactcaaaatctatgtttttttatatctgctttagcctccttctaaaaacactggttggcttctttgattccattggcacatgtttatcatctgctctttaggaggcactatttataggcaccctggggaccccaagatgtgtgtgacataggccttgcagtctcataactgaaagttgaactggggaggcaagaaagtaattgccaaatacacagagttgggaagggggagaggtcagtataatcaggattggagaaggaaggttttgtggaggagagttgaactggtcctggaaagatctgatcagacagagagcagtggaagaatgaagagggcacacgtgggctgtgtttattccacttctgtgta

SEQ ID NO: 107913 - DNA, 1032 bp, Homo sapiens
aagatgctcttattacctgggaaattccaagtgatttaggagttctgtgtcagatactgttttttatcatatatatatatatgtatatatgtatttgagatggagtctcatcctgtcgcccaggctggagtgcaatggcatggtttcggctcactgcagcctctgcctcccaggttcaagcgattctcctgcctcagcctcctgagtagctgggattacagatgtgcatcaccatgcccagctaattttgtatttttagtagagatggggtttcaccatgttggtcaggctggtctcgaactcctgacctctagtgatccgcccaccttggcctcccaaagtgctgggattacaggtgtgagccacctcgcccagcctcagatgctcttatcactcaagaaattacaaaggtttcagtagctctgtgtcaacaccagggtccatgaccaaatatagggaacaaaacaaaaaagaccaaatatggaaacaagagtctcctagcatgtttatttacaagggttttattttaggagctctgtgtcaggaatcaggggcagaggagagaagaaaaatatgtggaactctctgcttaattttctgtagacctaaaactgctcttaaaaagtctattttaaaaatccatcattaaaacacagactttctccataataagaagttggaggggctgggcacggtggctcgcacctgtaatcccagtactttgggaggccgaggcagatggatcacgaggtcaagagctcgagaccatcctggccaacatggtgaaaccccgtctctactaaaaatacaaaaattagctgggtgtggtggcgcacgcctatagtcccagctattcgggaggctgaggcaggagaattgcttgaacctggaaggtggaggttgcagtgagccaagatcgtgccactgcactctcagcctggcgacaaagtgagactccgtctcaaaaaaaaaataaaaaaataagaagttggaggaaaactggaaagggaggaatgttctcactctgggctt

SEQ ID NO: 107914 - DNA, 1047 bp, Homo sapiens
ccaataaccagtgcaaaaggaatttttcctttatactattttatgaagaaatgataatgagatactcttctgtgtcttgtggaaattatcattgtataaagaggttttttttttctctctaatataagaaaagggccaaattaatgttcctgcctggaagaaaaaaaaatgtaatgctcctgcccgaactttatcttttactgtataaaaacattgaaagaagtcgataatgtagatatttaagaagaaccaaaaaggcataggaaagcatgggttgttacatgtctccattagttttcttttcagagacattctatgcatgaggtatctctgtttttcctctgggtggctgtttttctagcatagcatgcaagactgattagtcttaatttttcacgttgggatttagcacactctagtggacagtagcttttcagttttcacagtttttaaaaaaatcatatcaaattactttattggacaattcagtgatatacttactagcagtaaagtttgtcagtatttgaatcaagtaatgaccctagtgagctggagtaactttgtcagccactggggtgttgtacatttttacatgatttttttagcagtaggaggagaggcttttatcgttatgtcagaacttttccccagtggttttcctcttttgagtggaatgaaattgatgggggtggccaaaatgaagaggaacacttgtacctctacctcacactctttaggtcttagaatgtgctttatgttttcattttaggactcttgagaatttctatataccagtgtgtgacaattttgactgtttgtaaatattgttacatcctatcttgatggattgtttctggaaatgggctcccaccggaaacaaaaataatcttttattttgcttttgcagagtgatggtgatgattttaattacatcattgcatttttccttggaacagcagcctgcctttaccaggtaggttttcttccattttaaagaaacacttaccattattgtttacttcgggtatcagttctaacaattgtgca

SEQ ID NO: 107915 - DNA, 1034 bp, Homo sapiens
ctcattgcttcagtcaggaaatgtgataagtttgatcatttggttaagatggtgtctaccagatccccattgcaaagatatctttttcttctttgtaattaataagtaatatgtggggtagagacctattattttaaaagccttggaaaaccttgaattaaatatatgtgtgtgtgtgtgtgtgtgtgtgtgtgtgtgtgtgtatatattactggaaatgctagctcatttttacagtagcattccaagcaataaatatagataaaaaatggaaatataaaatcaccattaagcgaacaccacagtaatcattgttgcaggcaagaatcattaatggatactaaaattaatgagcaaaagtatgatgagataagatattcacataatctcaactccctgcccccaagacaataattgcaaagggaatagataccaccttattaagtgatctaatttaatatgtaataacatgtattgcgtatcacctctgatattcttgccaaaattgtataacctcatttcaatcttgacaaaacatcagacacacccaagttgagggacattcctacaacataactgattaatactcttcaagactgtcaaggacatgaatttttttttttttttttttttttttgagatggagtcttgctctgttgcccaggctggagtgcagtggtgtgatctcggctcactgcaacctccgcctcccaggttcatgccattctcctgcctcagcttcccgagtagctgggactacaggcgcccgccaccacacccgactaattttttgtatttttagtagagacagggtttcactgtgttagccaggatggtctcaatctcctgacctcgtgatccgcctgcctgggcctcccaaagtgctgggattacaggtgtgagccaccatgcctggccaaaaatttttttaaaaaaagatggaggagctgttacagattggaatatacatgacaattaatgcaatacagaatcccagattagattctggaccagaaaaaggaccctagtgggac

SEQ ID NO: 107916 - DNA, 1023 bp, Homo sapiens
actatcattcttactccctatccctttttcctgctttctctttttcaagacataactgtttgatattatatatttaaaatacatttataattcttccccattaaaatttaatatttatatgaacaagggctttgttttacttacaactgaagaacaatgcctgacttgtagcaggccctgagtaaatatttgttgaatgaattctccctcaaatgttcagtcagatgctgtacctagcatagttccttgtactcagtgggcgactagtaaaatgttgtggattttgttaatactcagactcaggttatattaagagtccattttgtagaatagcttgtatgtgcttttttgtattttcctgggtgagaatggaacacccgcagaccctgggaatgcttcttagttgcctgtcaccatggggaatttgctcagcctgtttgcaaggaagtcattccattgtacttccatttaaaatatgatacaaaatgcttttcttctgaaaaatgaaaaacttaagaggaaaatctatttccctttcaaactgtgaaactttcatagctgaatgtcttagatatatgctacattatcttatccctagataaaaaataaccttatccattcttatattttactctctgacctgttacaattttatattagaaacatctgtttcttttcctgtaaccctaatcatctttcatttttatattttgaacagtgttatttacttgtctactacaccggctggcggaatgtcaaatcttttttgacttttggcttaatctgtctatgcaacatgtatctctatgaactgcgcaacctctggcagcttttctttcatgtgactgtgggagcatttgttacactacagatctggctaaggcaagcccagggcaaggctcccgattatgatgtctgacaccatccttcagatctattgccttggcttcagggggataaggagggaacatatcataactgcactgtgatgaagaagctgttccccacagaggagaagctctg

SEQ ID NO: 107917 - DNA, 1092 bp, Homo sapiens
ttagtggggccaccaagaggctgtagccccccgaaccttcctgccctgccagggcgcagccccagaagtagttggctgcattgtcaggcgcccacctgtgctggggtggagtttgcagaggtggctgtagcagctggcctggccctggggattggctctgcccccagctgtagcctgctctagcggccctgcccctagcttccacctccactctgtctgacactttgggctgatgctgtctgccacctgcagggtgcatcaaaggagctgtagtgcttctggcatccgtgggcccccaggcatgtgtctcagcagaggtaggagcaggactgtctagtctggtgcattttcagaggcaaataactgactgcagggctcctccatgggacagcctgtgagaagaagcacagggatgccccctaccccccacccccagccttctcccgtgggcatagctgttccagagccagacacaggtagccttattcatggcgagggacatgggtaaagggtactgcctcccaggagcttaggtcacctgggcaggaaggcttggcaagaagacagcacagaccagctggctccccgtgcctctgtgggtggtggtggaaggcggggccctttagcgtccagaagccctcgggatgatcccagtcctcacagccacattcccagggactccaggaggccaccaggccatgggcagcacagtcaggagcccacttaccttaggggcagggctggccattgagcctaggggtcctggatcttctgccctgggagctcttcctccgtgctggacccaggtcctgaagccttggaaaggagcaccagctctttccccatggacatccaccaccacagggacagccagggccctgagagtcagtcctggtcctgttggagattctacttgcagctgagcagaaaagtgtcttcatttagttaggaaaagcccaagtgggccagccagatttttctcatgaacactcttgtcagatggttccttgccacacctcggtgtgtgacacctcttcccttcagccccttgtagggcactactggcctcttgacccgagggatctgccctgt

SEQ ID NO: 107918 - DNA, 1010 bp, Homo sapiens
gagggagagacggaatagcattcagcaaggactccacaaatggtcccgggagtgcagtggacccacctgtgtctctccccagcatgacccctgggccttcctggtggcccttccagcctgcaaggctccagccttgaaccgctgcaccattgcttccaggtcaacggcagggcagattctgcagctgaccaggagcgggactacgtggggaacccaggtgagagaggcaggaagacaggaaagatggtatcttgacccaacagagaaatcaataaaaagcacattgacccgctgtgtgccatcagggaggggcggtgggtggcagctgaggagtcgtggagggctcagaatgttcccaggagggttgagaaggcttctgggagggagtgggcagcggtgagtttaaggatttggagaggactaggcctctgggctcgggaggagggactgaccagcgaggagcaggaaggaggtgggtgtggccctgagcactgagtgagctctatccttagcaccaagctccaaggacctgccatttccctcattctctcctacgctgtattcttccaccagacaaaccatgtctactcaaagaccccctgcagctttggtaattaaatgattgggctcctaagtcccatttctgccaccaaatctgatgcagctggccttgtaaatcatgtccccctcatctcccatgcaacctaggctgaaaaagaatctgatggacagagaagccaagcagaggatccaggatgccctacccctacctgcccccaacacttcctgctgaggcctatctgctacagacaagctaggtgtctataaaaccccccaagggcagacagggtggttgaaaaagcactgagccaggagttgggaagcctgggcttggcttggcttttcctgtgtgttcctgagcaagccgcatcccatctctgaagtctcctatttgtacggctcttgggacctttgggcacccccagcttttgtggtgagtgaagcaggca

SEQ ID NO: 107919 - DNA, 1028 bp, Homo sapiens
cctcgcctctgcaggatggtcaccctgggtgggcttgagtgggaacccaggtcggggccccaagccacccacagctgtcactcaccctgccttgccgccagcctccatgtggttggctagcgtgacatcgttagaccagacgtcgaactgccacttcctgagaccaaggacaccgcagtgtactcgcccgctgtgaattcccacacgcatgttcacgttcacccctgtcacctcccggaccaacctggggatggagcaggagtaaagctgggagaaggctggaggccaggcacacagaatgggggtgaggctgcaggtgcagggaaggtgaaggtgcgggggtcaaagagtcttctctctcccatccagccctagagtccaagaacgttcagcctgaagggcactggggcgggcggcaggtgcagtcggctgtgaaaggggctgttcccggcctggccacaaggtggcgcggtgccacactaaaacctagagccctgctgcttcccctccaggagggcacctctggccagcactgccctgtcaattaaattgtgattggaaaaatgcaaatgcacgttagggccgacttgaattaaacagggaagttaccaccactccaaaccctatttgtataatgctcttgtgggtaagacagaaatggcttttggattatctttttattggatttatccacactgctgcttccaagatgttagcagggtgatggcaaaagctggttacccaggtttcaagggtatggcctgctcaggagggaaggggagcctgggcaggtgcaggggcttagggtgctccatgccctagaggaaagcttggtcccggccacatgcaccacatatccatatctgggagctcccagtagacagggcaggccctccgtatgcacttataactcctcatgctgggcgagcagtggaggcagactgggaaggaagccatacatctccaggtgcatgtctgaggcccatgggaacctgcccagcatctgcaggagagggtgcaggtgccag

SEQ ID NO: 107920 - DNA, 1050 bp, Homo sapiens
tgcctttgtacacagcccttaacccctggccttctgtttccttacctgttgacttggggatattaattcccgacttgcatgttccacagggtcgttacatgaactgactcatgcaaaaagcacacccatactgtaagcagtacaaatgaaatgtgctgttatgattatggttattcctgaagcgttcctgggatgaaagattcagcattagggcactaaaggtctaagtcaattaactaactggtaataccagtttgttccagaaataattggaggtatctatcgaagaagcagacatcaaggttaaagaaaactaaactgagaaaagtgatgctgtacaataatatgcatatagttaacaataatgtactctccacttcaaaatgtgttaagagggtagattttacgttatgtgttttttaccacagtaaaaaaaaaataagcctaagaaaacaaagcagtatggagagggaaaagaaagtaagaactagggacaattcagatgggacgctcattacacccttcggtgggtagagaccattttaacataaaatagatgaccatggtccaatagaaacataatgtgagctatatgtgtaatttaatatttttccatagctgtattttttaaaaagggaaaagaaacaggtaaactgagttttaggcatacactttatttaacccagcatatccaaatattatcattttaacaggtaaccaatatgaaaaatacgtgtgggtgactttacatcttttgttcacatcaagtctttggaatctggtatctatggaacattccagcattgcagagagctccactgggcagcactgctctagactttggccctccagcttgccttggaacccttagagaagccagtgcggggctgaagcttggggagggtatggagagagctcccccagtcctgcccctgggagattctaaggggatagctggatggccggccctatgggagctcccagtccaacaggggattctcgaggcctaatgaaggagaaagctctcccattgatgagcttgcagtgaaa

SEQ ID NO: 107921 - DNA, 1054 bp, Homo sapiens
aacttcccacctcccacggcgcagaatcacatccccttagtggcttccctccgcttccccttctccgcaggggtggggcggggatgggttttatagccaggggtcaggattccacaagcctgatagccagtggagcttgtgcccagcttgggctcgtgcccagcgtgggcatgagtaaggaggaggcggatgtgagtgtgggatgggccggcaattggggcgggctgggctggtgcctcttggtgggctcaagagtgaggccagacctcctgtatcctcttgggctgctgccttgtctgacccactcctgagcccggggccagggtggctccagtaactggtctgtcctctcactgcaaggtgcagggaagtctctcctgtctgtgaagtcagccctgatgctccttcccaggagggaaacagggaagtttctgtaccacgtgtccagattctgctatacaaaattcctcgctcctatcgggtggtatctctgtgtctgtatctcccctacttgagaaaggaccatctcattaattggcatgcttgccccctcccctgaaatggccacaggccttggattcttctggagccttatggcctctaaaagcttgatgagaagagagaccaagcctgctgctgatgggcccagcctggaagctgttatcctatgatctgggaggaggcgagtccttacagctgggcattctggctggggttgaggagggggattcgcagcgccccctgccaccagacatgagctgagctcactgcctctgccctgcagttgtgactcagtggctgtgtggtttaatggtaggtgccggggcattccagtcaggcggctctgcatttgaaacccagctccaccacctacctgtatataagagccttggagaagtgatggcaactgtctgaccctcagtgtctccatctagcacttggagctattgctatccactccacagggctgttgtgagaatttgtttactaatctgtataaaacaccctaacctaccaccctgcccatgggacttccgtgggcagcccgagagga

SEQ ID NO: 107922 - DNA, 1062 bp, Homo sapiens
aggctgctggggacccatcaggatcacctcttggtacagccctggaagtctgacccggggtctctctgttgagtagtattcagtagatacgaagcttggtgcttactagagcgtttctagggtgtctctaaagcccagttccccagcaccatcaacaccctaagaaataccccagcatcctttagctgtgtttcagattcacttttgttcctgtcgctcttctcaagaaaactaaaggaaaatgaaactcgtttgctaagtagatctttgagattatatttttacattttcttttggggatgggacggctgtttgttcacttagtgtgccctagtccccagtcttcctctggccaagtccctttcccgtaagcatttcaccacgctgagtggaaggaatccatctgcccccttgactggctccctgtaggtgatgccagctgggaagtgtcttggctctggtacctcagctgagcaggctgcagagggacaggggcctgagctgagtcctgggtgagcagtgtgggcttgcacccctctggggccctgcctgcctttgtggcatctgacaccgccaatctaaattggaaacatccccttctttttctctgtagcacttatgctggtttgtaatttttctcgttaggtttgtttatgtgtctttccactggactgttggctgtctgaggtcagggagcttgtctctttcaatccccaaatatttactgagtgttattgatttttagatccctacttgcccaacactgtgggaggaaggcagatagtgcccattctcaggttccacaggagttctgactttggcaggaaggggtccctctgggtgcttcttccctgggctggcatctcctctaccagagccccacctctcttccttgtgcctgggccctgccttagaaaacactggttttcagctgggtacagtggctcacacctataatcccagcactttgggaggcagaggcaggaagattgcttgaggccaggagttagagaccagcctgggctacatagcaagtccctgtttctacataaaatgaaaaaa

SEQ ID NO: 107923 - DNA, 1089 bp, Homo sapiens
ctacctgctcagcagcccagcccaatgagccccgctgaagagctgccaccttgctctggaacttggcccagaggcctgtctggtggatcactctggctgccccatgtgagacgctgggtagagtggaggaagacacactttcacccacaggcccgggtattgtctgccaccaattgctttccctatcacctgcatttctggataggagaaattcagtggcagtgaacttcagcagcaggctcaaccccagcgcagcagcaggctggggttgggggttggctttgggtttcgagtggaggagggtctgcttctcttgcctcaaggctgactgtatttgccgattatatttacttattgcttattagatcgcctctttctcccaaaagctaggagtgggtatttggaggagagcagaagtggctggggtgggggtcgtcttctagatccctagagtgccttgatccctgggggaggacttcaggaatggcagagactcagcggaggggcacaatgcccagctgctgtatttgtgggaatgtacactgttaataattcaatctaaatgttcgtctgcaacaggagcatgagttctgtgtgctgtgggacccagaacagtgcgttcatgtttgtctgtaaagaggacatggatgatgcgttaaaccccatcaacctcacagagagtttcaaaatcagtttataatgcttggacaggaactctcctattcattcaagctctggccatgagtccctctgtccgagggtgtggctggagcacacgcagggtggtggcccatgttcgggccaggcctcctctcccgcatgaggcatgaatggaactgccaccttggtcctcaccaaactgggacctgaggagggagcctcccgtgatggcgcagcctcttgctgagtgccttgctgtccgtggctgcctgcttgctacttcagttaactttatcttggtggtgggtgcaacctgccgtcatgtgtttcccaggagtgtagcctgtgttgagaaagaaaagtttgctctgggggcttcaacatgatggtgcccgtaaatcctttgggtacagttacataagtgaggcc

SEQ ID NO: 107924 - DNA, 1113 bp, Homo sapiens
agatgaaaaaagtctccagagcagacttctgacaggaaaggtttagatgctggagagttgaagaggtgtaagaagagatcgtgccctcatttttcacttatttttttggttattcatttataataaaaggttggcattgatatggtacaacctgcaaattacttgcagttctgagtttcagataaaacattataaaacattaaattcaatacatactgctcctttgaaatttgggtaaaaaattgtacaaccgtatatatagtcatttttgtattttttctatgttgtgaaaaccaaaattgtaattttataagtctttgattcactaaaattatataatttaaatgtattttttgtatatttagaaataaggagtccagagactacgcttaactttctatgcatgcatttgaaagctgtttttacctgataatgtagtaataagttgtattcataaaatactgatctgtgttgcatttcaaaataaactggtgtgtgctctgcctggatttgaaatacctaccagtgagtgcagtgatttttcatagtcagtaggcctgaatgtggtgttgcaggaatatgggagaatttcagttcaattatggactccagctctttgacaattttaaaatctaattctgctattcataatggttctgcacttacaggaaagacagattatattaagaggtttccaaaaagtccttccctgccagtcagtcttcaggctaagccagtctgcaagctggctgcagagggacaaggggttcctcatgcaagtgaccagggaatctaagatattaatcagcatggggttgaggaaccttgtcttataacaagctggggttttgttagtgtaacttttctttttttgttttgagacagagtttcgctgttgttgcccaggctggagtgcaatggcacgatctcagctcactgcaaccttcacctcccggattcaagcgatgtttctgcctcagcctcccaagtagctgggattacaggcacccgccaccacacctggctaattttttgtatttttagtagagatggggtttcaccatgttggccaggctggtctcgaactcctaacctcaggtgatccacccgcct

SEQ ID NO: 107925 - DNA, 1773 bp, Homo sapiens
ggaggattgactgagcccaggaggtccagaccatgagccaagatcacaccactgcataccagcctgggtgacaaagtaagactctgtctaaaaaaataataacaataaaatagagattggagctgttggagagatgaggagaggaaggatattgtacaacaaagagcattttacctggagttgtttacacacagtaaccttgtgaaggccaggtggctcaaagtggtatttcctagcagggacactataggcattttgggtgggatacttcttagtagtgggtactgtcatgcattatggcatgttttagcatccctggtctcatatgccaaatgccagtaacctttccctttctcccttatttccaaatagtcaaactatcgaaatagttccaaatagttccgagggaggcagtactatcccattcatttgagaaccagtgctttctaaagtattctacaaaatgaccaagaacagaagaatccccagtgcctaagacactggcttgcttttcataaggccttttttttttttttttaacatccaaacctggcttagttgtgttcaaagcaaatgttgtggcattcctcctcctcctcaagtctttacccgaaactacttcccaagagaggttgctcttcccaaagaatcacctgccctgggaccatatggggctaggctgagggtcaggagccaagagcctggtcccaactctgtctgtggcttactgtgagaccctaggcaagttgcttaccctctctggggctcaaattcttcctctttgaaataggaataataacttcatcactagaattcttcacctggttgttgtgaagttaatcagaataaatgtggagataatacatgaatgagcgtacagaatattatttggctgttctgtggcatcgatataggtcatgatagtgacaatagtgtctgtcattgtattccacaccacttcttccctcagctaaagcaggaaaagaaaggaggtaagtctctctgtgttttttcttcctttccccaagcccactttgttaccttccttggttgctggatgagaaattagtcagagggtcagagaggacctcaacttcatatgctttaaatagagcatatgcaattttaaaccatcctcttaaccaatttttcttttcttttcagtttttccccagttatacttccacatgatacaccagagaagaaagatcctttctcatactgaagaacacaagaaatttgaatagttcctgctttctgcacctcccaccaaaacaaacttttcaatgatcaaaaaatgctgcagattttttgagttcccaatacgtttcatagaaaataagtaagaactatttttaaaatattcaaacaaaactaaaacaaaaatccagtgtcacatgggcctgagattttattttagaaaaaggttgttacataaaacaccctggccagttcatttcagcatgctctttcaaccagaagttcttaatatttatgatggcactagaaagggatttggcattttatgtccttctgtgtccttcatgtatctgatcaatgaagacctgtaacactaagtacttgagagttacagtctgaataatgaagtcgtaccagctgaatagcccagcttgcagtatagttatgtttcagtctgcagtgtgtttagcattcccttgtcaaagtgcttgactgcatgctggaaactttgtatttttgaagcggcaaactctgttctctggaatgctctgaagttatggctgggacctatcc

SEQ ID NO: 107926 - DNA, 1096 bp, Homo sapiens
gggcaagatacattgatgaggggtgaggacctggagaagctggcgctttccaggttgtcagtgactgtaaccacacctctgatttttagagaaaccaaggagacttggcccaggcagagagcatatctggtgctgtcgtcctccacagttctctccccagaggggaagagagccccaagagggctggccatcttcttaaagaaaggagggcccagcagcacccacacccccctcgtccccaacacacagggactgtcacacacacgtgcccagcagtgtccccattctgtgttccctgaattgggacagcagaaggtggaattctcaatagcctgttgtcgggttgaggggttttttcagtgctattcctcagtgtagctcatgttgttaaaagtggcagccgtgcatctgaaaagctttcagtctcatggtcgggttcagtctgaacatgtaggtgattcagatggagacagaatcatagttctggtcagccagaagccactgcctgaactgtggagaataggccagacaccctaggcccttggcctcccatccacattcctttctctgggtactgaggaatctctgggagatgtaaaggagtgaaagtgccatcatctgacccttctgataggtggcaggccctgcccatggaaatgaaggtctgcgtggccatcttcttccttgaactgccaccaagggcttaatgcatgacttccaggtcattctccttccccgggccctctgaaccagctgtgagactgcagccacccactatggggttgtgtgaacacaaatgcaaccagtgggaaggtcttgtgcatgcccagctcacagattcccttcattacagtaaatctatagaaatgggactggccccacatttttaaatgattaccattaacattcctaatggtttaattatatctttacttccagtttttagattatagagcttgtcagattttctggctttcgtgccaaaatagttctctgcctgtcgaattatatgcttaagtggggtcttttctgtgaacgacgtcctgcctggcagtagcaatggcgtggatggcagccctgttccacgtgctgcctc

SEQ ID NO: 107927 - DNA, 1774 bp, Homo sapiens
catttgaaaaatagtagcagtatacagatgcttatgctattttttttgttgttcagtctttgtgtgtggtgtggaattcctagaccacatgttccaacacctccgccactaccaccccaaccccatcccaagacccacagggcaggacccgtcagtataaaccatgactcagttcccctactttaccaacatttggcatcactttagttattttagagcataattttgaagagttgtttattttgtcagaccaaattttgaggctgcctgaacggcctttattttgtcgttagaacatttggaaacatatacctgctgtaggctggtttcagaaactggcttgtaaaacctgaatttgagtagcaggtaaacaggaaaatgtataaacaatcattttctaaaagaccagtactgattagaagggtgggaagtgcagcttccttctaaagctgactttgagcctcagtaatgaatattttgttttgttttaggtacacacttttcattgtgctgtacccaatgggagtgtcaggagaactgctcacaatatatgcagctctgccctttgtcagacaagctggcctatattccatcagtttacccaacaaatacaatttctcttttgactactatgcattcctgattctaataatgatctcctacattccaagtaagtaaacagttatgcgtatatttaattatgttttaaaatttggctctacaataactaaatatctttgactgtctttgcactatatccaagtaaatgtaaatctcatttattgggaattcttggtttttattgaatgctgactatcaaaaggaatttttttccagtagtaattgaataaagatgaacccttctcaatacagttgccaaaatgcagcccttctcagcatgtgggtttgaaactgaataccaggctaggttaagtatgtattggggaaagtactgaatggaaaacaaaaaagccattaaaggccttaccttgattgtagttttctgtgtcttaagaactgcttgttacagtatttgaaaaacatgataaaaagatttttgcattggttactatatcaaaatagacatttaacttcattttgaagggattggtagttaactagaaacataacaaaataataatagatttatttttttctaaatttttcattttcttgttgagcactgattgggacacagtgttctcttcaagatggtttccaattattttaatagtactgctgaagatttaagtatatggataatcaaatgtgcctatcagtgtattcagtgacagagaaaaagacatgtttgatgtctctgtgaagtgagccctactttctgaggatgaggagtttagtcctttgctggaattctgatgttcaattataaatcctatgattgatttctatataccaaaagatcttcttataaccaacgacatacagtgttagtggttcttctcattttgctatttctataaccactgtaactctgaatcttattttaatctagaaaagatactgtattcttccctaaaccccaggttaaatcagacagggttggacttctcctcattgcatggcatcatcggaatgaatcaccctaacaaagcgacatgcttgtgtccctctgtggaaaattgcatttcatgcattgtgagaaaaaaactacatccagatttcatgtgagtgtttatcttgcagaaattcttggatacagttctgcttcatgattcattttccactctttattcatgttgagtcctctctagtg

SEQ ID NO: 107928 - DNA, 1190 bp, Homo sapiens
ccaccctgctgctctcactcctggtgactgaggccctttgcacttggccctcatctctgggatgtacacagctgtcatcctaggccccagctctacacgcaagctctttctgccatacaggggtcctgaagatagagaccagcggctgtgccgactcactccctggctctgccgggtgctgcacactgtcttcattaacgttgtctgtgtgttttttttcttttgttttcctcttccttcaggtacagagtgaagacagtgtcctcctgtttgttattgcatggacgatcacggaaatcatccgttactccttttatacattcagtctattaaaccatctgccttacctcatcaaatgggccaggtaaaaaagcacatttcaaaaggctcacttttgaaatgatctgtcattgaatttgccctttattgcctaaatattgcctcaaagtttctaaaaataaaattgagacgggttgggtagaaattttgtctgtagatttcatcagaataggagtctgtacttaactttgactaacggaaatactgttttaaggtttttatattttacttaaattattttaattgggatcagttcttttcaattaaattatgcagtattttcttttttaaaaaatttcatcaccaagtagcaatcaatagagatttgccgtaacatcccttttttgtccatatcatcacattttactgatgagcttctgccattgtgatgggtttttttggaccaagtcctattctcctagtctcaattttgccaagaagttgtgactcttaaattaatttttaggtaatgacaaacattacatgtcagttttagcttatcacttttgttttgctttgattgtttttacaagtaatgatgactttggtaaaaggctagtagttcatctgcttaccttaatgagtccatgagacagttgtaggcagttttctgagctgggaaggactttgagggagagtgacaaagcagaaggatccaagtccctggagccgaaatgccttatttggtggaaggaaagcagtggttcctagagtgtttatgagttcagtaattaaattagggacataatccgattgtttccaacattttgagtatgggaactcctttgttattttattatttttctcatttgcaatgaacatttttattaggaaaggggaagaatgggaaa

SEQ ID NO: 107929 - DNA, 1203 bp, Homo sapiens
tccttggtaggaccttcctgggcagtcctggtttggatatgtccagggcctacaagcacacaactttgtgcggtggccaatgtgattagtcgcctggtttgttactcagtttttcttaggttgaacccagcattttactccctgccagttttactagtctcatgtccatatgcctcttgctcatggtatccttttacatattttaaagtacttaccctctctttccttttccaaagtcagctctgctagttgaagagttcttctagcagactctgttccctaaatggggtctcatctatttacagtgtagtaattgggataagactgttaatgtggctgaatcctggagtgttgtttgtttgaacagccacctcacaccctgttggctcctgtgaggcttatggttcaccaaaaactccagatctcttgatttcataaggtgggtcttctccattctgatctggagtcattttgttgttgctaagtcatgtaattacatttagacttattaaatttatgttactgtgggtttgggggttttttcatttattttttgtggtaaaagacatacaacatttaccattttaccacttctaagtgtatagttcagttgcataaatactgtcccattgttgtgcaaccatcatcaccatccatctccagaacttttttaatcctcccaaactggaactccataccaattaaacaataattctctatttctcatcttcccagctgctggcaaccttctgtctctactctttgtctctgcctcaccctaggtaccacatatgagtagaatcacacagtattcacctttttgtgactggcttattttacttagcatgatgtcttcaaggttcatctatgttgtagcatgtgtaagaatttcctcccttttaaggctgcataatactccactgtatgtatataataatatcccgctgtatgtatagaccacatcttgcttatccatccatcagtacacacctgggtttctttgccttttgactgttgtgaataatgctgctataaacatgagtgtacaaatatctcttcgagtctcattgatcatgctggttttaagttatgcatttgtccattttgagttattggttgtataattatctataaatcacataaggtcaatctctttatccaaatcccttcttgataacaatgttgcatttcctattgattgga

SEQ ID NO: 107930 - DNA, 1005 bp, Homo sapiens
gcacatgccaccatgcccagctaatagtttttgcattttttaaagggtttaaaaaacaatgatgaatatattacaacagccacatgtggtgcaaaccctaaattatttactaactagccttgtacagaagaagtttgccaacacctagtctatagcattgctatggactgaattatgtctcctcccacaaaaaattcataccttgaagccctaacccccagcgcgatggtatttggcaatgggacctttgggaaataagtttagatgaggtcatgcggaggtggagccctcacgatgggattagcacccttatgaaaaaagataccatgtgaaggagggcacatctagaaggtggccatctgcaagtcaggaaaagacccctcaccagaaaccaatcatgctgccatcctgatctcagacttccagcctccataactgtgagaaaatacttttctcttgtttaagccccccagtctatggtgttctgttatggcagcctgagcagactaagacaaacgtacagtttttccaaaagcaaagcctagtcctaccctcttagattttaccaaatctcttcacaaatgaaaggggttttaagaagaggaaagaatgcttgctgtaaagcttggtcagggaatttctttgaaataaccagcgcagtaagcagcgggttccaaaatgctaagaagaatagggtttctacaatagtggttttcttatgtggcaccatctgtttttctttgactgtaataaaaatgacagcttttcatgtactgatactccctgtgccttttaaagtcaaacatatgatgctatttgtgtgtaaaggtttttctcttgcacccatttgtttctccagcttgaatttctatgtaaactcccttggctaaattacacaagccgcctacacccagccgcctcctccctcgctttagagcagggggtggaaaccttccgtctgcagcatggagtatccaatacacagctcactgtgccaggcaaaga

SEQ ID NO: 107931 - DNA, 1036 bp, Homo sapiens
gaggctgaggcaggagaatcacttgaacccgggaggtggaggtttcagtgagccgagattggaccactgcactcctgcctgggcaacagagtgagactccacctcaaaaaaataaagacatatactgtattattccacttatatgaggtacctagaattaacaaattcttagagatagaaaatagaatagtggttacctgggggcggtgaggggaagatgtggagtgattgtttaatgggtacagagtttctgtttggaatgatgaaatccttctggaaatggatagtggtaatggttgcacaatatggtgaatgtacttaattccaacgaattatgcacttaaaactgttaaatgataaattttattttatattatccacacgtacaaagaaattactgagatattaaaatgatggtaagatgaaaaacctacctatacatgttcttacaaggttgttttttcccccatagtgtccattggtgatagacattgactcccttctccccgcctccccacacaatctgtcagagaaatgttgcagaataacatttgtatgctaaagaagtcacaggggccaggtgcggttgctcacctgtaatcccagtactttaggaggccgaggcgggcggatcacgaggtcaggagatcgagaccatcctggctaacacggtgaaaccccatctctactaaaaatacaaaaaaattagccaggcatggtggcaggcacctgtagtcccagctactcaggaggctgaggcaggagaatggcgtgaacccgggaagcggagcttgcagtgagctgagatcacgccactgcactccagcctgggcaacagagcgagactccatctcaaaaaaaaaaaaaagaagtcacaggaaggggaaggttggaggggttcaatgaatctataacagaggttggcctataggccaaatctagcctgcaatttataatagtttttactttttttcttgtttggtggggtttgttttgttttttagaaacagggtcttgctctgttgcccaggctgga

SEQ ID NO: 107932 - DNA, 1026 bp, Homo sapiens
tatgagaacaaggtggcagttatcgagagagaactcaaggtctccagcatgcaggttttcactgagcagcttctgaaacccttacaaagcagccagcggcttttgtgcagaggagtgccacttccttcagagagagaacacggttttcctttcttcctctttccctcttccgttcaactcttgtagaagccaaaacaccagatacataatgtcctaatgcccctgcttccggacctgttttcgttgttggggtttttcctccctgctgggtcctccagctgggtcacagtgtgctcgtgttcttcctgcctctgaggccacttccctggttggcgtgtctcctgtggccgcacgccttctgtgttatccctgatagctgtgttgtggacttcccagcatgcgccatccgtgaacgtggtatcatggtgaggcagaaaggcagcttcttacccccatcattcagatgaggagatgagatgctgtgtcaggggcacatcatttcttccttgggccctgtgcttggaccaaagctgtgccgtcctgtcatctagccccagtgccctttccacagtgacactgcagctcagttagcagaggccattgagttatattcagtatcctttgtccccactaaaagctgaatgtctaaaatcctccaccctactccatttggttactttctattttaaatattcttgtaggtggatttacatcaccttcattttaaaataacacctctcttaaaggtaaaaaaaaaaaaaagtctccttatttgattgttaatcagacactgtcaaacttgaggcagcttctagacaaatgcagcagcacttagtggcattttcacttaaagattgtgttagttatctcatagctagctggatccttttgccgttacctatatttagcatagatggttttggcaaaatcagaatgtctatttttctctcagtgtttttctgcctgtccctttccaacattttccttgtactgtgtatgaagattttatttcaaaatattgaaaaa

SEQ ID NO: 107933 - DNA, 1165 bp, Homo sapiens
ggattctaaatccagggtctttctgctgcatcagagctgccaccttctcaccctttaaaaacatgatggtggccgggcacagtggctcacacctgtgatatcagcactttgggaggctgaggcaggagttcaacaccagctggggcaacatagtgagacctcatctctacaaaacaaaaaacaagaaaacctgacgtaaacataatgtttttaacttttgttgtgctgacttctctcactcccctatggagtggaaatgcctgtgtgagatccataggtgcttttcctcctcaacagttccaccatgccatattcacattaggatatgattctcctgctaaatcatctgtacatcagatgtacacatcaattgtgggccctaggtgcttatctgcaacacattgcttctctgtttttttactgctcaagtgctctgagatgaatccttctaattagcctctctccttaaaagttctaagactctttctcaaactaggatgtatgcactatttggaccagaatcacccagagggcttattaaaaacgcatattccaggacccaccttacacttgatacagaatgtctgggagtgggaccagggaatctgaatttttattaggcttctcaaataattttaagaattccaaggtttgagaaatgatctaagatacctatgtgttgtgctgtaatttttgtgaccttcccttgatttaatttacttttctacttagtttacttgaagcctaacccaatctcagcatctcttttctaactccaagagccattgtttcattcttgaagaatgaaaaccttagagttcccttaaactgctaagtaaagatactgtggaatttctggtgctctgtccaaaatccagcgtctttgctgatgactaggtaagaggaagcttaaggagcctgccttaaagcagaggaagatctgaaatcattgcactgaagaagcaagactgactttggtttgtttttaagagagaggcccaaggaatccagctgcctcacactggggtggagttgctgggaagggtctgtagcaggcatgtgcttcatgctgtgggccagagccattagggagatctcttcacagagctgtcagggagatcagttcagaggccattcccacctgaggtaacacagtgccgacacc

SEQ ID NO: 107934 - DNA, 1667 bp, Homo sapiens
ctatgagcacatctgccaaagcaggtagacaggtacgtcaaaaatgctttacaactcaaatcaggcaattctattagtcaagttgctgttagcaacatttgccaggatttcctgtgtagatcattgaaactggttggcttgcaaagctattaaatgtctctgtggattataggtacatggacttggtgtcatcctccataaccatgctgcctgccagatgcaaaggacttaacatataacagacggtttcacatacattatcacatttgagctttacagtaatttgttatatactcattacatttccatattcaaaattgtttctctacaaccagagtgactcaatttctgctaacattaacatatcattttctttacctgccaaaaaaaaaaaggaaaagaaaaagaaaaggcatatcattttctgaagtatgtagtacattcttcagtatattttattgtcttcccatcgcctcttggatcctcttgtttttacatatgcactgttgatgaattgacttactcttttcacttgtaattggacttcagcgtttctgctgtcctaggatcatggttcttttctcctcattctctttttctctgcacagaactcctcattcatcgttttgtttagagcagtaggtgccctccatccctgccctacgtcttcgacagctaacttgaaaagcctgttgctgtggcccctcagaggccagtacttgctatatgtcaccttgaaaagcctgttgctgtggcccctcagaggccagtgcttactatctgtcaccttgaaaaggctgttgctgtggcccctcagaggccagtgcttgctatatgtcaccttgaaaaggctgttgctgtggcccctcagaggccagtgcttgctctctgtcaactgttccctggacccttctcttggccaaatgctatttttcctgccttggagtttcatattagctatagttcaatttgttctgtataacatcacatatgacttctgttcttcgatttcctgaagcatcttaaaaatgtctttattttccttaatattcaactctgcttactttaatggtgggaactgtataattaatgcataaggaaattgaccttagaaataactgcttaatcacatatatctcactttcttgtagtaatgttcaaattcttttcacactactatcatttctcagtttctttttatatcatattcccctctaaagtggacaagaattcttcattttaatcacattacatgtgaatttggactcctgctccaccccctctgccctgcgtgtttcctttgctcatctcccttgtttttctgtacctgtacatgatgtgctagggtgtagcctatataaccttttcagactagactctacttttttcacgtgaggtatatttccttttaagaagccctatgggacatgcatcattgcttgtcattttaattctctaccctttggaatgctagtcacataaatgtcatcacgtacattgtgaaactaaaaagtgatcagatggttttctcttatgtgtaaggatctacccatcagctagtgtgacaccttgatcagcaggatattaatgaaaaaatttgaatcaatacacagaggcaagaaaagaaaaaaagaattgtgatccgtatgctcacatgcttttccttg

SEQ ID NO: 107935 - DNA, 1062 bp, Homo sapiens
gtctgaatgacatgatttggggaaaattaaggtgtctaagtaggcgagttcactggatagagaacggtagaagcacctgcaggcaaggccagaaacatcttgacatctacttcaattagaaagtattgatcagctttttgttcactacttattaagatttaaatttactgccaaaggtgtgctaagacaggcacttttgtatattgctggtgggagtataaattggtaataaacttcttagaaagcagtttggcaatacatttcaagagccttaaaaacattcatgccatttgacctagtacttctacttctgggaaaatgtcccaaggaaataatcctttttttaaaaaaaggtctaagcctcgaattttgagtgttatttgtaatgcttcattacttcatttatagtatcaagaaattcgaggcaatttaaatgtcccacagaaggagaataaacaaacatattaactcaaaggaatatcatgatttaagctaaaatcttttgaagaagagaaggaaaattcttaaaatgttaaatgagaaaagcaaaaacaatataaacagtagaagttaaactggtttaaaatatgcttagaggaaaagactggtgagaaatacactaaataaatcgttgtgtgtgtgtgtggatactaaagcatttttaagaaaaacactgttgaccaggtgtggtggctcactcacacctgtaatctcagcactttgggagaccgaggcagcgggtggatgacctgaggtcagtttcagatgacctgaaactccgcctctaacaaaaatacaaaaattagccaggcatggtggtgcatacctgtaatcccagatactcaggaggctgaggcacaagaatcacttgaacctgggaggcggaggttgcagtgagccaagattgtgccactgcattccagcctgggcgatagaacaagactgtctcaaaaaaagaaaagaaaagaaaaacactgttaatttatgtatggcatttttgaaagggagacaaatacaaatttatattccctagagaagggtgatttatagtggagagggaat

SEQ ID NO: 107936 - DNA, 1897 bp, Homo sapiens
tttttagcaaagatggggtttcatcatgttggccaggctggtctcgaactcctaacctcaggtgatccacccaccttggcctcccaaagtgctgggattatagacatgagccatcgtgcccggctgggtttagctttttgaaaaagctttgcataaaaaagttttcaaaagtatattgaaacagtatttgataaatttttaaaatagaaatactaataatttttttatccagcattcaaggtacttatgggttattagtataagttagcaaaaagtgatgatatatataatagttcaactgttttttaaaagttcaattttgttcggccctgacagttttactaattaaaaaaaaactgtctgtgatgtgctcttgctggtgaaatacatatgaaccattcatatttcaaggctctaattaacaatctggtttaaaacactggtattccataaacaataaaaataatagggtgggaatttcctattggaatgctaactataatacagagatttgagtaagtttccatgacttacaattgactcactgtgtcctctcagagaatgacatctattatcttcacattttcatctttttcaaaacgtgacacccttttaagttatcttcagaaaggaaatatgtgtcatttatttcatgtctatattttgctctcattcagaggttagactttcagagtggagacctcaaaagtaaacaagcaagtgaggaggctctgaatgttcgagaaagctttcaaaaaagtcattcccttaagaggtctctgggccctctcttgaaaccaatttattattttttacctgtaagaacttcaataagtggatgagtaagatgctagtggcagatatttggacagctggccgtctgaaatggaggaagtagaaaagaaaatgaataaagtacatccagtgaactagaaaccagtacagcaaagtcattaatatataggaacacggctcaaaaaaccaagcaccaggatttttttctttcttttcttttctttttttttttttttagacagggtctcactccgtcccctaggctggagtgcagtggcgtgatcatggctcattgtagcctcagactcaggctcagtgatcctcccgtctcagcctcctgagtagctgggattacaggtagacaccattatgcctgtctttttttttttttttttttttttttttttagtagagacgaggccttgccatgtttcccaggctggtctcaaactcctgaactcaagtgatcctcctgaagagttgggattacaggcatgagccaccgcgcccagcccaggttttatttctttcatggaccctatgaattgtacaactggattattttctctcattgtattggttgtaaaggagctcagagccaagtttgtgatccacctcaaacaggtgcacaggccttctctgcatttgtttaggtattaatttctctcatgattttaaattattgtttttacccttattttccctgagcctgacttctaccatacgtttttttaattttgtttttctttgagaccgagtctcactctgttgcccaggctggagtgtagtggtgagatctcggctcactgcagccttgccctcctgggttcaagtgattcttgtgcctcagcctcccgagtagctgggactataggcacacaccaccatgcccagctaatttttgtatttttagtagaaatggggtttcaccacgttggccaggctggtctcaaactcctgacctcaagtgatctgcccacctcggcctcccaaagtgctgggattacaggcgtgaatcaccaagccggccccatatgtgttttttattatgtattatagtgctctttcagcttttcttcccaagttttctaaacaccaatgg

SEQ ID NO: 107937 - DNA, 1511 bp, Homo sapiens
tgtgagctgtgttcagtgttctccacattcactcacactttcagtccataaatatttatgaaacgtccctggaattcaaagcaaagtaattcccacagtactttatctactgtgaagaatcaaggggaatacatatgtcctagctctttagagtttattcatataacattttcatcttagatctggggctgatttgcttagttggttagagtataatgcttatgggtggaaattttttccttaaaataatctgtgtggaggaaggcgtaatcacaattccaacacttttaaaggaaaattatttattaaagggcaatcaactatttataatagttaagtacgttcgttaaatacttcatttatatctggtagatcttgacctgacattgagttgccacattcttggctctagaaagatgtttttaaaagatgttcatgaatactacatgtcaaaattgtaagagaaagcagatttttaaaatttttggacataatatactagcaaatttttttagatatgaactctgttttatagatgattcagaagattgtttaccagaaaaaaattattacaccaaatttccaccatattttttcttattgatgtcattgctttccatgactgaaaagtgtaattgaaatggcttcttttaaaagtgttgccttgtcctgcactctgatggtttgacttcttaagtccacccagattctcttcagatattgagttcattttctcaactataaaaggataagtaggattgcatttggttatgcataccagaattctgactactgtggctttaatcaagtagggatttatttttcctatataacaggaagtctgtctttctgctctactatccttagtgtgagacttctgtctttgtacttgtagtcttatggttataagacgtctgtgatgagttaatatggtgtcatgtttacattccaggcagaaagtgcaaggctttccagaaacttggtttatgtttccttggtcagaactgtgctaggtggcttcctcaagttgcatgggatcccaagaaagctagtgttttagcagggtacattgctaacccagatgagatcagtgttctgttagtgagacagaaagggacattgtatagtgggtaagcaaatggtattgtctgccacaagggtttggatggttgctcaagtcctgagccgatagagcaatccatgagtccatccacttggcaatagcacatagtgatagtacagtactcagtgtaagtaatgaatcggctctatatctttagtgttggaatccagaagcaaaaacacagagtagtttacccctaggtaatatacgtggtcataaatctcaataatgatcttgtacgtgatcttgttttcctcccattaaagtcctcattaataataaggggtacttgaataaataaactcttccaaaagctgtttccatttagattttttttgatatatttgagccaggcacggtggttcattcttgtaatcccagcactttg

SEQ ID NO: 107938 - DNA, 1023 bp, Homo sapiens
gtctccctgtatggtgccactgtaccttcccacagcttcagtggctcccacataccacttctgggccacatccttctcctgcatctctgtcccagctgcccacctggacatctccacatggttcctctgcagacaccacagactcaacatgtgcagaagccacctcatcattgttccccgacctgctctcctctgtactctggatctgctagtggcactaccagtttccacctcgttcctaatcaggaacctggggtgtcagcctttgtcttcttcaccatttgccctctgcttctctgtctacctcttttcctttcagggaacatcatttctctgccacttgtgtttctgttctttaaaacaaaaaacaaagcctcttttgccttcatcccctactctaaatctcccccttttctcttccctcttgccctttctttctctgtatttttctagccgcttcattgctgctcattttctccatttctctttttcctcttgcttctctagtggttccttctcattccctattcacattctcttcagtcctcactgcgcagataccaatcttgatcctgcgcctgttctttttcctttaggggatttgagtttcgatgggacagcttgaggctggccattgctaaagcctggggcatgggagaatggggtaagcaaagtatcaaatacttctttttgttgttgttgttgaaacagggtctcactatgttgcccaggctggtctagaacccctggcctcaattaattctcctgcctcagcctctcaaagtgttgggattatagatgtgagctaccacactcagccttaaatacttctagactaaaatccaacttactgtttctctttcccttctacaccaagaggtaggccagtatttgtcctctgagcatacctggattcccaaatgacaactctggggtgccttgaagactgcagttataattttggggcagaaaacacccccagaaatcctcaaacctaataaaagatatctgaatgatcaggaa

SEQ ID NO: 107939 - DNA, 1504 bp, Homo sapiens
ttattattcaattttctttattacatttttatttgaatctgttctcctttgggtgctttgaaatttagtcttcatttcagatataattttatctttttcttttttttactgaatttaatcaattttttgttcagttctgcccacttttagtccatttctattttcagtttttgaattgattaaacatgtatttttttcatagcccaaatgcctatttaaggatatttaattcagtttgggttattgtgttaaagtttcctttgtgattttttggagggcattttcattagctgaaatgttttgatcttctttttctattttctcctgaaaatggttttgtatagttgtaaactacttgcatctgctccttttgtagacaagattggaagtttgggttggtttataagatccctagtttgcaaacactgtaatgcttaaatgcagtgaagtatagtctctttagtggatggctttttgcttgaagaggtcggtgggggaggaattatatgaccctgattgttttacctcacctttgtgttacaggaatctaaatttcctcctgcctctttctctttccctatccagtcactagagggcacctcctctcccttcttttttactcatttcttccttagaagcaatgccgttttcagattgccatagcatcccacagactctgtctcttccctgtggttagtgctccaaataagatgtttttcagtgtttttataattagggtagactgtctctttcaggagtgattttggctcagatttaggccttctgttctgctcttctctcttccatgccatttttccaaattctcctcactttccacaaagatttgcagtgggacctcaggagatagctgtgcttggaatttgctgtttattatttttacttacaggtgtattgagtctgtagtctgtgtcaattaattgtgctgaagatgtgaggtttgtatgcttgtatttgttactgttgatctgtatagatttttggaggatttctaatattcagctatatagatatattgtgatttttaaccagttgtctatttgttaaatatgttggtggttttaaagtgtgcaaattataactacttgtagcttaatgtttatacagctgtgattaatctctatagataaatttccagaaataggtcaaaagttatatattccaaggcttttactaatatagacttcccagtgtccctccagaaaacccacaagtatttattattaatttttctttttttttttctttttttgagacagtctcactctgtcaccaggctggagtgcaatggcacaatctcagcttactgcaacttctgcctcccgggtttaagggattccctgcctcagcctcccgagtagctgggattacaggcactcgccaccatgcctggctaatttttatatatttttttttagtagagatggggattcaccatgttggccaggctggtttcgaactcctgacttcaaatgatccacccacc

SEQ ID NO: 107940 - DNA, 2102 bp, Homo sapiens
tgttcttaccgggacccctgtcacaaatatggataacaaacatttcttattcagatttaaatattgctttctgcctgggagcatgtttagtggtggtgatggcagggggatgggggagaaagggatgtaacctagccaggcagctagcctgtctcccctgcttagaggtttctaaggctgacccctggagagccgcctggggagattggaggcctgggtaggaggttgccaaatccaaccttcccctcctttgcaattaattctgcctttgtcatttattcaaatacagtagttttccagcatcctgacaatggagctctaacggtcaagaccataagtggtcatattcaaactttaatctttcccaaatcagttaagcgcttcagaccagaccagcttagtagcctccctctgccttagctctggttcattctgttgtctcctgatcaaatgttccctgctcccctccagacaaggagagaagaaaatgcacctgcatcttgtgctcctgatacacaaagcttcagcccctgttctctgaataaaccttgctttttcacacctccataattttgtacatatggtttccttggcgtggaacaccaagctctgttagttgttccctgctctgtgtgaatgtaactgagatgaaggaaaggaagagagaaatagagcatgctcatttgtagcctaaagagcctgagcagggagggtggaagacttacccaggtatacaccacctggtacctcgcactttgcaagcactcagtgagcagcacccaagtatgaggcaaaaacagtccccgaggatttctgtgcctagttggagttcagaagggaaagctatgaagagagcccagatcagggaattttatcctctgctgtccctgcaggaacaactaagtctttctttggaatggaaacctattattgagaccttaaggtgccttctctatgagatagtattagctggctgtccagtccgtcagaaatcaacccagggcacaccctgttggaaacattactagtcgtttgacaagtcagacaccttccctctgggcctagtttccacatgtgaaaaacgagggcattggactgaatacgtgatgatctctatcattccttacagccactcgttctgaaattctgtgaacctgtaaatgtgatgttgcttcagaaatgaatgtcaatgatctgagtagtgatgtaaaaggagggtacgctagatgtttaaacgtgccaaagtatgagtgtttggaaattcatttcaagtacagtagttctactacctttttccctctagataaattttgaaagtcccatcagaatacagaattgagagaggacacacacaacacgttttctgtaacagacgtttactatggtcaccactagatggcacccttgtattagtaaggagatttttctcagaaattatagggcttcgggatgacttctaataaaaatagatagtaattaatcaatagctgaaactgaggaatgagcaagttaagcagagaaaatagaaatggatgtttttctatcactgtctgatgacttgatccttaagattcgaggtaaggaaaagctggagctgtctacattgccctgatggagattattttataaatatttcttaattgtaaagcataagatacctttaaatccaacatgagtttgatttgcttgatgaaaatgggtgccatatttcagcagttctttggtgcgatggtttgtgatagtctgaagtcaaccttacacctattcttagcttcaaaagcaaggttagtcctgcaaagttgggaacaccaagtagttaccaagttgagtaaatcctgttgaaccaaaaagtgaaaacttgagtcatcttttagccaaagaataatttgatttatgcttctgtggcaggagttgaacaatgtgttaaaagggagcaagaaagcttcggaaaatttgtatgaccgtgatatgtcatttttatagttcagtttccttttcttgggagaggattttttttctcttcattcactgtaaacatctttccattaatttttaaaaatatgctatttttttagagcagttttaggttcacagcaaaattg

SEQ ID NO: 107941 - DNA, 1153 bp, Homo sapiens
gtaacaaaataccataaattgggtagcttataaataacaaaaatttatttttcacagttctgggggctgggaattccaagatcaaggtggtgctgacagattccctgtctggtgagggcctgttgctcatagacagtagcttcttactgtgtccttgtatggtggaaggggcaagtgagctcccttgggccttttataagggcactaaccccattcatgagatcccttgtgacctaatcgcctcctgaataccccaccacttattacttttgcagtgggcattaggtttcaacataggaattttggagggacgtagacattcagggtacagcaccaagcatgtgtactatgatttttagttaatgttagttttattttaataccccaaatccctttatctgtcttaaaatatacccttatatgtctttataaaatttctctacacctggaaataaagtttctgacaagtatattttttcattcacaccaagaaaattatcgaacgcctagcacgtgtgcataccaggtgctgttgggcagtgggagtagagaggtgaatgggctcagacctaggtccaggaaacccacagtcagatgggcatcccctgagttcctctggtatagtccatcctgaggactggtgtgcacatcacatgctgctcagagggttggcaggtttgcttccccctcagactctgagctcctcgagggcagattctgtttcattaagctctgcatccccagagcccagcggcaggatccttcttatatcctcaaggaccttgttctgtctgtacatctcttgctcctgcctcatcaccctgtgctatctgccttttccttctcagtgcacaaaatgctcagagcactctgtcttaaaaatcttttaacctggccattgaccctgtatttcccttatactactatataactgttctccgtcccttttcccagatttatggtaggctctttctacttcctcatgcccatcgatacctgaaccctgcagttgggtgtctgttccccttgttctacaaaaaatcaccctctggtctaaagtcagcaacaatgtctactggattctaaggacactgttggaagttcctggacttagctacatggggcaccgctgatgactccctcctggagatcc

SEQ ID NO: 107942 - DNA, 1801 bp, Homo sapiens
tggtcattaaatcaatcttataaatggcttcaaattacttttttgccaccaccacccccagagttaaatcactgctatattaaggatgagttggaaggggatttagaaggacttaatttgccagttggatggccattgagatggagtggagatggcagtctcactcaacgcactggaaataaaaatggggaagacagaccccagaatcgccagcaggacttagaaatggttgtacttgaggatgaggggaaggaaggactgttgaaccccaaagactgggaggctggttatcaagagggataacgggcggaatggaaggaaagcgtgtgcttcccactgaggctgtgtttgagccgctgctgtggctcccagatggagctgtccagaggcagcttgggatgtaggcccagatccccaggagacagggttggattggaccagagagcacctctgcagtgagatcattgaatgaggcaagatggggactgagggtggaacttagtagaatgaatgtctgcattgaagggcctgccaggcaagaagagccaacaaaggcccttctcaccccgtgttccggagtccgtggtggttctgttctatagcatatgggacatggagatgctgtacacttattgctcttacaagtttgtgcattatgaaagagcccttgatatctgataagctactgagtgggaagagtaaatcctcctcagaaaatccttcaaagatacacaaactaaaaatgaacaaacaaacaaaactgaacaagaatttacattttgttaaacagcttgtagccaagtttaaaaatggaatgttcatttttcatatttaatactgctggcagacgctgctctattcttactgaaacattagtttatatgaaataaaactttaatatcttgattcttactaattctcctcttttttccccttttttcctctagattttacattgtgctataggtaagtatggatattcccccctactatgtacagtgaattctgcttatttaaaaagtcatagatgataggctttattgatttctgttaaatattgaaaaaatgaaatgatttagtcatcatgtatgaaattgctgaaattagagtggctttcagtttctgaaatcataggtactatttagatgtcatgactgaacactttattaaagttcacagctattttgttctgttaatttaaaagaggtgtctcccaccttctcagtgtaagggtaatagaaacattagcatttttgtaaaaatgtggctggagttctggtgctgggctgtgttgaaaagccctctctgtgatcacttaaatggtatcattctctctccttatctttcaaatgggagtattgcctacctcccaggtgaatattacatgtttgtgagagggattaaagaagtactacgtataaagggttatacaaatgtaggggatttctactaaaagcagatacaatatgttttattttcctttttgtggggaggggcgagtcatcaaatattgctgtggaatagaggcataacgtctagtttggggtggctagaaccttctaattgaataaaatccagtcttggaaagttgatagaccctatagagcaagaccgtagtgattgctgtgcactccaggtatgtctcccaaagggaggatttgaagttgatacttagaagcactgaaagtcaaaaaatttgagaactgcaaatctataccgttatggccccatcaatttaatccataactaaagtgggtagttgctatattcagggaaacttacagttcagatgggcgcacag

SEQ ID NO: 107943 - DNA, 1054 bp, Homo sapiens
tttgaaatagtaatgtactccttcaatttctctactttgactgttacttactttagcatgttattccaactttgtataaggttacttctttatttctattattaatactcttttttccaagtattaggctgtacctctacatctgcccttttattttcctgtgcttgtccacagtggtttctgttactctaatttttaaatccaaacttattttcataatttactatgtacatctgactacatcattatgtccccatttacaagttgaaatacgtattttgaaaaataaattactttatttcttctttgtgtatcaattgggacattgtatttatttgcttttgaaaattttgtgtaggtaggtcattttatctatgaatttcttttcagaatggtagaggaggcattataaaatatgtgtgattaaaaaggggagagtgcatctgaggactgagacctactgctctgtcatgcaaagaagacatgctagccattcattgctgtgtgtcctctcctgcagtgtcctgttgctaatcagcagcctggatgtctttttttttttttttttttttttttttttttttttttttttgagatggagtgttgctctctcgcccacgctggagtgcagtggcgcaatctcggctcactgcaacctctgtctgctgggttcaagcgattctcctgcctcagccttctgagtagccgagactacaggcatgcgccactatgcccagctaattttttgtatttttagtagagatggggtttcaccatgttggccaagctggtctcaaactcctgacctcaggtcatccgcctgcctcggcctcccaaagtgctgggattatacgcgtgagccaccatgcctggccagtctgggtgtcttgctgcatacatggatagaataggttttctgggccgggtgcagtggctcatgcctgtaatcccagcactttaggaggccaaggctggcggatcacttgagcccaggagttcaagactagcctgggcaacatggcaaaagcctgtccatacaaaaaatacaaaaatt

SEQ ID NO: 107944 - DNA, 2778 bp, Homo sapiens
aaggccaaggtgggaggatcgcttcaggccaggagttcaagaccagcttgggcaatatagcaagacctcgcctctgcaaaaaattttaaaaatttaaaaaattagccggatacagtggcgcatattagtcctagctactcgggaggctaaggcaggagaatcgcttgagcccaggagtttcaggctgaagtaagttatggtcactccactgcactccaagtctaggagacagagcaagaccctgttttccaaaaaaaaaaaaaatgaaaattctttactctttatttaagtttaaataggcacatatggctagtggctgcacagtataagcctttagaccacggtacagaatgcagtgtgatcatgtggaatcccataagatatttcagattttaccaggatagaatgaagtgggaaggaggataaacataacgatgtaaattttgtatcactccagagttcataaatttttaaattgataatagaatagttatatgctgatgttttcagattaggaaaatcaatagggaataaaagcacaattgcagatactgaaaaaggtatggaagagtatatatcaaactgttaattagagcttacctctggaggggcgtggtattttggggcaaggggggagtaaaagattaccacttttaatatactttagtatatatttatatatcacatgaaacatgtaattttttaaaataaaattctatattatatgtaattgaaaacaagatgaatgaggaaaataagattttaaagttttttgaaaaaggaagacaataggcagcttattttatttttcgatttaaagagaaatagagttttacatctacaaatcctgttaatttttttaatggcaggagaataataaacctatagcataatagagtatagtaaaaatacatcattttttatgtttatacaaatggactgattaaatttatcaagatgaaaagatgaaatgatggttactggttaaaaactaaagtctaacaatctgttgtttatgagactgactttaagtttactaagggacaaaccagcttgccatgaccaagtgtcaagaaaagcaggactacccagttacagcataagataaagttgatttcggagcagaagctgaagagaaccttagttcacagtttgtcagtagcaagaacatgggagacacatgttggtgaaatcatatgatgaatgaatgattatctgaacagagaaacaaaatatgtaaaaagctggcagaaatgctatagaagttaaaaaatagaattgttcttaagaggtgtcacagtttgggtatgaagacttggttttgccattaattagccctgtgaccttgatcttaacctctctcgccctcgattcattatgtgcagtgaatacactggattaggtgaccttacatttttccccacttttaagttctgtgagacttcaacatttcactatcaaaatatgaaaattaagcaaataatgaattagtaaattataggggtggaaatagcaagaaaggtgaaattaagtgataaaggaaaaataatgataattgaggaatctttttacctatttcgtccttaaaaattggatgtaaaaggattttgaaaacatgtttggagtctgagggagcccagtgaataaccaacacccttttgcttgtttatgttctgaacattgagcagtaactcaaaggagttacataaggatcctaaaaatcacctttattagtgataaaggctgaggacatgctttagtgtgcgagtcaaatgggtttgctaactgaactccacagttagactcaccactcaccctgtcctgagcagcagcagatgggctgtcttagaagaaaccatgaaaacttgaggttctctatgaaacctctctagtggagctgaattgaacacaccccatttattcttcccaaatttacgctcaaatgagtcatcctttccagaggtaaagtaattaaaggagactagtactatgtggtggaaatccatccttatagaaaccagaagagagtggaaaggtgttttcccccagtaataagtactatatattcattgtagaaaaaattcagatgcagaagaaaatgcatagcagtcataatctaaagataaccactgttaacattttggtgtctatccttgaagactatatattattattattaagttttaagcaagaatgaaatcatatatgtgtagaatatgataattcctaaaacaaatcaaatattggtagatgtaactcaaattggttatggacctctgcaccgtaaaacaagtgtcgtggacatgtctgtggagctgcccagctcagcgtatcctctctggaatttgtctggttctcaaggctggacccttagcagctacatctctattccctgactctgcatcttaggccatagctggctgatccaggggtgcgtaactgagccagagtgggctagtcaggttttttttttcctcccaagaatttggaattttgaattgaaagacagagatggggaatcactgtagatgaatcacattaagtccatgggctgcagctgaggtcttgaaagctgcttgggtttctgttccctttgagacttcttaaactttttggggctttgttgttattgttttaccttggattaaaaatgaaattgaacagaattgttggtaacctacaaaaataattcccctagttcaaattttagaaactttgaaaagatgtttccaagtaatttattgtgcaaatggcaattttacattgaggttaaatttt

SEQ ID NO: 107945 - DNA, 1275 bp, Homo sapiens
gaataggaaattgattttgggtatttctataaaatacagcaaagtcttagaaacttgcagtgtccttaagaagaaagatcccttcttatctccctgccagtttttctttctttatggctcaaacactaactgatttttgccatggaggtattgtgcttcagactgcttttgtgaactggtttgaggacataaccgttgtctgttatatttttccttcttgtggaaacattctgatttcccagtaatagtctcaaaaaggaacttctgaaatgcaagctacatgcatgtgttaggctccttttattctggacccattttgaggaaacacatctctaaaagaggcttttgaaaagctagcaagagcaagttatagtgtagatatctaacacaaataggaatgacaacaaatcccagaaaaaccagcttctcaaacagtgtgaaaaccagaggaaaactctaacttgattaaaattaataagtgtcacaacattagaagggaagagagagctggaaggaaacaggaacccacccacacaggcctcactgcttggtgactcaagcaaatagaagcaaattgatgtggtattcaaagaggtacaatagctaacatctgtagaagggaatgtactgaaattaaaaaaaaaaaagaactaaaaatatcaatggtggcaatatagggcacgaaggagccacagtgcaagaaataggtgatactgaagattcaaaaaaggcgggagtttccactcacgttctcatataaaatgaattgcagaacagaagtcatagggaaattttcaaagttcaccatgtaaaagaaacattacaaaacattataacagaaaaacaatatatatagaaccaatgtatctagaaaacctgatgaggttgtataagctttcaaaaagtaagactaccagaggaagtagaaaaggttggaatatacagcttataaataatcagggagaaaagttatagaaaactttgctgaactgaaaggccacctcactatggttagtgagagtttatggtgttccacaacaaaaaaatttcttcccttcctgagtacttaaacaatttccagcataaaagagcagattttaaaatgtaatagttaaaaacaacttgggaccttaaacttgaaagaagaaaaaatccccgtgtagtaggaaatattaggttcctggataacagaccatgcagtttcctaaagctggaaacattttgaaaacacttagaaaagctaatggaactttgaaagcaccttaccaaagatta

SEQ ID NO: 107946 - DNA, 3014 bp, Homo sapiens
cacgttctagatcagaaagttatccattttgcttttgtttttttctcttagaaggcagaggaatttctttttttctttctttcttttttcttttttttttttgacacagggccttactctgttgcccaggcaggagtgcagtggtgggatctcggctcactgcaacacagaggaatttcaatagtgtccaaacttaggcattttaagtaggtggtatgatgaaatgagcttccagctggaagcctgagtacctttttattttaagtataatagttttcccaactgactctatagatttgggcaagtcttttctctcgtatccacctccttttcatttgtaaataattaggttaaagtagatttctaaagtcccttactaccctaaatttgagtgtgaggaaattttaacaaatcctaatgtgaaccattttttaaacttagaggcttgaactttttttggaagcggacactagtaaataagtagtactttctctttcagaaccttggccagtacagttcccacaagctacagagaagcaaatttggagtcaagaccatcagacttccagtacttgatatagtagggggttgtccccatttggaatacttcaataatttaaaggggtttctatctctttaagacatcataatattagagctgagcacagtggctcatgcttatagtcccagcaatcccagagctttgggaggccaaggcaggaggatcacttgagggcaagagttcgagaccagcttgagcaacatagcaagacctcatctctacaaaaaaaaaatttttttttttttagctgggctgggtggtgggtacctgtagtcccagctacttgggaggctgaaatgggaggcttgagcttgaacccaggagtttgaggctgcagcgaactatgattgcatcactgcaatccagcctggatgacagagtgagaccttgtctcaaaaaaaaaaaaacttggtaatgttagaagtataatttttaaaatttaagtatatcttatggaaggtagggacattaaacagtgtcatactttaaaatccactcaggaaccaagtcttagactttgaaggattagcctgtttatccttatagaatttttaatagggatttaggaaaatatcttggatttttggttttatctctgttatccccactaagaaccaattaagtgacaaatcctggatttgattttgggaaaatgtctgtgcataaggaagtgaagactcccaggaacatgcaggcaattaacgttgcaaaggtcagtgatggaagtaatcccttggactgggcgatagagcaggcttgctaaaaccacaatttctgtggttgaggagtttttcattgcctaccccatctacactgtgtaataattagatgtgtgtggtattgtttaattacacataagttatcctgatgggaattattagtgttgacatatatcctgtttacaggaggagaaaatgaatccagggaaggcagctactcatttatatctctttatgctaaatgttattctttattaggttctgtgggagtttacttaaaaaggaaatcgaaattacttgttctccaatttcacatcttcttaagaaaataataacactttgctttttaaaagacataaaaacatttaccaagcaagtacaaaggagcatgtagtagcaaggtacaaaaggaagcctggctgagtaccatggctcacacctgtaatcccagcactttaggaggctgacatggggggattgcttgaggccagaaattcaagaccatcctgggaaacatagcgagaccccatctctacaaaaaattaaaaaattggccaggcatggtagcacatgcctgtagtcccagctaatcaggagactgaggtgggaggatcacttgtgcccaggagttcaaggctacagtgagccatgatcgtgccactgcactccagcctgggtgacagagcaagaccccatttccaaaaaaaaaagtatctataaataaaatgctactcatggataaaatgtggtctatggatataaacattcataaaattaataaaggcaaatgaattactgatatatgcctggataaatcttgaaaaaatgcatgtgaaaggaggcagatacaaaaagtcacaaatagtatgatttcatttataagaaatatccagaataggcaaatccatagtgacagaaagtagaggaattgttaggggctgtggggagagagagtggggtgtgactgctaatggtacaggatttccttttaaggtgatgatattgttcttgaaatagtggtggtgggtgcacaactctgtgaacatattaaaaaccactagattgtacagtttaaaattgtgaattttgtggcatgtgaattatatgtcagtttttaaaaaacgagttcctctgtaatgagttgtgggtgttttctactttattcatttttggagtccatgatattcattgatgaggcagatgttatctttgcatatttgtcaagtatagttagattaaaaattagtggactaatgcagttatggcagtttaaaattatgtttgagagaatttgggtttctaaatatctttggttaacataagactgtaattatagcaaagacactttcttttttttttttttttttgagacagagtctcactccatcgcccaggctggagtgcagtggcgcgatctcggctcactgcaagctccgcctcccgggttcacgccattctcctgcctcagcttcccgagtagctgggactacaggcgcccgccaccacacccggctaattttttgtatttttagtagagacggggtttcaccatgttagccaggatggtctcgatctcctgacctcatgatccgccagcctcggcctcccaaattgctgggattacaagtgtgagccactgcgcccggccaaagacactttcaaatactcatgattggatatgcctctgtgattgacagtgagatttcaaatgggttaaagattgctctgcaaag

SEQ ID NO: 107947 - DNA, 1086 bp, Homo sapiens
gaagttggtgggtgtaggatattggaagtgatagatagaagacataatagagagcctgtctagaggcgtccaaattttaaaaatttaacaaaaatgtattgatttccctgcattaagggcaatgtatatccagccctctctcttggggtaagtatagattaggattttggaattgcaagggacaaaaacccaattcaaactattttaagcaaaaaaggaattttctggcctctgtagttgatacagatacaggattaatttacaaagaaactagctcaggaatgagaaccaaggagctgacactgccagattctcttgctttctctcatttctgcttgtctgtttctctttgaatgttggtcttgggctctccacatggtgggaaacagggagggtgtttatttttcgcagcatctgtgtcacacagttcccagagaggattctggttggccctacttagactatgccagtgatgtgaggtgcttgattagccaatcttaggacacatgcccattcttctgtccaagggactatagactttgcttatggaaaagagggatggggatagctttgggcacacaaaatcaatagccgccatagttcgtatatttcattatggtgaaaaaccttcagattgcagggaagatctggttcattttgcttagcctccaggcaagaccatcataacatttatactttactggcaacttttaaaacctgaactatggaatgatacttaagaaaaaatcatttatctcgctgggcacggtggctcacgcctgtaatcccagcactctgggaggccgaggcgggtggatcacgaggtcaggagattgagaccgtcctggctaacacagtgaaaccccgtctctactaaaaatacaaaaattagccgggtgtggtggcacgggcgtgtggtcccagctactgggaggcaaggttgcagtgagctgagatcacgccactgtactccagcctgggcaacagaacgagactctgtctcaaaaaaaaaaaaaaaaaaaattctttatctcatgaaatgaagtgtgatacctctacctttcattctcaatttttttttttttc

SEQ ID NO: 107948 - DNA, 1062 bp, Homo sapiens
acagtgaaaatctttcctcccacctttcccttctacccagctcccctccctcgaggcagttaattttgtgtatccttaagatgctgatgcaagcaaatatgtttatacatccccctatccctttttaaaataagacaaatgccaatatattaatatttttacagttcagcaccttgcttttttttcacgaagaagaaaatatatcgtgggaggatcatatatgtattgctagtattagaaatggtaggtgttggaacctaggctcagagaagttgtgacttgcatgagatcatagaacttgttagtagaagttccagatctagaaatcatttctcttgactcacaggtcaatgaagaactagtacagatacaagctttatatcacatcagtggtcacatagattgatttttaaaaaaacatccaggaatctcactgtgtgtattaatatttatatataaaattcttgttgtcttagcaagagccggtgagggcattggactggagagggattttgaggtacattggtaagaagaaagaagtctattcctgagcaatgaacatagagaatggggtggagggtaaggagtggtatcttaaaccaggaagataaattgggattgtgagagcaaagtaagctttttttttaaggctgttaatggttgtaccagttacaccattaaataatttcttcttttacaaactcttacttgatgtccttatgtgatagtttttggaaatagcatagaccacacacaccccattgcctagttgatactatacatttatctaaatccttccaggagacataccttaataaaaaggtccatttgttttattatggaacttaacaaaacattgtgtttatttttgagaaggacagtggaacaaaaatataacattcacagctgtatgcttaagtgctttcctgtttcgtggtttgtattgatctggctttcatttctgcattgattttaggaaatttggctaaaaaactttttttttttagcaagagccctttattcgtaattttaaaaggatagattttaaggtatgggtaattg

SEQ ID NO: 107949 - DNA, 1047 bp, Homo sapiens
gatagggcaattgaagaagggagaacgaaagcataattgttttgattcaacatggaagcagtgattataggagggcgaatagcgagggacgacgcaacatccagctggcagaagcagcgggcctggagagggtggctacattgaactaatccaagatggcgccgaggttgtaaccgggagcgcccaagaggcgggaattaccctgatccaagatggcagtggcaactgaggcaagccgaaagacgggagcgccaggagcgtctttgccctcagccaagatggcggctgccgtggaccctgtcccggctccgccccgcggccctggccccgcctgcccctcgtcccttcctccgccccctctcctcgcgtagtccggcccgagccgctcgcgctaggagagcgggcttcgggcacttgacatggcggcagtggcggcgactgcagcagcgaaggggaatgggggcggcggtggcagggccggggccggggacgccagcggcacgcggaagaagaagggcccggggcccctggccacggcgtacctggtcatctacaatgtggtgatgacagccgggtgaggctggggctcggggaggcggggagccagcgcggccggggagggagccctgcggccagcggcggggcggataggatcggcgcggcccgccgcaggcagtgcattcccggcggggggtgcccgggacccggtacctgggcgctgagggcggccgagcgctgaatcggccccggtggctgcccgcgagctccctcctgcgctgggggtcgagccaagttcccaggcactggggcgcggggacggctgccgggcgctggctcgcgagggccgcgggaggaaaggtggggctggccacaggtgcggggccgggggcagcggccggactacctgcggcgcggagcccgtcctgggcggccagattcggatgttgaacggcgccagcatggggagtggaggagctgtggctgcagagtgaccattcatttgggcggctgttttcaaaatctgggctgcgctttaatctgaaaggt

SEQ ID NO: 107950 - DNA, 1061 bp, Homo sapiens
tggttcagtcactgcacttgtctggaccttaggtttcctttctgtaattggaccagtgcttctctgacttagccatccctgaggacagtagagaaagagcatgtattctagggttaggggcttggggtgtagcctgtagcagcttgcagaaagcctggcatttctttgaactcctatttatttgtaaaatctacttacagttggtatcctatacaatgatctgaattttttggttgtaatataaaaatgcttcacccaaatctttgagtaaagttgatgttctagggtgaggtagcctcaaatatcccaaagggcatacagccacacccctctgggctggaggtgggattgaaagtagtttcaaaggtcccttccagctgtgaaattccaggcacctagagtaagtgagtctcatcctcaaaggacctaaggttggtaccaaagaattctaaaggaacctgagaagcgggatccctgtgccctgcccctggtgagaatggacagggctgtgtggaagtggaactagcagaaacagggagagagacagccctctgcagtgaagggtgaaggaggctggaggaagagccgggctgtgtctgggcctgactgtcggccttgagctgatgaccctggcaggtttggcttggcagctctccatctccccaggtaatttccaggaagcactaagccattgtttctcatccacagctggaggctgtctggggaggagccctcatatctcaggagggcagtgagggcagggggtgaactgcatgtggaaacatagagcttgtcacactgccaaggcctcctggccattctgatgcagcacctaaggctggggtctgggcttgtgcccagccagtgggaggagagttgagggagtctggagaagggcagcaaggttttggagagaacacagagatttctggcctttgaatgggaacaatctctaactacattctgggaacctctctgtgcatggggaaagactatctgctgatggtggtgtcagccttgcacaaatttgccagtatgcatggtctcttcctcaggcatga

SEQ ID NO: 107951 - DNA, 1012 bp, Homo sapiens
taattcatcaagtctatactcccatctaagataggagacctttcatagcatccttcacagatagttgtccaggaccttttgaacacttgtggttttaagaatctaccacctgaaatatgaagctgctgcctttgtccagaggtccggtagtaagaagctcctcttttattcaatagaaatctgcctatatgtaacaagctctttctggaacagcatatcatgaatataatttcattatatgtttgaagtctccaccatgtatctgtttcttcgtactccatcttctaacattacctgagacctgtctcataagaggacttctggatccccaagaaacttttgcctttttaaaacaaggaattccagttttttgcattcagactaaagcagttgcccagaaccatgaatgaaaacggaattttgtctgatttttaaatatctaaataaaatgattatgtagtttttttctttgtcactaagttgatactgtaaattacactgattttcagttgttgaaccagccttacattttcaggataaaccacacagaataataatatatttttttcaaaatatattgctgaatttgatttgccattattttgttgaggatttttgtgtttatatttatgaagaatattgttccatggttttttttataatgtctttatcttattttcatatcaagtaatgttgctctcataaaatttctttaattgaggttctctatttcttcttgtgggaattttggtagtttgtgtctttcagtgaatttttgtattttatctaagttgtcaagtttttatattatgacatagatttgtttatatatatatagagagagagacttgttctatatatatggattcatatatatatatatatatatataatgtctgtaggatttgtagtgatgttctctattttattcctgagatttatttttgtaccatctttctttttttcctgatcagcctgcctacaggcttaccaattttattgatctttccaa

SEQ ID NO: 107952 - DNA, 1034 bp, Homo sapiens
aatggccttgcggcattagatgccaacatagctagactccagaagtctttaaggactggtcttctggagaaatgaattcagaagaaaactcatcaggtgcttctttttaaaactagaacttggctatattgaatgtgtatttttctttagtgaaatgatgttttatgttattatgtgtgaagtaatatattgtacaagtaataaatgtattgttgagatatattgacactgaggagcttataaaaacaagtcatcttaagttcacaattgctacaagaagaaagttgtggataactaggaaattattgtaagtaatgttttatttcagtacttagcaattagagttcttttattaagatgtatctgctggattaagggtacaggttgaaatagttctgtggctgtcctaagaaataatgggaaaagaatctctggatgtaagtttttctgttgaaactagagggttttttttttctgtttacatatacttttttttaatagcaatgtgtttttattaaacatgctgtgtgccacaggccagtgttgttggtgaaatatataaacatttatttaaagagaaaagttaccagtatctacacctcttaaaaaacattgattggtctaaaaaatatatagataacatcctaagttaacatatggcttcttaaaacttgggcacttttatttgtttttatcccaaattcatgttttaaggcctttaaagaatagtcagactgataaagaagtgctaacagataagctatagttggggaaatttgtgggttttttttaaataagaaatgtttatttttgtccttatatttaaacatgatggaatttgtaaatcttggcattgattgtaattctgcctttttggaagaattttttctcccagcatgttagctgagaatattctctattttataaataatatgaagtaggttggtctctctgcttctctataccaggacttcttagctcagtatcatctcccttcatgtaagcagcacgttttaactcttaggaagctgaat

SEQ ID NO: 107953 - DNA, 1017 bp, Homo sapiens
ccagcctggccaacatggtgaaaccctgtctctactaaaaatagaaaaattagccaggcgtggtgatgcgcacctgtaatcccagctactcgggaggctgaggcaagaggatcacttgaacctgggaggcagaagtttcagtgagctgagatcattccactgtactcgagcctgggtgacagaatgagactctatctcaattaaaaaaaaaaaaaaaagagtaaaacatctccataccttaaaaaaaaattctgagcctctatttttagacatagtgatagattcgatacagaccaatgtattttatcattgttattttaattattatatgctcttgccaaagcacgttctgtgattttgtgcttctagttgcttgttttcatattaagaaccagacacttctctcaaatcctttttttaaagatggaggtatagataagtgaattaaagaaacaggtaaaaaataataattagtgttctggattcttcttaacagaactttacagactagcatggcaaagcttctctccgatcttagtgtggacagtgctcgctgcaagcctgggaataaccttaccaaatcactcttgaacattcatgataaacaacttcaacatgacccagctcctgctcacacttccataatgagctatctaaataagttagaaacaaattacagttttacacattcagagccactttctacaattaaaaatgaggaaaccatagagccagacaaaacctatgaaaatgttctgtcctccagaggccctcaaaatagtaacactaggggcatggaggaagcatctgcacctggaattatttctgccctttcaaaacaggattctgatgaagggagtgaaactatggctttaatagaagatgagcataatttggataatacaatttacattccttttgctagaagcactcctgaaaagaaatcaccactttctaagagactatcccctcagccacaaataagagcagctacaacacagctagtcagcaacagcg

SEQ ID NO: 107954 - DNA, 2096 bp, Homo sapiens
atgagcactttataaaagtgttcagtttcaccagagtgattcagaaattatcactgtgtctccactgttaaccaaaggtgaggaaagggagagggtaggagagaggaggcctagaggacaagtggggagatcagtagttgccactttaaatagcttctcttatttatattatctgatcatttatcttattgtttctttgagatcattactgtgtataattacttgtttgttatcagctctgtgagaacaggggccacgtctgtgttgttcatctctgtatattcagattctaatacaatacctcacacataggaagcattcgctgagcatgtatttgctcaacaaatggtgccatatacttttatcgccatgaaaaagaacgtgatagatctatgtgtttgtatacaacagtcttatgggaaaaaaaggcaaagttagaaattgtgtatagtatgtgtgtgtatgtagtgtaattaataccatatgtaaaagtgttttcacgaaagataccaaaattaatactgattgtctctggggacagagaggaggagtggaagggagattcttcattgagaatcattgacattctgtggtgtttgaattttttaactttgtacatgtattattcttttaaaaggattatgtattctttcttttaaaagggtttaaaaaattaatgcttaaaatgtcaactggaaaagaaaggtatgacttctgccaatcatttttaaaaatatatgtagtatttatgtagaactgctcatgcaattaatcgttaaacaaaatcaataaatttcaggccttttttttttttttttaagaaacaggtattttccaagtttgtactttttaggtttgggaaacaactatttgatccattttgtcttaacagtgttttctcttcagtcattgaatatgtcactgcaaaatcaattggaggagtcactaaagagccaggaattactgcagagtaaaaatgaagagctgttaaaagtgattgaaaatcagaaagatgaaaacaaaaaatttagtagtatatttaaagacaaagatcaaactatacttgaaaataaacagcaatatgatattgagataacaagaataaaaattggtacgtatttagacagtagttatggtcacatcttttaaaaggaataaggaaactgaaacttttgttgttttagaattggaggaagccctagtcaatgtgaaaagctcccagtttaagttagaaactgctgaaaaggaaaaccagatattggggataacattacgtcagcgtgatgctgaggtgactcgactaagagaattaaccaggtaaaattgacttcctttgaataactcatgccttttttatttttagatgtttttataaacttcaaaataatgttagacctgttttctcccccatatctttttctcttattttgccaatgtttttgctaatttctaatgatgttttcttctgttccaattaaattagtttaggaatttcaaacctggcgaaatgtttttttaaaaccatgtgattctgggcagggggtcctgatgagaagctgaagacttgtatagcaacaccattgagccctctggttctgaagctagagagatctgactggaatcccagctctgccacatattagctgagtaactttgagcaagccatttaacttctctaaacctcagctgtaaagtagggacatgaatagagttgtcatgggaaactaagaaatcattcatgaaaagcacttagcatggtaagccctcatgccatatgatcttgggtaagtcagcctctttcagcattatttcatcagttaaatgagtgagttggcagtaccccttgagatcacttcattccctaacagtatttttctaaaataaaattacctcactcaatttttctatgatattcacttacaaaattcagttttcttttgagatatttgctaagaattggattctcaactgctttttaaagttctaggcgagaagtcagttatctgaggcctaaagatctgcagatctgactttgtcttcgaatgatcctagaagttccaaatataaaataatcttgaatataaaataatcttcct

SEQ ID NO: 107955 - DNA, 1464 bp, Homo sapiens
ctacgcccagctaatttttgtatttttagtagagatggggtttcgccatgttggccaggctagtctcaaactcctgacctcaggtgatccgcccacctcgacctcccaaagtgctgggattacaggcgtgagccaccgcgcctggcccatgaggggaggttttatgttgtttcaggcaaccttaaaaattatctcaggcctcataataatagtagtatggttttgtttttgttttgtttatttagtttttgtcttttggggatgagatggacttctgctgtcttagtgggtttatgttttatcttttttgataggctatcacatgtatactattaaattggcttggtatgcttgcattcatagttcttcattatttctttaggcagttgagaattttgaaccagcaactcagagaacaacagaaaactcaaaaaccatctggtgctgtggattgcaaccttgaatgtaggtaaaagaactttaaggattgataaattatttgtggctccggaaatgttgataaagaattgagcttttgtaattactttgaggggataaatttaaaatattgtagaaacataagaaaataaaagatgctgtcacttcccaataatatacacctttttttgtttgtttgttttgaaatacaggagtgtgtttccttttacatatcttctcttcatatataattgatttatttaacacttactgaatacctactgtgtgccaggcacaaatagaactatatatgtacttttttaaaaatgagatcacactgtacatacttttccacagcttctgtttattcacttaacatataatggacacttttgtctatcaaaatacataattatgcatctttctctttaagaattacttgggtattctgcttatccaggtctaccataatatggtcctttgctaatagtactttccccttttttcccagtgcaaacaacattgcagtgaaaatctttgtatatgtctttgtgcatatatgtcagctttgtttgtttgtttgtttgtttgtttgtttgttttgagacggcgtcactctgtggcccaggctggagtgcagtggtgcgatcgtgtctcactgcaacctctgcctccaaggttcaagtgattctcttccctcagcctctcaagtgtctgggattataggcgcctgccaccacgcctgtctaatttttgtatttttattagagacagggtttcatcatgttggccaggctggtcttgaactcctgacctcaagtgatccactcacctcggcctcccaaggtgtgggattacagacaatgagccaccacgcctggccagcatttttgtaggatagatttatagcagtagaattgttgagccaaagggtatatacagttgcaattgtgacagatattgccaaattgtccttaatgatcacagagcttaataaagaaactataatagtaccagaagaaaata

SEQ ID NO: 107956 - DNA, 1952 bp, Homo sapiens
taagaaaataagtttaaacatacaaaaagtttttgcacaaacatatttacagaaatgtttcagcagtgaaaaactggctgttacttaaatgtctaactgtatgggagtagttacacagactatagtatatcctcaaaatatagtggtaactacttattaaatattcacaaaatgaatatattaataaacatgttttaataaatatatttcatatatttgagtttgttgtaattaatacctacaaatgagtgctcatacttctgaagacttgtttttatctttctttaggaagttcaaactgatggcaacagtcagtttgcatcacaaggtaaaacagtttctgcaacctgtactgatgttctacggaattcatttaataccagtcctggagttccatgtagcctgcccaaaactgacatatcagctattccaacattgcagcaactgggccttgttaatggaattctgccacaacaaggaattcataaggaaacagacctactaaaatgtattcaaacatatttgtctctttttcgatctcatggaaaagaaacgcatctggacagtcagacacaccgaagccctactcagtcacaaccagctttcttggccactaatgaagaaaaatgtgccagagagcaaattagagaggccacaagtgaaagaaaggatttaaacatacatgtgcgagatacaaaaacagtgaaggatgtacagaaggcaaaaaatgtgaacaagacagctgaaaaagttagaattataaaatatttgttgggagagctcaaggccctggtagcagaacaaggtagatgggacttataactttctgtagtatggtgttatactaaatagcaatgtcatgttatttagctatcatttaaatggagtttgtggtattttccatagaactgtgttttgagctaataagaaaatgagttctacttattgtattattttttaagttttgatcccttctttcctgtggatttaaaatgcgtttgagaatgtcaaacattcagtcttttgcttgcaagtgtgtatttattctgcttgataatagaccttgaaaagagtcaaccaaagagaatttggacagataaaaattttaattagagaatgcctataaatgattaactccctgagtagactgattattcttcctgttttaaaaagatgcagagaattctttcctgtcacttctttaatagccaactgttagattgtttaacaaatctcactttgagaagtaacgcataccttcttatgcccttttcagtgtatttttaggactttttttcttaaatcaaggtgtttctgagccagattctattcatttgtttccattctgtatatgtattctatagtaatggcttttgcttgaaatgagttacagttttgtcatcttggaaacacagtaattgattttggaagcattgattgaatacctaacgtttgcagaccaaaaaaaaaaaaaatcttaaaatgctatataaatgtagcaccattagaccaaagatttagtatattaaaattgctctgttttcagaccttcaacttattaccattttcacagtcagatacataatcatggtaataataataataccattagctgtcatttattgaacacttaccatgtgtccagcacagtgctaagtgttttatatgcattatctcatttaatcctcccagcagccctatgtggtactgttaccactcccattttactgatgaggaaactgagactccgtctcaaaataaataaataaataaagattggtagaagactgcttgatcattgaacacagttgtttactgtgtacatatacttttcatgaggatgttaaaatatctgtgaaactgaatacatttttgtaacttagaatacactttcaacttctaggttatcagatgattaataaataattttaagtactttcagcccgtagtaa

SEQ ID NO: 107957 - DNA, 1487 bp, Homo sapiens
tttttgaagaatcatatttcaagaacttttttcttcttccacattagcatcttcagataataagaaacagatacctaatgaagcttctgctagaagtgaaagagacacatcagacctagagcaaaactggtcattgcaagatcattatagaatgtattcacccataatataccaagccctctgtgagcacgtgcagactcagatgtcactgatgaatgacttgacttcaaagaacatccctaatggaattcctgctgtaccatgccatgctccctctcattctggtgagtacgaatgctgtttaaaaatcgtgagtgtaagttctaattaaattgcttggttactgtataaaaagtaggatatgtgattaattttttctccctcttacttacagaatctcaggcaactcctcattctagttatggcttatgtacctccaccccagtctggtcacttcagcggccaccctgccctccaaaggttcattctgtgcgtacagttcttatactacataagtaactatttgcttatagcagtcattcaggagggactgttgaatttattgcttataacttaatgcactaggatttaaagaccagttgtttatttttttttgctataaaagttttacatgtttatggccgagcgccgtggctaaacgcctgtaatcccggcactttgggaggccgaggtgggtggatcacgaggtctggagttcaagaccagcctggccaacatggtgaaaccccacctctacgaaaaatacagaaattagctgggcatggtggcacatgcctgtaatcccagctactcgggaggctgaggcaggagaattacttgaaccgggacccaggaggcagaggtagcagtgagtgagatcgcgccactgcactccagcctgggctacagagtgagactctatctcaaaaaaaaaaaaaaagaaaagaaagaaaagttttacctatttattaatgacaataatgaaggagaaagaggggaagagatcagtaggaggaaaaaaatcaaccatactgaccacccaagtacaactgctgttgacacactgatagagttctttccaatcgtttaatcctctgtataggttttagtttctggtttgtatttgttaacatttgctttccttttaaaataaagttataagtcaacaatacagtcttatatactgctgctttcacttaatactttattaaaaacatgtttattaatatataccctttgaatttttaataacttgttaatactgtattttttggatataccatagtctgtgtaactactatatggttaggagtagtaaccatatatttgagtttcttataattaatattattattaataagcaagtttttaatatcagaaacttactaatatttttagcttaaaagtaagttggatttttttcctcagtgcaataaagattcttgttttttaaagcttaatttaccctgtaatatgggagcattaca

SEQ ID NO: 107958 - DNA, 1048 bp, Homo sapiens
tacagacaatttttagcaccctgcgaggctccctccctgtcagtaccctcaccatcacctagaccctcatccctgtgtaaccattttcctgacatctgtttccatttgtgacttttacctgtttgatgacttcctataaatgtgattgaacactgtgcgcccttgtgtttgaccactttcagtcagccttaagtgtattaaacatccaggtagttgtatatatcagtactttgttggttttttaatgctgtatagtattccagcctgcgagtataccacagtttatccatttctgctattcatggctatttggtgttttcagctttgggctactgcaaatcaagctgctgtgaacattcttgcacatgtctttcagtagacataagcactcatttctattggtgtatacctgggagtggaattgttatttcatagaatatatgtacgtttagctttggtaggtgtgacaaatatccatatatttttctaaatttattttgtatactgataacctatgatttaccagaatattttcatttctgttaatagtgttttaaaaaacctttgggaaggggacctaattagggaaatagtattcagattgttataccaatctataggtagtgctatgtagaaaactttgttgttttttacttattactttgttaataccgatttctaccttgttcatagactaatactaggttctgtaagagaaaacaatgaagtacagccctgcttagagaaacttgtggtttagtcagaaaggcaggaggatgaaagataagcaatataaggcagtgtgtcagtggcatatgatttctatagacaatatgtgctctagggtggtgaagagtagtcactagactggaatgattggattggaaaaggcttcatggaagaagaaaactcagatgagccttggtgagtgggtagaattggattggtaggaatggttcatgaacaatgttattggaaggtgagaaaagcttgttgggtaactaaattggcctgcctgaaatgaaaaattggagttgggagtgatggg

SEQ ID NO: 107959 - DNA, 1605 bp, Homo sapiens
gtctaatcaggcattctaaagaatgtacataaaaggaaccagagttaagaactctgtcctatatcatgaattaacttgcatgtttcaaagaatttgggactatagaacatattttgggattaatatagtctgaacttagtgtagtagttacttctggtttaaaatagtatctcaatttccttttcaccttaaatagacttaaggaacaaatatatgtgtagtttgcttgacgttttacataaaagaaatttaatatatgaattaaattataattgtgtatttttaggatatatcacattaattaaaacagtgaataatgtggtacatacatataatggaatatatttgacctcaaaaaggaagaaaaattttgacacatgctacaatatagatgaagcttgaagacattatgctaagtgaaataagccagtcacaaaagaacaaatattgtattatttcagttatataaagtttctagactagtcaaattcatagaaactaggatgatagttgctagggtcagggagaagaggggatggaaaggtattgtttaatggatgcagagtttcagtttgagaagatgaataaaagaaaaaaatgacattaaattttgtcaagatagcatattgaaaatataatagaaaaatatttgtttatctgctataatatattatgtcataggtgttatcttcaggaaggcacactggacctgctaaattaacaaatggaaagaaagcgtaagtacttgaagacgtttacaacttcagatttcaaggaatttttcaggtctttgggctggatgacatgtcgtctaccccagaaaattaggtaggcctctaccatcacaagctctgaggaacaatttttcatgtctacccatgttaatcattttagtatttaacagtctttctgatcttcagaatgtgtttataaattcatcttgtacatggttggacaagctttcttgtctttgctggaaagaaaatgactacttactaatatattttgggaaaaatatttgtaagaatattaataagcttgttttccaggacctatttaagaaaaataccacgttttaatgcagattctggctattccatccattctgattcagaaagtcaggtaagattgaatagatacaatacacactattttaattagttttcaaatagtagctaaaaagtaggaataaaatgcaaagtattaattgctctaaggaagtatgaagtctgttgctttaaaacatcttttctaccaataatagtttgtaaataaacaaattttaaaactacataatttatattttttcctacactaacagtcatatacaaatgtattctaaatgactttatttcttacaggctgaaactgtacacgggcttgatggttgtgcttctttgctgagggacattttgagaaatgaagattcaggttttttttttttaattctttgctgatcaccttatctcaagtcattattttgatgtaacaaatttttgttttattaataggttcagaaacagcatatttagaaaacagatctaattctagacctttagaaagcaaaagatacggatcaaaaaagaaaagacatgaaaaacatac

SEQ ID NO: 107960 - DNA, 1388 bp, Homo sapiens
cgcctttttccggacaggtaagccgggcagggcgcggggggccagggctgaaggctactgcctcggacgcggcgtctcggacaagtttggggaaggagggctgttgctgccgcgtgcgtgttggggggcagtgccccctcggcgtcggggctggagttgccgagattctggttgttatggcagtgctggctgcgtctggggagggcgtgggggctgggaactccgcgcccctccgccttcaccccagttgcgggagtctgtgttggggaggtgggaggcggtcccctcggaccgccttctcccagagcgcggggatgggcggtgttggctcactttgcagcgcgccgctccggctaccggcgtcccggcccctcccttggctccccctcccctgtgcctgtcagcggggctcccggcggccgccctgggtcggcacccctcctcgccgtcgggggcccggggccctgatgtgcacagaggggcggcggggacccggagccgcgccggctgcagactgacaggagtggggcggaagacatcggtctcgcctggtgcgtgtggggagctggtccctctgacttgagaggcagacccagctgggagggcggtgggcgcctcggacctcccccttgtcctcctcttcagttctgggaacggaggagctattcataagaattactcattcctggaagtgtgagttagcgtccctctcatacacacccactaagtctctgcttgctgtgaggtgtagagccctgagatgtctttctagctctttgcgcccctgccatcgtccaagtcccgggtccattgctcctcctgctccctggctacacagtccctccctagaaccggcactgaccacccttatcttccaccacctgtggccctgtttctctgatggccagggattccccgtctccctgtacctgtggcttccaccagcttctgtgtgtagctccccatctccccacatgtctgaaacagttttgtctggaatctttgtcccaaggagtccagtaagttaccggggccccatgcatctgctctcccttctggaaagttggattagaggacatgaactggtgggggtcaggggtcaggttagctctggagggtctctgcacatccatctgtttcctaaccctgttaccttgccctggaggtcatctctagggaagggggtggggtgctttgcgggggagacttgtggctttggaagtcaagacttgattggctcatatgttcattctctagttgatgtgcagaggaaaaaactggaggacaggagctggtgccagggtctggggaaatcagagggagccctgtcattctattctgcttcccaggtctaagccttctttccttttctttcttcctccttcctt

SEQ ID NO: 107961 - DNA, 1038 bp, Homo sapiens
atttatttgtcttcatgtttacctctggaaaaaactcacaagtttagtgattcatctatataataagctttcaaatatttgcaggaacgtgtttgtttccccataatctttttgtcttcaggttaaacagtcatagttccatatttattattctgatgtcatgcttctcagaatccccatagcatttctttcctctagttgcattctatgttgccagtgttcctgctgccagaattggatccaacccattgttccagacaagatcaggttagtgaactctagtacttgcaggctgtctgaacacgaaacttctaacaccttctgtatagtatgagttagctttctgtagcctttccacaatgctgactcctcttaggtttgtggtaactgaaagcccaagaatttgtatcctttcccacactgtaaaacttttttttaaaaagctaaaagcaaggctgtactttagaaagaaagcttaatgacacaagtttaacacaaatacattctaaatttcagaggttactcgtaaagccaaagcctttttgaactccataccaactcagtttctctttggaggtagatcctggtattagttattaggggtccttccagatctttctgtgcatttacatagatagatagatagatatcatcagaaatgtgtaaattgtgtatgtgtgtttgaggttaacatatcattttgcaagttttctgcatgcagcatgtcctggaaatcttctgcatagtgtatttcacagtgtggatattccatagttttcttagcaattcttcgattatttctggtgtttaaaatcatcataaacagcgtctccttgtacacatgtacaagtgcttctctagggtagatacaaaagactgggtgagtgatacatatatgtttattttaaaatgtagatctcagacatgaaatttgcccttgttaattttgacctagtgttcgaatctgcccagataattttatgtcttgattttgatcatctattataatattaagcccactataccagttttgcccat

SEQ ID NO: 107962 - DNA, 1094 bp, Homo sapiens
gttcagacattattttgatgatttattctccttaataatagatgctgtttttgtggtgtttgttactgggcgtttgccaattctgctgattgtattctgtgcttatagacgttgactaaggagatggttgctatggtggggactgtctatcaaaagaaaagagctcatagagataagaagcatgagttgtatataaaagaagtcacattgctttttgttgttgagttttggtgtattcatggggacctgacaagtaaggtaggggtttacgttcctttgtttacatgtaattttttttggtaatgggaagaatgaaagactgctgctctttattcacagagcatcaggcagtgtttcccagcatgtgggaatgtccaccactggtagtacatgagatgattttaggtgatttacagatgtttcttgagcttctcttgctggtcactgcttggcacagtccagaagacaatctgttttccccgatgcctgcttctgttgggctgtccactcctgccccacccattcactgtgggccctccttaatcccacccattcctcagctctctcttcgttcctacctctggtctccctcttctccttctggcatccctgcctgggcctcacactttgccctgccttagtttcttggccccagtatgtctccagcctccctggccctcatgcctattgtctgtcccttgtgttctttcaaggcacagctttatgctacctgctacaagtatccccattccctggcatttctctattatcctctaactaattgcccagcttccatcccttcttatgtctgtgctgggccaccttcgccccacagatcctgtgtctccaatcctggacttgcgcctacctgtcttccttgcctctaatcctgagtgcctttccctttcagccatgatcttcttttttctttttctcctacctttttatgtcaccttgcagtccactaatttcttttataaagaagcataagtaaaaaagagtcaacttaatatcaaggaaacaacagtgtaggaggtatgtggatatggttaaaatagtgacagaagtacaaaaattactgatgtttgtcatta

SEQ ID NO: 107963 - DNA, 1037 bp, Homo sapiens
tctggatccgacactggtgtcctcacagagggcaccccaggcatcctccagcaacagcgggcagccagagcagcagaggaaggacatggcaggtacggctgacaatgctttgtgagcaggaatgagcatggggagatatgagtggggctcctggacatagtgagatgaaacttttcaggggctgaggtgcaacatgaggaagaagatcaggccaaagccagtggaatttggattgcctctgttaatgggatgtcttgtctggtgaaggctaggaaactcaagtcacagaagaaacttcccgtcagtgaggtagtattccccaatttaacaaatatgtattgaatgcctaccctgtgcaggcactattatgagtgtgaacaagagaggcagaatctttgtcttcatgagaatgacagtgaagggaagacattacccagttagaaagtgccatgggagcagagaaaatgaggaggagaatttcagctgtggatttgatcttgaaagggccttaaaggatgggtaaaagttgggcttgtggagatagaggaggcctagagaagaagggagaatttgggaaatagtctttatgtggtggatgtgtgtttatacacattgtgaatgtgtatgaaggagattaggaatattgagagagaaagctggaaaggttggttgggtgggctttcggtcccatgctaggattttattcagtagtctatgggcagccattgggatattttgagcaagaaaagtaacttgatcaatcatttcctgcctttggctgaggtcacttagcagcactggtgttaggcagggctgcaggccatgattgtttcgatatgttctcttcctggccttctcacgggagcagtcgtaattttatttttacccacttctctgttttgggcgtccgtcagattagcagctagctctatgcctccagttggaagagagcttctgttcaaagtgctgtatgggtggagtctttctgccactgtccgagccctgctgcccttcctgggtgttgaccttggctgtag

SEQ ID NO: 107964 - DNA, 1018 bp, Homo sapiens
atctcaaaaaaaaaaaaaaaaaaaaagaaatcagaaatggctacttaaaaagacatgttaataattattttgtaaaatgaagagtaatgtgagttccaggagatgctatctgtgaaagatgcaggagtataaacagtacttctattagtagactagagaatgtagccaccagatagaggttttgattgtttatattttctatctccagaatctagcacaatgtctggtatacagtaggtgctcaataaagaaatattgaatgaataaatttttctaggctggagtaatcagagaaaagctacctcatggaagaagtcaagcttgagttagatatttaaaacatgacagaaattgggtggcagtggagagggcattttaagtttttcagaggatatcattgccatgtctacagtactgtgttatttatttctctctcatatttgtaaaatattgcacaagtcacccatgagcactcagctatttcttatctcctttatcagaccattagggaagggttgactctggggcccatggcacctggttgtatgataaaatgcaagaagtggtgatttatttctacttgaagaaacaattttacagtttggggatgcttttgcagccctgttcaaagaggctgtggattggaattctccataaggccattaattattgaatttgctttactgtaaaacaaaggagctgcttataggtgtcagctgttgaaggtgcagagtgacttagtagcagtataagtgctcctcctaatcacaggcagacctgttagcagacactcagaaaaaaggacaggatactgtcagcacattgcttcagggaagatgggcaattagtggcttcagatgtcacatagcattcttctccttttggtctcccaggtgctctctgttgggcaatcagagattttagttatgactctagaaacaagtcccagtgagagaattttgggctttgcacttgccaaatggtgagatgagtggtgccagagagtttggctgcggtg

SEQ ID NO: 107965 - DNA, 1053 bp, Homo sapiens
tgggaggcagaggttgcagtgagctgagattgcacctctgcactccagcctgggcaatagagcgactctgtctcaaaaaaaaaaaaaaaaaaaagaaaagaaaaaaaaagaggtgggggttagtaaatcctggaaacctagaacttatccatgagtgaggctctaaaacaacaaatatttattgagttatttgtggatgctggaactataccatgtgctttatataaattattttattgtctccttttacaaaactatgtgagataatagcgctcatcaccatctttgttttgcgaggcttgaaaagagcaagtaaggtccccaggttatcacagctagtgagtggtgggcctacattttaaagccaggtgtgttggactccaaagcctaatggtttataactccccaccccatgcagcccctccaggtgagagggagcacaggcaataggctctgcccatccagacattccagaatacgaatgaggagaaggccctgcagattcagatcatggagcatcttctataagcaagtgcttatggaagatactctgcctcctagggagagacagagtgtggacttttatctgacagttcttgctgtctgtttgcctccgtgttatttcaagaagtatttgagtaggtggacctatcctagtttgggccttttattaggttttgaattgtcctgtcagtagcttgtgttagtggcatctccatccattagaaaaaaattattttgaaataattataccttcataggaagttgcaaagaaacatacatggaagtcctgtgtgcccttcatccagcatcccccactgttaacatcttgcacaactgtagtacaatatcagactaggaaataatccacagactcatccatccagtttttctcccatattctgagaatcacattttaaaagaagcatcactaggccaaagtgtatctggaagagggagagggtggttggtctagaagccaggtcatatccagaaattctaagggactgttgtgagctttttgcatatagatgctgtatgttatttacatgt

SEQ ID NO: 107966 - DNA, 1054 bp, Homo sapiens
aaaccatctgcaggagggtccttttccttgtggactgctgtcctgtgtggtatttctgataaagcttgagtttccagtgcagcagaggagaagaggagagtgtgtcttttcttcccttttgtcttaactgcattcagaaaattccacctctgcccctttcccctgcgaatgcccctggtcccagctccttcctgagtcctgttgctccaggtgcagtggctgtgggtctgggacctgtgggaacctcctgtgatggagtacagagcactgttaaggagaaaggaaacatcagagtcagctcttcttctgctcctcagggctccccttttcctgcccatctttctcctaggatagactggtctacgcagagaggctcacaggtgtgccttgtaaacttcagaaattattctacccgtcacactcagggtttgtttctgcctgctttgtgtcacctccaccccaccctctgctcctgaagcagggatgtttgtggctgaatgaggagggtggagtagatgggagtgtgtttacagcctcctctgggcttctgcctggtgactagaaggacctagatgggaacattgtggaagagatagcccacttctcccaggaagctcccagtctactgaggagatgataattgcttatctgatggcctctggtataaagtgatgcctgagctgagcgtttcttcattacctctcagatgccagcaccagtcctaggctagtgcatcagtagaagccggatctgagctgagatggtgattctgtcctctctggagaggccattgtccccaagaggcattcatgtggtgatttgcaaaacactgttgagtttctctttgcctgtttggggatttttatgcaaagggatctccattcctagaattcactgaaagcaatccctgacatgccctctgcaactcatcatgttaatgggaaagaagggctggaggccagccagggtaccctcctccccccaccacccgccaagccatgtcaggatggctatattgattgcagagtctgacggaagattacggcaatggatg

SEQ ID NO: 107967 - DNA, 1032 bp, Homo sapiens
agggtctcagtttcttgttgcagaggctgatctctggtctttgttatgtgggcctctccaacatggtagcttgtttcatcaaagccagcaagaaagagaatcctctggcaagatggaagccacagtcgcacatagcctagccacagaagtgatctcccatcacctttgccttattatactgattaagaagcaagctacaaagccagtatatactcaaggagagaggatcattgggggcctccccagagtctccttgccacaggcagggagtattaaccaagaaaaagactcaggagattgagagatctggtgccccagacccatctggcttcatctagtgcctctttaaccatctcactatcagcctccagacctgaaagatgtgctttatgcctgggttccaagtgctccttatctatgctgaccaaaaccgcatcttcacatctgttcttcctcattaaagattttcatactgaaaacacataaaaagaaaaataaagtgttggggaagaggagctggaaagttcaaaatattgagtatttgtatattatatatatagggtgttgtgaactgaattgtgcccttcccaaattcatatgttgcagtcctaaatcccagtccctcagaatgtgactgtagaaataaggctttcaagaggtgattaagttaaaatgatgccgttagagtgggccctaacccaatctgactgatggccttataagaagagaagattgattagggcacatggagagagactgtgttaagctgttcttgcattgctataatttaattaattactgggcaattttataattgctggttaatttataagaaaggaggtttaattggctcatggttctgcaggctgtataggaagcacagtgctagcatctgcttctggtgaggtctcaggaagcttccaatcatggtggaaggtgaagagggaacaggcatctctcatggtgagagtgggagcaagaggctggggaggtgctacactttacagtaaccagatctcatgagaactaact

SEQ ID NO: 107968 - DNA, 1068 bp, Homo sapiens
ggtttcttcatcagagaaaaaggatgttttcagtggagtatcttcataagaccttgagggaaagttggtagagagaggatacaggactcctctgaggaacagcaatgcccttagaataatgcagcctcagaaggggccgcccttgaggagcatagcactcctggatattgtgtgtcaggcgtctcttgaagacatttaccccagtggttaggtacatggattctcaagccaggcttcctgagttcagtcctggttctgttatttcccttctctgttcctcagcattcccaaatgtaaatagggtaatagcagcagcaaactccatggggttgtagtagggattaaatgagtgaataagttaaagatgattagaagcaatgcttagcaaatgtgtaacagatgctattttaaaaatcttaaagtgtgattgccttttatggtaagttccagaggtgagaccttgtcatatatactactgaatccatgcagtgcccaaccagaacctgtcctaagcaggtgtccagttatttactggatgaaatactgaaatctacaacttccctagtttatgtgttcatcagcagggagctaaggccaataaacatgttcctctttccctaggagtaaaaaccctctcacagttcccctagggaatcattcctttcagttcaacacagtccaaatttcaaccattaaagtaactcgttcctttgacttaagatgttttgctcctgaggcctcatcagtcctccaagcctgagtgtatccaattcctcctgagcagggtttttgacaggggtgatgggacacttgtttgccagttgggaggaggggtagaagatgggaatgatgctgaattatgcaggtgatttattttgaagggggatcttaatgacttggcagcattgctcagagctcaccttggtgcgggtgggatatcttgctgaaagacacagtaattaggacctggacatgtagattgaactatctttgttttttatcttttctttttttgagaaagagactcactctgtcgcccaggctggagtgcagtggcttgatctcagc

SEQ ID NO: 107969 - DNA, 1293 bp, Homo sapiens
tcactactctcttagtgttggacattttggatttttttttcatttaaaaagattgcaaaccctgtcgtttaccctttgcatacatccataatgattttcttgactagatttgccttatataattctgtctttgaataacatggtaactccagactcctagcatgttaaactttgtctctgtattctatattgtaagtttttatttggtttcctgaacatccatgatgctggggagaagatgcttactttctgcaggtgcattattcaagagcagccctcttgctaatcaagcccttgcttctggcctctggaagcaagccttgtgtgctacttataaacaaacacccagaacacagtcttctccttcttcttagtttatcctgttttcattttatcttgtctcgtagatcccagattctaccaaaccacatcttgccttcatcctcagccttgatccttctagctagaacacttttccggttgtgggcaagaactttcccacacgttctctgcctggttcaccctccagcccaacctcagtgtctcttgtggacatcttgtaaagatagaccattctaatgctgtttccaaggggctgccacttgctccagccctttagcagggacgtgacaggcagggcttgtcctctgccctgaccacagaccctatactgctgtgcatagggagggatttatcaggagccttcctatctgtttttcttgcaatgcagttcatctagaaatgttccttctatctgccaggtaattgtcctcgtcatatctccaaacatgccccctgcatgttcttttctgtccccaccttcagctgctctccgatggtttccaccagaatgctacccacagctctcttatggtgcacacttagtgattcaaatgacttccatggattcattctctggacccatatgcaattctccaggcactgtatgatttttaaaaaacaataccacatttatacagacccagagagacagacatataacaatgaggtattacttctctttttagctagatttctgatcgaggaattaaaagcttcgtgctaaatggggaaagaagggtagattttggatggcaagaggaactttcccttgcttactcctagaggtcatctaaccttgggaagtctctggagtgtggtgctgagaaaagcagacatggaccttggacaacactgggtttgattctgcactccataactcatgatttgtgcaacacagtcaagtttcttaacttctttaagcctgatttttctcatctgaaattgggataa

SEQ ID NO: 107970 - DNA, 1055 bp, Homo sapiens
gcagcacacatccatgtacccttgccttgttgtgtagagcacaggctgatgaggcggaaatcaccatttggttttcatagggatttgtttacttagcaaatatttttcgagtgcctccaagcgctgggcattatgaagtgggtgagtaaacagtccctgttctcacagagcttaccagtagaggagacagatattagtcaagtaacacatgagtggatatataaatacaactgaaaaggaccttggagatcattgagatcaactgatgaaactgagacccagaaatgctagttgcccaagcaatttgcccaagaccatgtagcaagttagggccagaataaagactagaactcagaactcctgattttcattcttaaactgttttccctaccctaatatgtcacactctggtctgctgcatatccataatagactgcccccaagccccagccagccatataatcatgttgatccatcaggacactattgccatttttagaaaaaaacagagagtattttgaaatgataattaaagagtatagtgaactaaatccctcagggtggcacttaccaaagcttgttttcagagttatctcggagcccagagcagaaacagagagaggcaaggctcccatgctgtagcgacactgactaataagggtgcttacaggtgtttcagtgttttggtctcaccccaatactttctcatctcccagattcagcagttgcttattcactcattaattcaacaaatatatactgagtgcctactaggtgccaggcacagttcttggagctagggacacagcagtgaacaaaacaggctgccctcatggagcatacattctagctgggagaaacagacaataaacaaaataaataacacagcatattagaagaatcaaagaaaaataagaaaggaaggtagggagtgccaaaggtagagatgcatttttaaatagggtagtcaggaaaaagaccttcctgagaaaatgatgtactcagtacatcattttctttatttagtgacaaataaatgtatgtatatacataca

SEQ ID NO: 107971 - DNA, 1044 bp, Homo sapiens
catatacacatacatatatatactatacatatacaaatatacaaatgaattggtgataaatatatctctttaagtgtgacagtgcatttgacatgatttaacatgtcgctgtgggcctagctctgaatagccagcatattgtgtaatttgaaaagtcccacaagctgcttcctactccttacagaaaaaggaaaagaaaaaaaaagcttctcatggcatgtaccaatgcccaattcctagcattccctttttgtggggcactaaagaagtagttctcaaacttgagtgtacatcagaattgcctggaaggattgttaaagcacagactgcagggctgcacccccggagtttgtggttcaataagatttggatggatacaaaactttgcatttctaacaaattcccaggtaatgctggtggtccagggaccacagtctgagaaccactaaattaagctgttatagctaggaggttcctgttaaaatgaagctattgcctgagaaatgaggcatccattcattaggatgcatggatgttatcaaagtagttatccttaaacagcagaatcgtttaaaaattggactatttttttgaacaggggtaagtttcagaagccacagccaaagaccccaagcatggaggaattaaacaagggatgtgtcctgaaaggaggtgccaacagtatttcattatttgtctatcaatgctttacattttcataacgtaatacttttataagcccttttgaccactactttcttttgaccagttaacctactaggtgggcagtgcaaatgaattattacattttataaataagaaaattgagacaaaaagaggttatatggcctcccttgagctatcaagtctgagactcccagatctcttactcctattccatttttctttctccattaacatttttcataacactagctatagctttcgcctgagacatctattctgggatcattaaaatccaggacatacagctgctcttggtcttttgccctgttcagaatcccacttgctgcaagtagatta

SEQ ID NO: 107972 - DNA, 1100 bp, Homo sapiens
ggtagagctgctggagcggcccagcgagcggcctggttggtgtctggtccgtaccaccgaacggagcccgcccttggagggtctggtccccagcagcgccctgtgcatctcacactcccgaagcagcgtggagatggactgcttcttccccttggtgaaaggtaggagaacagagcgggtgggaggcacagaccaaggaggccatgagcgctggcctgactctagctgaagaccaccatggaagtgacctgtctcacagacccatttttaccctgtggggtttctttgggacctgactgtgaagagaatgggttgggaacttggagaggaagagctcccgagtaactgtgtgtgactttgggaaagtcatttagccttcctgagtcagtttcatcttggaaatgaaggttgaattaagtaacctccaagatctcttccagttttcccatcatatcacactacattcgggaaagtcctcttctacctttggccaaatatggtttagactcatcctttctccactgacccactcccgctccacagcaacttctggctctctgacccccgaccaagtactcacatgctgacctggagacaccaggcacacccagggaggagccacagctgagtcagatctgatccttccctcagcccagccaggctttgaggtccatgactcctttatgtgccttcaacagataaagtattctagccttggcttttattgtatgtaagctctgtgttcccttcacatgcctgtttactcactttttctcatgccagggagactaaactcctcatgacagtgtttctttaggggtggtctctggattagtaatatcagcatgccctgggaacctgttagaaatgcaggtgccagcctgggcaacttagtgagaccctgtctctacaaaaatttaaaaatgcaaggcggcacatacctgtagtcccagctacttgggaggctgaggcaggagaatcacttgaacccgagaggctgaggttgccatgaggctgcagcaagccaagattgtgccactgcactccagcctgggcaacagagcgagactctgtctcaaaaaaaaaaaaaaaaaaattaa

SEQ ID NO: 107973 - DNA, 1076 bp, Homo sapiens
cctaggcaatggagcaagactccatttctaaaaattctaactttaaaaaatctgtgaaattgattaatagcacttaaactccaacaaggtagactttgcagtccagttatgccccaccaaaggtggtcagttaatgtgaagttccctgcctgctctttgtctaagttctgatacttctatagggctgagtacagggtgtttccagcctgaatcatccccaggattgttcaaggggtcagggttctctttctagtttccattggttttcttttttcttttttttaccagacagggtctcactctattacccaggctggagttcagtggcatgatcaggcctcactgcagccttgacctcccaggttcaagtgatccttctgcctcagcaacccccaagtagctgggactacaagtgcgagccattgtgcctccataggttttcagaggccccagcacaacctcctgtctgcactggctcccttccctcagtctctattcctaacctaccctgggtcctttctacagtccaccaacagcaggtccatctggctccgtgatttcccaagaaataatggcttaatcctctcataactttcttttgactttaacccagaggattgagataatatttgatatatttgagctaaaaattcaagtttttccttggcttgtacctctggcacctctccatgacctattctctgtcattaattctgtggtacttgaaggtaacatttggaccacattatggagatgggctgacctgtgtgatgggggttgtgctgacactgtgagtgttgggtgtatatgaggggaccactctttaattcaaagaagagcaggacagagaggagtttcgtggaaactgcctcaggcctgctttgttctggttgagatgtcctgcctgtggctacatccatctaatactatttaggacatgaaagggcttagaatcaaagcctcaaataggaacatgtcagggcaagccacatccttctctaaatacaactcagtgtcgtgctgtctccaagtagaactgaagcaggaagacccaggtgtccatggaaagagctggt

SEQ ID NO: 107974 - DNA, 1038 bp, Homo sapiens
tttttttgtgttgttgttgtttgtttgatgttgtttttgtcattgtttttgagacaggtgacatttgctctgtcacccaggctggagtgcagtggctcaatctcggctcactgcaacctccgcatcccaggcccaagccatcctcctacctaagcctcaagagtagctgggaccacagtagcacgccactacgcctagctaatttcttatatttaatagagacaaggtcttgccatgttggccaggctggtctggaacagctgggctcaagcaatctgcccacctcaacctcccacagtgctgggattacaggtgtagccaccacgcctggcctcacacacatttctaagtactctcaaggaaaagaacaagatgctctgagactatctggggacaggggtggggtgggggttagattgggcagtcgggaccctgcctgaggaactgacatagctaccaagagtcttgttactacccctcttctggcccgcaagtgggtattatttgtgttctctaccaagtttaaaaagtatttccgaaaggttttgctaactactatgggagaacgtaaggtagggaagtagagtaaaagcggcataaagctggatagccttatcatgctcacattttttaggaccttgcttgaagccgacttgcttcaagagctctcctgccgttctttggtctataagaacctctgaggaacctgtacctaagtcacaaaggatcactgccagggctcttacttcctgatttgcaacctgagtctcgtcataattatgttggcactgggatccagattaaaagaaccagagtcccattccctgcaacccaccttggcctttcccatctgtctctcatttctgttctgaggcattgccatccacagctgctgcctcctgctgcgataactgttattcagggtgtgctggcagggttcagctgagtctgcatgaccctctttgggcaatgctgtagacctgtttctgtaacatttgggacgttgtactcagtggcctttacgatcttttccaattc

SEQ ID NO: 107975 - DNA, 1150 bp, Homo sapiens
caaagcttctgcctcggtgagttaggatctctgctgcacaagacctactgttaaggaacaaaaacagggtttatctgcagtgcagataaaactcccgaagagtcaccacccacccatgagtccttctggacattaatgggcccttctgtggtcttgctatcagccttggtctttaattcgtgcttttgtttattaagaaagatgctcacccatctccccagatagaactaacacactttttctgggttttgcattaagggattatctttgagccaggaatagggctccccctgctttcactgtgtgatttttaataaagccttttctagacgtgtggactgttgctgctggcagtgactgtgtaaggaatcagaagacctaggatttagtcctgcctctgctatctactgtatagtcctgggaaaattacttagtctacttggggttctcttttacctcacttattagtgatgctgattctgtctattcaaatctaatcccaacagagttatgatgataattgagtaggcatgaatgggctttgtaaactgataatcaagcatctacaaatgttagttcttagccacctcgactgccttgtgaaggacagggaaagggaactgtgtcatccttatctcctgtagcttggtatgaagctgggcacatggaaacttagtatttgccagcaatagattggttgggtgaatgttgcagggtaatagtttgacagtctatacaatttggttttatttcccaagtttgagaaacaagagcttcctggccatgtgagaatctagtgtatctctaaactgaagtcctggagccccagaattctactatcttcctggcatgaaagaccaagcctctggaaagaaagcccctaggccaagtgtggtggctcacacctgtactcctagcactttgggaggccaaagcgggcagattgcctgagcttaggagttcaagaccagcctaggcaacacggtgaaaccccatatctagtaaaatacaaaagaaattagatgggcgtggtggcatgcgcctgtaatcccagctactccggaggctgaggcataagaatcgcttgaactcgggaggcagaggttgcagtgagccgagatcgcgccactgcactccagcctggggtgac

SEQ ID NO: 107976 - DNA, 1065 bp, Homo sapiens
tgactagcaggtctgggattcaaatttaggttcttttacccttagttccctctggagtaccatattcacccttttcacttgttttcttttgtaactgcatatttggtatagaattgcgatcgttagcattacctctggagctcttaactagagatagtcactttgacaatttcattatgtctgggaaattggcagcacatagatgccaagtacatcctggttgcctgagaaggtggcagctctgggctccctgctgcaggaggataaagtctctggtctgctagtgcttcactgtggtttggtgagaacagccttggctactgattttccatgttgtctgtggctaggctgggaggacacagggattccaaatgacttttcaaagtacacttctctaagcctgtttttctctcttttcagagtctagaaggaagctcataccgggggagcttgaaagaccctgcaggctgcctgaatgaggggatggccccacccacacctcctaaaaacccagaagaagaacagaaagccaaggccctgagaggcaggatgtaagtggcttccccagttcctccctgtggtgcacatgtgagtgcggtggacaatggacaaaggttggggaaaattcgagaggggttccccacgctgtttccactgacatctttcattctaagactcagatctgtacagcatagcactgataaacattgagccactttggcactgacttgattgaagtttaggctaaagtatattctgtgagatagcagctattactgacaaagtgtggttgtaggtctgttagaaatttaaaacatagtgataaaaggaaaatggcaaagttgaggaaactatgagactgttactgagggcctatagaatcagagagtctctgaccgtggcagatagtctgatagagatcacctaagaaaacatttccccaaatgtaggaaagttatatatagaggaaggagctgttgtaccaccaagcaggtcctgtctctactccttctccaaaggttttaattttgcatctgtttctgggattagttccaagagaacttc

SEQ ID NO: 107977 - DNA, 1099 bp, Homo sapiens
atgtcttagtcctttgtcaagtcaaagcaaagcttaagtcagaaaggtgacctctgaggtggcaggtgaccctgggaaaagccagtcactactctttttttttgagatggagtctctctcttttgcccaggccagagtgcagtggcactatctcggctcactgcaagctccgcctcccgggttcacaccattcttctgcctcagcctcccaaagtagctgggactacaggcacccgccaccgcatctggctaattttttgtatttttagtagagacggggtttcaccgtgttagccaggatggtctcgatctcctgacctcgtgatccgccagcctcagcctcccaaagtgctgggattacaggcgtgagccaccgcacccagccgccagtcactactcttagcatgtagcttgaaccggcctttgagcagtcatttaagccattgtccagattcaacaggccacaaaagtttgctgtctcttttgcccactttacgcatctcttctccctcttctcattcttgccaaaatccacacctcttcacatcctgagctatcttgaaaatgcagctgttagagtatctcatacctcttactatatctcatccttattctctcctgctgtactttatggtcttgatgaaagggtgttgtataggtgtttcactgtaaaccatatgtgaggccagaggctgaggggtgtagcgaaccaagactcaatccagaagatggcagtggggcgtcaaagggttaaatgagagctctgtggagaaaagatgaacacaaatagtcatttgtccaggagaagaaaaaagttgagaatggagttacttgtcttcaagttttagtcattcaacaaatactggtctaacaccagtatgtaccatcagtgggatacatcagtgaataagacaaataataacaacataagtctttgctctcatggcaagtttaaattctagtgggagaaatcagacaataaacaaaataaattatgtattatgttggaaacaagaaaaagaaaaaaaaatagagcagtgtaagggagatccagagaataaatgaggccatgctgcaattttaaatggccctggcattt

SEQ ID NO: 107978 - DNA, 1009 bp, Homo sapiens
ttcggtcatggaggctgcacgacagtgattatctgtgagctgaagtgacaggctgagccagtctctggcatgatcctgcaggttccctgggatcgtgtcactcacccagagacaaaaacctaagtactgtcctgctagatccagggcaaaatttggaagcttgtcctgaaatagaaactttgaggaagagtaatatgttgctgatttttaaaaaatcttttaaatgtaaaaaggatcaactcgttttcttccagatgaattacttggtcctggaggagaatgtggacaatgatccctgcaagtttgcactcatgaacagagagacttctgagagggttgttctgcaagccgccaacgctgacatccagcaggcctgggtgcaggacatcaatcaagtcttagaaacacagcgagactttttgaatggtgggtgctgggcttggttccttgcagggctgtgtcaggggactccacgacctctgagcttccttgggtctaggttcatgttgagttatgaacccagatcacattttataggtactccaactttgtagttttcagaaacactttagaatttttctgaagctgaatacacaagcacaacagatagggtatgaaaaagaagctccatctttctgatagaagagatttcacttataggacacaggatatatgtcttgtggccatcactaccacctggtactaatttgggcaaaagtctgagataggcacatcctctgtgtctaaggaaccaggaccggctagaaatgatatgtgtttttccacttttcacagcttctgtagtgttaactagagataaatgagagtttgaccaatcagttcaaatccctcctctgctcccaacagtgtgagagcctacataagccacattactagccaaccttaccccttttaaatgagagatgattgctaactttaaatttctgtaataccctgaaacttcctagaagaaaatttgtggttacacagagggtgtagctctttgtgg

SEQ ID NO: 107979 - DNA, 1059 bp, Homo sapiens
ttttctcaaggcatgtgtaagtagaaccttattgcaatgtacactgcagaagaagaaaatgatgaggagtgcatactgaagagagaggctataccttaaagatccaaattgaaatataggtgagcaggccacctcttgaaggcctctcactattcaagtggtcatttggggcatcattcccagacccagcctggcccccaacctcacccttgtcttctgaacttgatgctgcaatgggcgttgtctctctgggaatgtgtctgttactcttagtgagctgaatcctgtgctgagggtgtctctgttcctggaaccccagctgacataatgggaccatgcaccctgtgtgttcactccgtgctagatctccagatgttaaatcctgccctgactgactccctttaacctgaggccagcctgttgatcccagccctagctgtgcataggctctcatctcctgcctgcatgggaatgatgtcaccaaaacattctttactttttctcaataagtggaccaaatggttcctttaagggcagtttcctggggtctttacttacacactggctgcttgctaccttcaggctggcatttgtcccaccatggtgttttggggagatatacaggcgcatccttgaaggttaattaagaagaaaataaagcaccttgaatcctaggagtcagatttacaaagctttccaagaatacccaattaggtaaagggaggtaattctgctctaatgtttacatccttttccttcccctgcttgtgaatgttttcaagtacaactcctactcccagcagtacatgccacaccaatgccactgcaagattggctctaggtctatgccatcccctcgtggccaagtctcctgcagccaagtctcctgctgatctgtgaccatacctcatggagaactgttctaaagatgacgagtatcatccatagttcagcttacttctttaccttgtactgattaaactttggggtgggggtgaaaggggggcatcatacatgaaagagatgtttctacatggaagaagagtcaaaccaagctga

SEQ ID NO: 107980 - DNA, 1035 bp, Homo sapiens
tcttcagcagttagaaacaactgagacttccatctagttagcaagaattagttaaaataagaagctgccagatagctctaattgttaataacacaactacagttattcacagtaataacacaattactctgaataacattaggaattacacaattgaactgaaagcaagtgcttgctaccctatcccccgaaccaaaaccatttgttttattctactttccattatgcttattattttaactcttctttctccttctttcttattaaacaggccctatgcagttataaacccatttatttctgcatccttcttaagctgttcactcttgtgtctcccaggttagcacaaaagtattaatagtgagctgggagacacattttacaaagttcatgtttaccttagcattatccagttcatagttcagctcattaactaagttctcttgggcaaattgttcaatatttctgaggctcagtttctacatctgtaaagtaagattagcggtctctacctcactgggtttctgtggatttaagacagaattaactttctgtcttaaatctcatttaactatgagagaattatgttgaaaacaccttccacagtattttacgtgtacgtagtgttcaatacatgttactttccattttgtttccatttccaaatgcatattttctctcatgttattaactaaaaatatactcttctggccttattaaaagtttgccatgtgtcccctgtaaattctgtattatctatgtctttttactctggcacttgcacatttgaaagtgaacagaatctataggccagcttcttccacgcctctcaccatttattccgtcatttaggaaaccgaatccaaactaccatagttagcctacaggctttcagagcctgacacggtaaccacaagcatcccttgaattgaatgtgtctattttcctgtctttgtttgctgaaggtctttgaaacaatatccctttggcttttctctttccctctcctgggaaactgtacactaggttctcaga

SEQ ID NO: 107981 - DNA, 1176 bp, Homo sapiens
cctaactcgtgggctctaatcatggaggttatgggatagcaaatatgcaactcctaaaagacctaaccacctaaaaaaaaaaaaaaagattcaaggtttgtcctccaaaaatgagcagtccaattcatttctatgcatttaatttgcctgtgcatttaatttgtctcttagattcctgtgaggctgtgaaaaataaattgtggtatgagaagatattttcttctcacttctgccctcccaagtgaagaaagtggttgttgggttcttctctgtccttttttccagagcataaagcttgagaaggaaggtagcagttgctttcaagggcattttactcttcgcatctgccataagaaatactggagaaaacaacttatggacataagacttcatcagctctcctaacccttttcggtagacaagctcttaaatgatcgaaattataggctaagaccaaataacatttagacaaagagcacctgatacttccaactgaaaacaatttacagaatttaatctcatgagtttataattggtatctaaagacgtgaatattgaaaacctggaatgttcaaagttactatcaataaaattcttagcactggcagtgtgtagcacttaaaaaaatcaaagtattttatagatgtccccaccaaggttatttctcaacattcctgtaagattaatgtcctccctccttccccatcccccaactcccattttaccaatggggacatttggggaaggaaaaacaaagactttctgtaagaaaagatgaatcaggaatagctgagattgaaactcaaacattcctggtcccacccctatattcagatgttttcatttacaagatattttaaagtaaagaaaaaatgctgcaatatcagtacatctaaatgcaatgaacttctttatctcccatcctcccctctgaaaggcactactatttataaaggctttgtggaccacaaagcagtgaagctagctttctcctctgcttcctctactcccccttacattgtttatggctgagagagacctgaaggatatctccaacattaccatttttttcttaaaaattttaccacattcagctgtaagtggatatatatctatttaatttgaaacaaatgtaaaagatgtaggaaatcattatattaatacttcttaaaagtt

SEQ ID NO: 107982 - DNA, 1009 bp, Homo sapiens
aattgagtaaaggtccctgtctttgataacttatattctatttggagaaacatggggggtaaatcttggctaataactagcaaatataacatgttaggccaaggagtagagataattaagagaactagtcgagaaggcattggctattaaaaaatggacaggatttatgcaaactctcatgaaaggtgggacttcatgatcctacagtcaatctagctgttctgggctttgaaccccagcgaccccatccagaagaaaccaggagaagcacaaactggcgctaggttcgctaccatccacctgacccttgagcccggggaaacccacgggtgcagcaagccgggaaagctgcagacgaggcaggcggaagaggcgggacttcgcgggtgacgtcatcggggcgccggaggcccggggcgcctgggaatttgaagcaaacaggcagcgcgcgacaatggcggtcgctcgtgcagctttggggccattggtgacgggtctgtacgacgtgcaggctttcaagtttggggacttcgtgctgaagagcgggctttcctcccccatctacatcgatctgcggggcatcgtgtctcgaccgcgtcttctgagtcaggtgctggcctaggaagggaaaggacagggcttggtggcgggaaggaggacaaggaaatggaagagggtgacaggagttgggccgtgagtgagagcaaaagagccaagcaggcagaccgaccctactcttggtttggggagtaagcatgagaagcacagaggccaggggttgggctcctcgagagtcgtctgttctttcacccacacgcttagacacgtgttttgcaaaagtcgggaaacccagtttggaacgctttctggcactgaagcacacttgaatgaattctgtatatttaactctttaagaaaattagacttgcggccgggcgtggtgcctcatgagagtaataccagcactttgggatgcctaagtgggcagatcacctgagccccaggagtt

SEQ ID NO: 107983 - DNA, 1031 bp, Homo sapiens
gtcatgaggcagcacccacaggtttaaatcagattggggtatttggtccttgtgggattcacaagatggattactgactgccttgctgtgaatggcacaactcacaccttaatgtagcttcgcatacagcttgggaagaacataggaggcaaagttgctcactgcagtaatgtccctgactgctgcggcctctactatgttttgcacgacgagcttcttaatggtcttttccttgggcatgcatcggacatagtatgtgccactactggccacagccctttttggcacgatcattgttcctttcttttctttgtcatcttggaagtaaggacctgagagagctacagaagaattcttgacatctagagacttatggtcatgggaaatttttttttaattaccattttaaatttcagtttacatacatatagacaagtatgacagagggatcagtaaaagcttttcaagtataatcatatattactttagaataaaattctgtggacacagtggagtgaaaatatgagttggaaaaagatgtaaaaaattttaaacttttcatagtccagcaatttcacgttttgtttttttaaatggagatggtggatatccagtcactagcatttgtattccaagtttattccttaaaaagagtgataaaacagttctaagataatatgttaatatttttagtactagaaattacattctctgcaacttaaaatagtcatagtttttttttgtttgtttttttactctttagaagtactggtgtaaacctatgatctagttcacaaagcaactcagtgactgtttgcttttttaaaaaaaaaatgaggtggtcttgggtgggaatatgtatcctaacattaaaatatgatgatttatgtggaaaaggagattataaaatagcaattcacacaatagtctgtatttatgaaacttcctaattgaaggcttctttcaggatatataactaaaagatgataggtttagatactcagcctaatgggttactgaggaaaccagga

SEQ ID NO: 107984 - DNA, 2510 bp, Homo sapiens
aatgtctttgtggcagcgaatcataatggttctcccctttctataaaggaagcacccaaagaactcagcttcggtgcacgtgcagagctgcccaggatccacccagttgcatcgaagcttctcaggcttatgcaaaagaaggagaccaatctgtgtctatctgctgatgtttcactggccagagagctgttgcagctagcagatgctttaggacctagtatctgcatgctgaagactcatgtagatattttgaatgattttactctggatgtgatgaaggagttgataactctggcaaaatgccatgagttcttgatatttgaagaccggaagtttgcagatataggaaacacagtgaaaaagcagtatgaaggtaagtgtattattcaggaatctgcaagaatcagaaatccagcttaaactgaagaagaaaaaggaaatgctcatgtcattgaaagtccattcatagagcaggctgtcaagcgtggttggatccaggagctcaagtgatatcttcatgacttgctttctctccatctctcagctctgctttcttctctgttgacttctttctcaggtaggcatactctgcatgctcaccccaaaccaatcactctagcttgggatgtagaataccttcattaactagcctgggcaatttgctctgcaactgtgaggttgttaactctgtatgaccttcttgaaataagaaccagtcagggataatttccttaaagaaaatggatgtgctagtaccagaagaagggtatgtgcctgggcaagcaaatttgacagatgtccttggcagaatatgatgttttgaatgaaaattccacataaaggaaacaatgaaaaagaaatataaaatggtaagatttatttgtagcagaaaaagttctattgataaacattatttaaagatttttcttttatcaaatagggactcaaagtagtgcatgtgttggttgagaaaaatgcttagttctactgcctattctatgcaaatttctgtctatgtttttacaactgtgtgatcagactatatttaatgcatttttcacttaacctggtaacagatatttggttgtgtcatataacattttttgtaggcatctttgaggtaacttttctttaatgtatgcatgttcataagctatttctttaaaatagatttgtctttaagtgacttcttcatgtgcttaagatgtcctgccctcatcacattgcctagcttactttagctgattgactgacataagagttttatacaaactttcttcagctctgcatagagttttttcgaaaatcaggcttgttactgtccgcttttaaaaggaatatagttgcctattgaaattagatagctaaggagatctaaggaacacgtagaaatattgagcgatagtaaagctgctgagagacccctgcagagtgaaaacttgtcatcttcaagaagaattttatttttattattattttttttgagatggggtcttgctctgtcgcccaggctggagtgcagtggtgcaatcttgactcactgcaacctccacctcctgggctcaagtgatcctcccacctcagcctcccaagtagctgggaccacaggcatgcgccaccacacctagctaatttttttgtatttttggtagagatggagttttgccatgttgcccaggctggtctcgaactcctaaactcaagcaatctgcccacctcagcctcccaaagtactgggattacaagcatgagccaccatgcccagcttcaagaggaatttttaaatgttatccttgacatcaataaatgtttatcttcactggagtccctttctaatagcatgagctttatttgtggtcatgagcttcagccttcaaggaaaaagagtcctgttagtgttccagataagccaagtgcagaccttgaaagttttttctcattgtgatctctcacccagctacttacctgaataacagatacagttttcacagatggaaccatgggtctgctgataatcactaaagttcctgaagagttttgattctctcattaacatgttactgggagattatttcatattgtagttggttggttggacaagacgttagaggttttgtttgaaaatcagcaaatatcttttttcccccttcttcttaggaggtatctttaaaatagcttcctgggcagatctagtaaatgctcacgtggtgccaggctcaggagttgtgaaaggcctgcaagaagtgggcctgcctttgcatcgggggtgcctccttattgcggaaatgagctccaccggctccctggccactggggactacactagagcagcggtaagtggtggggggactgggtgagagggggcaggggctgctatgctgcatgctgcaagaagatatctcctaatctggcgtttctggaacctctgccaaaaaaaaaatccagctcttgttagtgtgacagtatattaatactagttggatagaattccttgatagttaatagcattt

SEQ ID NO: 107985 - DNA, 1046 bp, Homo sapiens
aattagccaggcgtggtggcaggcgcctgtagtcccagctactcgggaggctgaggcaggagaatggcatgaacctgggaggcagagcttgcagtgagccgagatagcaccactgcactccagcctgggtgacagagcgagactccgtctcaaaaaaataaataaataaaaataaataaataaataaataaataaaataaactttaccattgaaaaggagttggtgatcatctttctccatttgacgtctctggcctacccagtgagtctcttcagctcctgtttttacgcagttgctgtacaaaaggggaacgaaagtaggggcatgtttttatttaaagctggttagatactttttcagagaagtcatgtgacaggttttctgatttttgtattatgtgaaacaacaatttttgtgtttcttgcaggagataatcttggccaacagtacaatagcccacaagaagttattggcaaacgaggttccgatatcatcattgtaggtcgtggcataatctcagcagctgatcgtctggaagcagcagagatgtacagaaaagctgcttgggaagcgtatttgagtagacttggtgtttgagtgcttcagatacatttttcagatacaatgtgaagacattgaagatatgtggtcctcctgaaagtcactggctggaaataatccaattattcctgcttggattcttccacagggcctgtgtaagaatgggttctggagttctcatggtctttaggaaatattgagtaatttgtaatcaccgcattgatactataataagttcattcttaagcttgctttttttgagactggtgtttgttagacagccacagtcctgtctgggttagggtcttccacatttgaggatccttcctatctctccatgggactagactgctttgttattctatttattttttaatttttttcgagacaggatctcactctgttgcccaggatggagtgcagtggtgagatcacggctcattgcagcctcgacctcccaggtgatcctcccacctcagcttcc

SEQ ID NO: 107986 - DNA, 1024 bp, Homo sapiens
ccgccgtgttctgtaggcttcaaatccattatacagaaagcctatctccacgcacactgtggacttcaccttcaacaagttcaacaaatcctacaatggcactgtggactgatgtttccttctccgaggggctggagcggggatctgatgaaaaggtcagactgaaacgccttgcacggctgctcggcttgatcacagctccctaggtaggcaccacagagaagaccttctagtgagcctgggccaggagcccacagtgcctgtacaggaaggtgcctggccatgtcacctggctgctaggccagagccatgccaggctgcgtccctccgagcttgggataaagcaaggggaccttggcgctctcagctttccctgccacatccagcttgttgtcccaatgaaatactgagatgctgggctgtctctcccttccaggaatgctgggcccccagcctggccagacaagaagactgtcaggaagggtcggagtctgtaaaaccagcatacagtttggcttttttcacattgatcatttttatatgaaataaaaagatcctgcatttatggtgtagttctgagtcctgagacttttctgcgtgatggctatgccttgcacacaggtgttggtgatggggctgttgagatgcctgttgaaggtacatcgtttgcaaatgtcagtttcctctcctgtccgtgtttgtttagtacttttataatgaaaagaaacaagattgtttgggattggaagtaaagattaaaaccaaaagaatttgtgtttgtctgatactctctgtgtgtttctttctttctgagcggacttaaaatggtgcccccagtggggattgaagcggccgtgtacttcctcagggatgggacacaggctggtctgatactccagactgcagcttgtcaagtaagcatgaggtgctcggggcagtgagggctgtgcaagggggaacactgagcagatacctttggccccttccagcttttactgacagagagttccaggctagacaccat

SEQ ID NO: 107987 - DNA, 1090 bp, Homo sapiens
ggagggtagttttagccttgagtcaggaggcactgcccaggcttcctgggcataactgtgggctccccatgaggacccggtgctggaaccatcatccacagctgatgggaatgtagaatggtacggactttggaaagcagcttggcagtttcctaaaaagtcaaacgtagaatcaccatacaatgtgccaattccactcccaggtatacagcctagaggattaggtccatatgtccatgtaaaaatacgtacaaaaatgttcacagcagcattattcgctatagccaaaggtggaaatgaaccacatgtccatcaacggataaatagaaaagaaaacaaagtgtggtccatctatacagtggacactattgagccactaagaggtgtgaagcactgaaacacgctacggcacggtgaggcctgaccacagtgcggagcaaaagaagccatgtattatatggttctgttcatatgaaatgtccaacacagagaaagccatggagacagaaagtacattagtggtgtcctgatgctagggagaagggaaaattggcattgactactaacaggtgtggatttctttctgtggtgatggaaatattcagaattagtgggaatggttacacaacattgtgagttgagtaaaacgactgattgtacactttaaaatggtttaaatggtgagggggaaattatgcaccttgaaagggaatctgtgtctcaggctcccctcactggcaggcttcccctctatcttcacctctggcttctgcaaactcctggcccccagctgcctgtctgtcttggtcctaacgtacatcttttgtagacttccttgttcccacctgcctattttgactgactacagtcacggcttctgagggttttttgtctcgagacagggtctctgtcacccaggctggagtgcagtggcaccatcatagctcactggaagtctcgacctcctgggctcaggcaaacctctttcctcagcctcccaagtagctgggaccacaggcatgtgccaccatgcctggcaaatttttgtttttgtagagacggagtttcaccatgttgcccaggctggtct

SEQ ID NO: 107988 - DNA, 1054 bp, Homo sapiens
aggtttgccaagcccttgaggctcctagatcaacgatgcctaaagtcactaacttccctgaggttgcagaatgaatgtcttttttcttccccactggaaaagccatagacaaccattaaagaaaacttgaaaaatacagggaagttgatggatgtgtggccagttggtgctgtctgtcttcttggtgaccaggagtaatttggaccatctgggaaaccagacctcttttcacccaggctgtttcgtgtgcatcacttctgaggctgtgtgctcagtcaagaccttgccagagagttgggggattagccttaggtcgagaatattctgagcagtagtaagaaatttaaaaatcatccataatttcatcactcttattttaagagattagtttatttccttctaaaccttcctctaagttagtgtatgtgtgtttatagctgcatacaattttgtatgatgctttttttcctataatattatatcctaaggagcacttgaagtcgaatgactttagtaaatcattgatgagaacattttgagtgtctttccattgcactcccaactagccttctccacctcttcactttaaaagcaacaactagttgaaacgtgacgctatccaagtctttccggagaaaatagtttctggagtgagatcattgttgtttgacaatttgggaaggacttaaactgagtccagctccaggcaggacttgataacatgttcatgcagtggcttctttcacagcgttatagcaccagcccttccttgtctctcaaaccttacagctcaggaggggctgtgaatggatgggtaaggaattccagtccctgggtccttggcacctgtggtcagcatggggctcccactccagaattgcgtgcggtggttttgagctcttgggtcacggctacatctggagttgttgtggcagagaagcctggttcccagccaccactctgctcttgaaggtgctgactcagagactcccaagcagctgacttcagcattctctcacagctttacaccccctcttccctgcagcctgtcttg

SEQ ID NO: 107989 - DNA, 1076 bp, Homo sapiens
ggagaggggtctgtcagttcctctgatccccaagacagaaggggtgcacttacagctgggaccagtctggttttcttaaccctggcccaagaaggcaaactttccatcccttctctcaggctgaactgtctccaaagcattgacagttgggctttggcaagcaggggtgctactgagtgtgtgagtatttccctctggacgtgtgtccccaagccatacatttcagaacttgccagtgactgtgctgacatccactcgtactcagtaagtgtttatgtaccaaatcccgtgctcactcaagatggacaaatgaggccacagatcaggggctcagagtctggtggaggaaataacatgcagaggagtcagccccgtagagggtgatgagtgctgtgggaaagccaggtgtggcactgcaggagcccaaggaagaagggcccagcactgcagagggagctgttggagctgaggctcagagcaccagtaggagtttcccagacagagaaagccggggtgggctggtcccatcagtgggcctcccatgtgcatattggcaagatgtgtctgctagggtgtgaagagcatcatcctttggccagtggaaagcagctgatggtgacggccatggaggcaagaggagtgggctggggagggaggggagagtggctggcttgggccacagtggtgaaatatacctgccaacctaaggggtctggccattctggccattgtttggcaagtgggttccattctttggtggcaggagttgggagggctatgggcaagtcagggaatggtggtgggggtagacaagagtatcaagcatagctggagggtctggggactcccctggagaagagggattaggaaaagcagacacagttcaggtgtcatcagggatctcagggtctggcctgtggacaaggacacggcccgtatgaggggcagccagatggacctcgcctcctcattatcacagcttcctgcagaggtggaagaggtgcaggctgtggttctgtgacaaccctgtgtgctctgggtcaagacagatgtctagcaagaagcaggagaggtgg

SEQ ID NO: 107990 - DNA, 2041 bp, Homo sapiens
atgtccaggtagatagtgtcagaattgtgctgaattagaagataaccaaccagtgtccagtagagaattgcatggtgtgtgggggaaaaatcctcacatctggtgtcagaagtgttgtgttgagtggtgtgtgagagtagagtaggaaaaacagtttgggtttttccttccaagtactcatcttacttgctcctgtcctggccaacgggaaaggctgggctgggcttcaagctccttgcacttggacttttcccaactttgagccccagcacgggcccctggtccatgtggggtgtgccggggcagcaggagaggttttcgtcagctctgctctcctttcacctgctccgcatccggccagagtccagtcacagctctctccagaccgcttgtgtttttgtcacctcaccgtccgagtggtttgtgttggatttcatgagtcatgcaacacatgactaagtgtgggtgttggcttttacctcccctagagtgctggcagaccatctgtggggacattctgagcagatttgggttggaacatatgtaacagatgcaatggctgtggtatttggccaggctgaggagggagcaaaatggaaagggtatgtttaatttcatgtcttgtagaatcaagtctggtgtacacatctctccgagtgtgaaatcaagttggatttatacattttttcttgctgtgccaaattcttcactgtgagaaatcaccaagtcttcccaagggagtttggcaatgtggtgctttgctctgtaataagtgctggtgagagaatcccctcctgagctcagccgtggagccctgggtccacacgtgcagagggggctggcctcatgttgcacccagaaaggcctcttttcagtgtgggagcgaacagaatgagttggaaagcactggagctgcatgtggagggtgacttcagaagctgtggtgtatttttctctagcagagcacatgtttctctttttgttgttgccataaagtctgctcccacccactccacagctggcccgacttaaagcaattgcagatgtgacctaacctgaccgagtatttaatagcctttacacttctgacattcccaacatcatcttgtttcctactggagaactaaggagtgcaccttgaggggcgaatctggtaggagttaatggaattttaggagtcacacataaaagtcttcatgtgtaagaactgcactttgactccatccattcacttattcaacagatatataccaacagcctaatgtgtgacagggatcatgctgcaccttggaaataaaatagtgagcaaaacacagtcctgccctccagcactcatagttttgggggcagagacccttacaaccacgatacaacctgatgatctctttccaaagtcacagagccaaattcctttttatttttttatttttgttttttaccttatctgtggacagagagccaatttccaaagaaagaagtgcatatcaggtgtggggattagaaagagccctggggtgggtcaagaaagcctgcacccggtcctgtgcagcagagtggtcccaggccaccttttccttgccctgacctccagcttccatacatgagaggtttgggctgcatcatctccacggttcctgctgcctgaaatgtcttaagagtttctgattccagagactctgtgggtagcaggaataatacaaactttatatcagaacatggggcttatggcctgagtagaacataagagtccatttccatctaattcttagttgctgactcacagagtaggagtccaagtccctcttgctttttcccagatcctcccttggggctttcgagtggcggcttgggcagatcttgctggggagcactggtgtttccttccaaagttttatttgtgaacgacagggcccccatatttcaagttatcgttcccaagtaatttttttacatgccttcactcttcagctcttttacaatactgttttatttcctccactacttattcacggttataaatttattttttaatatttgtctt

SEQ ID NO: 107991 - DNA, 1052 bp, Homo sapiens
atctctgtattccagagctttatgcctgagcctgcagactataggagaccagtgggctagtctggcgcagaaattcccaaagaaaccaataaatgtcctgagtgaatacagcagtctgcatatggatctgttccatttaaagaaactgttcctgggtcaccctggactgccgcatttagtctggggcaggaattcccaaagaaaccaataagtgtcctgagtgaatagagcagtctgggtatggatctgttccgtctaaagaaactgttcctgggtcaccctggaccatcttcaaaaactccccacatgaacgtgctccttctcacaatcacagatgagccaagtttgaattacagatctcctcggtgtgctcatgtaagctaaatgtaaactcgtctctgagattcttttacgtgatgaagcaatgagaacttaatctggaatccctctccaccctccacccccagaacagctggccatagttccctctccttcttgctcttgaatgtccacaaaagaacctttgtctgattgtgtttttctattgctcctgcctgagattatcactgataaaatgccacttatattttcttgagttctttatcctcctttagttcaaatcaatgttagaagatgaaacaagggaaaaggattgtttttctttttttgtttagtggaagatagcaggataaagcctattcagggcgtggtggtgtgtgcctacaatcccagctaccggggaggctgaggcaggagaatctcttgaacccagggggcagaggttgccgtgaaccaagattgcacaattgcactccagcctgggggacagagtgagattctgtcgcaaaaaaaaaaaaaaaaaaaaaaaaaaaaagcctatgcacttacaaataacgttttatgtttttagagggctcaattgcacagactgtattgggtttccagatatttccagagggaagaagtccatactggcttaagcatccttcctcagagctaaatacaccttgcttgggggaggaagcccatccagtcccaaggcaggcagaggg

SEQ ID NO: 107992 - DNA, 1032 bp, Homo sapiens
actctgctatacatgttcattttatttgccaagtgcagctgactttgagctgacttcttcctggctcctgttggcttcccatggagccaccttaccatatgggtgaaagtcaggtgggaccgagaccagggaaaaactgtggagggtggggcagagaaggatggaagctgttcttggttctctgtgtgagcttccttttttgtcagacctgtagccagagtgtgactcctttcagccttaagaagccaaattgctccacaggctggaagcttgcgtcctcaaactagtgaaaccaggtcctttactccctaaccatttgtttctctctctgccagtccctgttctctggggccagatgttggaagtgaacaagccagcgagtctgtcttcactcctgggaggagtccatttttgttaattttctcagtgactgggaagggctggtcttccatctcattcctgcttccccttttcatggatgactgagagtgaggtcagattttaaggaactgagaggaggaaataggtctgctggtcttaaaagagagaggcgagtgatgagagtttggtggcgtcgcagggtgaagagaaggcttgttattagtgggccatgaacatatttgtaggcacatggaagggaccagaggagacagtgacaatggaataaattctccaaagagggtggggtttgcagggctgtgtttcctcaaggagggaggagcacttcttcccttgggatggtgagatcagagcgaggctgggaggacatgccagtttgtttcagacggagaggagagcactggctgaaaggcatcctagggcctaggaccagaactgtgagatcctgggaataggtgaagggagaagtccttttacctatctctgtgggtgacgaaacaagtgaggtcgttccctcgcatgagtgtggaagcaggagttggaaatagacctcgtggtgaatttgacagtgaacaaagaaaagtgacaggactcgcagccctgaccggatgcctggcttcatgcatctgcgtc

SEQ ID NO: 107993 - DNA, 1074 bp, Homo sapiens
taaatccctgagccctcccctctccacaagtcctctttggtagccttcagagctcctagctccaagttgggctgggtgataggagcaagttagtgtgctggtggcataggctcttctgaatccctccagatccttctgtatactctcccagaagctgacttagatcttttcaggtattgggaactgacactggtggaaaaacagacaagaaaaagttttaaatacaaatgaactctaaattctttaaccacgaagaggcactaggcatcatcatttgctgggtttagcttcctcctggcgacaggtggccacagggactattactactttgattctgtctccaaggcccttttcagctaagtctgggtgtcaaatgtttttgttgaaattttgctgcttaccaggagcaacagcatcttaactgcaagccttaagccttttttcaattcatctgaaatagtgattttatttgcttcttttcacctctgtcctaattgggccctgtctccagacagatagggtgtgtccccactttcattcttccaaggcccttccactgaccgagacactagattggaagctggcagagaatcaagggctggctctaggcgctcagcatttaaatattcaaagttatgacacatcattacttattcagagctcactctctaagtcctctaaggcagagcctgttgcagacagtaaaactcctgacagtgagtacaaggcacactgaaaagctacttgtaaggcaggaagtccagtgaagaatgagaatgtggaaggaaacctcgggcctgagttatgtgaagctctcttctctgagctggggaggcacacgcagcgtgggggcacactgtggcttggtgagcaggccgagctttgtctccccacgtccaggcagcacggcatcctgtgtctcctgggttcaagtgattctcctgcctcagcctcctgagtagctggtattacaggcacgtgccaccacacccagctaatttttgtattttttagtagagatggggtttcaccatgttggccaggctggtcttgagctcctgacctcaggtgatc

SEQ ID NO: 107994 - DNA, 1036 bp, Homo sapiens
ttccagctacaggttcgccaggtggaggactatcctgtggacctgtactacctgatggacctctccctgtccatgaaggatgacttggacaatatccggagcctgggcaccaaactcgcggaggagatgaggaagctcaccagcaacttccggttgggatttgggtcttttgttgataaggacatctctcctttctcctacacggcaccgaggtaccagaccaatccgtgcattgggtaagtgaccagttgcccttctgttgggtacttaagggtgggagaatggagaagcaggaaaatttagctcaaagaaagaattaaggaaggcatggttaggaggggtggccaggcttaggcgtttaatttgattaatgataagcatacattctctcctttcctgacgtgtgaagaagtgagtgaactgtcacaaggttgtaaagataaaatgatcacaaccccttgattttcctgcctgccatgcacagcaccatttgctcacattaatagaattcagaaaatgtcctcagggagtgatggatccagattatcagggaggcagcaggcagggcaacttaaactttccccttgcttgtagtaactgaggtgctttgggagaaatgaattcaaaatttgtccctgttgtttttctataaataactataacttattttcacataattagattaaaatcctattttaaatgtaagaatttttttttcaacataaacacctgaactagaaaagatttgacatattattagaaaacaggtgtctctaactgctgccagattctataataacaaagtgtataatggctcaaacttgctggaagtttatttcctgctcctcaagtccaactgggtctcttcatccatggaacttctcctgcaagcagtgactcagggactcaggtgctttccatcttccaggctttaccatcttccacacatggctcctaaggtcatgctgcctagagggtcatgcataggaggataggcctttgccatgcccgctcccacatgctattagacggaaca

SEQ ID NO: 107995 - DNA, 1059 bp, Homo sapiens
gccaagaagtttcttgcttcagaatagatagcctcttaggatacaaagggacctatatatcatgccttctttccctcagccctcatgtctggaaaatttagggttaaatttgtatgcccaaggctgtagctgttgaaattcaagttgctggcaggattttctgtctctctttttatcctcacaggaaattgcttcagtaattgacttttgggaaaaccgaggccaaagttttctttgtgtaggaacatttgtgtggtgtttatctcttttaatccctataatagttaatatcctccccacttgactgatgcagaaaccgagcagtgagttgaagagagcctgagttctccctagtccttggtgacagggtctggattcaaacccagctttcctgcttccaagcctctatcccatagatgcctctcagcctcccggaatccaagccaattatttgtttcctggttttaaagtgcccatctgttaatttcttataattcgtaaaaaagtagaagtagattttggataaaataagttgtaggtgggaacttggggggacaggtggcagaaaatgcagaagacctgtgaaaagatcatggcatcaggcagaggaaataggattgcaggctctgtccatttggggtctgttgtctgcccatgcaagggccaaggagggagctcccttcccccaactcccccctcttccctgcccctccctcactgtgatgtggcacccaaggagccctctggcgggacaagctgtgtctgtctgaccaaaggcagacactgcagcagcctggaattcattctggaagaaaaccttgaacattcctctgtttgagtcagactctgatggtttttttttttgtttttttaaattattattattatactttaattttagggtacatgggcacaatgtgcgggttagttacatatgtatacatgtgccatgctggtgcgctgcacccactaactcgtcatctagcattaggtatatctcccaatgctatccctcccccctccccccaccccatggttttaaaaaataggcttatacca

SEQ ID NO: 107996 - DNA, 1072 bp, Homo sapiens
gttcttagtatatttgcaaggttgtacagtcaacaccactgtctgattccagaacattttccaaaaagaagtcccatacccgtgaacagttactgcttaaactaccgtctcccaccctcccctttcagccgctggtatccactcgtctactttctctctatatagttttgcatattctggacatttcctatacgtcataaaatgtgtgggtcttttagctggtttctttcacttagcaacatgtttcaaggttcatccatgttgtagcatgtacttcattcctttttatggccaaataatattccattgtggaggtatagatatactatattttagtttatggacatttgggctgtttctactttgggacaattcttttttcttttaataactccacagttaacaccctatactttggggcaattatgactaatgctgctatgaacgttcatgtacacactattgtggggacatatgttttcaataatcttgggtctatagctaggagtggaattgctgggtcatatggtaattctatgtttaactttttgaaggactgccaagcttcaagcaggattttgtgtaaatataggatcatgttttccattttatttcagtactggaaactacatgtcaggataagaaccttagaaaaaatcattaacaaagagcataaaatccttaagaaaggacataaacttgaaagtaaagcttattgagaaccgtcaaaagctaaaggtggttttgaaacactgagcaattaagaatagtttattaaagtcattattggcctcagtcctttaacctcttaaaaaatgacccttgattggtagctttcttacattttgaaataattttagactcacaagaagttgcaaaagtaacacagagatgttctatgtacccttctccgctgtcctcaatgatagcatcttaatataacaaaagtacattctcaaaaccaggaaaccaacatggttacaatactattaactaaactacaggtaattggttgcttttgggtttcctgccagcccctatttttttcctcccttctccttccaggttctac

SEQ ID NO: 107997 - DNA, 1065 bp, Homo sapiens
aattttaaacacctctcttttctcttttatattattaccacttagtaactaaaagcagcaaaaggccaggcatggtggctcacgcctataatcccagcactttgggaggctgaggcgagaggattgcttgagcccaggagttgtagaccagcctgggcaacatagtgagacctggtctctacaaaaaaagtaaaaaatcagtgggatgtggtggcacctgcctgtagtcccagctacttgggaggctgaggtggggagacagcttgagcctaggaagttgaagctgcagtgagtggtgatcacgtcactgcactccagcctagacgacagagcgagacccagtctctcaaaaaaaaaaaaaaaaaaaaagaaaaaagccgcaaaggacacttcaactttctattgccattctgctgcttttcccctttggagagtttgataagggcatttctggagaccagggatcaatgctttgtttgtgtacaggaacctcttccagcatagagcatggggagcatctgcaagcagttgtgttgtggcccattagaagcccatccttcttgcttgggttccttttgttcaaggaacaaaaggttgccatttttgcctgttgagatgaagtctcccctcctcttctataggttgaggctcctctgtacctgtttctctgcaaaaggatatttatccctcatgtttggtaggtaacagatctctgaatttggggcagcaaagaaatgctgccttcagaaggatggaagctttgggcccaaagttagtttcctgctgcagaacttggcagtggccttggctaaaatgggaggcggcacatgctgcaaagagcactggatttgggcccaagaagccagggccagatgaacttcaacttcttgggtgaacttaggtctgtggacctctgattccccacctgtggaagccaggggatggcaccaggtgatgcagtcaagggcccttccccttggaacttgctatgtctgacacctggcagagggtctgagtgtcaggtctctgggatctgaaactgttacgccatcagacatcaggatg

SEQ ID NO: 107998 - DNA, 1031 bp, Homo sapiens
gccttagcaaatgagccttaacctgcaattagcaatggtacctgcaccctttagactcagagaggcctcctgttaaagaaggatgtaattccccctattcaaaggcttgatccatgaagtttatagccaggaactaattagtgcatctttatcttgctttaaaggtctcaacatatgcactagtggaagtgccacctcatgtgaagaatgtctgctaatccacccaaaatgtgcctggtgctccaaagaggtatgtaggtgggggaggggaggaagaagggaaggaatgctgcgagggtgagggtgagaaggaggccaacaccacaacacactaattcactatacataaaaatcctgtgcagattctgtaagctgcctcttccccatcagggcagagtgatgacaaatccaagtttatgagacaataagataaactgggtttcttgatactgtggaatgctaatcctgttttggggaaacaagactttccttcccttttgtttggagaccagttaggattcatctatagttttctgatctttggtataagaactccaaaagacctgagcttgtgaattgagtttgttgcataatgattcaaaacatatctagatggctggcatgttggtggaagccagtcatcttagtgtgtttacttgagaataaatattaggaattagcctttatggaatgattttatttagaaataatggctgccatttctttaagccttttagaaagagatataggtttgggacaatgttaggctattggtatcataaagcaatatgggctgggtactgtggctcatgccagcattgtgggaggccaaggcaggaggattgcttgaggcttgagctcaggagtttgagtccagcctagacaacatagcgagattctatctctactaaataaatcaggaaagaaagaaagagagagggagggaggaaggaaggagggaaggaaatgtaacttggtggactaatcagaaaatgatcgatttctaaatttcctctcttgaaggaaatttc

SEQ ID NO: 107999 - DNA, 1058 bp, Homo sapiens
ggtaacatttagacatatggctatttagttgctggagtctatactgggactcttttgtccattgtgtgacaaatgtgagggcctggttcagggtgtggggagaagcattccagggcattgccatcttcaaggcagaaaggccatttcagcttctgtattcacttctgttatcctactgaatattttggatcaggaaattccaactgcagatgtatgttttagtagtagttgtctgaccttggacccatggggtgtacagaagtggagagaggctgaatggaaggaggccagccaggaggctatggcaggaatttagaccagagggcctggcttgggttgttggggctagaggttgcagacaggaagggttggcttaggataaacatttcttgcatcttgaaaggagtgatcaaccggatgcggtggctccttgaatgattgatgaaacacaggggtgagtcagtgaattttggaagaacatatttttagattacagtttgcagtaaacactgggcttcagagacgtgaggcaaaagagatacatggagttgccaccgagctgggaatagtcactatgcaaacagcaaagaagatgagatgtggctatcatctgggctgctagttcctgtttccatgacctagacctaacactgacatttgtgaactccgtgtgtttagttttttattcattgcttccttccttttcaaaatgcttattggtgccaaatgactcatccagcaaagtccaaactctgaaatattaataggtggagagaggagagatgccaaagggagtgagtctgacattacacataccagcacacagcctgtggttttggatcctggagtacctgtctggtacctggtacccggcacactgtgagttcctggacatcaagggctggtaggtcattcacctgtgcatttctagcatccccccagtccagtgctcagcgtttagggtgtgttaagtgcagagtttcttgaatttgaatgtgtcccaacagcaactgaattttagggcaatcattttgagtacaaacgactttacttttcca

SEQ ID NO: 108000 - DNA, 1018 bp, Homo sapiens
caaactacttaaataatagggcccctttcacatggcagtgtgcagctgggttaatgggatagggtctcttttcacaggtatttccagttggctggagccgagggccttggagaactgactgccgtggtttgttttccttctttccggttcgaatgggattaatggcctctataaatgtaaaggaatgctttatttagaggcacccatttgtttctgaggcttcttgcttccgttgaatgcagggtttacttcccgggcctcatggtgaaaagtttgctctaagacaggcttgactcatcccctaaggctgatgctttgaaggcactgcggggtaccctgccctctctttataggattccctccccaactccagccagacattttcagagctggttgtctcttgtagagctgggacctacttctgcaacttgttctctttagttattctcaactgtccctcagagtgatcctgagatccaactcaagtcagatcatatctctctgcttaaaaccttcgaatggtttcccagagtcctgccaggctccacgaactctccacctacttctctgactttccttcaccactttcccttcgatcctttgctccagcagcatgggcctcccactgtcccttcagcgtgccagccatgctcccatggcagcccttctccctgcctggaatactgtcctccaagatatctgcatgaccggcttcctccaccctgcaaccctttttctagcatctcctgctcagccaagttttccctggccgctcccagctaaagctgcaacctcctccctatatcccgagttctttttatctgcttttcttctttaatttttgtccttagcactcaccaccatctaatgtaactacatatcttcttcactatttcccctaagtagaattctcccccagccaggatgtgagctccgtgaataagggagtcttgttggttttattcatctctgtatcctccatgcctacaacagcaccaggcacatatttgttgaatga

SEQ ID NO: 108001 - DNA, 2039 bp, Homo sapiens
gtagaagcaggactgaaacccttgtctgcctgactcccccagctactctgcccactgtagccccctgccttactgtcctggcacacccctcaccatcctgtataccttaaatatcaaagagggcaagagagaaagggctttaaagataagttatttttttaaggaaccttaatattatttttaagaagtaaccaaattagtgacgtgaaatgcaaaaaaaaaaaaaaaaaaatgctgactacccttttgaaaatgtgctttcagattgttttttatatgtaattcttagacacttgtcattaagaaaatagtggctggcttgtgctcagcaagaagcacactggcacgtggctttggtataggaagtggaaggcaaggacctgggtttctgacaagtgcagtcagacatacacatccatctgagagctgcttgccttgttcccgtggtaaggccatggctcccacatactggaagcatatttttgtgaactgttttcagaattgggaacatattcagtggaatgtcttaaacgctgacacatcttcctcctttgaggggaagtatattttcagaagcagctaagacatttagagccaaaattgctgataggtggttcagtcaagttggctgatggcatctgaggtcaaaaactaagatgtgacgattgagttcttaaagaggtaactcttaaagtgggcccaagggagaaggcagcatctttggactcctaggctggatggctacccaagaatatgccattgaaggatgacacctattcagatgtgaaagttcccagagcaggcacctttgggtcacccaccacgtgtggctttttggtgcctgcatgaaactgtgttgccccctggtgagatgcccgggtgtcctgtaagccgatttaactctgcctgaggaagaggagctgtccactccagttgcccttggctaagtttagcctaacacacagggttttgacccatagttctaaaatacacaaattttgagactacagcacttctttggaaagaggaagaatgcaaagttcagtatttcaatactttgtattttacttgaaattacccttagtagcatcttttttttcctgtctgaaagcttttgtgtggatgagaagggacatttcatttcctcccttaacaaagtgtcattctgaggttctcatgtgtgtttttggaaatagagatactggttttgtagagtttgcctttgggtatgttttctttttttcttaaatctccaaggaagagaactgactaaaatagtaggaacatgaaagtattaaatgccaattaatttgttgtagtaaagtatcttcattagcgttatactccatcatatctggtgtaaactgctcacagaaaaccctatgaaaccaaagggggaccattcaggtctaaaaagcgacaggtccgagactgggtctgtcacctgggcattttcaaagaggacattttgaagaatttgcatattcagatttttaaaatgcacttaacatacttcattacagatttcttgggtagggaggatgggataggccagggatgggatggagtcagttctgcctgggaaactaatccgaatcatttacctttctgtattaaccttggcctgtcctaaaaagagaacgactgtttcatcatgagttgctctgagttttgttaatgtttgtgttggtggattgacggttaaatgaagcatttagctggaatatgaactttgggagttttcatgttgtcctggatttctctttgtaaacctttaaaccttagcccctggttgattgtgttaaacccattatgagaatgttatttaaagttgtattataattgcaacctccactaattattcagtactgtagcagcaaagtattatttgtaagaatttggttatttttatacttatatccactctaagtctggcgttctagtcagtaaaatgatgcaataaaattaatatcattttcattgtgtgttttcctcttaataacaagaaaaccagaccagaatgcaacaagttaccagtt

SEQ ID NO: 108002 - DNA, 1044 bp, Homo sapiens
ggactcgatcaccattgtggaggccagaggcagctgcgtatggaggagaaatgtcaaactgaacgcaggtttcaccactctaggaaagcagcttgttgagcccctgcagctggatgtggttagagggatgggctgaataggcaggttagatttcctgcatcaacagtgctttgggaagctgtgtggattcctgaggaagaacagggagccgagatggagccacacatgagtttgctcaccggctactgcagcactttgtacccagaatctcatgtccacaaaccccatgtaaactttcaaccactcaaagctgtttattcggctgaagaaataacttttttttctcacccagtcatttgtacctcttcatatggctatgtcgcaccctccagaaacgtggttatacttccagtcagtgtgggagaactgaagacttccggttggtcgaggaactgagggttgaccttcgggaaggaagttccactcatcttatttattatgcctgtgatgtgggtcctgccagggagacatccagtactcggtgtctttaattgccacctggggaactgtgtttattggccttctttggggcatcctggttttggatgaagtgaggggaatacagaggtaaaagaattgtctccaccctgaagcggggagtcccgcttcacatttctggaaatggtgcagccactggggacagttctgccccgggcatggttgtttcttcaaggtcctctaaatataatccctattcttacataatccttggccctgatggttttaagcaagaactcctgtgtcccatggtctccaccactcaccatcaccctgctgtagcaagagtcctagtcaggggaggtgcattttagtagttacattgcacttatccatgagataaataaaaggagaactgtttttatcagtggaggctaacctaaaatttcaaagtgtcgcctttttgaaatcttgggcctctctctctgtagaaccaatggccctttgtggctcacggcctcgcacctaactggagagttctgagct

SEQ ID NO: 108003 - DNA, 1047 bp, Homo sapiens
ccagcctgggcaacatggtgaaatcatgtctctacagaaaccgtgctcctctctacaaaaaattagcctggcatggtggtgctcgcctgtggttctagctacttgagaggctaagatgggaggattgcttgagttggggaggcagaggttgcagtgagccaagattgcaccactgtactccagcctgggcaacagagtgagatcctatctcaaaataataataataataataatagcaataataaacaacaacaacaaaaaaaccaactaggggatggggaaaaggtataaagagaacaacaattcaatgtcgtcctcaacaagcacttctcaggtttagaatattgtatactcagtaggcctttaataatttgctatgtccagcctggactgcatcatttggaaaggtaggagacaaccttgaacccttgctgcctttctcccatattgaatttaacctgtgtcatattcctgtaaactgcccagctcatttcatatcactgtatcaaccataaagcaaacacgaacaggcgtatctgagctgaaaagtaaacagttatcaggtgacttctcgtgccatgtggagctgtctgaggaatagcaataaatgtgaaaccttgccccatggggacttaatggtgttagacaatcttgtgacagaaaccataattcctctggttgctgtggcaattgaccatggggatgcagactttggatgggagggacaagtttgttcatgctaagaagctgtttatttccatggactctttttgaaaaatttgaacctagaggaagaacaaaaagttataaataaggaaaaaaacataaagaaatacaaacttagctctagcaaaaatattcccattgatatttctgcattgggctttgtttctctgtttatcaggaaagtccttttcctttactaactgaagctataactgagctggtattttaccctggtgtgtccccacactctcatcctttactcgggactcctcagccccagcacggttcaataactagcaacaaacaggcctgtgacatcat

SEQ ID NO: 108004 - DNA, 1032 bp, Homo sapiens
tttccaaattgccatcaaatcatcaaagataaaccatatgagtggaaataaacttcaggggatgagactaggaatggttacctagagggacataacctgagcgctcaagggacagaagcctcatatttgctacgtgttctgtactgtgtggtgtacccatttggggaaggagcctgtgcctgctggctcctgagaagagaaggtagttgtgcatgagtatgtcattgtctgagcccaggtaccccacccaccaggaagcaacacagtggcaggtctgttcccaacttccacaaagagccagcacctaagccacatgctagacatttggttttatgaccctgagtcactttttgccttccctagaaaacttatttgtactttaagtgaggtagaaagaaaaagatttcagattatcctatctgtgacaaatataatttaaaatttctgatcctggaccggttagataggtgaagaacacagattccaacaatttgcagtcagtgagatctcacgagtagcatttctgtaacctgctgaaatgagaatttgtacaggtgtataaataggtgggctttttcataaacaaaccattctgtttttatgacttgtgaaatatttgcttcgtgtagtagaaagagcactgcccggagagttggaggcctgaattctagttccacaccttctagtagcaaaaggtgacccagaggacaagtcaggtctctttactgagttggagctgccccatcctatccccagagctcctgattcagtcaatctgggggagacccagactcttcccatgtaaattctgatgcttgggcagcttgggatccactggactagaatgagtctaagggcccctctggctccagcattctgtgaatttatgacccttgttttcctggccacccccaagacacagtgatctctgtcctgtagaagagtctaaatctgccctattgctgctgtttttgtccccctaccccctgataatctggcccctttgggttggaagaatttttgtatcttttt

SEQ ID NO: 108005 - DNA, 1031 bp, Homo sapiens
acaccacttctgtgcaaagccgcgtgctgataacttgatggctggaaaatgcctgttttatcctgaaaataggaaactggttctaggtccaaggcttttgtctaactcactgttaacgacaggcttgttcttcctttcagttaaatatgtgtttttcagcgttacctagttacatccgatctacagttcacgcctctaggtaagtaacagaattatatttgcttgtgaactagtctgtacaaaggggaggctgttctaacatgggtgatagcaacaaaaccgggctgttttcacccagccatggggcaatccagggccaaggtcactgaccttcatgctctcccatcccgtcactggtgaatggcgatgacattcatttccaaaagccttgggacccacgtgtcatttcagggctgttaaaaacccacaaactttgcctatagggagtccaacgcggtggtgatctcactgcaaacaaccttttccctggcctccaatgtgacgctatttgacctggctgataggatgcagaaatgtgtcaactcctgcaagtcctctgctgaggtctgccagctcttgggatctcagaggcggatctttagaggtaagagggcagccctctgggaggatcctacccatatagttaggcacagacctaagatggaaatgcaaggcatccagggctcaggcccaggaaaggccctcacagagcctatttttggcatgggtgttaagtcaaagacctttgtgcacatgcatcttcttttatgtgtgcatgcatgtacaaacatgcacacacacacccagagtcctgtacacaagccttgaagacacctggtccttggcatgcagctccttctgtttattttatccagtgttgatgtgggagggggaggggcataggagctgatgtgacaaagcagaaatcactctttttccactgaaaagttcctgctctctttggggaaacagaatgtacatgcttgtcaatgacccaaaaaaaccttcatctggccagaggcagtggctca

SEQ ID NO: 108006 - DNA, 1036 bp, Homo sapiens
caggattgtagggtggagaaactcaagtaaagaagcttaggaggcctggctgacacagggatcaactgggtatctgcgtctggatcagatcccagagtctctgagtcaggggctccccagtcaccagggagcttcttggcgtcactgggcttctcttgatccagggaagcccaagctcctttgtctccgaaagagtgtgtggctagttgataaatgggagtggggagacatgtaaatgaaaagatggtgaactaaccttttcccacagtgaccgcacggccagagctcctttacatcacacttagggttgtttttgtagccacgttgaagttgctggtaccaggaaagtaaagccagccaaatgatcctttgtcatttaaggaacggtagaaggaagtaggatgatgcagcttttcatgtcatgttcaaagttacacttctggcttgtccagacatgggaaaggaaaactgctgttggaggagtgaaatggaaactggcgtcttagggaagaaggaaagaagagatgatgctttgtagtggctggagcagaaagctcagggagcagcacagttccaacctgtcagccacaatcaacctgggctggaggctcataagcaaaccacccccatgccaagccccacagtgcccctttgtatcagtgatctgagcacctctgggaaatgaaaggtggctgtttctccagggaagtttgggagccttgcttcaaggcctatagccttcagtttcagaggccacatatattccagtgccagatgaaatctaattcacaagtctcccttaaagccattagccattctgatgataactgtaggcaagtattaggggcagattcactggctgttactatattttttgtgccagtgttcatgggttagtgtttggctatataagtgctgtgcttctatgggtgattttagataacacttgacatggcaatacaggataggaacaccatctttaggtttagctcatttgttttcagggttactattttttttttttgagtgaagactt

SEQ ID NO: 108007 - DNA, 1062 bp, Homo sapiens
tatactttggtatttagaataacctttattcatatgagaactgttttaggaaagtgctctgactgtgctatatttatttgcattgtatttgttgtacataaccacacactcactctctcgaacactttttatgggaaagagaatgaaacactcaagcctataggttactttgctacttgcacatgctatttcaaaggtcccctgttcaacaagttatatttttttgtattactctcttgctgccacccaagagttttgaaataattatttagaatatgatagtgcataatacatttaataaacactataccaggttccttggcaaagaatctttccctagagaggtctcacttcttagttgccaagggatctctttcatacctatgtaatggcctttttttcctatattaccttacagcctttggagaacatcagcttgccagcagctctgaggtgcaaaatggaagtcccatgtctcagactgagactgtgtctaggtcagtcgcacccatgagaggtggagagatcactgcacactggctcttgaccaacagcacaacatctgcagatgtgacaggaagctctgcttcatatcctgaaggtgtgaatgcttcagtgttgacccagttctcagactctactgtacagtctggaggaagtcacacagcattgggagataggagttattcagagtcttcatctacatcttcctcggaaagcttgaattcatcagcaccacgtggagaacgttcgagtgagtttttccatttcatgcaactgtgccccatagaggagagagggactcatgatgcttatgaaatctgtggcgtattaaaaccacgcatgagggcctagcgtggtggctcacgcctgtaatcccagcactttgggaggccgaggtgggtggatcatctgaggtgaggggttcaagacctgactgacctacatggtgaaaccctgtctctactaacaatacaaaaaattagccgggtgtgatggcaggcacctgtaatcccagctacttgggaggctgaggcaggagaatcgtttgaacccaggagg

SEQ ID NO: 108008 - DNA, 1465 bp, Homo sapiens
gggtggaattaaatttgtggggtaataataagtatttcctgctggttagaaattctgttacttaataaatgcagtttggttaatagtctttcaaaacatagggcttatggtggccatgaggtagggaaaaataaagaacccttgatggtgacaagcctaggaattactgctctaggccatgagtgtcccagctgtgttctgcaaaaccctcggcctcctcaacagtgacctggggtggggcaccttgcagcagcttcacttttattcattttatattatgagattttaatcaataatagcatttgaacaaaaaggttacattgctaaaacaaagcagaacaaaataacaaaaaccttatcacagtggccagtcctgtttaagctgtaatgtagaattcagcagacattttcatctttctctttaaaaaacaaataatgcaaacaacgtataagcttctcattgtgcctggtgagggatctcggtgttctccaccttcctctgtgaggattagacctagtaaggggagagtgcaggcatgtgtcctggtagcatgcgtgtgtatagatatgtttgtatctatattaggtccatggtatttagatgtatccaccaaaatgtaagaaacgtcatttgtatctcgaatatagtccggattttcttaaactcctgagtaattttgaagcatatctttttccattgtagcttctgaaagtacagagaagcttaacaactccactggcctccagagctcctcagtcagtcaaacaaagacaatgcatgttgccaccgtgttcactgatggtggcccgagaacgctgcgatctttgacggtcagtctgggacctgtgagcaagacagaaggcttccccaaggactccagaattgccacgacttcatcctcagtccttctttcaccctctgcagtggaatcgagaagaaacagtagagtaactgggaatccaggggatgaggaattcattgaaccatccacagaaaatgaatttggacttacgtctttgcgttggcaaaatgattccccaagtaagtattccatctttacttgatctattagggacatttgtaaatcattgaattttcttaggggacctcttcaagaccatttgtaatctccagagaaaagtgtgctttttaatggcactattgcattttgatggtcactcttatgagaacattgtgaagttagtcagacaggtgtcattcctcctgctttcttatagatgagaaaactacggctctgagtgtttaagtaatgggtgcctggccatttagctcactcagtagagttgagaccttagcctcagggttcttggttccatcttcttttcactctacaggatggtcttcaagctgagagccggcctactctttatgttttattttgttttgaagacaatgtctggctctgtcacccaggctagagtgcattggcatgattacggctca

SEQ ID NO: 108009 - DNA, 1025 bp, Homo sapiens
cctcctgtgcagcctggttcctaatagcccgcggaccgctaccagtccatgtcctgggtttggaggtccctgatttacatgccataaagtttaccctttgaaagtatacaattcggtgggttttagtacattcccaggattcaggaccactcgtaaatacatcctcagtttagaccacagaggtaatgtgacatacagcacacccatacgagggctagctttgtgattatatatactcgggtgagatttattttttctttcacttgaaaccaagattgaagggccaggtttccttgctgtgcccttctgcggggccggtttgtttctatttgccttacacccaaggcatagctgtgtaaagtcccagctttacacagtggtttcccgttggattccctccttgagaatcgtggctcccatctcctgattcttggcagccatcagaacagaaattcaaggtcacaaatgttgaacaggtgcctccagggcagctgccagcctcaacattagctcacttctctggattcctagtcatggttcatttttggcctcagatttgattctttacttacttgccagctcagcagtgcttttagaaatttttttaaaaaaatattttattcagcattttgagttgtttatagtggcagggttatggaggatactgcaggactgttgtctacctttcagttttgtttatggtgtgcattttttctttcttacatctttagtcacccctctaggaagagagcgcaggtcagtgtgggtcctgccctgtctgcatgtggccattcttttcccctcggagactgcactggagttccctgagctgaatgggctctgggacttccaatcctggtccttggagaggaagggaacaaagctgcttcctcaaaggccccgccacactcaccaatggctgagtctcaccttgtctgaaggttgtaatggagccaagttcattgccttccctttgctcagagctggccagctttggggcatgggttttgagtgccttctgcttc

SEQ ID NO: 108010 - DNA, 1057 bp, Homo sapiens
tttgaacacgtatgtgtggtcggcgccttcacactccttatccatttaatcctcaaaacaagcccgtgagggatgttatttgccttttacagttctggaaacagtagcctggagaggttagatcacacggtaaatggaggcggcaggattttaatagattttgaccaaatccatgtgcttgtcccacaatatcaggaggtctcagttttctcatctgtaaaatggggtaccagttgtcctagatctctaagatcctctcctgctcatcattcgtcttcctccctccctccattccttgctcttgcttttttgtagagattaggggccagcattggcgtggggaaaatatgaggagatggcagtggcaatgaggacacctattgagtaaaaattttttaaaaattttgtttgaaattacctgagacaagaccacaagtctttaaaatgacattttatatagagattgtaaattatgccctactcatatgccaatccataggttattgatgccagaggttgctgcattaattataagccaagctgaaatgaattggtgactttcttaatgggccctctcctgggaacgtggagcagtggctgacattgtgaggcagttgttatgaatacctgcccagtaggaggcgaggttaaatggtactccatgcagatgctgtcaaattgctttcatttgaacatctatgctctcttctacccactcaccattcatcaggcatagacagaaacaaagacatttctatcctgttttttcactcttcttttgttggagtgtggcagatgcctctatttgtgtcacattggactgatttgtaaatcaagatatatttacagaagccttgctatgtggaagagccgtgtgaggtgatgaggttgcagtgcctgtctgtgatgcccccagggaacattcagtcttgttggagcacacacatcaagattgtaaaaagcgaaataacgatgcatgagtgattcacaactgaagaaatgccacaggagatcatactgaccaaaggaatggtgagggtggaaatgggctgctgca

SEQ ID NO: 108011 - DNA, 1040 bp, Homo sapiens
cccagccgtaggcccctccgcgcggcgcgacccagggtgggggctcctcgcccggcgtgtgcgggaccctgagggtcggcgggtagggagggacgctttcgcagttggctggactgaggggtgtgactatcccgttctcctccaaccctttggaagaaaacttatttcctatggggtaccctgtatctcttccaccccactttaaaaaaaatggaaaggaaagggaaaaagactgcaaagcatctctcccacctccgatatctggccagccggtccccagtttcattttttccgctatacagaactggcctctccaggtacagggctcgactttctcatctaaataactgatttttaaggggttctaggacgggatattgtaaaggacaaaggatgtacgtagtttgaaacaaaacgctctactggttcgacttaaaagcaaaggaacgcggttggggttgcatggttgaacccctgcaaggcacaggctgatacaggaccatccctgagcctcctccctcccctttcctttcccaatgaactgttgctccgtggtagccaccgcctgtcccacgcagagagaaggaactgacctcttctccctgctacctttgtgtccagttctttcttatgatctggaaaaatatgccacatactgagtggaattctaaccataataccattatgaccttgggactgctgtctctttgcgctcactttctccatctgtgaaatgaaagtgatgatccctgttccttctagcctcctagtgatgatgtgacaaaatgaaagtaaaaataaatggaaagtgctttgaacaaagtcagcaacgtggtggtgttagcctttgccttcctgtgagtgacacagggcatatgctctgtccgggctattcaaataagctgggttgcttgcaacactggacattgatttggagtttccctgaaagttgagttttttgtctgcataattgacaattcatttaagtttctcatctcatgcagactttctggcacgtgaattagcttgcttcctccaac

SEQ ID NO: 108012 - DNA, 1044 bp, Homo sapiens
taaactgagaatgcagagctgaatagaacatgacatagctctgaaagccctgttgtgcctgaaaggatgaggcaggatcatgcatttgtttattgccaggcccctttcccctcagccatttcaattgccagaggaaggaatcagaggagctattctccctccatctttctccttcatcagtttctggttgatacctgagacaggtctaacacgagctaactttcagagtcagaaggtagcaaagaccatctctcattagacaaaagccaacctgccctagcagtcccggtggtcacacctggaagccaagaataccagatgtctagttctcccactctaacaccttacatctgaaaaagaggggagagctgagcttccagttgccccagatgacatatctggacagttgtgccttgagcatcagaggaccttcctctccactctgtctctctcttctctttctttctcagatccttggctggtgggaggccataaacacttctttcttccttctgcaagagcaagccctgggagatgtcttttaggctaagttacaaaattggggaagaggagctcataggtatattttcctaaaaaacagtagagagttgatagcaatttggcagccaaatctttggctattttttagatttcttcctgaagtccaggctccaagaacaagatgtctggagaagatccacttctttctatacccacatgtgcaacccctgggtctccctgttgggggtgagtaacttcatcttgatctcagttgttcttgggacagagttcaggtggacacatgtgtgatcttgggctgtgggggaggaaagatggagggcctaattagaagcaatgtgatttgcctgttgtattagaatttagatgagactacatatggcaagattacatttaatgactgcttattttaatcaataatttcctttttaaataattgtctatgataacttctgggttactaaattttaaggtacgctaagttatcatactttcatcctaatttgtttcttatagggaggaatg

SEQ ID NO: 108013 - DNA, 1082 bp, Homo sapiens
gcctcctgagtagctgggattacagatgcccaccaccatgctcagctaattttttatttttagtagagatggggtttcaccatgttggccaggctggtctcaaactcctgaccttaggggttctgcatgcctcagcctcccaaagtgctgggattacaggcatgagccactgtacctggcctttagtttatatttctctgttggtattctttatttttaaagtcattgtcatccgaatttttttctcattaacattatcgttttctttaattctttaaatatatttttaacagctgctttgaagtttgaagtctttgtctgctaaatacaacacatgaacctactcagttagtttcttttacttgatgtttttctttcctgagcatggatcacagttttctgggttttttgcatgtcttgtaatttttcgttgaaaactagacaatttaaataatgtattgtagcaactctttattctgatatatatttctgagtttttggttttttgtttattttagtaaattgcctggatttcaactgtggcatctgcctcccccgtggtgtgtggctgctgatatcgttagtcagctttttattcttatgtgtttagccttgcttcctaggagttgccccctgtgtctgcatagcccttaaggctctgcatagcccttaaggctctgctctctgccagtggatctgtgtgtcacttgggaagcatagtcaaaactggatccaattagttccccattctcctctgggttttatgttttgccaggttctttcaggcctccccaggcgtgggcgtagttttctagtcatccagggaaatgtggggaggttatctagtctttctatggtgctctcatttccaggatctccccattaaatttctgctggtcttctgctcaccctagctgggtctgcactttcaggctagcaaggattttccccattcatttttctactgtgcttatcatatttagcatataaagccacagccttttgccctggcttcaaatcaactttgcccctctgacagcaaactgctggtttctgaccagcttcatgcttaatgggagcag

SEQ ID NO: 108014 - DNA, 1033 bp, Homo sapiens
ggtcgctgtccagctgcctagtcttagaaatgtcataggtgttgctgaccattccctctctcccactccctgctgcctttactttggtgcagacgctcatcatcttgtacctggactcttgctaagtctccaagactctcccgcatcccatttctccttcatgctgcccactgaatgatctttctaaaataaaactctcatcatgtctctcttacttaaaaatgcttgctggaatttaaccccttccgtgtaaagtcccagatagggtgtacgatgcaaggttcttcgcaatgcagccctaacctacgttcctggccacacttctcatgacaacccatgcactgtacgttccgctttcacccaaactgatgtcctaaacacaccatgttctttattccttcctgccttcatacaccctgttctgcctcctccgattgcttcacctcccccttctccatctggaaaactctgacatcatttaaaatccatctgacttttaagacccactttcaccccttttggagaaggattctctgatgtcttccactgtgcaaccataacatttgattcatattagtaatataaactattatctcatatttatatcacatcatatttatatcacatttgttcacacatttgtctttaggtttatttgtctatcttaaggaaataaatattaaactcatttctttgccactagattgtcagattcctttgttttcaaactatgtctttttacctctgtactcgtcacaatattcccatacagtacacataatgtagcaaacactcagtaaagcctacttgaattgatgagcaattgagcaaattttggctaaaacattgaagcattgatcaaatagaaagagttaaactattataagaacctaatcgttgacaaaccagatgctataaaataataataatcaaatcacaatggaataaatattcctgaaagcatggattttaaaaattaacttgaggctgtattttataccttatatacacaagaattatttatttacaacag

SEQ ID NO: 108015 - DNA, 1050 bp, Homo sapiens
aagaggcggaggttgcaatgagctgagatcacatcactgcagtccagcctgggcaacagagccagacccggtctcaaaaaaagaaaaaaaaaaaaaagttgctaatgcaactaatatctgtggagcttactgcatgtcagtctgtgtgaagcatttcgcatgcatgaactaatcccatgagtaggatattattatctcaagtttatagatgaataatcacatggggagaagtggctgagtcattatgagttgtgtttctagcctgtaacttctgaaatctctgaagcgttctatctgaaattttatggtcctgcatgttatttttgttcctgcagaaggggccaaacaaaacacccgtggctgccatctgcctgaccagcttggtgaccatggcctttgtttttgtgggtcaagtgaacgttctggcccccatcgtcaccatcaacttcatgctgacatacgttgcagtggactactcttacttctccctgtccatgtgttcctgcagcctgaccccggtgcctgagccggtgctcagggagggcgcagaaggcctccactgctctgagcacctgctcttagagaaagctcccagttacggctctgagggacctgcccaaagagtcttggagggcacgctactggaattcaccaaggacatggatcagctcctccagctaaccaggaagcttgagagtagccagcccaggcaaggagagggtaacaggaccccagaaagtcagaagaggaaaagcaagaaggccaccaagcagaccctacaagatagcttcctcttggacctcaaatcccctccttctttccctgtcgagatctctgacaggttgcccgctgcctcctgggaggggcaggagtcctgctggaacaagcagacttccaagagcgaagggactcagcctgagggaacatatggagagcaacttgttcctgagctgtgcaaccaatcagagtccagtggagaaggtgagtgctctggtatcacactggggcctcttatttggggatgaccactgattatcctacctacccagt

SEQ ID NO: 108016 - DNA, 1037 bp, Homo sapiens
gcttctcacacaggtatccctcatgggcttcctgttccttttgggcttatacatctcgtccctggcttcctgcatgggaggactttatggagctccccgcatcctgcagtgcattgcccaggagaaagtgatccctgcacttgcctgtctgggacaaggggtgagtaatcctctttttttggtttgttttttgaaacatgttttgctgctaacctcactgttggcccatcaattggttaagcttttctgatcagagcctctggtcaatttctttggggtgacacagaaaataatgcagaggtcatttctttcagccctgtcctctggctggcttaggttagggctaagtagatgaagcatcttaaatgtcccagccacccagccccttagcacttttaggactgggttagctaaccagtcctagtaccatcttggaccctgagcagcatgaaaatgcagtgccccatcctttaatgaaaatgaattcaggatcctccaggtttagcatagaagaaagcgtgttttggtcaggaggcgagctggtccttgcagctctaactctgcccttgagtttcaaccgccccttgggggttgctgtttgatgatttcctacacctctggcgtctacacttcctgttaaccatcatgaaccaaaccttaactgatacataaagggcagctcagttgagacatggctggaatgattaaaatagacattcctaaagtccaggggaggaccaaagagacataaacagagaatcccatttcccactaatatggtttgcaagctagagttcatttttgtcttgttggggtaccccagagggcctccccagccgcttccaattttcagcctctctctggtttagggaacacatcgttgcaacttatccttgatttcttcctttatcttcctccaaaaatgcagtttggttttggacatagtccgtttgagatcctattagacgttcactggaaatgttgagtaggcagttggatatgtaaacctgggtttcaggggaatgttttaggctgga

SEQ ID NO: 108017 - DNA, 1054 bp, Homo sapiens
tcctcctgagcctcctccaacccacaaaggtgcctttcacgccacagggatgcctccctagttgccaggggagattgaaaagcagcctatgcgcagagctgcagctggagggcttgcggtgggacagcttccaggagagggtcccgcaggagaggaaggggcagccctggggaaggcgatgcgtggaggaggctgctcaccccattccccatctgggtgtctttcaggagtcatggccggcttcaacatggggggcgacctcagggagcctgccgccagcattcccccgggctccctggcagctgttggcatctcgtaagttcccctcatggcaatcagtctgagctagagagtgggagagaaaaccccaggcagaagagggattgccccttttgttctgagagtgccccgactgtgaccaatctatttcatattccgatccttcttttaacactcggtgggctggaaaattcacgtctggtgggttcagacactgccctttcatgcgccctgcctgggaatgctgccgaggaggagtgtcgggacccagatcacagatcgaatcctttctttcctttcctcggcctcccgcccccgtccctcccccacccccattttgaacttggggatttttttaaccaccgagtttccaggatcactggagggagcataaagatgaagagttttgcaatcagacgaattggggctgcatctcagctctgccgctgattggctgcatgactctggacaatttactgagttctctgagcctccatttcctttcttgtgaaatggggataatgacactgtatgtgcttcctagattgcggcggggagagaaggcacacagtggaagctcagcacccagctcttcttcttcccccagtgagcctcccctccagctcccccaggccgtcaggcctctggggttttagttcacactgtgccacccacacaagcaggctgggtaaccttgggtctatttctgaccttttagaatattgtttctctctgtaccacaggaagaagcttctctgcccttcattgggtaggt

SEQ ID NO: 108018 - DNA, 1078 bp, Homo sapiens
tatcccaagggcaggcagcttcctgggaagagcggctggagattcggtctggtgctcctctggatttaggaagctgtccccctgccccctcactgcactcttctccattacaccctgtgctggtggctgcaggggtggagtggggggagcttggagtggatgctgtacttgctttgcttcttaaagtgcattccttctcaaagtgcattccttctccaagctccactaccaaactttccctgagaagcagacatctcctctccagggtttcacacataccatgtggatgcagccactccagggatccaggaacacgattcacagaggaactaggaaatggaaattcactgaaaagaatatcagtcatgtgaagtcctgtaacccttgttcccagattctaaactcttactggaagggataagggcctctttggccacagccaacacatgggcctgtggttgaccacacccagcacgaaaaaatgtggtaggaaacctacagcctttactgaaatgtccacagtcaccttccttttcaagaacccagctatttctgtgatgccctttgacctccctgggcctgactcctctctcctgctcatgtacacaccctgggaagctctgggaatttgctgggccctccaattggctggctgtctccaggcccctcagcccggctgttagtgctcacccctcctctggcctacttcccccattcccccctcctaggcgtcccctgggtctcctcacaagttatgtgtcttgtgagtgagaggacaagaacctgctggatcagaatggggttcccatgtttaaggactagagagccccaagtagggacagtctgaagatgggggctcactccactcccttcattctgatggacttatgggcagaaacaggagacaagaaggaagctttggctgggtgcagtggctcaagcctgtagtcccagctactcgggaggctgaggcaggaaaattgcttgaacctgggaggcagaggttgcggtgagccaagattgcatcactgcactccagcctgggtgtcagagtgagaccctgtcttaaaaaaaaaaa

SEQ ID NO: 108019 - DNA, 1163 bp, Homo sapiens
gcccagcttcgacccccgagtctgctcccactctgtgactctgtgagcaggagggatgggctggcccgactccctggctgggcgttccgggtatggatgcctgccacatgcagtcaccagctggggagggcccttccacacttctgagcctcgcccgcctcagccctgagcagctgggagttccgaggaagcgatgggtgaccgctgaggggtgggccgacacatcctgcctgtgcccccccgctgctggtttgtgttcctctcactgcacgtggcaggtgtcccctggctgtggggaatttgcagattactctccatgtgactgtagaagcgtccctgaaggcacttctggcttcaccattttgggggtacctcctggggtaggaggcaggatggtgggtctgtataaagcacaaagtgggatatgtgccctcaagtcactcacatttgggtggggagcaaggcagccagctacagacccagagaacaaggcaggaagtcctgggctgacagtgggcatgcagagagtgggctctgtggtgcgagcagcctgtgagtgctggccgagggttgggggtgggagtgaacccagaggtggagctggcaggagagtgccgcctcctgaggctggcaggagatgatgccccaaattgcaaatttgaaagttaaataatatacaaaggacccacgtgggccccccaccccactcttctccccactaccctcactccagggcccagacaaggccagtgctagagcttccaggcctgctcgcaatccaacttacatgtccctcttgcctggatcttcatgctccctggggactgaggcatgcaccttcatcttcagggacgtgttttgaagaaatattgaggcctctgccacagggttgacctaaccccaacacataggtgcccacaccccaggccagcactaggcaatggggcagcctctagacatctccctggggattgcatttgcctttaaatctctgggccccatagcgagttggcaagtggctgtccttgttggcctaatgtgaaagattgcatcacatatactacagttgtcagagacatggctttggagtcagacctccaggttcaagctccagctcagctataatttgctgcatagaattggtcaaggtagttaacctctct

SEQ ID NO: 108020 - DNA, 1008 bp, Homo sapiens
gtgttctactgttttccccattcttatggatttatatccttttaaaaatctctttaatgggtgcggtggctcttgcctctaatcccagcactttgggagaccaaggggggaggattgcttgagtccaggggtttgagactagcctgggcaacatagtgagaccccacctctaaaaaaaaaagttctttgatatatattagcaggatgtggggagggaacgaaattaggtacatgtattcagtctgccatcttaactgataagtctggtattaatatttttcaatgacaaactaaccatacttaaaaaatttttaattagagaattttattatttcctctccaaaaagtatcatttttcatttagaaaggtgtattcgtatatctctttgtgagagatcattgtctgtcttgctctggcaaactttacagtcctagattcaggactgtgatcactgtgaattctacccctgattctagggaccatttgtggaaatctgaatagtgctttgtaaacagatttctgagtctttttgaagccatttgggatggtatcatggaagagatatgaagaaggtattttctcttggtgggttgctgcaatatgatttctgacttagtgtcatcataaatatttgagactacttgttatcttcagtaggtgttaccttatgggctgatacttaatcacagcagtcagaaactgtgaatttgcatggtgacacccttccaaagtgactgtaagagccttcctccctgacttttgaggatttgcaaacagcagagaagcaagtttttaggtatcactccagggaaaatagtgatttcatgcttgaaatatgtgggaacaatatctaaagaaaaagcttaagttgtctaaagaggatcttataatagttggatacacttataattagaaaagcccactgggggcccaggcactgtggctcacacctataatcccagcactttgggaggccgaggtgggcagatcacttgaggtcaggagtt

SEQ ID NO: 108021 - DNA, 1056 bp, Homo sapiens
tttctttcttcccatccctttctgactctgactctttttcctcttcctctttttctggttctgatctctttccctctgcctgtatccctagctggacccttggtatgagctactggataggggtttctggccaggcctgggatccttcctcttactgccctcattcctctttgtgaatcaccattatgtatgttagttactacctaggtaggtacttgttgtattgcagatgctgataatgagcaggtgtttggaggatccagagtgggtagcattgatgatttagtcttgaaaagtttactcatttgctaggtccaagcgcaacataggccaattaccatgtcccgcctgccacttggctgtgacaagaaagttcttaagaccaaaaacaatctgaatctggaagtcctcgctggtgctaagggagggatgaaacccaggaggtggagttggggctggtggatctgcaccacgctcctgttgcttccaccctccgttggctttgtctctggtgacgtgatctaagggaccctgctgatgggattgatactgggatcgcagaaaggtggtttcactgggggctccaggagtcccaggtgccagggttgctccatgagtggcctgtctcagcaacatgagagccttgaggactggaatctatctcagtcaactctgtgtcctccaacaccagcacggggcttgctgtgggcaggggctcaataggtttgctaagtgaatgaattaaggatgaatcaaaaacagtaaaagaagtacaagagaaaggctctggaacccacatggaggtgtggagaaccctagccccttagctgcttatctgcagtcgcctgggcgatggatactccccaggcctccctccagagaggcgccaaccttcctgtgttggcagcagttcgcaggtattccgtctacacagaatggcagaggatcgcacaatgcctgtgtggaggcccagcccagggtggggccagcttgcaagcccagtcagaccttcttgggaagaaggaaggaaggaagggttgcaactgagaagaaact

SEQ ID NO: 108022 - DNA, 1088 bp, Homo sapiens
aaaatcttctgttggaaaactgtcactcccctgaactccctgagtatcccctaccctctggcatcctagtccctctccaggaaccttcagatgccccaacgatccggcacctaaagggttaaccccagggcccactctaatgctcagggccaatgtgatgtccatactgatcacctggagcccaggctttgcagcttgctaaatatttgacgcatctccaggaaggaaacagtgatttttttttttttttcctggccatgtaccaccctgcagagatggcccgcatatggagggagacttgctggcctttggctcatcaaactgtcagtgaaggaaagacagagtccactcaggtccctgattccttgtacttccccctccagtgacacggttgctggaagagctcaattagtgaaattgcaaggccgtgctactggcttctttgaaacctcacactagcctgatgtattttccttcttcttgattagaagttcttggctgctcttctaagttactccaaatatttttccttccttctggtcaatacattagtagagtgtagtgtgagatgaaatttattttcaatcattcccatagcaactggctcctcaagaatctgtttttggtatcactgatgtttcatatgggatattttctttgtggttaaaaatccaaactgaaaccaaactataaaccttcaaaatgaatttaacagagtgatttcaactcttaaaaaatgaggacatatacatagacatttgaaaaaaagactggaaggaactatgcataatagcaactatctttctgttgagattatatgtggctaaattatcttatttctacttttccttcaaatgaccagtgttacttttttaaaaaaaattaattcacttttagagcagttttaggtttatggaaaattaagcagatagtacaaaagttcccacataccccttttctctctcccccaccacagtttcccctattattaatatcctgtgttaatgtggtacatttactggaagtgatgaaccaatattgatatgttattgctaatagtttagggttcactcagtattatacattct

SEQ ID NO: 108023 - DNA, 1054 bp, Homo sapiens
acaggacaacaaatcctaatcttttgggttatatgttccactggacagaagttatttgcatctgtactggaaaaaaatccataaggtaacatgtaactttattaaatctggggcatataatgcatttaatcaacagcaaatagtgagtaaaatgaagtacattcacctagatagtccttgggtagcctttgccacatatgacgttgaaaaagacgtgccactcacttttttttttgctaagttttagataattttaaaaataatactgacctatagagaaatgaagaaaaatctggtttactgcagtgtccttttaaggctctgtagatgggaccccctgtgtgttcttgttctatatttagttcttgaataactcggactgagaaatccggaggcctctttagcccagtgtcccatcttcttcctcccatagtcttttcatctttgttatcactgacagccagctctcagcttgggttcctccttcattctttagttgagatgtagacaagtagaaatggggcctgaggcaggttcacgggtgggaagggctggtttaaccctgcactggtcccaggcactgtgccttggtgccagtgagtgtgtccgatgggggtgcagggttctcagcgctgggcggttctgcccatgggcccatggctttctgtcctgctgactcttctacctggaatcgcatgtcagtgtgttgcaggtgccatgtatatcaccggctttgctgaatccatctcggatttgctgggcctcgggaatatctgggctgtgcgaggaatttcagttgcggtgcttctggccttgctgggcattaacctcgcaggtgtcaaatggataatccgcctccagctgctgttgctgttcctgctggccgtgtccacactggactttgtggtgggttctttcacccacctggacccaggtaagcctttcagagtccagtatgtggccttatggatcttcactgctttagagatgtttgtaggtgtgagtttgcccaccccatctccccctaacccccataggctttacctacaattgg

SEQ ID NO: 108024 - DNA, 1120 bp, Homo sapiens
gcacacaaagtgcctccagacagaggcccctggaacaaggcttggcctgccagaagttcggtgggtctccaaacacacactcacattcccaaaccactccagactcacccaggcctagaaagcacacatcatcctcaatagactgcccacccagcaggttgtctggaacaatgtcccacattctggtgttggcccaaggtatgattttgggtttgagactcctgccttatgtcttctgcctgactcagctgtgctgagtcatgcattgatttgccaatggatccttctgctcatttataccactaccccctggattaaatacatactccccttagtttaattattagccatttatataatataagctgaatgctgaccaggaaccaagcactataccaaatatttacacaaattatctcttttaattgtcttcattctctatggtagtttcaatcactgggcagtcattttgtaggtgaggaaacggaggcttagtgaggttacgaaacttgttcaaggtcacaaagtattagagccaggacttgacccaggcagcacatgcaccctcgaccaccacaccattaacactcagatctacagctccttcccagctggttcacttattactgaccaatctacacacacacacacacacacacacacacacacacacacacacacagagagagagagagagagagagagagagagagagctaccctatctggtcctaaaatgattaaagccaaaccaagagtccattcattcaccctccacctaacttccaagtgtccccacccttgccaaacttcctgtgagccactttctaatcaccgtgaccaagagaagagcaggtcaagactgaaggtggcatgacacccactagcctgtcttcccactgggcactgcctcctaatcttgtgttctgcaggccccaaagctcctagcagaatttctgatccccaagactggaataaaattgttcaaaggttcccaggaaatttcttgagggctagccactcctagagttcagcttccagcattttagccacctaacttactctctgttcccacgcagaggtccttaatttgccatctgggtggctttgcttataccatt

SEQ ID NO: 108025 - DNA, 2148 bp, Homo sapiens
gagacacttgcagagtgccagctaggttagatcttttgccgcttctttcatttgattaatttgggtttttaaagggctgtttaaaaaaaaaaaaaaaaggccgggaaactttaaaagtaggcattactgtagtactgcatttcttagaacattttaaactagaactcatttttttttcacagtatatttacttgaagaagcactataataatcattgagaagtattttgagtctgaaatttaatttaattttccgtttcaaattgctttatttcagggaaataattttccagttgttttgctatattctgcaaataaaaaccgtgtttccttttttcacttaaactttggtaggaaacaaactaaagcagacaaacatttcttgttatgtttgttgctttctttaatccaatggataaaaaagtaaaaccctgtaaacattattttatttttttatgcaataccatgctgtaaatatggttcatcaaataaggatgtacctatgattgaatctttaattctgcacagttagagtttatatataaacgtgtcttgacaatcaaggacttttatgtgagtcttcctttatgatgtttattaatgttatgcattccatttgttttgaagtgagtaccaatgtgctaatttgtattgtctgaaagtatgtaatgtttttacagcttgtttttaagaatctgtaaatatgtacaaacaaatcacagtactgctttatgttagaaggcatatgatgttgtactgtatgtaagcaataatacatagcagtgctaactttacaagtagcatcaggaaagttctaaaaacatttcagagttattaattatccttatttcatttaataatgattatctttaatcagtttttataagcaaattccattgttcctcctattggaacgtaacactgtttacacagcataattgaagttgcaggggagacaggctaaatctgacttcatctgtactcactttcactaagcattgaatggccttaccactcttctgcaagatggaggaagaccgcaaaacttagtgcccatcacactgaaggaagggatgtggttttttttcctgcttctgtactgctacctaactttgtgatttgctttggattttaatatttgtttctgttttagattcaagcccgtaagttttgaggtgacttcagctccattgtgaaatagatagttctcttcatatttcataactacatttcaataattctaaactttctacattgatttttagatacttatttttcaagcttggtttctcagctgatcagatgaatttattcaacttcaatacaaagaaagacaaacctattatagtttcaagtgagtagatattatactgtacaggacagctatttgaacacacacatcactgctttagaaataaaaccgccaatttataaatgtatatgacctacattttataggaaaaaatgtttttaaatgctagtcatttatataatgtgctttgaaggatttgctagtccacttctgtcactttttagtacactggtatcttttatatgtaatgtatgctttttattattgtagcaaagcatttcagtagaaagaattttgcaacaatatgggggaaatttttcattgttggatttgaattatactggattttatctgtgtagtcttacttgtctttattttaatgctgtctgaagggaacttggtatccaaataaagcaggtaacctcattttacttcaagggcatactgtgtagtgctgaatttaatctgaaaatctgatgattttgaaaagaaaaacaagtttataaacattgtacagaagaaattaaatgtgtgtgatggaaatcctgatggtggagcacgttgaattttctgatatatagtgttattttcctgggatcccctatgccttctttgtatttcaactaataaaggaaaaaccctgtcattaaaactggtaagataataggatattctgattatacagtattactattcctatcccattttctgaccttttctcaatcactgtaaatttttattttctatttcctattgataattaaatatgtacataatatagacactgttgtatagaactaaatgaattgggttgctatgcttgagtgggtagtgaaa

SEQ ID NO: 108026 - DNA, 2111 bp, Homo sapiens
atactttacagacagagtgaacttaaaagtttaatgtcaagagattatggcttaaataaattagtgtgtcctatagggggaaaaaaaccaagaaaccaccttttaaaaagaatgatatgccatatacccttgattttcattttgcattatattgacgtgtttttttgaaggaaaaaaagtaataaaaatctgatagtctaagactccactatttaaaagcctaattactttaaaaatatgcatactttcagaacttttaccaaaacacacaactgttgaagcagtcacttctctatggaagtatgcatattggtgtcagtttctttgtacagttgtacttagatattttttatgatttttcatgtgcaggtatcaaggttttgaagttttagtaaaagaaattctgtagattacattcccaagaacataatgcttacacaaaatgtatattccacgttttaaagcttaattgtattttactttacatatacacttcagttaacatagagcacttagaatctatttggtatttttgatttctcaaagtaaaaaaaaaattagatttttaggtttgatatggttgtgtcataatcatctcgtaattgacaattttaacttttggcaataaaaggaaattgggatatctttggaactgtaaaacctggtttaatctttttctttctagactcttgatagattggataattaaacagtatccagagaaactaaagaaatgggcattttaattgcatattttatcttgagttactttttaatgaacactgctcattacaactttacaaaccaaaagtgtttactaattccagtaactaccatttctttttcagctagatgagtgatcggaaaatttttgttgcatttcaaaatctaaataaactacagactttatccttataccatgaatgtttttttttaatactctgtcttaaaataatacagcatggtacaataaatagtgcttttatgtatatatacacacacacacttttctgaagaatgatggtttgagttatgcgttgggcagttttgatttttggaagttatattagttattgactctttgttacaactttttcatttttacattttaaattttctgccatcgttgtcacaatgcacatcctgatatagcaccagtgaaaatctaaaattaatacccttggaaaatgaaaatattcttaatttccattttgactcttatactggccctatagctctgcagtctttgtttcaatatagaatatgttatccatttaaattattttttcttttatttaatgttatcccaagactgttctcataaagaaagggaagaaataactatccacccttaacatccttcatttattttgaatatattggtgtttttatgataaggaatataaattatatttaatgtggtttcctgtatactttggttattaagttttgcttgaaatagtagttttcccgtttgacagctttctttgctgccaaagttttcaagaatttaagacttctttgaagtaaatatttaagttctgccattattgactcttaagattgtgtgtgttgtgttgtgcattacataattacaaaaaggcttcattcaggtgatacgttaaaaatggaactgtgctcaccctaaataggcattggtatttttctcttttggtgagagtaggcatttatttcttgagttgttttggagcctgatcaaaaattttgttcatggagaacttgatgcaattttgatacagtggagaggtttttttcggttgttttaacatcaccagcatagtttttagaatgtgactcttgctgagcatttagggtgagcttgggaaggaaggcctttgaaaatggtagttatgcaagcagactttcaggtgttgcattcctgttttcaacacatttctttaaatctacataatggcagacttttctaccaggttataagcagtttttagataagtgatactcagccagcataacttattgacttaccatttacgtatagtcatcactctcttactgtgaaattccaaatgcctaccagagttaccttgttctatcataatatgacaaacatctcaacagttttggatttc

SEQ ID NO: 108027 - DNA, 1621 bp, Homo sapiens
gctagtctgttcatattgctataaattcctggcactgctgttctccttggaaagagggtattacatacgcacataacaaaaagacaggaaaatggactgtgcctgtattcatccttttctttccaatagcatatgctaatccttttcatttttataaagcaaaatatatttgacaaatgaaattggaagttacaactttcaaaagccatttattttagagattcttatggcaaagcaattcattattttacaatatttgttttgttttaaactttctatattatgtgctaggtgaaaaaccatttcgctgtgatgaatgtggtatgagattcatacaaaaatatcatatggaaaggcataagagaactcatagtggagaaaaaccttaccagtgtgaatactgtttacaggtaagagagatggcttgaaattcttctactgtaattaaattatacaataattataaattagattagaaaatattacaacttagagctatttaaggggccttctaactcttacagattagatttataatagaaaattggctcagtgaatttgtttggaattatgtatgttattgcattaatatatctttatattaattgttttgtttcactttttcttttcttggttgaccaaaaccacaaacaacccactaccatcctctgaattcaacagtatttttccagaacagatcgtgtattgaaacataaacgtatgtgccatgaaaatcatgacaaaaaactaaatagatgtgccatcaaaggtggccttctgacatctgaggaagattctggcttttctacatcaccaaaagacaactcactgccaaaaaagaaaaggcagaaaacggagaaaaaatcatctggaatggacaaagagagtgctttggacaaatctgacctgaaaaaagacaaaaatgattacttgcctctttattcttcaagtactaaagtaaaagatgagtatatggttgcagaatatgctgttgaaatgccacattcgtcagttgggggctcgcatttagaagatgcgtcaggagaaatacacccacctaagttagttctcaaaaaaattaatagtaagagaagtctgaaacagccactggagcaaaatcaaacaatttcacctttatccacatatgaagagagcaaagtttcaaagtatgcttttgaacttgtggataaacaggctttactggactcagaaggcaatgctgacattgatcaggttgataatttgcaggaggggcccagtaaacctgtgcatagtagtactaattatgatgatgccatgcagtttttgaagaagaagcggtatcttcaagcagcaagtaacaacagcagggaatatgcgctgaatgtgggtaccatagcttctcagccttctgtaacacaagcagctgtggcaagtgtcattgatgaaagtaccacggcatccatattagagtcacaggcactgaatgtggagattaagagtaatcatgacaaaaatgttattccagatgaggtactgcagactctgttggatcattattcccacaaagctaatggacagcatgagatatccttcagtgttgcagatactgaagtgacttctagcatatcaataaattctt

SEQ ID NO: 108028 - DNA, 1085 bp, Homo sapiens
taagctgggcatggtggtgcatgcctgtaatgccagctactcaggaggctgaggcaggagaatcacttaaaccagggaggtggaggttgcagtgagccgagatggcaccattgtcctccagcctgggggacaagagcgaaactccgtctcagaaaaaaaaaaacaaaaaagatttctgaagagacttggttgtattggtgacctgagtgtgatttacaagaaccattttgatatggtgggtcattgcagcagccggatggaatggtttgaagagggaaaggaaggtttgcagttgccaaaaatcagattagtatgtcaaaccatagtgagctagattatacataaatcttatgtctttataactctctcatatatagtttaccttaacagttacccatatattatagtaaaaatttttatccataaacagctgattgtgtgcaatgtcagagttaccagggagaaacatcacattggggaaacagtctcactggaaaactgttagaagagaaactttagggcccttgggtaggggaaaattatcattttgtgggacacctggagattgtttttttccttaccgtgttattgctttcctggatgtaaaaaacatttaaaatttcttgatacttttcagataagctttttgtgtcattcttgaaatcactcaagtgctgtatagatttatcttccttttccagtagagaggctttagccctcaaggggaaaaatgataaagggattttctcaataagggaatttttcatttaagtgtttttatttttctcaggaaaaatagatatcagtcattttattcttatttcaagaatcaagaaacaggtcagacgtggtagttcatgtctgtaatcacaatactttgggaggctgagttgggaggatcacttgaggccaggaattcgagaccagtctggacaccgtaacaagaccctgtctctataaaaaaaattttcttaattagctgggcatggtggtgcatgcctgtggtcctggctacttgggaggctgaagttggggaggatcacttgagcccaggagttcacggctgcagtgagctatgattgtgt

SEQ ID NO: 108029 - DNA, 2330 bp, Homo sapiens
gagactctgtctcaaaaaaaaaagttttcctgctctcatttgctgtttcatcctaagaaacttgagaaatagactactttaaatattacagtgtatataaatgtgtaatttcataactctgcaaaagaaaacccagaaaaaataattttttaaactttctttttggggagggaggagttagtgaccccaatctgttattttacaaaatgggcaaacattgccaatctttctgaagtttgaaatgcagaatttgaagtttctcactgccctgcgttctagggaaagaaaaccattctatactagaaaggtgttatttaaaaagtttgatacccagaaaaattaattatttcattagttaccataatgcctgtgagttttttgccactttgatttaactgacattgacatgtctttgtgttagtgttgcagcttctcagtttttatattctacttcattggttgtaatttagtctcagatgatttcctataggatgtaatttcctgcatagtatatgggttctacttagcctgataaatgatctttccaacctcctggaagcactatatgccaaagatattctgatattttctaaagttttaaggaaaattattgggtatgtagttattagtccatggatttattttagtaattgtcattgtttcaccttttctcaagtttattgttcagcttaaggatattttcatttaggatatatagcccagacactgggttataattataatcaatatgtaagtatggttataattataatcagtatgtacgtataatcaatatgtaagtaatcatttgttatcaacctcctcattcctgttcttaatagctaacattttttgagctgttatactactgtgctaggcttctttcttaaattcctacttcacattaattatctcatttaacatttggctctgaggtatattctattatttccattttgcagatgagaatataaagtcgtagaagtttaaatacatgcttatttctcacagtaagaaatgctgagaccagcattaaaactcagctcatctggctgtagaacctgtactcttaagtactattttatgttgcatcacataatggtacatgatctttttttggttagtgtaatagttatgatgcttgaaaattttattgtctaccctttgtaatttattaaatatggatgtttccttgtgttgtcaagtgtgtttattatgccatgttaactttgtcatagtctcatcattatttttcacccagattttatgaagaccctttattattaaaataattttcacatatattctgattaatacaacagtggataccattttttgagtattaagtgctttacatttgctgtcataacaaagaattgatttggggaagttttgtagaaaaaaatcagcagaaaatgattatggaggtaagaaaaaagcatggtagtttaggaatagaaagaaagccactttgattagagctcagaaagcagagtggggaattgcgaagacaggtcagacacaagaaaggtaggggccagaagaatagaggaccctgttttaatttttattcttagaacagcagaagaccaatagtatgctttaaacatgatcagatttacttaaataaacagaggctggctgtaatgtggaattagaagaagataatagatcccagagaaactactccttaggaggatattatgtgataggctagaccacaggatgatggtgtcttgacctttgggtgatgacagtgggaagtggagagaagtgaacagatttgataggtatttagtaggctgaatcagtagggcctgtcaattgtccaaatatggagagaggataaagaagaaaaaagctgtacagttctctcatttgtgcagtttagaggggagaggagtgccatttgtggcataagctgtaagttgaagattgtattagtccattctcacattgctgtaaggacatacccaagactggtaatttataaagaaaagaggtttaattgactcacagttccacatggctggggaggcatcaggaaacttgcaatcatggtggaaggggaagaggcaagtcttacgtggtggcaggtgagagaaagcgagcaagagcaggaaaattgttttagaaagcagtcagatctcgtgagaactcactatcaggagaacggcatgaggggaaatgcccccatgatccagtcacctctcacctggtccctctttgacacatggggattatggggattacaatttgagatgaaatttgggtgcggaacagagccaaaccatgtcacagtccctaagtttattgtgggatatgatgta

SEQ ID NO: 108030 - DNA, 1068 bp, Homo sapiens
acactttaagaaatagacctcttgcagcagaacacttcgtgttcctggaacctgtagtgcttgtttattctttttagatatttaattgacagccaaatccagaagagatagctgctgaatttgtcactaattctgagtctgattctctcgtttctttgcataaaagtagtgttaatgctctgtgctcaaattagagcacctaaaccatgtttctgaaatacagtgtatatgaaattaaagtgtaagttgcagctagtataaaaaaagcaaatcattttattgtggcagaataatagtgacatcgtatgggtgggcaaaaagccacaggaccctgattaggaaaatgattttagtcatgaaaaaagtatgctttctgagagaatggtccttcatcttttataccctagttaatttttttaaagggaagaaagccgatgtgcatttttacagttctatatgaagagtaagctgatgatgggtttcttttaaggggactcaacatagagttatcagatttggtaagtccattatgggcttaatgtagccttcactgctgagctcttattatagggcacttgttttcaggaggtagctggaaattggggggcttatatcaagttcagaaatagacatgactaatttaaaatgttagaagtcaggatactttttagtaaacattgtttttaaaaatctgttgtacgttttgggattctaactcatttgtgtttggtaagaattcactggtgcctacatatccagccattttactaattttacatacgtcatatttagatggtgtttacagtaactgctgttgctttaatttaggtcttgtactgcataggtgccatcattggaacatcaattatttagtgttaatatgcttagatgctagtaccagttgtgtaccgagtgtataactggctgatagaaaagtgagatgtggaagtgtcataaatatatggtgttcagcttattttggaattaggacaatggtttttttgttttgttttgtatttttcatgtatacttcctagatcaactctcagatctttaatttgtgcatag

SEQ ID NO: 108031 - DNA, 1049 bp, Homo sapiens
tgtttcatacattctcctttccataaacctccaacacttcccccaccctgtatcaatcactgagcaaattgaagtaatcagacgagaaattcagtaagtttgtagtacttctgcttatcaataaatcaggaagttttgatcttttggagaaacatgggcaaatagtgatttattttattttgcaaaaaagctcaggattttttccaatgttttgtttaagtatgtttaggtatgtataggtagtttaaatcttcgttttccatgaagggaaatatgtgttgttgacctcagacttcttttaatgtacaatttacatacaataagctttaccatttttagtgtatagttctgtgcgtgttgacagttttgtaactactaccacagtcaagatacagactagttctgtcactccccaagggtcccttgcactttttgaagtgagcccctctcctaccaacaccccatgacaaacactgataagatttttgtctctgtagttttgcctcttccagaacatcatataaattgaattatatggtatgtagctttttgaatctgacttacttcacttagtatagtgcatttgaaagtcatctgtgttgatgcaccaataattcattgctttttattgctgagtagtattccattgggaaaataccttggagtgatattgctgggtcatatgatagatggacaggcatacctcattttattgcacttcactttactacactttgcaaattacagtgttttttttttaattgaaggtttatggcaaccctgtgttgagcgtctgtcagcatcatgtttccagcagcgtgcactcactttctatctctgtgtcatattttgataattctttcaatatttcagaccttttcagtattacctgttgtggtgatttgtgatcggtgatctttgatgttactattgtaattgttttggggcaccacaaactgcacccacataagagagtgaacttaatcgataagtgttgtgtgtgttccaactgctccaccaactggctgttccctcatttctctgcctct

SEQ ID NO: 108032 - DNA, 1216 bp, Homo sapiens
atttgaatacattatgtgtcattgaaccaatagtgtcaatagtgaacttcatttgctctggtgggcttaaccattatcagtgttccatgaatttctgtcagctatggaagctgaatgttctgatttactctattatatagcagtttaatatcttagaagtggtaaagtcttattgggagcttttgaatgtaaagccaaaattaaactttttctgaattaatatcaccaatctcaatcactgaagaatagctttagaaattagcttctgctgaagacttgaaaatgtttcttaataaattcagcctgttattacaagggaaaccagtgtttatatgtgaaatttctcccatgataaagttatcttgacagcacctaatattgaatcacaaaatgctgttttatgtacttcctatgctatcagttagaacaagaagcaaaatctccactctcacacaaataggcagtggatgtattttccaagctcaaactacaatttcgtcagattttggaccttgatgcaagtgcaaagaaagttttcatatttcagaatccacttaattgtgcaactctgcctactctttaattggaagtagttaatgtccagtgtaatacatgataaaaggcaaatatcagggatctaataaaattttctgtaaatgccttccaagtggtgaataatgcttgataaaatcacattttcatggattgatatcagtatctgtctttgtgacaagacggtttcaaagatgaaatgcataaaatctcattgcagatcagcattaacatacatttacaattgattttaatgatagggaatgctaattttgaagccctataaaagagaattccagcgttttcattagtagaactgtatggtgaaaagttatgcattattattatcatagtttgaatttcattaataaaatttttgtggaaattgttttctctcttatatgagtttgtatacagtatccttgattttaccttttggtctacaaagcttaatattatttactctgtggccctttgtgttaaaaaaaaaaaaaaaaaaacttgtcaacccctgtcaggttattttgaatgccccaccctctcagttcttagacctctgttttcttggtgacactgtcatttattcttcctctgtcatggtcatgttagactagtgctcaccaagctttagtcttcctgtgactgtagtttcttatttcccagg

SEQ ID NO: 108033 - DNA, 3985 bp, Homo sapiens
gtggtgaccgttgtttgcattatcttttttttaaaattactatttaattacattttaaaaacttatttcttttgtttttgcctttttttttttgaactagatccttacaataaatgaggatggatcacttggtttgaaaacccctaaatctcacgtttgtgagcactgcaatgctgcctttagaacgaactatcacttacagagacatgtcttcattcatacaggtatttcttgaattaaaatgggcttgtggccattaaagttattatctttgttattttcatcttcgtgtaactgtcattcattcctaagaccatagctaatctggcattccaaatcagagattttgtaggccagaatgtcagaaggaaaccaggaaaaactcttaagtgagaaaacaattagcatggatgtgtaaaattaattaaatagtcttaattggacacctgtttggcttaatgtgctccatttagctagagaaatgattaaagaatgtattattaaaagcctgtttatcagtgttcattttttgtgtgtgcaaaatgtccaggcagagtttaaaacatggatttggaaatcaaatataaataaatgatagctaagataatgaaattgtagagaacagtattaaagatgacagacctttgggtaaacaaactagacatgtaagatgaaatgaggaagaaaaacagttataagggagattcattgaactaggaaaatagtgtcccagaagctagtagaagatagaattccaagcaggatgtgaccaacagtgccagtgccctaggaggatagaggttagagaaccaagaaaaaatctttggaataaatagcaaggagatcacaagtagcttttcagaaagcagagtataagggttaaaccgcaagtgggcagtgaagaatttgacttagagtagactactcttttaaggaggtgtagtgaaagagaaggagagaaagtactaaggtagaagtgtttcaggactgaaacaaggtttctcagcatagagcaggccagagaatactttccttaaaaggaaaagccccagcagagagagaaagtttgaagagacaggatcttttaaaaaagggatgtttagaaagttctgaaggttctgaagaaaatatgtaaaagggcataaatggatggttaactagggagaaaacaggatgggcgcaccttcttccagataaaaaggaagaaaagatgtttaggacacgtgagaacctgtatttctttctcaccccatgatgttaaaattcaattttaaattgttttatttatttccttcccccccttgaatatatagatcaaatttaatcttatttttctgtgattgtgagaatatgaatttttaaatcctgggaaaaaaattgagaggacataaaattctgttaataacattaaaaatttgtatggctattttgtaattttccaaaatttgggcatctaagatttttctttcctcagaaacagtaactaaaaaccgttgttttattcagtaactaatttgtggatgtgaaattattttaaggtgaaaaaccatttcaatgtagtcaatgtgacatgcgtttcatacagaagtacctgcttcagagacatgagaagattcatactggtgagtgttaaccacccttactaggttcattaaaatgattatttcaaatggagggaagaatttttaataagtggcagtgacttgctgccatttccattggtttagactataaatcacaggttatcttttttctcccttcaataaatcaatgttaactgttaagacttaactttaatgtccaagcccaagaaattactttgaaatagagttgcataataacctaaaatatatgtttaaagtcacaaaaggaaggaagattttctgaaattgctatttccttaggtgtttactgaactcaaaattatcgttaattagtctggggtaggaagcaaattcctgactcctaaagcagcagtacaattcattctctttctttccctttcatgtatataccttacccttagacatgtaatcttaaaaagttgagaactgccaatttctcagtcaagttattaatgatttagaaattaaatattctagaggattactataaaggaacacataccgtaaaaacctaagtctcattttagagcaaatatttatttgcatctatttttgccaacggtaaaaccaacttttataagtaactttgatttagtagtctgttgactttgcctttgttgcctctaagcatgttgaaaagtgtttctttagaattgatttccagtgttttgctttttgtgatggaataaaagcagagttggtaaatttgtataactttgaattttacatttgaatagaattgagaattgtgataatatgagaatattgaaaatatttaagttcttcatatttttctgttttaagtactcaagcaagtacctgcccagtgttgttattttgatgtgttctcatgggacctgcagtatttgtgaaaggacagtttgtcatatagaaacaaccttttctgtctgataacttttttttcaattttctttgcccccaaaaagaagcctgaatgtgtctggtctgcttaaataaaactttaactgggctgggctcagtggctcatgcctgtaatctcagcactttgggaggctgaggtgggcggatcacttgaggtcgggagttcgataccagcctgaccaacatggaagaaaccccgtctctactaaaaatacaaaattagccgggcatggtagcacatgcctgtaatcccagctactcgggaggctgaggcaggagaattgcttgaacccgggaggcggaggttgcggtgagtcgagatcgcgccattgcactccagcctgggcaataagagtgaaactccgtctcaaaaataaataaataaaataaataaataaataaataaataaaactttaactgtgcaacatgtctgtatgcttggatgttctactttttaacaatcattttgcacattactagtttcagttttttaagtaaacgtattcatctctttttattagaaggggctatactaggcactgtgggagaaaaaaatttatagattttgtgtgacttatagctaaatttaaattcctatataacaataaaacctgatcagatacaaatgaaagtgattatttttgtgtgttcttaatacctaataggttttgatattttactcattcattcaacaaaaatttattgagcatccagtgtttttcaagcaccagaaatagataacagaaggcagtttctttctttggagtttacgttcttgtggaaaaacagacgtggaaaaacacacatataagcaagcacagtgcagttaagtgttgtagaattttatacaaaattctcaagatactattgtgccctgaggaagagacacatgtgctgtccgttcttagggcaggtgtcacagaaaagccacatgaggctaagttaagaatatatgtgtgtgggtgggtgtgtatctgaaaaaaatatttttgaaacaatactcaccttcattgcactgtgatattttgtgtgtgagtatgaattctttttttaaaaaagtgctggtcacaatcctgtaatcaactgcactagaccatggggaatcttggatttaagcagagtataatgggttgttaatgtttgtttagaatttactaagtaccagaaaactgtgttaaatatctcatttagtcctcacattaatcttgaaaggcaggagttattactgtccccattttatagatgaggaggtagtaagaagtgcacataagttaaggaactttcccaaatgtatatatctagtaaatgatggaaccaagatttcagctcaagcctctgtgagtccagagtacacatgtgaaatcactggctatgcagaatgggactagaagcagaaagttatatttgggcctttttgagtttttcttgctctgtcactaagccaattatggcttag

SEQ ID NO: 108034 - DNA, 1046 bp, Homo sapiens
tccaagaatttggtgtttctgtctttgaacttaaaaaaagctagattttcctgtgtgtttatccacaaggcagtggtagctgtttcatccataaaattcaccttgaattaaggcttgaatctacaatgaaaggcagcagtacctccagtgccagaaaacaatgacctagaactccttaactcttcataaaagggctttgtacagtcaaggattacatccgtttcacattaagcaacttgggccagatttgttctttacaaagcctttccttgcagttgctatgccacagaaagctattgaagtgccatgttttttggcagttggattttcttatttgttatcaacatacatgaaaaaaaatacctggtgctgtcttgtttttagttccattttatataagtatttaacatctttttgtttgttttatgtataaaatattttgagtcatattttaaaagattttgtgtgttttccttttgcacagtgttaacttgcttattattatgtgacttggaggggttgaaaaaattcaaaactgactggcccagagatgaagctttccactttctttgactctcctcaggaagctgtgacacccacttccattctcctgccaaatgtttcccttccatgactttggtgcatagactttgaagcattgttgaccacattggctgtttgcccagaatccaaatgccctgtataatttgcataataattaccactgatctgcatatagtataggctgaactgtcttcttgaatttaaagtaaaaatgttttaaggattaaagcttttttcccttacgtactgcccttttctaggtttgagaaggggtcatagctgtgtgtttgcaggccctaatcagtttccacagttctttatatttatttcccagatttctctacctttgttggacagtttcttagctcccattctgtatgcccacacctacagcattgtttccctctcactggccatacccctcctgatcagatcttctagttttctttgctgtttcagcataatgttgtgccttttttttt

SEQ ID NO: 108035 - DNA, 1541 bp, Homo sapiens
tactactggactttggtattcacttgttacatgaattagaaggtaacagtttccatctcagaagggttttaggaggattgttgggttaacattaatgaaatctaagaatttttttcagtaaaatataacaatattatctaaatcccatgttgtatatattatataggtcttttccacctccttagtaactgaatgagagagaggatatttttaattccttctctttattctgaaatgtatctctcttttcatttattcaacaaataatttgagtgcctgttatgtgccaggatctctcatcaggtactgaaaaaaggaactgggtttgttgtaacactttaggtgatctgaataaaaattcattattcaaagttatgctgaactgaggaagagcacttttcacacatcagatagattatataatagagaatcctttcccagcaatttattatatattgttggttcccagaaaagattttagactttggtatcagaaagattgaattatgtaaaataaggaaaatttaatgaaaagaaacagagaagtagatataccagacatttgccatgctttcttctacatgttaccttgatttaggaagaagtagctttaaagatgaactgattataagacggaggatgcaaacaggaagtatggaatagtaagaaaatgaaggaagaagattggcaaaataatagagttttatttatctaattttcccaggaaattgtgtgtcttgtataaattgtttttccatagaactgaaccctaactttgaaaaaaaatctgatgtaaatctttctttagaaaatatcacctacttctttgcctaatattcaggaaacagggaagaaacagcctttttctaaaacccagggtcattttgctgaacatagttgttgtgccatgcttatgatacagtgaatttcttgttctggtgctgtcaaaagcttaccatttaaaaaggaaatttggtgatgagaaaaatctagtactgagaaacaataaaaaatcttgatgaatgaaagaaagtgacaatgttagagtaggttattaacgatgaccaggacagtcaagttgccgtgatgggtattactcagggtgactttgttatttgtatatctttggacttgcactattttccatttctcattggatttggagagtaaagagaattgtcacagctgtcattctccatccccagttgcagtagaacgtctcataataggtgagaaatgtaaactctcttatctaattagtcttttgagttttggtggcttcaaagttgattttgattgattcaggaatatatgataaaaacctatagtgtttagtttaaaatatgctttaataattttagtagtacacatttgaatgtgaaaaatcatgtctgccttttaagaaaacagaactttttctcagtgaggggtgtcaggtttcatttattcagtggcagtgatccttatggagtgaaaaatctctgaatttgaataggcagaccttagggctttgcctgatgaaaatgggtatattatttaag

SEQ ID NO: 108036 - DNA, 1072 bp, Homo sapiens
attagctatggtgggaatatttacaccctggaaatcagcaaatgtttctatacctcctgattccttagttggtggttaaatatttgccagcataccactattttggggacatataaatatgcctacaatagcaaattttgaaaaacatagagactaaaataacccatagttacatttcctagagataactacttggattttctgccatattccctttcttttttcaaatttgtgcagatagatatggaggtataatatagaataaattagctgatttttaacacttgaaatgtaagcaacttttgtgcttaaagtttttaatgttttttgtaatcatttattagctacataatctatttcttaatagatcatgttatatttaatggttgttttattggacattattatgttgtttgaaagttgtagtccttttgtttctgttttaaatcatgctgcacttaaaatgtttgagtatgtatctttgtgcactattgatcaaagggtgtgaacttttggaaagatttcttgataatgttactcttttcagaaatgttataccagttacacttctacctgcagtggacctgaggtgtatctgtctgcattctcactggtcttgagtgtctgactttgcttaagatgggagcctcattatagtttaaatttgaatttctttagtttctggtcacactaaacttctaaaatttttgttggcattttatatttcatgttttgtgaaattctcccttcttcttttcttccctctccctccacttctttttttggggctttaatgtttttctcagtaatttatatcatttttgggggttctttacattaatgaacaaatcaagttcttcagatatagaataatactaggttttatgtaaaaaattatttctaaaatcatttgtgatagtgattggttgttacttcggattcattgctgatctatggggtatctatttcaagtgtactctcttcttgaaattctgactaaaacccagattatcttcttattgggtgttggactctgtatttggtgatatgttctaggtatttgtaaatatag

SEQ ID NO: 108037 - DNA, 1668 bp, Homo sapiens
ttctcaaggatctttactgtattttatagcctgagttgaaagtttcctagttttaaggttcttgttttacttcaaggatagattgaaaatgtagcagtgaggaggggatgactgaacaccatcaaatctgatgagaactgacgatggtactgttagtgatcttagaaccttggtttttcttttctttctttaaggacaagtaactctgagaattaagatctgaaaattgaagaacattgttgaaatcttaatgtttcttctagtatttctctattatgtagttagcatcatgtcttgtacagtgtagcagcctaaaattataattgcttctataaacacatatttggtgatggtctgttgtagagcccaggaaagtactggctgagatcttgagtcatatgacaaaactgttgagcatgaagataattagattttcattgttaatttgtctttcttttgacaaattatcttttagaatttgtgtggtttacttgatattttataaatacagagcccatctagaagtctaaatacctcttttattccctagtattgtgttgaattttggaccttaaccttttttgtgcgcttttaacttcagtatcagtttccttaaatgtgggaatgaaattgatgttacgatttcctgacttctgcttggtcttatgatcatcttttcccaggacgtctttgatcttttttctcaggtagattaaaaaaaaaatctgtttatccctcaatttatgtactctcaattcttattacccactgcctattaatgaattctatagcactgtatatagttaggacacacacacatagatcatcattctggaagcacctgtatgtgggtttagcaaaggattaaacataaaatggccttttgtcacaatgaactttttatttatgtctaaaattggcttttctttttttaaacagataagcgtaaagcaggaaattacttttactgatgtatctgagcaactgatgagagacaaaaaacaaatcagagagccagtagacttacagaaaaagaagaagcggaaacaacgttctcccgcaaaagtaagacaatgtattaaggtggtaatcacaacctcttaattccaactgttggttaattctataggcaagaacctggctggaccctaaggcagatgtagaagtcttgtgtggtttagtaggagggggtgcgtgcctgcatggaggtggtgggccttgctttcaatttttctgcttctctttcaccatgttcctgacttgtctaaaagtgaacttttctttttccatatctctatcggatggcatgcattgccctttcttctcatttgtattagttttccttatctttatattaaggtttcaggaaaatgtaataccagttattcatcaggaaaagatataggatccctgttaataggatgtaaacttcatgagggcagggacttcattttgttcacagctgtatcctaagagcctggaataggagacataatagatcctcagtaaatattttatgggttaatgaatgggttagtaaataaacaagtaacccaggctgagtgcagtggcatgatcatggctcactgcagcctcagtctcccagtctcaagggatcctcctccctcagcctcctgagtagctgggaccacaggcatgtgccaacat

SEQ ID NO: 108038 - DNA, 2072 bp, Homo sapiens
atagaattttgaaagctgagctggggagctgataatgaatactataggcaacagtctgttgccaattcctcactgaggaaatgttaaggaaatagttttatattcatttatttgtagaagaatacattgggagatgataatgctctaagtcagtgaggttggtatggttaattggagggaagtggatgtcactgggtatgggtgcaggatgttgagaatgaagagaagagtctaaaatgattccaaggagtcagtcatcttgtttggaaggtggggagagggggtagaccaaaatttgcaactgtagtgaaacatttattcatcacattgtgtctggcaacattattttaggtacaatttatatttgttacatcgcttattatcattattgagactaggtgaagttaagaagagtagcagatttgcaagaaaaagttaaaaggggggatatatgtgctaaacttgcagctgtcattgtctgttgtttcatccccaaagcctgatgcagttatttcacgttgtctttatttctccctttgaatttctacccttattctctgttctgttcagttagagtatgacacatgtgctgtctgtattaggtgtttttttggtaatgcatcagaaccctgcacgtacattttaagacctttgaaaaggaaatctgatatttagaatgtgcttagtatctagaatggcactttgcacatattacaatctcagtaaatgtttttgttatagtattttagcctgacagagcaggcacttaatagctgttgaatgagaaaatgaatgacagctattataagaaataccaacaaagagtatcttactttaaaatatcaaaacagtatacatgtacatgaaatagttaaatataaaagtaagactttattttggggtgagaaataagtcttgataaagcaagtcattctggagttgagttaatgattagaatcaaaggaagaatattttcagtatagggaggactctttaaagtcaggaaaataaagagggaaagattgaaaatgagaaaaagggtaattaagagatattttagaacttgcaagaaagaaccggcatagggagtggcaagaggagaggaagcatgacactataggtctctacttctgtcttaacctggggaagaagttagatgagtatagaagggagatatgaaaaggaaatcatgtctgaccgcttctgtagtatcaaagtgggaagcccagagggagactgactcagtggatgagcaggggctttagagttttaggagaaatgtctgagtttagtcaaatctgaagaaagaagggcaggtagagtggtggtggatggtggtggtggtggcatatctggactggtaataagaacagcattgaaattcaggcctgcaaataagcatgagggtactaatgggactaggtgaaaatcacagtattaatataatcactttccatatatgtggaaataacaggttcagatatacgtgttaatcttttttactgtttgcatttaaaggctcttggttggtttgtgaatggcagttaacagcagaacttatttatgaatttatcttacactcttcttgacacttgctaaaaagagttcctcttttttgttgccacatgctacatttccatggtttatttggaatttacacgctgacagaaatgtttgtactactttttggtactccttcaaaatagggcagagaaattccacagctgcttacatagtctgttatctcttcttgtctcatacccattcccagttattgtttttcagtaaataccacttcagaggtgataagaggtctgtattcccaagtcttgtaggtggtgattttaccatcgtattttgtagtcaaaataattgataccaacgaagccagaagagtggtcactgtacccttctgtaacttggtagaattactagctaaataaataatcatttacatcatgtttttgtgccagggttcttgatttgtgattctcacatggcctgcatttcaggaattcatgagaacttccactttttattttgtcagtatgaaattcctggcttaggttgca

SEQ ID NO: 108039 - DNA, 1069 bp, Homo sapiens
gtaaaatgccactgtatacttttaagggaaagagagttttaaaaagcagctactattgtgaaagtagttttgatgtcatgaatgacctgaaagggcataagggaccttcaggagtccccatgctatgctggctgtttcttgcaagttctaaaacatctcttaattaccctgacctttttctcattttcagtctttccttttttattctcccgactttaaacataaagagttaagaaccactgatgtagatttactgaaactgttacaaaatacaggcacatattactggaaggatggatccagaagaactgctatgaagaaaaggagagaacttaaattaggtgattttatggaacttggaagactagaatttccaagtaggatagggatggtcagcactgtttcaggtaaggtaacttgatttgatcagttcatctagttaatctttaattatgtaaactataagatgctgatatagtaaccagagtttacatttatagtgagaaatgtaatagggaaatagatcagaatgtttgtttccaactgtggctctctgaaccttttcgaaaatcaaaggatagctgtggactttcccctaacaaatgtagctcctttcaaaattttgcatgcggtcatggatcaggcaaacgggacagatatagttcgtgattcacacaggcctatccatcagtgtactgcttcacctccctgtcctgttctgtgactttgtgagcttggaatttgaagtcttcctgttgtctggttacatcaaactgttcttgcagttctatcttggaaatatacatgcaaattaaatttaaatcttaaatttctccttttctggactccatgaatacccccaaatattgctgacattcgttagacagtacgtttacagtacagttaattgtgttatacctttccttttacatttaaactagttatacttttagtcaccttgatttaacttgggtgtttcctaggcaatattttggaacaggttccttctagtgatagttaaacacatctttttttatatggctgtgtatactacttttactctcagaac

SEQ ID NO: 108040 - DNA, 1035 bp, Homo sapiens
gatactttgagaccgtttaaatatcctctctctcaaaattttgcccactaacttcagcatctattggtgggccttgcctgtaatggttattaccatgatgtttacctaattgtgatttttgtcttttccgcattccttctatattgatgttccttgtagctgtcccatttcctccatttatttgttgtttttactgtttcattttgtatctgtggatatgcattttattctgtgggttataatccagtactgttgttgcttacgttcttgctcagattccatctttggtcattaggagctctttcagtctgggtcttatgtccttttgacatcctctgatccttttttgaacactttagcttctgacattatgattttctagagtcatcttatatttttccccgacccagctctgggctcaaccacttctcagagaactctggttcttttttgtttggataatggcatttagaaactaagttctggatgctaggtgtgttgggtgtcgttgcttttcagtgacctcagcaaacaagctaggaaaatacatgtatgtctactaacccacacatgcacacaacatctatagtaatttctttatattggtagggcccgggcatctgtattaaaagagattgagtgaaagagagaaagggattgtatagttaagatgtatctagattagcagctctcaaatgttctggccgtggggtccctttatactcttaaaaaatactgaggactcctcagagcttttgcttatgttggttatatgtatcagtatttaccatattcaaaactaaagctgagaaatttaaagttttatgtattaatttgtcacaataaaacttactacatgttagcatgtaacatttgtaaataaaaaataactgttttccaaaacaaaaaatttagtgagaagagggaaattgttttacatttttttgatatctctttattatctggcttaatataactggatataatgcatatctgtggtgacatatattaagtctgtgatgatatcacatttta

SEQ ID NO: 108041 - DNA, 1210 bp, Homo sapiens
tgtcagtttattccttactgaattcatctctatttttaacacatttcaatatattattaatatattaaagaatatggatcccttgactgatgttacaaatacttttccctaatttgtttttatgtcaggcttatttttcaataataaagtagttaggatttgatgcctttatatgaaaatgaaaatttgtgttttattctaccagcctttggaaaccgatattggtattataattttaaaattggaggcagttccaaagtacatcaataaaatctttgtatttgaatgttcaaattcttaatttgaaaatttaaaatgaagtagtcatataaaactaatttactatgttttgttgccaaacttggttttctaggcagttatacttaagcatgaacattgacgacaaactggaaggattgtttcttaaatgtggcggcatagacgaaatgcagtcttccaggacaatggttgtaatgggtggagtgtctggccagtctactgtgtctggagagctacaggattcagtacttcaagatcgaagtatgcctcaccaggagatccttgctgcagatgaagtgttacaagaaagtgaaatgagacaacaggatatgatatcacatgatgaactcatggtccatgaggagacagtgaaaaatgatgaagagcagatggaaacacatgaaagacttcctcaaggactacagtatgcacttaatgtccctgtaagtaattcctttataagatattaaacttagaaacataattttttgttacgtaatactgcaagtcatcgaagaaatttcagaaaatgtttcagggctaaatagtgttcttgaatagatatactaaaatattgacataaatcatatttgaaaggcaaaattaagttcttgtattatattattttagaagcttatttctttcaggataacaatatttctcaggattattttggtattaaattttaaatgcttaattttaaaagatattttatctaacttctaggtttctccttaaagagtaaaacatttgaatcttcaacgtaactagaaaaatatcacacattcaagggtttttcctacaaattctgtaattcttgccttcttaaatttttctaatatgctcctattctctgttctctttgtatcctccgcttgcttgatctgtttatctttttaaagtatatcagccctttactctttcctatcta

SEQ ID NO: 108042 - DNA, 1111 bp, Homo sapiens
ttttagtttgttttctaagaaatgtgataaatgaaatttttgaagagagcagctatttggtgatgtatgtaacatctttgacctttatttttatttgtttatttttgagacagggtcttattctgtcacctaggtggagtgcagtagtacagtcacagctcactgcagccccaacatcctgggctcaagccatcctcctgcctcagcctcccaagtagctgggaccacaggtgcgtgccaccatgcccagctcattattgtatttttattttgtagagatggggttttgccttgttgccctagctggtctcaaacccctgggctcaagcgatacgcccgcctcggcctcctagagtgttggaattacaggcgtgagctaccatacccagcaatctttgacctttagattttaactttactacctaaagattttgaaaagtgaaatcagatgttttgtacagatatactgtatatattctaggttgataatacctggtaccagggaagaaagattagcaagttatgaattacacatttgtgtattttgctgtttataaggtttttttgagctgttcatttcagtaaagttttctctgttaatgataaccttagtaaaggaaagagtattttgatttcagtagtgtgttggaatttaacttaggtatttgactgctgaaaactatgatcaaagttggtcattacttaggtgattaatttgggaaagaagtgactaaactgaaatatacttaacattttcgttatggtattgactactgtagtgattttctgtgtctacctttgtttacattttttatttcatcaagataaattccaaaatgtagaattccttgttcaaagaatatgtacatttttatagcttttgatacgtttcatagcatttgataccaaatggcttttgaaaatagttgatctaatacatacttttattatcagtagatgagtgtctttttttaatacttcaacattggatgtattttttaagagtcattatcagtttggtagatgaaatatgatagtgctgtttaatggtaatttcttggattactgctgagactcttttttatatgcttaatgactatttctaaatttt

SEQ ID NO: 108043 - DNA, 2085 bp, Homo sapiens
gtcttatagataattcagtaatcacttaagtttgatatattagtatatagacttggctactgtgacagaggcttataaaggtagaaatatatttatatttacttgaaaagtctgtgtaaactatcttgagattaaatggaggctgcaaaatcactgtgtcccagggctcctttgtcttgctctgctcttcttctatgcagtttctgtattgtgggcgaggatggttaccattgtgtctgctaataagaagaaaaagagaagggcattctctttacctttaagaggagtttgtgtatatcactttcactcagatccctctggctctttgtcacgtcacaaccagttgcaaaggaggctgggaagtgagtgactctgacctaggcagccatatgttgcacttaatttttattactgcataagaaggagagaacagattctggggagatagccagctatctgtcacattaaggtttgagtcagatttattttcattaaaaaaaaaaaaatggcctcaggcctgtaatcccagcaggctggcaggctgaggctggtggatcacgaagtcaggacatcgagaccatcctggctcacacggtgaaaccctgtctctacatacaaaaaaaattagccgtgcgaggtggtgggcccctgtagtcccggctactcgggaggctgaggcaggagaatggcgggaacctgggaggcatagcttgcagtgagctgagatggcaccactgcactccagcctgggtgagagcgagactctctctcaaaaaaaaaaaaaaaaaaaaaagccgttgattatttaaacagttaacttttttgttgttgttctggaatgagtcttggttactgtatagtatgtattaaaaataaccattagcaatctaggcatagtggtatgtgcacagtcccatctcatgtaattaaaaaaaaaaattaggtgtttaacatttgttcatagtatacagggaaattttgttttaagaagtttttttaaaatatttattatgtaagattacagaaactatagtttgaatattaatgtttgaattattgatatttgcataaaatgtaatggatgcaatgactagatccaacagaatgtcagattctgctttgcgtgaactttttttttaccttttccctccccctctccttgttaagataaattatagctgtttcttaaactgtttggatttccataaatttgatgttttagtatttctaaatactactatcttcttgatgttacattgttttacaaaacagatgataagtatttggaatgcagaatatgcctagattctgttttatttgagaggggcttcagtgtggtatagaaatgcctgttaactttgacttattcaaatatttataaattatttttctgtggtgaaaaaatagagttttttttaaagcttttaggtttttaaagtcatataaaatgattattgttaacgtgtaagttttctgattaatacttgtgttagcagctattgaaatagatatttgtttaaacatcctttcttgttagcactgatcagagaccattttgtccagttaccattattataaatgatgttcctattaggatattttgaaatagtagtactttaaaaattaacatggtttagaagatatgttttatagatacaaaatggtagttatacagaggtatatctgaagaggtctttgaatgtacttagacaagaaatagattttgttttattaataagagatgaagtagtttctgcttagatcaaaactatacttttcaaggatgaaagcaaatacaaaacttcttcagaataacaaatagcaaatttgttaaaggttctggtattaatcatgggtttcatctcaccaaatgatctggaggccggttgatatttgtatttctaatgctgatatttttaaggtataatttctcacggttagaaacataggttagaaatgttaatatccaagttaatgtaactggcatcctccaaataacagagtgctttggatcagaagtaatttgtgaaatctagcttttttcttttacctgttttcagaacaagttcctttgagtgcttctct

SEQ ID NO: 108044 - DNA, 1894 bp, Homo sapiens
tgagaggaatgacatgtatatgcttttgaatgcttggctgcaaaacattgaggcaagcaattaggagcttagtagaaatcaagtattttaaaatagattttttttgtttgtaactacctcaataacaaagctactgactagctaaatactggaaaatgctaaattatcagaaagactgtactgtttgtagtccttgataaagcatatgtaaatacagccttgaattgatgtacttggttattttctagagattatcaatttctagaaaatattctgcttttacatttatggcttttattgatgtgcaaggtatttatggatccctaaacttgtattaggactgttacataaaatgctttatctattgtttctgaataaaattatatttggcttgttctttatttctgataattcaactttcagtcttcattactttcatttaatatacctcagaaaaatcccagttacatgaataaagtgatctgtggtcggcatcaatgcagtaccaatgtggaatgttaattttctgtgttagtctctgctaaaaggttagttatagcatgatgtttaaaaaatatcgatggaccattttagcattattaaataccttttgctttgaacttttaaaatgctgtttgtgttttcaaaaactgcatccttaatatatttagattttttcagctgagggaaatgttactgtaagagtttatcaagaaatagtgctatatgagtgttggagagtatcaaaatatgattttagtgaaacacatttgtgctttccttcctatgttatgatatttaagatgatagtcaagtttattgtcctgacttcaaagaaatcttaatccttcactggaagttaagtttgaaaaagtccaatttgtatgtgagtcattgttgtgatatcatttagcatttgatggctcattgcactcagactaagtgttagttgttactaattttatttactctaacagtatctaccatggaaagaattttggtagacttaggacacttaaatgtaacagttttacctgacttctttaagactatgtttaatcctgattcttttgggggttaacctgtatttgtgtacttttgtaggatagagggaggaatcagcagcttggaaattcaagcacgtgatctggcgggatgggcgtttgcctaacgtatttaatggaggtaattcagcattctttgagtcaatctttaatttttacctgtaatggatgcccatgttactacacatacttacaataactgttgggtataagtgtgcatttatggccaatcccttttctttttatattcatataaataacatggtatcactattataaatattataaataatatgtagatatggacatatgtacatagaaaagaacattattaattttataagatgaagtcaattatcttctcttaagattacttgcatatcttttaggcctcatttcctttatgttaggaaggcaaatgatcctctcctttcttgttggcctatgttggtgcatatattaaacctatgcttttatctttcacacaacatgaaagaagatatctaacagttttcaaggagtttacatatatgtcagtggcacatactcatgtcagttattaatgatcataaaaattcttctgtttgttgtatttttaatttttaattttttaatagagacagggtctcgactatgttgcccaggctggtcctcaacccctgaactcaagtagtcctcttgcctcagcctcccaaagtgctaggattacaggtgtgagccactgtacccggcctgatcataaaaattctaaaatttctctgtgcattttaaaatttgttttttgagaatttttttttttttttttttttttttgagatagggttttgccc

SEQ ID NO: 108045 - DNA, 1022 bp, Homo sapiens
caaatcttctgttgaactgcattgtgtttacagtttcacgtctgtgaaaaggtcagcaggtaacttgctttactagacagctttttactgggtattaagagcaaaaaatgtacacctgtatccttatattaaaaaaccctgcttgtctagtggtaagaacaatcctaaggcctttccagaattgggctgtggggcaaacttttgctctccagactttgtgaaacaccttttacgatgccaggaaagaactacttgtgcagtagaatgaaagctagagttggaaatgcaaaagttgaagctctttccaacagcttgcatttaaaacagctttttgttttatataataattgtgatttgttgagtttacatgaagaattttgcaaaattaggcatggtgtgattaaacaagagcgtttcttaattttatagagggcagtggtaaaggcaccactcagtttggaaatttcaagtatgttgaaatgttgctataaataaaatcctattcagatttttagatttaataaatctaaaaatatatttgcagttgtcctttgggtgcaggaggaagtcctgggtttctctgtgcttgtttctgggcagattttcagtattgttagcatgatacaggtatagaaccttaacctgagtgaataatttgcttgagattaccagtctgttttggagctggaatagactctgggtctcttatgcccagtctggtgaccaatcccagaatagactaaggaaactgggtgtttgtctgtttggtggaaaatagggctgagccaaaaaatgaacgtgtgaacgtttacttttctgttaaaacatttaaaagtaatttctccacactggatttctttggcctttctttaaaaacagaggacttgagtatattacccagtggtacttctagtgggatttgtaccacatttacatttgattacaacaggcagatgcttatggtttttaacggggggaagatatatttttcatgcgagtgttctcagtggttagaataggga

SEQ ID NO: 108046 - DNA, 1101 bp, Homo sapiens
ttgtgtgggttaggccaatgatgagtatcttaaagaaggtgatgggaaggattatagtagacatggagagaagtgtgttttaaatgataactatattaattcaacatagataaatgtcttcacaatacaggggtttgacctttgaacatctagggtggcatggagaagttttccctgtaaaattgagaagagccaatatccaagagattagaatgaaatgcacacttgctgttctgcaggcccctgtatatgtgtacttgtcatatgtacacacctgtatgtgtagatacatataatattaaaatttgtttatttgattaggttgtataattagttttaagggaagtgggactagtagtggaactagttttgagttatgaatgagttaaatgaattgttacagaatatttggaaaggtcattttcaaggttttggggacgagcctaggaaacagatttttctgtagccataggggcttctggaatagatgcacaaactttgatggcagtttggggcaaatttgtgtaagttggagagtgttagctttgaggaaatgagaacagacaagaaaaacgcagtgtttgagaaagttatttatgtattgatttggtaggagctgataaaaaattataaaagttgtggagagattttgaatagctaaagtgggagatatcatggaagtgatttatgaagcttttttttttctttttcttttttgagatggcatcttgctctgttgcccagagtggagtgcagtggcgttatcacgcctcactgcaacctctgccttttgggttcaagcgattctcctgtctcagcctcctgaataactgggattacaggtgcccgccaccacacccggctaattttttgtatttttagtagagatgaggtttcaccattttggataggctggtcttgaactcctgacttcacgtgatccgctcgcctcagcctcccaaagtgctgggattacaggcctgagtccccgcgccggtccgatttatgaagcttgttacttcaagtattagaaaagtaaaatggaaagatggtttagagaagatttcttttgggaacaatataaaacaagcaaggcaagaa

SEQ ID NO: 108047 - DNA, 2134 bp, Homo sapiens
tctctaccaaagataacaaactttgctgggtgtggtggcgcgcacttgtagtcccagctacttggggggctgaggtgggaggatcacttgagcttgggaggcggaggttgcagtgagctggtattgaaccactgcactccagcctgggtgacagagtaagagcccgtctcaaaaaaaaaacaaaaacaaaaacaaaaaaagggtaaggactttggtgggggatcatatgatttggaacatagattttttagtttttgtttttttttgtggtcttcaagagagcagttcagagaccagggtgcatggtggtttactgagtgggttggaagaatatggaagcaataaatacaggaattgattaaagaagtttagtttgagaaggaagaacaacaactcttattctaaaactggaggcaagaagtaacagatggatgaagttacagcattttagaagctgtgaagaggatttgattacaggtggagaaggtgtgatttgagggaattttatagaagggttcgagtatttgttggaattagggatttaaatatgaaaatgatttggattagtcaatgagacggagagttgtatttagaataaatctgttgtggaagatttcatagctttctggtggtgcttaacacccagtgcgtgggcatggagaaaacagatggtgaggattgtctatcactggggagatgcatagtgagaataatggaaggtcatgatattctggagaggacagtgttaaaatggctgttggacaggtttaaattatatagggagacaataaagccaagtggaggtaaagagcaggtctacaactagaacataaagtagttgtggataaagaaaaggggggtggtctctgaagttacaatcctagtggattgtaactatttttttttttttgagacagggtctcgctctgtcacccaggctgcagtacagtggcataatcttggctcactgcagcctctgcctcccaggttcaagtgattctcctgcctcaaccacccaagtagctgggattaaggcatgagccgccatgtccggctaattttctgtatttttaaaggagacagggtttcaccatgttggccagggctggtgtcgaactcctgacctcaagtgatccacctgctttggcctcctaaagtgttgggattacagacgtgagccaccacacccggcctagcacttttcagttgatggctctgttttgtttctttgtggctagctgaagtgcagatgaaggtcttaggagtttttgaaggtcagggtgtagaaagttcttgagcatctttgttgaagtcattgagaataatggctgaatttgggagcaagcagaattgaagttattgggtaggggaaataggagggtgttctggaggttggtagatgttgcagaaggaatggtttcagtgagtaatgtgactcccaagcgattttttagtgataggataacagggagtggtcctggggagcaagaagcagcaagtccttttttatcaagctgaaggagtaggagaatgatatagctagtcatgagagaagcagattgtccaggaaaagccaggtaagatgagacaggtggtcacaataattgggcaagagttgatagtgattggaatcattgagccacgggaattgagaaaaatagctagatttgttacatttaccagttctcttattattattattttttaatttttcagacagggtcttctctgttacccaggctggagtgcagtggtccagtcatggctcactgcagccttgcctcctgggctcaagcaattctcctgcctcagccttctgagtagttgggattacatatgtgtaccaccatacctggcttttcttttctatatatatgtatatatatattttttaattttttaattttaattttaattttttttttttaaagagatgtggtcttcctatgttgcccaggctggtcttaaacttctggtctcaagcgatcttccctccttggcctcccaacagtttgtttataaaataaataatacttgcaaaatcataaccattcatgtgtaatatgctgatataaatttagctgaaagatatttgtgggttaagaaatgagacattggaaacaaaagatgaggt

SEQ ID NO: 108048 - DNA, 1456 bp, Homo sapiens
aatttagagttgtagaaatattcaaatggcagcagctgaaattggattatatttttgggtagtttagtgcagtacattagagtataattttagtttctttcatgtagtaggtgctcaattatttgttgaatgatagaaactaaatacgtggactgtgggatgaattgtgagtagaagcagtgatgggtggatgtgagaaggagggttagactggaggatactttgatggactgccagaatttattcgttcagggtatatttttatatttactgtatgcaatggactgccagaatttattcattcagggtatatttttatatttaccatgtgcaaggttctatggtagggagtgtgaaggatacatgtttatatatgacacagtccgtgttcttcaggaatttatccagggacaaaacatacacatccatctatgacacaagtactgtggcaggtttgttcaaggttggctttgtggagaaattggtgcgaagcttagaccttgaaggataaataagataataggcaagaaggtgagggttggctttcctagaagaaggagtgatatgagtgacagtgagcaaagttcaggacatgtttaggggttggtggtctagattagctataatttagggttcatgttgaggaatggagggaaataaagctgggaagtaggcagactatctcaaaaattcaggctaacttggattttgaaaatgtatttattgagataaatacagtaaagtgctccaatcttaagggcacttaggtataaatttatgtagccaccacccagttcaatatacaggacatttccgacttccagaaggatgcctcatgtgccatttccaagctgatatctcatccaaccaaaaataactattattctgacttttgtcataacagagtagtgttgtgtgtttttgaattttgtataagtggaacccaatttctgtgtctagttcctttttctcaaggagcatgtctgtgagttttatccatgttatgtttggctgtttattcttttttcattgctgtgtggtattctatcatatgaatataccacagtgtatttatctattccatgattattggatggtttcaagttttttgaagtctgaggtgttctgtttgtttttttcaggcagagtctcactcacccaggctggagtggtgcgatgtctgctcactgcaacctccgccttctgggttcaagctattctcctaccttagccgccctagtagccaggattacaggcatgtgacaccacgcccagctaatttttgcatttttagtagagacagggttttgccatattggccaggcttttctcaaactcctcacctcaagtgatctgcccacctcggtctcccagagtgctgggattacaggcatgagccaccatacctggctgaagtctgaggagttttaacttaagtcagtatgcagtggagaac

SEQ ID NO: 108049 - DNA, 1081 bp, Homo sapiens
aaaacaagaagtttcataatacagtaactgtccttaacagtggcaggtgcagttggatgttatctattttgtttgactaaaaagaaaaaaagctggccaagggggaagaaaaaaaagctgattgtcactcattaaactgatttcatgaccgacaaaataattaatcacaatctatagtttggaacgcagagagttcatgaataaggtataatacaaggtaggagagtcagttggggttgggttgaaaatggatggccttgaaagctaagctaagtagtttgtatttgatatgatgtagtgttgtgcttggtaagcaaacagaagctgggttttagtcttggctcttctgtttacccactgtatgattatggagaattatttcctttctgagtttccattttctcataaaattgataatcatactttcctggcaagggttatggtgaggatgtgagaattaaagtatgttaacatatgattaaagtatgttagcagaaatcattagtgtatagctgttgaacttttctgagtagagaattgagccaaggaccgtatattagatagctggcaatagctataccttactgggtagattgcgggtaatgtggtggtagagtaagattgtatgtgaaaagaccagttagaaaacaaaaagaccagttaggtggctactggagatattaagaagggcttgaattagtttgatagcagtaggattagaatatggaagtggaatgcagttggaggtagggaagaggggaagatgactagaaatatgctatttatttatttattattgaatgaacgaacgtgaggctcttgatctgttgcccaggctggaatgcagttgtgtgaacgcagcagctcactgcagcctctacctcgtggattcaagtgatcctcttgcctcagccttccgagtacctgggaccacaggcatgtaccaccacgcctggctaattttcaattttttttgtagagatgtggtctcaccatgttgcctgggctgatctcaaactcttgggctccagtgatcccctccctcagcttcccaaagtgttgggattacaggtgtgagcca

SEQ ID NO: 108050 - DNA, 2054 bp, Homo sapiens
ccttagcctctcaaagtgctgggattacaggtgtgagccactgcgccgagcccaagaggcacacttttgtttgtttgtttgttttttgagatggagcctctctctgtcacccaggctggagtgcagtggcgccatcttggctcactgcaacctctgcctcccaggttcaagcgattctcctgcctcagtctcagagtggctgggactacaggcgtgcaccaccacttctggcaattttttgtattttttagtagagatggggtttcgccgtgttggccaggctggtgtcgaactcctggcctcaagtgatccactcaccttggcctcccaaagtgctgtgatttcaggcatgagtcatcacacccggccaagaggcacacttttaaataatacatggtataatcttattctgaatggtcttattgatgacagatctttttactttgaaattttgatttttagaaatgctgaaggttagtcaatatcaaatagagtgaatgaaaaatagttttgccttaaatccagttaatcacagaaacgggaataattttcttggttgacttattagctgattttgaaaacactcccaaggaggaagttggaaatattttgaacaggggtgatagcttcacatgtagttagttaggcactacataaatgttggttgagtgcatcagatggttggatggatggagtgaataaatgagtaagtggtagccttccaaagtaacttattttaaagaggaccatactgatttgaatgtgtaaataaattttttaaaaactcatttttctcagatgaaataaattctgagtatgtttgttaataattttattaccttgagcaagatagtttaagttcacaaatgagttttacagacagtaagtgctgtaggagttcagggaatggagaaatgaacattggctaaggtttggtgaaatgatttaagtgaaccatacttatatttgaaaagattccttagggatctcagagaggaactaaatgactccaaattcctcttgcagccctaaagtgaacctagagtctggatctatttttgtctgaatgctttctgcctgtttcattttagctactcctactggtttgttcctttcagattcacatttgttggtagatgttgagccccctgaaacaactatggggtctgttttccgtcttcgtatagtgtaacttttagttgttcttttatgagcctgtaccccacaaattacttggccttcatgagagaagagcatgagtcaacttggccctgttatcctggcattttcctgcatgcttttctcaaagctgctttctgaattacggaatagaatagacagaactgagggcatgtgtccagtagacacgagcttgttgaatgaatgaatgaatgaatgaatgagatatttgagataatttaggagatctgaattgtctatatgttttatgtttctttttcatttattcataacctgcctttttctacaaaggacttaacagggctgccaaactatatgcactagcaatgaattgaaataattcaataaatctggttaaagagatgatgaagaaaagaaaaatctgtttaaagaatatagatcaatgtgtatcggtgttagagaactaggaataaggtagaagataagcagatggggaaggaaaggtggtatctgatagaaagcatgattctgaaggagggaaaagattactgaaatatgacaggctatctttggaggaaagcatgagaagatggagggtaaagaggattatttgagacggctgttttgaggaggaagatggtaaggctatttgaaggataagagtcaacagaagtttggaatatagtagaagttattaaattatgttgatttataacaaggtttcagaaaatgatgggatgagctttatttaacagataatgcacatttgttatatgcaaaagcatataatgctttgctgtcaggaataaaacctttgggatttatattgtggtagggcagctggacttgtgcacaaatacctgtactataatcacaaatatatctgtgagtca

SEQ ID NO: 108051 - DNA, 1037 bp, Homo sapiens
ctgggcccaatctcctctgttaggttagagtcataaaatattaatgtttttgaaatttgtgtatgaggtgcaaatcactatggtggatgttgggagattagaaagataattactccacttctttttgggagtctaagtaatggcaactcttgagagtcttccttactttcagtagtaacagtattcacatgtagtttatgtattgctaaattttgtatttgtgacaattattctctttgttttgcaaatggtacattgtaacctgttctagagcagagacttcctgtagtctctagggaaactaacagcaggttgattcttaagtgcttaataaatacctgttgaatgactgatagaaagtagtgttcactgttagtgataatagtgggattgtatgaaattgctgagtactttgggggtattgtaggcaaaactgtgtgtgtgtgtgtttgacagcgtgaaggacaaaagggatatctggagaggacctttagatttaagggaagaagacagactggattagaatggaattgcagtggttctgtaacaacttggaagaggtgggaccaaggggtctcttctaaatttgaagctagtttaatctggagtaaaatctggtctgtagcagggtgctggtttaatttagattttttttttttacctcaggcataaatgactgttttaggactgtctgatttaattcttttttaggatagtaaaaataacagataagcttcttctctcaaggaatttgtagtatttacaatttttttttttttgagacggggtcttgctctgttgcccaggctggggagcagtggtgcgatctcagctcactgctgggttcaaactccgcctcctgggttcaaacaattctcctgcctcagcctcccaagtagctgggattacaggagcgtgccaccatgctcagctaatttttgtatttttagtagaggtggggtttcaccattctggccaggctggtcttgaactcctgacctcaggtgatcctcccaccttggcatcccaaagtagta

SEQ ID NO: 108052 - DNA, 1420 bp, Homo sapiens
cgcaggcctcagtcactgttgctgccggagtgtgctctttgggagaagggaagggcaggggttggagaaaagggaatgcttgcaggaaacgtagtgggagtgcgaacagggcgaggggccggaggaaagatgccggagaggtggaggaatgcggggaggtggctgtggaggagtcttgaggattctggggggtgttcattgtgcagatacgttaggtatttcattatggaaagaactgaagcgtttctcagggaaggaaagaagggagataggagttcccgtgaatagaaaggatcgcgtttgaagcaagagggagtgctaaatagtagagaagatgcagggaatgcataatagaatagacagatgtagtataattaataaatattggcctaagtactgaagagttattccagatgggccgggatggcctagttccgaacctgtgtgggctgttcagtagatgacatctggtaagtgtgggtctgggccgtggttggggtcactgagaattagattttagtctgtagtttggtctgtgacattttagacgtgcaccaatgagtatgagaacctctgaagcagaccttgagaaagggtctggcctgtggggattccttaggctatggagcttcgattttagaaaatttgaagtattaacacttacccgaggttgggtaaatactatcctggcaaacgctggaatggaaattaattgacttggtggttttcttcactgcccagtttatctggtccaggagaattggtgccgtattattcagcctggattgcagtacacaagattataattaatggtcggggggaagacatgcttgctggctcttctttagatacttcatttgtagctcaaattagttggctggattggttccataaatctgtggctggtgggagatcttctgccattcacagttcctgaagtgaactgtgagggagttctccagtgagagaatactctcattcaggcatgatggcattgaagaaaacgtatcagccagcaaagtgtgggcctgcagaatggaggagctagaatatctgttttggttttaggttgcaaggaggtcaggactagttatcagaaggtctaggggaacctaggagactggacgactctagagccaggttggagggaggattagcatctctatgtcaggaaatgaaccaagctctctctggatttgctgagctcacaccagaccagatttccaagagggaactctgggctagaaccatactcttaaaaactacccggatattattcaccttttattaagaaaaaactatatacagctgggcgcggtggctcacacctgtaatcccagcactttgggaggccgaggcgagcggatcacctgaggtcaggagtttaagatcagcctcgccaacatggtgaaaccccatc

SEQ ID NO: 108053 - DNA, 1051 bp, Homo sapiens
gcgggcgccgagtcgcgcggtcaccgactgcaggcggcggcagctccaacctttctaggggccttgagaggaggggaaggggggaggggggagaacttttgctgtggcagcttcggcaacagctcccacccctgcgcctttctcctcttcctccccctcctcctcctcctcctcttcctccttctcttcctcctcccagagcagtagagacgcagacatgccgcagctagagcgccgccgcggtcgccgccactgccggcccggtgcattgtgggaagccccgcacacgggaagcgctccgcggcgcccgccctcgtctggcgcagagacctggctggaaagacacagcgtggcttcgattccggcgcctgcgtgtcaccagcccagggtggccgtggaagctggacccgagccgcaggccccccaggctgggcctgggaggaaagcggtttgaaaaagatcggaactgaggaactctcttagagcgggggactccctgctcctacagccttaaccaatgcccagcgcttggaaagtggaggactcggggattcgggagcgtttcaggcctggggaaatggaagggtcggggacctaggtgaaaggttatttgccagaaatgtcttggctttttcatttattctgtcttacctagcccttcgccgccacctccagtcgttggcctcttaccaccttcaaatgccaccttttccggaagatgtagccctgcgcccttgaaactggcaaaccctattagtgtctgcaagctgagatgcagggtgtgggcatagacacagatcaagagatccggccctggaccctcttgggcagaaccttgcccttctcatttcacctgaagcccaaactttgtatggcaaagacttggtaatgatctctatagagctaggattacacagttgtctcatcctttgggggccctttagccaaactgtgacctccttaatggtgccttcgtcagctaacattaggcgccctgaggtgcttctgcatactgccatcgtttacaattactcatctttgtgtacacacc

SEQ ID NO: 108054 - DNA, 1197 bp, Homo sapiens
aactcagttttccaacaagttgtaggagttctttttccattttgaagataagttcgtattagagattctgtttctcttttcagaagcattagacatttgcttatattagccacttcccaaaatagtgtcatattttctcgacttcttaattattccaaaaagcaaaacttagtgtaccactaagccaagtacttgggttttcagattccttccaaactcacattttaaagtttttatttttatttttagggaattcaagtttggaccaatgctaaggaatgctttagcaagatgtaatcctgtgaattgaatttctcttcaatcaaagtgccccaaaacagaagcacaagtaaataaaagaaatttaagtcactacctagtatacataaacatatacaataagttaaataaattcagctttctttaacttaattgtggtcgtgttaatgtagcacaaaaaatatattttaatgaagattaaatattataatttgaggttttggggactggtgctgattccaaaaagttaatttaataatatataccaacagattgtttgtcacgcttctgaaccaatgactgaatgtcaagatgttcgttaatttctagatgtttgtttcaagaccagctgtttcagatctattaatgtagggaatttttccctaagattgaattcctatatttacttggtaagatccactaatctgttatagggagttgttttctcttgccttatagttgagctatttggtttgacaaagctcagcagaaacttgatgtgaaaaatctacgattttcttctacattcattgatgccccttgtaatgtttgcatacactagaaaatgccttcaatttgtgttttaccagaattttgatactggtcagaaattttatactgccaacaaagaagactcaacttctcagatctataatgggatacattgtcatcctctagcaactcctatatagaaagttttaactgaatatgttacatataagaattaaattcttctcaaataattcttaacctcagtaatgagcctaaatttactctgcttggctctctacacatggcatttcagggtataagatgtagcatttcaatgtgtaagatatatgtactaaacatatgtgttgctatcttcatcattaacatccttcttttctattgcttggctgtaatttttgtaaagat

SEQ ID NO: 108055 - DNA, 1076 bp, Homo sapiens
acacaacctggatccctcacatgcgcagttcacaatagggttcgtgctcctaagagaatctaatgcctctgctgctgatctgacaggaggcagagctcaggtggtcgcttgcctcctgctatgcagcctggttccaaacaggccatggactggtatcactccgtggctctggggttggggaccccctgctttaaattatctctagattattaatacctaatacagtgtaaacactggtgtctcatataagtggaatcatacagtatttgtctttttgtatctgtcttatttcacttagcataatgtcctgcaggtttatccatgttgtagcatatatcagatttgattccttttaaaggctgaataatgttccattgtatgtgtatgtgtatgccgcattttgtttatccattcatctgtttctgtttccttttagactgtgagaacattctctttgaagggaatgactaccaagctctttggtcaagaaactccagagcagagagaagccagaataaaggtgctagaagaacaaataaatgaaggagaacaacagctaaagtctaaaaatctggaaggcaggtaaagatgctgcgatgtttaagtaagctaggcttgtagactatatggtagattattttatttatttatttatttattttggtaacaattcccagcttcattggcatccctgaatacagcctattcctttaaaatgcattcctaagaaatttgagttatcacgctgggtgtggtggctcacgcctgtaatcctgacactttaggaggctgaggtgggaggattgcttgagcctgggagtttgagaccagcctgggcaacgtaggaagaccctgtctctacagaaataaataaataaataaataaataaataaaaataaaagaaagttgaattatcaaaaataatgttatagaaacagttgtttcaatgtgggggaaagagaaataaaagtttcaacttcataatattattttcctgcactattcctgatttctaccctttgtactttccctccaccatttcttctcccctcccctccttcagtacccagctgaa

SEQ ID NO: 108056 - DNA, 1032 bp, Homo sapiens
gtagcttgtacaacgtccttatgtaacaaggactttcttatctgttcttatgttatcttttacagagccaaagggaattctcttttagatagtcctacgtgactaggaaaaagttaatatatttttttctgatcagtttagaaaaaggaattattttcccagaataggtggcttttggtcagttgtcctgtcacttttttttttttttttttttgagacagactagagtttggctgtgtcacccaggctggagtgcagtggcgtgatctcggctcactgcaacctccacgtcccgggttcaaactattctcctgcctcagcctcctgagtagctgggattacaggcgcccgccaacacacccagctaatttttgtatttttagtagagacagggtttcaccgttgttggccaggctggtctcaaactcctgacctcgggtaatccacccgcctcggcctctcaaagtgctgggattacaggcatgagccaacactgtcctgtcgcttttaaaagcagtataagaattctgttaggaaaacaagagcactattcccttacctctgtggtgattggtgtgaaatcatctgcacattgttagctcgttttccttctagggctttgagtagtaggaagtctcaccaatgtattttcaagtcaccaagcaaaagaaagttggctaggtgaggtggctcctgcctgaatcccagcactttgggagcccaaggcggatggatcacctgaggccaggagttcgagaccagcctagccaacatggtgaaaccccgtctctactaaaattacaaaaaagttagccaggcatagtggtgggtgcctgtaatcccagctgctggagaggctgaggcagaataactgcttgaacaggggaggtggaggttgcagtgagccgagatcgcaccattacactccagcctgggtgacagagtgagattctgtctcaaaaaagaaagttgctgagtacagtggaattctctgcagctcttaaaaattataaaagggattaatgtatgttg

SEQ ID NO: 108057 - DNA, 1383 bp, Homo sapiens
tatgttcatcatccaaactgcactttttaaaaaaatgtgcaatggtttctgtcataaacaactcacttagcctgttttctctccatggtttgtaatagaatagttgttttggatgttatcaaaaggcctgccatttcagtgctggaatgtaaataagtgtaggattttagatctacacatcatattctttcatgttttttttaaaggtccgtgaaatagtttataggtgttaggccatcctgtgtctgtgctcttaaattctaccaaataaactaatttcagataatagtctgccatgacaaaagggactagaaatcaaggaataataattatacttaaccatatagttcagctgtaataggcaaagagggaaatacttctcagtaaattaatgtacctggaaaatgtaccatccgctctggtctcttgtggcaacctagaaggaaccttagaacatgcctgtgccaaaggcattgaaagagactaggataccaggtaaggtcacattttatgctgattggaatctggaatcctctttgttgttattattattattattattattattttgagatggagtctcgctctgtcacccaggctggagtgcagtggcacaatctcagctcactgcaacctccacctcccgggttcaagcagttctcctgcctcagcctcctgagtagctgggattacaggcatgcagcaccatgcctggctaatctttatttttagtagagatggggtttcaccatgttaacgaggctggtctcgaactcctcctggccccaagtgatctgcccacctcagcctcccaaagagctgggattatagtcatgagtcaccatgcctggccagaatcctcttgaaatgaaatatattgcctggaatttgttttaataagagtccaccgatgagcagtggagagtgggggcagttttaggagaaatgagtttggctatatagtaattactgaagctgggtgttgagaaatggaggtatatccttctgttctatatgctttttgtatgtttcaagatttccatgacagtacagaaaaaatacaataaaggaaaaaattcttctgaaggtcttatattgtcttgatctcccgtttaactgttcaagagtatcgttggactctttgaataaattataagataccttctcataaaagttacctgcgagaattattaggctagagtcaagaactgggtattagaaaggactgtggattaatgagataaaatttgtggacctttggttgcctagaaattacccagacaaattaggcaatagttctcgtgggaggtgcagatgggggacaaacattcagagagtctgcatcgtaccctcacattgcttctagttttttttttttcttaa

SEQ ID NO: 108058 - DNA, 1107 bp, Homo sapiens
ggctgaggtgggaggattgcctgagcccaggaggcgaaggctgcagtaagtggtgattgcaccactgcactccaacctgagcgacagtgggaccctgtcttgaaaaaaaagaaaaatgtatgaaaagttctttacttagtgcctggttcataatcattctgtagttataattttaaaggtgattgtatttatgtgtatgtatttttgtttataaaaaataacaagtgttgttctgttccttttcaggtcagttgaacataccgatggtcagagtgtcctaacagactcactatggcggcgatatagtgaatttgagttgttgagaagctaccttttagtttactatccacatattgttgtgccacctctgccagaaaaacgggtaagaagtgaaatggcagtagtttagaagtattcagcattgagactattcttaatgattattttgtttacctaggcagaatttgtttggcataaactctctgctgacaacatggatccagattttgtggagaggcgacggattggtttagaaaactttctcttgaggattgcttcacatcccatcctttgtagagacaaaatcttctatctgtttttaacacaggtatttttcttttatttagtcttagtaaaatattcatttaatttgggtttcttaaaaaaattgtagaatacttattttaaggatcttttcattaatttatatgcaatttattttttgttatgaatttctaattaatggattatgtcattcttttggttaactttttctatttaaagatactgatgatggtatttttggtatcatttaaataatattaaaatttgtcttcagtattttgaagcccagatctataaaatcttgggttcacctttggtaatcttttagaagttggattgaatgtttaattttgaagtgaaaagaaatttttttaaacttctctctccaattcctgctgaagtaagaacagaatgatagaaatttaatttacttaatttggaatatttgctttgcaataatgatttctaaaattaacttcaatttttaggaaggtaactggaaggagactgtgaatgaaactgggtttcagctgaaggtaagaa

SEQ ID NO: 108059 - DNA, 1039 bp, Homo sapiens
aaactcaaaagaaattggaggcgtagtctgacctgctccttctgggcctctgccttgccagttattattgggtctgttttctcccggaaagatcagagctctataaattgttaactttcagcaggttgagtaacacattcagcaaaaggtaatacttgcaagttttttttttttctttttgagacggagtttccctcttgttgcccaggctggcgtgcagtggcgcgatctcaggtcaccgcaacctccgtctcccaggttcaagcgatcctcctgtctcagcctccggagtagctgggattacaggcgcccgccaccacgcccggctaatttttatttatttatttatttatttattttgtatttttagtagagacggggtttcaccattttggccagcctggtctgcaactcctgaccttgtgatccgctcacctcggcctaccaaagtgctgggattacaggcgtgagccactgcgcctggcctttgcaaggttttgaggaaagtgaagcgttctgttgaagcagggcttgagttctgttgtaagtgtttcatgaagccctggagacctctgataattttctacaaacatccctttttaaaattttccaaacctgcttccttgacaagctttcactatggcaaccggatgggaaatgctcactggtggtaacagattgtggtaccttgaagtactttctatacaaagtcgggtctcaatttttcaagtacagaaacatttttctgcccacttagttatttcaagctgtaacacacaattttctcttcctggaatgctttatctgtcctgggagcaaattttcattcattcctaaaacctcagctcatttataatcttcaagtgctaagttgttcataaatctgttatgggctgggcacggtggctcacgcctgtaatcccaacactgggaggccaaggccggcggatcgcctgaggtcaggagtttgagaccagcctggccaacatggtgaaaccccgtctttactaaaaaaatttgctggacgtggtggcgggcg

SEQ ID NO: 108060 - DNA, 1132 bp, Homo sapiens
accagcagagtgacacatactatctaaaactcgaccaaatgaggttcttctctgtttaccctaaatcctcccagaatggagtcattgcactgagtgacctgcttcctgattgcgcagactgaaactagctaaacctgaatgtacctactagggcaccataatactgcagcaagaccaaagtggtaaagaaacacagtggaccttttaccaacctgttcatgtgatgtgagcaataccatcttaaaacttgttacctgaatcagtagatgaatcttttatccagttcttgctcctaaagttaagtttgaatcccctatttttgcacaggggcagcagatacacacaacaatgagaactcagtgactttgatttctttgtagtgaaaagtgaagtctccgtttcagagtttgtgtctttctttctgtccataactgaagtattcactactcttgtaaaccaaccaagaggaggagaaagatgacccagaagtggattcagccattgtgcctgaaatcagtgtttaaaaaaaaaaatcaaccaggttgtggtaacaaggcattctatttcttcaaaaagactgtatgcctgtgtctgaggaacttacctattatccacctctgttggaactctcttttaaaaagtacatttatagattgatcagaattataaccatggagaattttttcttctgagcattttaatatacttgaaaacaacattgacttgaaaaatttcagaacatttttcagtacctagttttattaaatattacacttgagagacactttttaaaaatgtgttaatgtcaatatgatgagattttagcctttctccagaactaaggcattaaagaaaatagcaaatattaaaaaataaaactgttacttttttccttctttcttttcacctttaggttaatatccagtattatgtgttatccctttggataagtatgctttattttacctctgttaaaaattaaaataaatgattctattcatatttgtcagtaattcaaaacttatatgtgtaactgaacgcgcatgtaaggtatggttttatttattttttttttttttgaggaaatttaaatgctaaagaaacaacgaaatgaaaaggtatcaggaaaaaa

SEQ ID NO: 108061 - DNA, 1030 bp, Homo sapiens
ctgtattattttttttggagacaaagtcctgctccgtcacccaggctggacttcagtggtgaaatcatggcttaatgcagccttgaccacttaggatcaagccatccacccgcctcaacctcctgagtagctggaactacaggcatgtgccatcatgctcagctaactttttaatttttattcttgtacagagtgggtctcactatgttgcccaggatggtattaaactcctgggttcaagcgatcctcccacctcagcttcccaaagtgctgggattagaggtgtgagccaccgtacccggcccccaaatcttgcagttagtaaataatagagtcaggatttgaatacatgtctaaaggactcaaagtccggttcttcccaatacttctaggtacaaatttccttaaaacaacttgacctgaggtctgacattaccattattttgtagctatgatatacaaataaaagttaggtacttcagagaaatattttacaggacaaagggaaattgagaaaataacccgaagaaataaaattctgctccgattcaaatctgtcattctgcttacatgcagcagcatgtaacagaaacagacttcctgcataaacagaagatacaaaggcagagcttaggaatttaaaagtaaaagcttgtaccaaactaccgtaagaaaggtatatttaaaaagttacgccaatgattaacacaaagcaaaagaagttaggttatggaaagcgatgctttttcttttctttcttttttttttgagatgcagttccgttcttgtggagtgcaatggtgcgatctcggctcggcacaatctcggctcacagcaacctctgcctcccaggttcaagcgatactcctgcctcagcctcccgagtagctgggattataggcatgtgccaccatgtcctgctaattttgtatttttttttttttttttgagacgtagcctcactttgccgcccaggctggagtgcagtggcacgatctcagctcactgcaagccccgcctcccaggttca

SEQ ID NO: 108062 - DNA, 1029 bp, Homo sapiens
atgcctgtagtcccagctacttgggagggtgaggcaggagaatcgcttgaacccaggaggtggaggttgtagtgagctaacaccactgcactccagcccaggcaacagagcaagaccctgtttcaaaaagaaaaaagcagttaagggaccgggcatggtggtgggcacctgtaatcccagcactttgagaggccaaagcgggtggatcgctcgaggtcaggagcttgagaccagcctggccaacatggtgaaactccatctctactaaaaatacaaaaatgagctggatgcagtggtgcatgcctgtaatcccagcgactctggaggctggaggagacattcttcactctttttgaaaaattctattttccccccaaaaaagaaaaatagttcttatgtgatatatatggcaaaactgcaatatgttcaacatcagcaataatggggctctctgaaggaaatttataccatggacaaatagttgtatttctgaaagatttttgcccatactcagattcacttaggtcaaatacaaatgtcttcaagtctgatatttattgttttgttctcaatggatatgaataggtagttaaaatactagacttttgctttgttttccatcaaggagcctgaagaaataaatgcagatgatgagatagaggatacatgtgaccacaaagaggatgacctgggagctgtagaagaacaacgtagtgtcatcctacatctcttgtcacagcttaagctgggcatggatttaacaagagtaagtaatggcataagctggctatggagattgttaagggctgtaccagtaattgttcatgtttatgtcaggactttttatttatttactttttaaattttaattttaattttttttgagatggagttttgctcttgttgcccaggctggagtgcaatggtgcgatctcggctcactgcaacctccacttcctgggttcaggcaattctcttgcctcagcctcctgggtagctgggattacaggtgcccaccaccatgcccag

SEQ ID NO: 108063 - DNA, 1030 bp, Homo sapiens
taggttatctctttaagttatattaccaagtagcattactgagtcaagagtaatgcatagtttatggtactttatatattcgtaaattacttctttaaagaaatatatggcacagggacttccaaagttggcaaaagttttggcttgataagacaggcattgcaggcaagggttggcaggggagaagaaaaaacaataatgtataaaatgcttatttctctgtagctgtttgactggcttatttgtagaaacagcagttagtaagtatttattaagcttagtatatggcaagtacaatgctaagaattagaggagaagcaaaaattagaagatacaggtttttcactgaagagacttataatctgcttggagtcacaacatatacactaaaatgagatgataatataaagcaatatatttttttcttaattgataccatgtaggctattgggataggggcattcagagaaaggaagaagacatattgagtcgggtacatgagaaatgctttggggagaaagtgggattggaattgggctttgaaaggagacaggatttgaagggaggaggaagagaatgggaatctcaagatgaaggactaacactagcaaggatcctaaggcatgtgtgtttattgaagagaaagcttgcctggtaattttgaacccaggatatgccattcactgacatgtgaaccaattaattaaccactcttagcttcaacttcctcatcggtaaggtagggataatatactaccttgtaagatccttatgaggataaaatgaatttagtagaacacctggcttatgggaaatgatcacagtatttttggattttacaactctgaatggcactattcatgttgtactctgtggaatgaagcttccaggagcactgctccatagaatgcagtgtaaattgtgcctccaaataacataaaaataatgcagaagggtttagtcttaatgacaatagcgtcatgatcatgggtaagaatgtactatgtttaagaagattggtacatgatac

SEQ ID NO: 108064 - DNA, 1068 bp, Homo sapiens
acccgggaggctgaggtgagagcctcagagcctgggaagtcaaggctacagtgagccgtgattgcaccactgcattccagcctaggcgacagagtgagaccctatctcaaaaaaagaaaaaaaaaatcacctggaacagagcctctgaaagctaaaagagtctgtccactatatagagtttctatgtgaactaaactagtgttcaaaggatggtccattagagagccttctgctcacacctgaaggtcattaagcatcataaattcacttttcctctaaaaaattggcttgctcatcaatcattgttactccattggttctattaggaaagctggacaatgctcctaataaaagcagagtgtattaaaatcttttaaactgaaaagcttgcatccagtacttggtccaaaagcaacataacaggaccagaaagtttggttaggaaagaggaagcaggaaagccattatgcactcatagtaggttcaaattgagcctgaccaaaggtataagaagtaagtggttgagagcccagactggaacttaatttaactttggaatgaagtatttgattttcctgttaaggatcttctagaatctttctgataacttgatggcttaatattcccttttttttttttttttgagacgtagtctcactctatcgcccaggctggaatgcagtggcgcgatcttggctcactgcaagctccgtctcccaggttcacgccattcttctgcctcagcctcccaagtaggtgagactacaagtgcctgccaccatgcctggctaattttttgtatttttagtagagacagggtttcaccgtgttagccaggatggtctcgatctcctgacctcgtgatctgcctgcctcggcctcccaaagtgctgcgattactcttaataaaaagtgccaggtcttttaagttttgttgcttccaaagaaaaattgcagctgccttagataacaatcttttgcccaattgataagcaccattaaatgttcattaaatgaagatagccaaacgaacttttaaaaagcctaatatggcctaatatgtctttt

SEQ ID NO: 108065 - DNA, 1093 bp, Homo sapiens
aaaacaaaacaaacaaacaaaactaaaaaacgaaatcatgctatgaacctcaaatatacacagtaaaatttattaaaaaaaaaaaaaaaagaagagcaaagcagagctctgagcagcttcctgccccagcatccctggttctgctgctttcttcttcccaggcagccgtgtcacacagacctgcagctgagatgggtgccatctccctgggttgcttctgcagaggaggcctctcctccccagtggagcctcctacctgccggctattgactgagtgtccagctgaggacagcatccctgcagtgcatttcttgcccactgatgtgatgtgttcatgactcccagcctctctgtttgctctgccactaatacaaggaggtgccccagcctctgggcccctgcagctgtgccagcggatggtgctgttttgtattccttaatttgtgcagcaccagctgcgtgcaggcactgtgcttggcaccggggctgtaataggacccagacagatgcgtgcctgccctggccaggctcatgctctgcaggtggggtcagaggtcaacatgcagtagaggaaaggacagcagatggggtgcacaggcaggctgtggttttatacggggcgatcagggaggcaccccagagaagggaacacaggcctgcaggaaatgaggtgtggagtgggcagcaggaagggcagtccagggggcagtggggcacaggcctggtgtgtacaggccagaaaggaaaggcaggtggccgtgtgaagccgcaaggggtgggggggagtggggaggcactggccgggtcttgcttcttgcagcaaagcatgctttgggcctacccaggtccctgccacctggggtcccaatgcccctacctgccctggagggaccggccccaccagccctctgttccttgcagctgtgccataagtaacgtgaagaaggtgtccctggaactgggcgggaagtcacccctcatcatctttgctgactgtgacctcaacaaggctgtgcagatggtgagggccgggcctggagggggcagggacagtgagcgggaacagggactgtagggaccaggaggccctgtc

SEQ ID NO: 108066 - DNA, 1045 bp, Homo sapiens
tagtgcgagcagtcttcaaggcaaggtgtgagggacagtgcgggtctctggagcaatagccagtggaggagcctcagaagcctgtaggctgtgtctcagctcaggagtatgggttgctgtgtggggacccacaggggccctgccagtgaaaggttgggccctatgggacgggcctgagtacattgtgctggggcctctgtgtagggtctgggccatcttgacagcaacagaacattatcttccccaaaccattctgaagtctgctcagcccatgagagactgagggtcagagagcacccagaactaggggcaccagctcagggactcctgcaagtgtctaagaggaagctggggttaccagctgtctcacaagagcttggtccactgtccagatgtcatcagggtgggaggggagtgaggagagaccagctgagcacacacaccttgctccccacagatcaactgggaccagccggcagaggccattcacaactggatccgcgggaacgacaaggtgccgggagcctggacagaggcctgtgaacaggtgtgtccctgcatggctggaatccagccacgtgcattggtgtatcccactggccattaaactgtcacacatgtttgaactggttggtataataaatagctactgccctggcccctactcccactgggtgccccctaaacatcccagcctttccccaggagtgagagacctacccagcctgcagtagctaaaggatagatgtcctgcgtagctggaggcctccaggcccttgtagtgcccctggggcccagctgtattggtggtgaaatattttgagtctcaccactgggcttgcggagaccccaggcccagtactcactctgacttggcctcaggcagggtggagcagcacattcagggccaggctgaccgtgggcaggccagatgctgaagatggggagacttgggggtcacaggctctagtgaggcatcaggggtggcgggactgtgtgtggtggactttgtgcaaaccttgagggcagtcttgtcccccacaca

SEQ ID NO: 108067 - DNA, 1014 bp, Homo sapiens
acaaggtactctgaggggacagaattcccaagacaacaaatggggtgacaaggcagatgggtggtcaaagagggaagacatttgagttgagaaaagagagtggatttgtagtcggactggtctgttgagattcaggctctctgatctttgtgggtgtcgcttcacttttctgggccttagtttccctatctgtaaaccgagtatacctgttatccctgctgtgaggactcagttacataaggcatatagagcttttagcacaattcctggcccatggttgttatcaatacatgctgttttccttcttccgtttcccgccggagccggtgtcagtcctacccctgggaagagagggcctcctggagggtggcaggtccacgggcctgtacccaggacatcctccgtggcccttcatcgtggactccaggtttcactcttctgcttcctaggaccctcattcacggagataagaaaggggggttttccatcttctgggcggatgatggtctggacaccggagacctgctgctgcagaaggagtgtgaggtgctcccggacgacaccgtgagcacgctgtacaaccgcttcctcttccctgaaggcatcaaagggatggtgaggacctggagccggccgcgccctgcccgccccgacgcaccctcaagcatcctccctagacccagcccaccgctcctggaggccaggaatctgttccccaaattcaggattctggagggagaggagctctcacttcaaggtttcagaggcaggattaggacaaacagtgtattgtattaggagggaatcttgctcacaacggacagaacccagctcaaaaagcgtttggcaaaaaggggacattttggggcccgttcaatagacaaggaaggctaaaggcagggactgggtcacaccctgctgaatccaggagcttcaattatgacatcgttaggattctatttctctctccttcactcgttgattctccttttctctgtgtgatttgtttcattc

SEQ ID NO: 108068 - DNA, 1030 bp, Homo sapiens
acatatagacagagaagatagtaaagcaactgtggcaaaatgctagcaataggtgactctgggtaaataataagtgggcatttgtactttttttttttgagacagagtctcactctgtcaccaggctggagtgcagtggtgcagtctcggctcactgcaacctctgcctcccaggttcaagtgattctcctgcctcagcctcccaagtagctggcattacaggcatgcgccaccacgcccagctaatttttgtatttttactggagacggggtttcaccatgttggccaggatggtcttgatctcttgacctcgtgatctgcccgcctcggcctcccaaagtgctgggattacaggcatgagccactgtacccggcctctttgtactattcttattcttaccattttccttcattctttcatttccaaatgaaaaggtaaaaatctattcatatcttgcccctcgacatctcccatataatcttcgcttcttgccttattagcactcatatcttgtttcacagattttccagttttttagagttttattgagattgctttgcaaatgtttgctgaaatgtacattttgcttttgtagtgagtagtctcaacaaatatgctcttcctctgtgagtgtagcttcctgacaacttcctcaattttgcccatggcggaacattcagtctctgtcttctctgatctagaatcttttcaggcctcatttccccctgtttactcctacttgaaggagaggagatccatatggacctggtgcttgttggtaaacagagtggatgactgcccctcccgctacctcttgaaagaagggtaacttgagcaaaacatttcttgccaacttcctggtggcctagaggctttagtgtcgtgagcctctgctgtcctgagagttgagtcttctgagagcctgtggtctggctgttcttccacaaaggcatgagtttattcccgcagcttgcagcaatctgcagggttttcctctggcaagaaaaatcaaaacccaaagcgcaagg

SEQ ID NO: 108069 - DNA, 1690 bp, Homo sapiens
atctatgaagctggtgtacatatgttacaattacgtatattttctttggtccttcataaaaatatatttactttgccaataaaaagaaaaagaactcacagcttttggcattcatgtgctgttttcctgctttgccgggatgtggaggtgactctggggccgagtctatgtctccaccttcgcagagttcagggaactctgttttgtatttggagggatagaaaggccccttggggtccagccccggtccagcagggtagggttcccatacagctcagctccaggccagctgctgagattctgctcatcccggctccctgacctggagctccgtaaacccaaatccagcccacattccgacagcacctgtgggaagctgcctcaggcctggccagtcctgcgaggctcacctactctgctatcggagaccctttcttgcacttcctacccccatccagtccaccaaacctattacacatgccctatatgtttgctgtgccttggcagagtatttacccccttaggaacgtggctgtgccatttcctactggcgtgggtaattgtgaaagtgttaggaatcctgagcaggcagaggtgagactcggagaggccagtatatgcagttacgtcctgtcctccatcgtccctaactccccaacatgcctggggtcttcgctgtgtggttgcacagttgaggttggacccatccacacgtcctgtgctggctggagcctgggggaagtgggggcccaagcacaaggaggggctatgagccccacagggaatggcaaggaaatggaggctgaccagggcctgcttcagtggctcagctggtatgaagcacacacacacagagagggctgccctggttcacccagtcatgtgcagtgggaagcaagaaccttctagaaggatcctttgctttataagaactggatgcaagtcgggtcaagtgtttctcggtgaaaaccttggagatctggaggctgggggtagggcacccatgggctcccagcagagagatgtctgaatgtgggggtctgtgtgaggtcgtgcatctcagagggcagaggccgttgttctcaccagccgcccagcacacagcacagctgataggaggatggacatcctatcctgactggccatggtcccgaggaggaggctgggcctagtgacctctgtcctttgcccctgaccggatgtaccctctgtgggcaaacacactctagggaagcaaggcattgatttccagccttgttaacatgggctttcttcatccataaacaagcagttcagccctagataagaggtacgtcagagggacagggaggattgttgtctggtcaggatgatgacatgggacgtggaataacctcgggagcatatgcaccttctgtgccaaggaccggccggacacgctgctcacctcccctgggtgtgtgtcccaacatcctgctgttgtcttgtggcagggagtgtgtgtaaggggtggtcttagtggtctcctcagtctgggcttccaggcttgcacctgaattgtgtgtacgtgcacacatatggtgcacctccccgggatgagtgtgcctcctggaggtcttggctgagtcgtggagagtacagcacagtgcagggaacagggataatggggccgcactgcctgttgatcctgggctccagctctttatgtgtg

SEQ ID NO: 108070 - DNA, 1001 bp, Homo sapiens
ggtgcaccgcttcccgcggagcagccgctccgtgcgctccgtgaactgaaagcgccctgaaccccagcctgtccgtcaccccggatccccaccccatccccatttttttaagcaataatttatttgcctcctccagagggacatggcaatgttaccagcccaccttctgaagcctgggaggtgtgaacccagggcccgccaaccgctgcctttctcgggagtacttagagcctcgaacccgcgtccctgggggctgggccccaggcgcacggggctggaggcaggccttcgtgccttcgtgccttcgtgccttcccgcggtggccaggcctctgctgcagccgctggttgcaggcagagttttggggacctggcccttctcccactgggctcccccatcctgggccaaggccagaactttagtgctaggggaagatgaaatgtgcagttttgaaatgttgggtttccagagagagtcatgctggaggagaaggaagtaggccagaagtccagggctgcactgtggtgtgagggtggctttgtctaagatgcctgctcagcatgatcaccagagggtgtgggcaggtccctggagccgggggggggggggggggggggggggggcaggaccgggccgctgggccctcatgtgggagagaggtgaaaagcgtcccccactagggggctggcagtgcatgtgcttgagttaaatgtgcagggcagacagagccagaagggcctgtacccaggggctcgtcccctcctccggtttcccagacaaatccagacaccagcctttagggtggccttgggaggagagggccaggctgtcctgggtgtgagagaactagatagagcctcccaaccctgatttagaaatgcattccttattttgtctagaaattaataaatgaactagcttgttttgacaggtttatttcacatcctatgaatgtatgtaaataaactgtacataggtccatccacataaaatatctttta

SEQ ID NO: 108071 - DNA, 1013 bp, Homo sapiens
tctaaaccgttactggttgccttgtacaatcctcacagtcctcaggaataggtcttttgttctccctttgtctgggtagagaaactgaggctcagggagcttggtgactttcctagtttgcctggttggtaagtggcagagcttactgcctacaagggctgcatcttacccaccgggttcccacatcccccactgtagtccccagggctctctgttggctgctgtttgggagaatgtggcatgcaggggtgaggcagggggtcttctgagggctcagttcccagggaagttcctctcaggtgccaggaccctgtggcagcagggagggaattcaggtgaggacagcatgttgtccagcttggttctatctcatctgcctgtccttcccagggtgtcaccatgaccagagatctgtgtggccccacgtcaccacctgtggcctttgagatgagtcttggaaggtgggcaggaatgccagagtcttcattggatgaatgaagaaattgaggcccagaaaggaccattcagggcacccagtggggtgggaactgtcaaggcaggagcctgagactctgtcccctgggctgtgtgacttggcctctttaaacccttgccatggtcttgccagtccaatggggctggctcatcctggttccctggccagtgagatgctgggtgaccccagggctgcagcctgggaggcgtggcactctgtgtctgcagctttctgcttacccctgccctgggccagctcctctgctcagaagctgtgtgcccagctgcagctgggggcaggtgtcctgcccaggagcacaggtgtcagctttgactgccagggcacatttatcccatttcctcactggcacagggccctgtgacacacacacccatccaggcctgtacaggaggctggggggctctgctgactgggagtccaggtcatctgccattgccagggcagggggctgtgtcaagacctctgctccagcctcaggggccctgtcttgtcagtg

SEQ ID NO: 108072 - DNA, 2004 bp, Homo sapiens
aggtcactctgctttgtgaatgggatttgaacccagaggccggattcgagaggtcacatcctgaaaatgctgcttccccaaccagtgggactagcttcattcacagatgtctctggacacatgggctgggcctcgcctatgcttcctccctggggacgtggaagcatgtttgggaggctgcaaaggccaacccagagggaggctaggccagctggtggtgctgtcacaggtggcagaacccaggctgtctggtctgcatggcagtggggaaatcaggcctcaaatggtaactggtagtctcccaaccagggagcacccttccctgagcaccgggtgctgctcaacctccttgggagtggctgtccaccttttcctgaaatgtaggctgcttgcgaagagctcatgtgctccggggtgccagagccagccctctgcagttcctgatgcccatcccaaaggaatctctggcctgcctggggggcgctgtgtgctgttggcacattccaaatctttgctgctgtggctgctgctacgtgtgtgagacggggcacactcatctgtatccctgggggtgtatacaggcctgggcctcgccagcaggtgtgtggctgtgtgtgtgcacacccacatgtgtatgcatcttgctttctttgtgtctgtctgtgccgtgtgaccatatgtgtttgcacacatacatgtcttaggtgtttgtgcaccatgtgtggctgcctgtgtgtgcatgtgttatgtgtgggtgcaacacccggggagcagtttgcagcttttgttttcttgaccatactctggttctgagagctcttgagagttgtctggggcagaggttctggccagtgaggctgagctgtggtcagggagctgtgagtggaatgtatgttgtggcactggtgccacctttccattgagtgccaatctggccagagaagggaattttcctgaacagtgtctaggtttatggaggcccctcctgagtgaggacatcactctgtcctgtctcccaccccattcagacagaccggagaggcttctgtgagagcccaccctggggcctcacaaggtctccatcctggagtccccacctctctgagctttgtacctaggcctgccgagtgggtgcatggctgacaggttgcttgtgagaggaggacacagcagcaagtacactgcataggaggttagaggagccgagagaagggccaggagtgctcttgattgaagcaggaaacttgtgcagagaaggcgagggcacaggtatgtgggggctgtggtcttgagcctacgcctgggtcagccactaacttgtcatgtgcctttggggtggtccccctccaaacctcagtttcctgtctgcagagtggagggctagccctttgcagcccagggcaggcgtgcagggctccacagcggcctccttgttgtttgtacatcataaggatacaaactcatacacggcagtttctgaggaggaaccctgaaggcattctctccagcccccaagagggtggtgcctattgtgaagggaccccctactcccagggaccctgtatgcactctcctcttggtgagggcgggcaggggctgcagagaggcagggaaacctccctccaagcaccagtctggactccttagtcgggctcaggtttcagcgccgtctcctggccatagtcgaccgttggcaagtagctcctctagatgccgtgaggctgggtagggtgatggggagggcaggtgtggtcctcatccaaggccagccttcttcctggatatcttagggccagagagctgataggcccctcagcccaaagtgtatctcagtgaggcagatcttagttctctatacagtggcctcaggaggtaatgagttcctcatggcagggggtgtacatgagagagtggggacctgtggaggggattcagctctgacacatctgagccctggcactggtcgtgctgcccaggacccacttggcaagagaaggtgtagtg

SEQ ID NO: 108073 - DNA, 1048 bp, Homo sapiens
atgtccatctataaaacagccttgcactgctactcttaaggaacacactgaaggatgggaaaggggaggcacaaaacatccgtgcaccaggcacaggtgccagggacttctcaggctattttcttgcacaattctcacaacttcccagcaaagtcagtgtgatctctgggatgtagagccctcagtctcacaggggagggagctgaggttgagcctttgtgtgtctgagacattccccgcctcaggctgtgttcacagttctcatgggccaggggagtcactgctgcggccctcacttttgtgtctcctcagagaacagcctggaatccatgaacatcagctcttcttcaagcactgaagagaacccaaagaaacaggcaagaaaaaacgaaggtaaccttcaagctgggaggctaaagtccaagttggcaggaggcaactcctctccctctgcccccagatcccctcagaccaggtctctagagctaagggcagaaggaaatgtttctctttccattaggaattgggttgacttgaaataacaggcatgtaaacaaagtaggatttattgctccctctgttaatgagaaatgtgggacgaaatgcagactttcttgaggctccactaacagcagttccataaaatcactcaggtgaccaggtccccaagtctctctgctccaccagaaaggaattagggctttcaaccacaattagggctttcatgctcacaaaatggctgctgcagctccagcctcagcacatctgattccaggcagggaaaagtaacaaagggaagggcaaaactacccttcagccaacttagccttctaggggaagggatttttcccaaaagttccaagcagcaatgtcttcccacattccagcagctaaatttgccatatggccatcaggatctataaggagggcacactgctgccaccgttaggaggaaggagggcaggtagctagctagctgcatgtgcctcaccctggtagccctgaacagggcatcgctgccacctgcactgtggctccgacctccctt

SEQ ID NO: 108074 - DNA, 1092 bp, Homo sapiens
gttcctgcaacccacaggttttggcagggactggacagggacagagccagaggggcaggggtgggggcagggaaagagaggggcgacttccgaattccagcccagcactgggccattcacctccccatcgctgtcggtgtcctcctgcgtgggggggatgggagagttcgacctgcgaagagatggcagggtcgggactctgggaccagcctgagcagacaggagccaggggagggggcacagaggtcttgaaggcgttggcagcatccccatccctcctctcccagctgcccacaagttacccagagggcagcaccagcttcctcacagtccccagctgccacactgcagccaggggatagtttcaatccactcattttcccaaggccgtagccactttgacatgctggacaaaccatgttccagacctgtcgccagaggccccagtcctgggtggccagatggccctcacccatcccagctccactgcacttagaataaaacctgctctcctcttgggtcatgccaggcagccctcccagcactcaccttgcctccccttccccagcccctctgccctgcctggccaggtcccatctctctaggtgctgccctaccccaggcctctgcacctgcggctccgctgctggggctgcccctcctccctcacccttgtttactgagtgccacctttgaggcctttcctgccctgcctcccccatctagggtcagtcttggcccctgtcctgggggtcccactcacagcaatagagggactctcagggctgcctccaggtgatcctgagtgcccaggggcaaggtctgtcctggaccagtggagaggggctgggaacaagctgtgtgagctttaagcactcagtgtgggccccagaaggccccactcgatggggacctcacctgcactgacttccaaacctgccctcccagcctgctccaccctgggcctcacctaggatctgcaggtcctgctgactgaggtggggggggctgcgctggcttgccccaggcacctcagggacctaagcttgggcttggagatgccagcccctgatccccagaagcagagaggca

SEQ ID NO: 108075 - DNA, 1427 bp, Homo sapiens
agcactatcaacctgcaggatctgcagtgacggcagcctcggcctgggcaggcccaaggccacggtctaggacacaccttccctgagactcatgacatgagcctggggagacctcatttggtttccgttcagaagaccagcgtagcccttttgagacttttgggtacatttatcaaaaatgttttccttttgttttaccaggaatgagttcgggctatactctttgaaactgcctttgtgagcaaagtgctttggcaaggcaagggtctccctcagcagggctaggtgcactacagcctctttccccgtgtcccgttggatctgagctgtgtagcacttgttgcattacaaagaaaaagacttctgcaggaaatagggtagagaacaggctgtctagtcagatgcagcttgatctgtggcaaaaccaagtgtggtctttcagcttcagtgtgttagcatcccagcacctgggatggggtttgtgggcaagttgattttgccacactgtagggcccaggtggtcccattgccaccgtgaagccaaattctagcccaagtctggtagagcagtcgggcagctagttttcgggggaggatgatgtggtgggacagaggacctcagtggcctattacggagccctcttcccagactaaattcatagccgagagctcggggggatggtagagttaaaatttaaaataattttctaaattctgtatttggatattagtgtttaagtggtaatttggcaacagtttataaagtgatgttctgaataccataaattatgtgtaggactgtgatggcgcgtgtatgttttattattgaggttgatgtgcacataatacgtcagtgtatatttttaccgagtgaggtctgtcttgtaaaaggagacaaggtgatcaccttgcccatgtttatttgtaagtctgtcaacttagcaatgacacagggtcactcctaaatgacttttttttttttttttgccttgtgccttttgaagtatgtgttcattcagaggctgttttgattctcagactgaatcattcaaactctgccctgtgtttgtttcttgaatttgggggtgacatcaagtttgagtgagtcctccctctgtcttgtctcactctgaggtgctgtccccaggtgctgttccacgtggaagaatccacacctcgtcgacaaatgggtcttctccacagaccggcgctctgtcaccaactaaaggcgaggggagaacttgcccacctggcaggctctttagccccaaggtggcccggagtcctcctccctccatgggaggcttttggccaccatggcgggtggagccgcacccaccccatctccatggggaggagagtcttcccccaggaatgccctctcggcctctatttttctcccatgtgcctccctgggaacgtcaccg

SEQ ID NO: 108076 - DNA, 1975 bp, Homo sapiens
tcaggcaagttcctgaattcagtaccatcattattatttttgtgtaagactttgacaaagtatagcccctgccaccagagcagcctgtacagtgggtctctaaggtgggacctgccccgggcctgccatgcacgtgtgtgaaacagcgtgaaaagtgtcgcggtaaggtgaccctgggttacccaggcaaggctcggtgtttgtttcagaaagcagagaagtatgtaattgattttaaaagtttctgtttaaaatatttggctatgttttagactatgaaggaatgaactttgcttctctggataagaaagtcacatacattgttccagctccaagtttgttcggccctcgccacaagtggatgtagcgtttggccctttgtgtgccttgctggtgactctggttttgggagctcggatatgtcccagaagcaggcttatggcacttctgtagctcccttgctacccttcctttgtgtctagataagtgactgacatgcttttctttggtctcaggaaagtgggggctcagcaagaactgattaccgagccattcaactagccaaggaaaaaaagcagagaggagcggggagcaatgcaggtgaggccgtgtgtgctgcagccggacgagcaagggcctgagggttctctgtcactgttactggcagaagaaacacagcaggtgtttctgtgctcttggttttacttttctgttcagaatacccttttatcaactccttagttttatttgaacttaagggaaaaaattagtaacaaaattcccagcatcagtatgaacatattttatttgcctaaacaagctttgtgaaagttaagcgttcaaacaccagtgtcagttacctggaaggctactaaggtaaataagcaaagcaggccagttgtcaggaaagcagagattgtgcctggtgctgaatggccttggggcctgatcttggcatggcagagacctggggactgccactgtccccaggtacgtgtacatggagccaaactgtgtgtcctgtggcattgtcagagttatgttgaaatcttatttgaaaatgttagcaacttacttgcatttttaaagaccaaacaagagctggtaacctatggcctcaagcatctgtccttcctaaaaatggaatagtgggatgtagtgcttaatggaaactgctaaatctttttctaaaaactaacagtggatttttaaaatatattgttttttgtgtatttcatttgtcctttgtatttatctaaaagggttgatatgattttatatcttgctctctattcctaatagtattatgacttcttatttaaaataaataacaattgccggttttctgttaatcagttttcttaaagccagtgtttcactatagtgtatgcatcagtgtgaattgtgacttaggaagggacacctcaacagttcacaaagtaccagaatggaacttgcagagataatagaaggaagtgtggtggtgaaatttgtagaaagagttgaccatataccaaggaaagttcatgaaggaaagcggatgcctttattgaacctggtagataatcttgaagaaaaaagagacaaacattcaagtatataacacgtgtcctatttattacattgctttggagtactatctataaaggaggtttgatgttttcattactgtttttgtaaatatttcagcattatctttaaaaagtaaggacattggccaggtgcggtggctcatacctgtaatcccagcactttgggaggccgaggtgggtggatcacctgaggtcaggagttcgagaccagcctggccaacatggtgaaacactgtttctactaaaacacaaaaaaattagccaggcgtggtggcacgtgtctgtaatcctagctacttgggaggctgaggcaggagaatcgcttgaacccaggaggcagaggttgcagtgagccgagattgtgccactgtgctccagcctgg

SEQ ID NO: 108077 - DNA, 1266 bp, Homo sapiens
gttcagtcctctcgggcagctccggtggcacctagaggggagagggtgcaggctttgaagccagaaagacatggatgcaagtcttactttgcttcttgctgttaccagttggcctgaccttaggaaatgttatttaatctctctccagttgtttcccctggagaaagccctgtcagcctgaggatccaagacgcgtacgtaaagtgtctgatttcagccagtgtcccttcctgtcccttcctggggtgtgtgtcggttgccctgagcgaccggccatgggactctgtcgtgataaccaagcttcagggtgtgggaagaggacagtcagtgcttccttggggcatcactcggtaacatcatgggcataaacaaaagtactcagtcttcaaggtcataaagtaaccagagtgtattcctttttttttcagatctcttacctcagctagaagctccgagttctcttactcccagcagtgaactcagcagcccaggccaaagtgagctcactaacatggatcttgctgcactcttctctgacacacctgccaatgctagtggttctgcaggtgggtcggatgaggctctgaactccggaatcctgactattgacgtcacttctgtgagctcctctctgggagggaacctccctgctaataatagctccctagggccgatggaacccctggtcctggtggcccacagtgatattcccccaagcctggacagccctctggttctcgggacagcagccacggttctgcagcagggcagcttcagtgtggatgacgtgcagactgtgagtgcaggagcattaggctgtctggtggctctgcccatgaagaacttgagtgacgacccactggctttgacctccaatagtaacttagcagcacatatcaccacaccgacctcttcgagcaccccccgagaaaatgccagtgtcccggaactgctggctccaatcaaggtggagccggactcgccttctcgcccaggagcagttgggcagcaggaaggaagccatgggctgccccagtccacgttgcccagtccagcagagcagcacggtgcccaggacacagagctcagtgcaggcactggcaacttctatttggtatgaagcactctattcagtcaccaccatataggtcacttctctcatactcggtcttgaggatattctggattaatcctttctatgcagacgtttctggtttacaaaaggacgcagccctggactacaagtctggaactgacaagttctta

SEQ ID NO: 108078 - DNA, 1022 bp, Homo sapiens
ttgagaagtctgcagaggcccagtgttatactagatgcactttccttaaactctagtgggatgtgagaccctcttctgtagcaacctatgtatcccaggattgaatttcctgtgtgacaatgacttatttgtgtgtcatccccctgccagctgtcaggggtagaagaccaggtgtcaccctttcgtctagtgaaaaacaggcactcgagaacacccagttaccgtgggattatgtcacgccctcaatgggttgtttcagtccccctaatggtggtcctgggagtgggttcctcactgctttgtcactgatgaaaccaagatagaaaggacttgccagggtcacacctgcaagaagggctggggctgggctttgaactgtggtgatcatgactgttttgccagatgctctgctatctaatgtttatttagtgattgtgttaatatctggcccttgtacatgtctggtctctggtagtaaatgtttatagaattagtaaagtgctaagtaagaaatttattaataagtgggtatcatttgcactgagattattcatgatctcttcacagggagctgagtcctcaagagagtcaagggaatttttaggaagttttgaaaaactgacatagttttccatttttaatttctccaaaggatcactaccattttctttcaaaatgcttcattggtactaagggatatttattgaagaagtgatactatattgatactttttttaatctttaaagtaatatgacaactaaagaggatacattctgaatttgattttctttttgtctagaatagacttcttttgtagatttgcattattaaaaatataaaatataatagacattctggccaggtgttcacagcctgcaggtatgagcttgggaacagtaacagctggcatgggagaaataggatcagagaaccgagagcagcttttcctctgggccaggtgctggcacagtcaggaagctgctggggacagtcctatggaaagcgtgacatcaagtcctta

SEQ ID NO: 108079 - DNA, 1048 bp, Homo sapiens
gcgtcaggcagtggggttgtgggcgtggctgccaagccaagtggcctcttttgcactctctgccactttcttgcctttgaccctctaatccctcccatgtcttttgttttttgagacagggtccctctctgtcaccctgactggagtgcagtggtgtgatcatggctcactgcaacctcaggctcctgctcaagtgatcctcccaccccagtctccagagtagctgagcccacaggcatccaccaccatgcccagctaatttttgcattttttatagagacagggtttcactatgttgctcaggctggttttgaactgctggccttaagcagtctgcccacctcagcctcccaaagtgctgggattacaggcatgagccaccatgccctgcccctcccatgtctttgaaatgctttcctggaagaatgtttcactttgttgactttccctagcatatgtcccctaagcctgtgtctctcactgggacttttgtcctgaattctgaacctgcccctcctgtgtttccgtctgcctcagctattctatctccaagtaacaaaggctagagcagagttgtgtttcaggagtggactgggagtaacgagggctggagagggcagggttagagaggaaagtgacggtggcctggtgacctgtgaggggaatgctgagtgtgtgagtgcctagtcattgggcagctttgcagcatgggactaggaaacctaccccactaggccttctccacagtccaggatacagaagtgcctggcagctgtggtggcggcccctctggggagcacacccatgtgccctattctctgggccctggtgcggttgtcgctcctcaccgggcctggctgatggcatcctagctggccctagagttacttctgctgctcagtccgtggaggctgtgtgtgtcaccaactgggtcctcacgtctcctgtgtgaccagcagcaccacagcagagcaccggctttggggcgcagctgtgtcacagctgccgcgttggcaagggacaggcctccatgcctcgcacagagttt

SEQ ID NO: 108080 - DNA, 1034 bp, Homo sapiens
agaaaggctgctgaggctaggcctgctgctgtttagttctccttgtcatattctcatttctctcaaagataagaatgctctcggataaaatgagcctgtgctcatgacagctgctctgttactcagggaccagtgcagggctgtcttacgacacttagatgagaaagtagacaaggaaagaggacagcagtgggcatctgccttgtggtcttgctgacagcgagaagcagtgggactgcttccttgacgccttagcttggagccccgttatgaggtgagccaaggctgactctcgcaagccaggactgagcttccctcggaaagacctttgagtggcaccattcacctaagttagcttttctggtcgctattgtttttatcccctttgctttgttgtttctgtgaaaatatattttcagttaagaaatgctataaagtagtggttttctagtgcgtgggcctagaattcacacatgctcactggtgaacagtgtctgtgggctgctgtgggctgcatttggatagctgtctgcattagcaggaagctgtacacactgtgtagggttagtcatctcttttcttttttgaggcacatttaacctactgtcaaaacgctgactcatgcttcaccctcacactcactacttggtggtgataaccttgaagctattctcccctaattaatatctcgagactgagcaaaatatctcatgtaagataaaagtacttgaattgctttttcatgttcatcttaatagtattatttccaaaagtttttaatactgtattatgtgaaatctaactaatttatctgtgaaataattccatcacagtctgtttaatgatgataaagttccataaatgaatacaggtaatattaagtggttgcatgggaatttacaaacatgtcagcatttcagaggtccttcaagacagaggcccatccaaggtccttttggaaaacctctgtgttcttgagtatgccacacagtagtcaatgcaaggctcttttaggccacttgctctcatgagcc

SEQ ID NO: 108081 - DNA, 1062 bp, Homo sapiens
cccaggagctttcagctggggaagtactgctcagctctgttaggagctctgtggccgtgtggtggagttggcgggagacggatgactggggaagggccctgctgcattagtgggtggggtcaggaatgctgagtataccatctcatgcaaagaaaaattgtcccaaacacaatgcaatagaacattttgcaatgtgtgtaggcagagtagttggtgatagggaagtacaattgggaaggaggctggaaaactaatttggtgccagatcatcaaaaatctttgccacaaagaagaattggtagggccttctctaggcagtagggatctgttgagacctttatttcccccaactttttatttagaaagatgtcaaaagacagaaagagtagtaaaacaatcgcccatattgaacctttcacccagattccccagttattcacatcctgctgtttttgttctgtctctccttttctgaatatgtgtatgtgtagttcatattccttttttgttttgctgagctttttgctgccactttttgaagtggcaggcatcaatgacatttttctctaactacttcagtatatatctcctaagtacaaggatgtttacctccgtaactgcagttctgttgccatatctgagaagttcaacaaaagtactataatattcaatttccccagttgttccttaagagtgtttgtgtgtgattttttttttttttttttttttgagacagagtctcgctctgccgcccaggctggagtgcagtggctcgatctctgctcactgcaagctccgcctcctgggttcatgccattctcctgcctcagcctcccaggtagctgggactacaggcgcctgccaccacgcccagataattttttgtgtttttagttgagacggggtttcactgtgttagccaggatggtctcaatctcctaacctcgtgatccgcctgcctcagcctcccaaagtgctgggattacaggcatgagccaccgtgcccggccaagagtgtgtgtgtgttttgatttgcacagtacatgtggctcttttgacgct

SEQ ID NO: 108082 - DNA, 1047 bp, Homo sapiens
gaggccaacaattcttttgtaattagtttatagttttgacagaaactatacatttatgttttatatactctttttatgtagaaattttttcagttaaaaaaatgcagcgtagagaaagaacatcaacaaagcaaaaaaacatgtaacaaaaccaaaatccaaaaatcaaccttattgagattttgattaggattggattggatatataggaaaatttggaaacacttgacttctttgcaatattcagtcttcccacccatgaacatggtatatctatccattaatttagatcttctttaatgattcccagcaaagttaatacatttctccttagagatcaagaatatctgttagatttattactagatacttatgtaatttatatgtagtcacaaatggtattttttttgaaaatgtcactatctttaagtgtttctagtgtatacaaatgctgctcatttttgtgttttgatttagtattcagtaatcttgctaaactcttactgaaaaatttatccttagattgtttcagatttcctgtgtacacatttatttatttgtgaataataacagtttgtttcttcctttttactggttttctctttttttcttgtataaatgcattagttaggacctccagtacagtcctgacaagaaatggcaatagcaggcactcttgtcttatttacaatatcaaaagaaaagacgtttcactaaaaagcaatgttttctgtagggttttgttatatgctgttaatcaagttaaggagctcgttttctattttttgttacctaagtgtctttttgtttatgttgttttgtatatttaagaaggaatgtatgttcaattataacagtgtttcgtttgcagctgtggatgatgaattttttctttaatctgttaatttgttgaattgcattgattttctaatattcaaccaactttgtatcctttgtataaacccaacttggtaatgttggacttcgttatttagaatttatgcatttatatttatgaatcatattggcttgtaattttccttttac

SEQ ID NO: 108083 - DNA, 1056 bp, Homo sapiens
ctgccatccacagtgtgccagtgcatcctaggcaggctgtccccatggttaatgaaggctgttactgccccacaagtcccatgcagacagtaaaaccctcagtagaagaagagaggctgtgccgacccttgtgtctctatcacagggataactttcctagaagctcctggcagaattcctcttacatcacactggcttgaattgtaccaggtgcccatggctaagccagtcctcagcagaggggatacagagggctccactgactgcagctagggctcttttctagtcacattagggaggttgcatatccagctagaattaggactgacagcaaggaagttgggggagggaagcatggctgtgggcggcatctaataacatctgctggaggccatgaggtttgagaccaggaacagccttgcactactttaggtgggtagcctcgtacacacggtgctgtgtagaagggggttgaacacgatgtgaaagcatcatttgggattgtgctctcctgggaggccagacatgctggctgggcacaggccttagcttactaatttgatgactacacaaatgtttgaagtgtgcagtaggcacataaatgcactttgaaccaggccctctgggaaatacaaacaatgtaggatcctagccctcgggaagttttagtctgtggagaagacaaactaagaactttgaaaaaggccagattggttacagtagttgttaaattgaagaaaagatttggaaatgcaaatgtataagctgctggtggatcagagctggtagatcagagacggcattaaactcagccttaaggctgaggggcagttgggctgagaggcaggtgttgagaaggtgatcggatccagtgagaagagtgaggtttgaagctggattttagaaggccttggatgtgctgaggagttaaccctcaaagtagcccgcatcgatcctgaaacagtcaatggttcctgaagtttgtaaggatgggagtgatgagatctgacttgtgcttttagaaccccatggcatcctggtgaggaatcggttgat

SEQ ID NO: 108084 - DNA, 1044 bp, Homo sapiens
tgaatggtgattaaatggcagatcttgagtgggtgagggtttggatgtgttactgctttgaagcccgctgtgcagtcgtctgttatctttccctcgtgatcccattgcagtgccccattgctaatagttggaagcaagcacccatcacagccttctatagaatgggtgacaattcaaaggtctgacccttttcaagcaataaaacaaaacaaaacaaagtttaaaaaggctttcattataatgatatttgggagtcaactaaaaagatgtttgtctcctagtcagagtcttacagactttaggtttatctttcttagaacaagggagagagtgggctttgggaattctggtcagaggttgtgaagtatactacctgacattcagccaaggcagtcctgatatctgggtctagctgtttggcatggctgttttagaagtttagtgatctggagactctggtggccttgtcccttatacctcctccagtgtgagtgttatgtggagatctgaaaatcctgtggagatctgcattgcctgtgctcagatgactggtaaaaggcataaatgggagaaaaaaatcatgacatccatagcccctttctttacttccttgttttactttttcttctcttcttttgtctactgagcttagtcttttgattagatcagaggttgacaaacattttctataaagagccagatagtaaatattttactctttgcagtcacatgtggtctttgccacatattctttgttgttgttgttgttacaaccctaaaaaatgtaaaaaccatacttagctcagaggccatacaaaaagagactgtgtactggatttgactggtgggcaaaaaacctctcctggactagactatgcagctccagagattttaactttttaagtctctctgagtacccaggtgtctcaagaaactagcgggtgggagcactggtggtggtccaagttgcttagtggctattatttcttgtgagaggtttcttgtcttggtatttgacaacttcagtcttctgatatgtaaaat

SEQ ID NO: 108085 - DNA, 1103 bp, Homo sapiens
agcatggtgtgaattcaggagccgggttgcctggggtcgaatcctgcttcccagttgtgctccctgagcagggcactgaatcctctgttgtccctgctggtgatcctgcctcctccctggatagtcataagacttcttgagataagggacaagcttagagcagcaccaggtgcacagcacatggaatgtgcctgtactgccctctgaggtttaccagttatgcccctccaaagccttgtaccctgtccacctctgggacacggcctcatgcatagtaaaattcactcatctaatggccgtttaaaaatcacagcttttaggccagagtcttaggatgaggccagagcttagaacctgtgtgtgtgagtaggggcactctaggactagcattttgaaattggcattcctgtcccacgcatatcctgtgcttcactggggacaggctctgggtgcaggagctgtttgggcttagaaaaggtggggaagaaggccaggctctgagaatgcagctcactccttcctatttttcatttgtcactggtccctgggaaacggttttctccagcagttttggttgttgccacagccagagagaaccccactgtgccttgtgaatgaagtcctggaactgttggcaggactctggtcacagcagcccctcttctgggatccggtctcttcctgtggtgtgtgagcggagcccactaggtggcaggcctgggccacttgttggctggaagaacaggcgtgctgggagaaggccttgggcagggtggggagaaggccccttcccccgatgtcatcctctgagggcctgtaacctggtagctttgagactgattaaatctagctgaggaggctgaaaggccctctacccaaggcctgatctttcatctcctgccctctttttgttgggagacctggctttttagtgttatctgacctccctttgttgtggctgccctgggggacaggttgaccaggtttgtactgccctgtggggacttagcatcccgttcgttctccctgcccctttagcgcggcttgctgaggaagggcccgcttttctctcaccctgttctcctcctcatccagaaagttac

SEQ ID NO: 108086 - DNA, 1121 bp, Homo sapiens
gtcatagcagttagagctgcagttctttggatcacagtctgaactgccttgagagaaggtagcaggtagtagaaaaggttaaaagaatctcatctgtgttactgaaacaagttgtgtggccttggttaagtgtctctgggcatcactttccccatccgtaatacagggacagcaatattgacttcacagggttgttgcaaggatcaagtgtaaacatcttcagagtgcctagctcagtgcttcacctgccataggtcctagaaagcaatcattccttccaagagatggtgccagcagctggctctgtcagcatatactgcccttcagcccctaagccatgtacctagccctttgggatcatgcaaatctccctgtggacatctgtgccagaacacccagtggcaccctttgtggctgagctctttctaaggtaccggctattggcagaggagcaagctggggtaaggaggcgagcatgtccaggaacattctttcttttcctctccaaagcaggctgcctctaacagctcggcttccgaagtgaaaatcctgtgtgctcctaattggttttcaggggagattgatttttgccagtgtaactgctgctaggaaccctgatgtctctctccttagggatcacgtccctccagatgaattttgtttttagtccccatcgaatccacttgccaccttttctagcaggacctgtttaggagccctggagatgaaatggtaggcacctttggtgctttggcctttgggaggctgtctctcagaacgtctccaggctaagaagctgatgggcaggaagggcagtggctgcaaggagggagtgtggctgctgccagtctcctgggtctggcatcttcccattgggggcaatgagttgtcatattctaaaatcctgatgaagtggggagtgtggagagaatccaagctcctcgagtacctgaagaacgatggcctggaaaagaggaggccagctgtgttctggctctagcgagggcagaggaaagtggattgggcataagcagtgccagccaagaacatgaggagggagaagggttcaaagaaatcagagttgagaactctcttcaggacctgtcctggatggcaggcag

SEQ ID NO: 108087 - DNA, 1005 bp, Homo sapiens
taggacacaccacttttgcttagtgcatagatatcttgaggtaggtaccatgaggtggtacaggttagaaatctaagccagttttaagaaaactgatgttaagcaaacttaataccttctggacaagtaggccacagaagcgagtaagaaattgtaagaaaacacagcagggattggtgagcacctacgtaccacagagctctgggagtatgagcccaggggtgcccagctgccgacaggggtatctttgtgaatttttgggtgtcagcaactaattcagactttaaaaaagaagagggaggagaaagaggaagaaaaggaagaaactggtatggtataaacaaaacaaatctgaaagctcaatgtggcccagtgccctaccagattataaactggtttggatgaacccactctcaggtcttttagtggaaggcaggtttttggtaagtttttgagctggaatttgggaccagatgaactcttgggcaagccctctgtggcccgatgataaccttcagtttgcatctgtgaaacaggccactgccagctgctccatgtctgtggggagctttgaaatcttgattaaaaggccccagctaaatagagaagatgcttctggtgtattgacaatctttctgtggccatcagcgcccatcagcaggtgctgccctcagcgtcccttccagcctgtagctgtgtctgctatttttagctcttctgcaactccattaaccatatccacctcctcatgccacttgtctgtatgtttaattatgtaaatggcattacaaatcacagtggtgttgaactacatctcatttctcacagcaaatcaaagcatgttacactgtgtctttttggccattctttcaatctgaaggtagacacggtagaggatgattgctttcttcttgtgaggaagatgagttgggaaaatggatgttttggtaaaagtgatttcatgggatgcatgtgggatctcactaagcggctgacttttgttct

SEQ ID NO: 108088 - DNA, 1036 bp, Homo sapiens
ctccagtgcctgattcatccaggctaaaaagatttgtagttgctgaacattctaaggccttttgtgccttggtcagttgctcttgtatcctggaatgttccgtttttctttcttccccaggttaacaggagaagtttcaggattggcttaaatgtaccctccttcaagaagctgtctatgccctctggtgctggtgaggtgttcccttgcatggacccccatggctcctggacttttgcattaccaggcttggccctttgttaacattgtggtttatttcccatttcctggagcacagcttccttaaaggcagagtctgtgtttttgtcctctcggaatctctagcattcagccaggaacttggtggggactgaaaaataaaaaggtgttgaacaagtgaaggaatcactcttgtctctagctgtactcaacagatgggtgtgggcactacaagctgaaaaatgtacttgcaacagacagttgtgtagaaagccaaggacaagcccagagggagtgcttattagatgagaattgctaggataggacctcaagatgccttgacaaactactgatgtatttattcaacacccttctcataaaatgtatttgtttcttagtggtctagtcatttattttcagagtactcctgtgataaaacgtggatccatctttctttagaaaacaaacaggacgtgaagagatggccatccaggtggtctttgtgtcagggtcagaactagggatgagccagcttgtcctgactctggaagcagagattctcagagctcgcatcgccccacattcctgggtgtctctcgtgtaccccactgacagtatcatagcatagctacagtctgcttgggggatgcctgatctcttcgcctggtgtccttttttctcctgggttggggttaggtgagaaagtctaacagaacagcaaaaagaagaaagaaacacccagaataccacggcctggagaaaaagaaggctgcgccatcttggtctctgtccttccaaataatactagagttttggg

SEQ ID NO: 108089 - DNA, 1124 bp, Homo sapiens
ttctcaacattgtctcattccttctaaaacaaggtatctatatgtaaactgctgatttctttggggcattacccccataaattttgaaaagcattaatggtttcatcatttttccacctaagtttcaccataaatttgatgtttgttcttgcttcaattttagcagaattcatgttgctctggtaggagctgttttcaaactgatattttatccttctcagtgctcaaactaaatcctgttcagatgtgttataataagttagtatgagtttattttggtgtcaaaaaattgaaatccatgcatagttttaaaataatatacattttccatgaactttatgaagacccctcatatacagagagtttaagaatcagagtgtcttcatacaacagcaacactggaagctacaagacaatggatcaatgtctttaaaatcccaaaagaacaaaatttaatttcagagaaaacaaagttatactagaaaggaaatataactaaagtacagtacatggctcagctgtgaataatatttccagtcatcctgtgaacactaattgttgaaccatacacatgttttggttaaacttggggaattaatacgggatgggagacttatatggaggaggtacgtgtgcaagagcaaaatctttacctgtcatagtgggaagtcaatagatgccagaattagaaacatggaggcaaatacttgaagaaacagctagaataatctaggttgtctcccaggaaatggggagagatgagccaagtactacagtttgtggtgatagactatttatgtgctatttgatgttgatagaaataaactttaaaaactaatgagatcaaaatgtagtgtgacacctaggattgggtactagaacagaaacaaacagaaaaactggtgaaagtcaaattgtttcaagtttaatagagtagtaaagtgggttttttagttgtgacaaaggcactacaataatagaagatgttaacattaggggaaactgggtggggagtgtatagggactctgtattatctttacaactgttttgtaagtttaaaactattccaaaatggaaagcttattagagaaggctcagtatggatgctatcatactaccgtgt

SEQ ID NO: 108090 - DNA, 1045 bp, Homo sapiens
attggataaaatgtgtcagacatacacagagttaaccatccctgagcatttccaccgtctccttccctgctgtcttgttcttttcttacttgggcaacacggaggagagcaggctctggttgcctgagaggccatctgtcctgtgatccctcacacctgaagcctccgttccctcattctcccagccatgggcaccatgtccacagtgcagatggggcgggggagcagtgtcagcactgcagcctgcaggtggagatttggaagaaagcagcatgagcagacacaagccttcagaatgagactaattttcatgaggctttccctggtaataaaaggaaatgggggctgcagagagcctacagtatttcagcagatggtcttgtaatagaatgttttttcaaagtttccttgtgaggcatcagtgactcttggaaaatttgtatcgtgtaatgaggaacaaagacatggctttgagcatccctcttcttggcatgtttctgagttgcctctccctcctggcacaggtaggtggttttggaaagtgaggaagatgaccctagagaagcagcctctcctgatttttctgtgcctttgaaggagctgggacttggtcctagggtcaacaatgcctgttcagctctgcccctcctcactcttccaggcttgggcctcagcaggacccatttgatgtcaatgaaggaaggtctgcatttctgcagtcccttaatcagctgcatctccctctgaattgtgccaacctcatggaatggtgtgcacctgtccaagctggcttatggaaggaagggagggacggattcttggtgatagtttcttcttcagactcatagtagacaagcccaagcattgagaacacctacagcagggcagaatcacagcaaacccttatggcagccctatgaggaaactgaggcacagagaaattgcaaataattgttagagccagaatttgaacccaagcctcttaaacatcacagtgtactgtactgtcttaatgattagcatctccttttcccaaaatcaactt

SEQ ID NO: 108091 - DNA, 1035 bp, Homo sapiens
attatttttcctgtctggtgattccctgaaagagaccccacttataaggccgtctttatacaacctgactcagaggttgcccagtgctaacagctttttcccagaggacatttgtcaaaaacaagcagaggcaattgttgaatattatagctgcctggggaggtagataacaatttgggcaaacaatagggtaacctgaaagcttaaaaagaaaagctagggaatgaggtggccataggaggctttgaaaagctcatatactattcctgggattttaaaagaccaagactatgtatgtggctttgcacaatatttcaaagggatccacacttaagtacttcacaatcaagctgtcaaaaggcaaagtcaaagaaaagattttggaaatagcaagagagaagtgactcatcatctacaaggaatcctgaataatataaaagactgatttctcatcatgaacaatggaggcaagatagttttatcactctgtggaaattctctatatcttcacacgtgatatttacctttttctactaggttctttaacatattaatcatagttatttaaagtccctttgtattaattccagtctgggccattaatgtgtctggttccagtattttatctctatatggagggtcattattttcgcacgtacacgtgtttgtgtgtgtgtatgtgtatgtgtatttttaaagttttgatttaatgctcaacattttgtgtaaacaaaataaaacagtagacagtccactatatatttatgtccagtaaaggatttcttttcttctgtaagaccattagtatgggggcttgggtttcttctaagtagcaagtcgttagggtttttttcctttcttttatccaaattgataatcatttttcttttaagggtgagattaatcagttcatatattagttaacagttactaagtaacaaattacaaaatgtagtgacttaaacatttattatcttgtggtttctatgggtcagggatctgggcctggcttagctgggtgcctctgccctaagg

SEQ ID NO: 108092 - DNA, 1028 bp, Homo sapiens
gttactgcttttattggtagcctttttagaaattctatttcttcccatatttgagattcagtttataggttcatttggagtggaaagttcactatttctattgtcacctacacctgcacctcagtgcaggacgaggtctgattttggccttctgaggcctgtctccacagtggtcctggtgatattgcagagccaggaactgagtgactaggttcatttgtggtccaggggcgggatctgtagcttccaggctttctaggtttaagtaaactgaaaaccctggccctcagtggaggtcttcagaagttttttatatcagcttcttattttagggagatccctaggctgcaggtcgccagcctggcttcaggcccccgcttgtgcggaatgtggtttattctgaccctgcacgataaagagggttcctgactgcctctgcctgctccagacttggagccagcaggcctgtggcttcagcctcacccactgctttgcatttctgtttggtattggacactttaatcttgtttttgaacttgtccgtgtctttttgtcatctgttctatattttatctgccagtgctatgtgtttggagtagggtagaggcatcaaagtgtgaactcactgtgttgtgttgactggaggaggtccttgaccaaatcatgcagattccctcaattctctattcaaagactgtcatctgctaagtacatgttcataatgatgacattttacctttatattagagtcaacattcttaatttcaaaatttttccctgaagactttcttagaaatctccttagggaaaatagcaacccgctaaccctacaagtgagtctgtcttatggtcttcccagcacatctctctgtaattatttatctgcacacacatttgtgtctcccactgggatctaagcttcatgatagcagaaattctctctctggcttccctgttgtgccctcagcccttttacaattctgtctgtcacatagaggtgtccttcatggtgttctggtaagtgacgc

SEQ ID NO: 108093 - DNA, 1042 bp, Homo sapiens
ctaacgtgggctttgttctcttccaagcaggccagggagctggagagcagagaggcagagctaagacgccgtgacaccttctacaaggagcagctggagcgtattgagaggaaggtaagactcctgcttggctgcattcctcggggccaggtcctaaaggcatctgaccagaacacatcactgtcatggggggagagaggagtccgcagacccagtgcccattcgcccagatgccagtcactccttggacatgccctcctgcattctgcagcaggcacccaaatagagcctttcaacaagttgcattcatggagataattggtttttaattgtctccccctgccccacctttttttgttgaatgtggctggctctacggtagttcaattttagaaaaaaattcactttcaccacagggcggtgctgagtcccagtataccttttccactttagttaagctgcatttggtaaaaataataataacgtgatgtcttgctatacaaatacattaaagttttattattgattttctcctgggagtcgggaagatcaaagtgcactacggctgcacactcactgcttttctaaggataagcctttgaaatgaatgagatttaaaaacatatcatcatgcctttaaaaaaaaaaaaaaaaaacccctaccacgactcttgaaaattcatttggtaacttgcttattttttggtttaatttgtggatcatgacagatttttcaaagaaatggcttaaaatgtgggaggggatggttgggaggttaaaaaaaaattgttccccctcatgcctgagacagcatgccaagcaacctgagccatcagcttattgcaggcaaatcttcgcaaatcatttgtcatggtttggagctttgaaattgacagtttgcttgaggggcctgatttccacaggggttttctcctgtggcatgccacagtggaggctgacagaaatatgggtttctggatttccaggccatggggaaaagagggaggttcttccttgccccatcaacacctgcttgtccacc

SEQ ID NO: 108094 - DNA, 1024 bp, Homo sapiens
aatggatacatccaaacttctcaatggtacatcaaaaacatgtaccaacaaaaagtgttttggagtttcttgccccacatctataccatcacagcatggtgatggtacaaaattttgcatataattattgatacggctgagcatcttttcataagtttattgggcctttgtatttcttcttttgagacttgcctctaaatatcatttggctagttttgtgttaggcagtttgtctttttctaattaatttttaggacttctttatataatatgaattattaacttctaattatttattgttactctgttttcctgatctgttggtttaatgttatagatactacttttggcatttagatatttaaaatctgtgtaacttattgtaagtttaaaagctcccccttccctatttttgtcattttttaagtttgttaatttgatggacaaaaaattgtgttttggatctgtacttatttattaccaattaagcagtcacattcattgctttctgaaatcctgttttattcattctaatcattgttggaatctcccctgttagaaggcactttcaggatgttttcctgttgtctccccagctggcgatggcttagctgctgactagcagctcccaggttggaaaagcatgggctttgggttcatccctgggtcagattcttgtcctcagcacttgctaactgcgttagttaactttcctgagcctcaattcctcattcttaatggaccttactggagtgttgctaagggttccctgagatactatatgaacatgcctactagaatgtatacagagatattcagtcacttcttcctcctgaggtggttcctctcattagtggtcactcatacctgttctttatgttggattaaactccgtgttccagtatagaattaggacccgttgcttctactcccaccctgtggagtcgccgtggctgttacagaaccacacagcatccacctgcagccccctgtatgtgtggaggtcggggagctaagggctgac

SEQ ID NO: 108095 - DNA, 1054 bp, Homo sapiens
tcattctgaactgccactagtggagatggtattccatgctccctcagggaatgacccacccatctctctgggccactgcagcatcctccaggcctccaggcctccaggctgatggccacttccactctttcttcccagtcgacaccattacacggcagccagcagtccttccagaatggatatcagatggggtcctttccctgattaagcccagtggctccctaccaactctggaacgggctctgcggcttgaggcccaaccctgctggccctccctgcatctgtgcctcgtgcggtccaacaccttccgacagcgctcatcttgctgctttacgccgggtgtagtctcatcccagacctctcccagtcttgacttacttttctcgttcacatgattcggacttctgcccagtgtcagccgggggtcggggagggatgagccttccctagccagtcatttacaacaatacccctaccttgttgttccttttcactttatttagcctgctgtggttttgtattttttccccctccatatccagagcgttagctctgtgaaggcaaggacttcacctctcttggttcctgctgtgctcaagtctgtttgcgttcattattcattggatcctcagcacccctgaaagctaggtaggagtttttctccctggaccaatgaagaagcacgttcagggaagggggagtcatcatccatgtcacagcagacgctggaacaaagaacccagatgactggtgggcatctcttttgagggtatagggaccatgggtgtgggcagaggcatgcctggccctagtggaaagtgctgggggtacatatgcccagcagcagctgctgttgtctctcaggtggaaacacggtcatctgatggtgggaattcaggggtaacaggtaaaggctgagatagctaagaaggggaatgggcaaagacgccaacctagggtctcaggaattacaagttgcatggaaggttcagttgagctgactttgcattgactgtagtcagggcagatctctgaatctctttagggtctctgc

SEQ ID NO: 108096 - DNA, 1066 bp, Homo sapiens
tttcaagtcctacagcaatactaggagcctgagaggaggagaatcttccaaaaggcagatagagacaaggacaggtgttgaggtagaagcccagccctgctgatgctaggaccccacagggcctgagtgagtaagcaccaaggctgcctgcatccaggagttgaagggtgctgcactgccctgcagggtatgagccaccccacacacagacaccctgcccccactggtggtcagctctcgacctgtttctgaagggttccccccggtatgtcctgttcatctggggctgagaaatacttggaatcacagaacattgagaaggagagctgtggtggcagccacatcaaagaggctgctgagtgacagctacagcatggatgtgatccccggaggtgggccaggccacagctcctgcccattctcttacccgagcagcttcttccaaggccaatggcccctccctttctacctggagccaggacccacctgccaaggagaagatgcactgggggagaagccagacagctttctgttggtaaccataatgcctgtcacctgccaagtggcccaccatcatgagggcagggactcctgccccaccagcccctttgtgaatttggctttattgtcatagcctttctcatcctcatatcccctgaaagcaaggtgggatggatgtgaatgtatttttaatctgagtgaagcctaaggtttttttgtttgtttacagcatcccttgataataattagcactatttactaagcaataagtactctgcaaggcgtttcaactccattctatatttactcttgttggtttcatatacaagtgaagaactgaggctggagaggtcgaataactccttttgtccgtggtcacagctggttctgtggcagggctggggttgctcttcctttgtttgtctttgcatcattgctgtcccttgcaggccctgcctggacgtaagatggcagcagggtggagctctcagagcctgcccgggttttggactcagaccaggcctcagacctcagccctgccccttagcaagtcacttcacttcta

SEQ ID NO: 108097 - DNA, 1051 bp, Homo sapiens
tcatgtaaattaacacctacttcagatgggtatggatttctaaatatggattaaacatggatttttaaaataaaggaggactgaggaaatggtcacatcaattctggacgagaagacagtttttatgaaacagttccattttaaagacacgtctaatcagagttgggaatcgttttggaaagaatatctatcttgccattcgttccagggtttacttgtgagcacgaatcacctgctgtctccggccacctgggatgctcagccagtgcctttggaaacatttctgccttgaatgtcaggtagtggtgagcgggatggcagggctggcatgaggcagagggctcagtgtatcccagatgtggtgttcccttttgagagcctccctccctcaagatgagcaggtgttaaggctggcctcatctgtatccctcctgaccgcttaggtgatcttgaagtgtggaccctcctgggacacacagcatctcctgaccaagctcagccccagaataactagtctggaaggcccaggcttacatgataaccaggttaagtcccaggctgatgttccatagacaaggacagcattgcatggttgaagcacagaaaagttctggggctggtgagtgcagagtgggatagctattgtaacagaaaggcgttctgcactcaggttttgttactatgcagattcctgctacatcagctcaaaaccgtgtgcggcttagtctaaatgcctatttaagcaaaggccaaaagtctgtttgaagatataaagggaaaaatagtgttcataatacaaagcttgaggctagtcatagatgtacaatttccacgcagtaaaagtgagtaatgaaactgcatttaattgttcaaaagtagcagaaatgcatctttaagaattaaaaactacaaaaaggtgattatacagcatagcaaatctctaacatggattaaacagaattgtttaggagataaaataccagcatgaacatgcattttgaaagagggaagaacaatgctgggtttaggtagggagagcccagcttctgct

SEQ ID NO: 108098 - DNA, 1991 bp, Homo sapiens
cttctgtaggggacggtggtggagtatgtccccaccagcctcaggcagggagctggtgcccaccctgggagtacagagctgtggggagggtcctgctccccagtgcatagggaggctctgggtgaaggctgctctccaggttggtgtcagatgttggtgtcagctggggtcccattccacacctcaggcccttgtcacctgccttcctgttcctggcctccgccagtgatggcagggcacaggtgccaacggagtgacctcttgccaggtgtcctggggatacctggtgcaccccacagcttatagggcctcaggccagggaggtgcccagtttgcccctggctcctcctggtgggtcaggttctgcctcctggaggtgcagtgggcacgcccagcactggaagggctcacactgggagatcataatatcatgggatgggccatgcctgcattcacatgccctcttctgccccttccccagggctgaagctcctggcaccatgatgctcaccccagcaggaccagagcaccgaggcccaaggccccagcctgccatgccgctgccaccgcggagcctgcaggtgctcctgctgctgctgctgttgctgctgctgctgccgggcatgtgggctgaggcaggcttgcccagggcaggcgggggttcacagccccccttccgcaccttctcggccagcgactggggcctcacccacctagtggtgcatgagcagacaggcgaggtgtatgtgggcgcagtgaaccgcatctataagctgtcggggaacctgacactgctgcgggcccacgtcacgggccctgtggaggacaacgagaagtgctacccgccgcccagcgtgcagtcctgcccccacggcctgggcagtactgacaacgtcaacaagctgctgctgctggactatgccgctaaccgcctgctggcctgtggcagcgcctcccagggcatctgccagttcctgcgtctggacgatctcttcaaactgggtgagccacaccaccgtaaggagcactacctgtccagcgtgcaggaggcaggcagcatggcgggcgtgctcattgccgggccaccgggccagggccaggccaagctcttcgtgggcacacccatcgatggcaagtccgagtacttccccacactgtccagccgtcggctcatggccaacgaggaggatgccgacatgttcggcttcgtgtaccaggatgagtttgtgtcatcacagctcaagatcccttcggacacgctgtccaagttcccggcctttgacatctactatgtgtacagcttccgcagcgagcagtttgtctactacctcacgctgcagctagacacacagctgacctcgcctgatgccgccggcgagcacttcttcacgtccaagatcgtgcggctctgtgtggacgaccccaaattctactcgtacgttgagttccccattggctgcgagcaggcgggtgtggagtaccgcctggtgcaggatgcctacctgagccggcccggccgtgccctggcccaccagctgggcctggctgaggacgaggacgtgctgttcactgtgttcgcccagggccagaagaaccgcgtgaagccaccaaaggagtcagcactgtgcctgttcacgctcagggccatcaaggagaagattaaggagcgcatccagtcctgctaccgtggtgagggcaagctctccctgccgtggctgctcaacaaggagctgggctgcatcaactcggtgagttgggcaggggcgcccctcctcccgcggccccatcccctccagggacgacggcatcggtgtcagatgcacgcccagtggtgcctgctgtgtgcctggcctggcttttggcttggccatccccatggctcagctaggtggggctgcccttttccatcccccagagagtgggtttggacccagggtgctagccccaaaggctgctcccagccatgatgctgtcttgtgcctcagaagatg

SEQ ID NO: 108099 - DNA, 1002 bp, Homo sapiens
cactccctctcctcacactggaaggcacacagggctctcgagcgcatggggtgggtgttggagtgggttttgccagacagaggaccgtgcttgtgtggaagcccagtgcagcagcttagagacattttgtggggcgccccagagcctgttacccagccagtgaccaggttcctctagccctaccctgttcctgctgcccagcactcaccctcttgtgccccaggggcaccgtttgggtcagagctttgctgagggagcagcaggacacagctgttcctctgggtgccagttggcctgtctcccctgcctcctcaccccagtcccacagagggaaactgaggtacagaacagggaactgcagagttgggcttgggcccatctatgggaagaggctgcttctgggttgagattctaccaactcttccccttcttcctgcccccattccttctcccaattttccccttcccacccctagtcccaaggaggaccgttctcagggaggcaggtatgggtggagcctgtcctctgctccctgggccaggtgcctccttgagcctggctttgtgggcagctgctggatggtgcagctgggaaggtggaggctgcgtcctcatggcctgacatggctagttccttcctggtgaccctggccgggcccccacccctcagagccccaagttctcctcagaggctctaggtgcccatacctgcctcccagcacccaacctgggtaccgcctccctccacccccaaacaagtctgggctgggtgccgtgggccatgtgtgagtggcaccctttgggagcatctggggtcagctgtgcccaggggttgctggcctggcagagtctgcagtcggggacttgggtctgagttttgttcggaggcccccccaggcaaggcacgcctctgctttgtccccctggatgcagacacggtcatgttggtgaagaacctgccgcctgtactctttcacccaaatccacctgctctcaaactgt

SEQ ID NO: 108100 - DNA, 1004 bp, Homo sapiens
gggagggtcctctcaagcagggggcggcatgcatgggcagcgccagctcctggtttgtgctgggaggtgggagggtgggctgttggggccagttgtggaaggttctggtggtctttggggaaagatttgcagagcaaggaggtgacagctgggggaagattccagggcatgcctgtggcccgttcccatgcccgggacacgtcaagcctctcatttgctctgccagctgcccagctgctgtgggaggggcttctgggcccagccacctcgagggtgggctgcctccaggcgggtggcccgaaagtggacagctgtggccagggtgtgggcgtcggcacgtgggctcccggccggcgtgtgcccttctgtcctgccacccgctctggccccaggttcacctgccgtctgtgcccctgtgctctggttctcctggaataccctcctgctgggtactggctcccccttcccactttacgagcagcctctgtactcctcccaggtgcagttgcgggtccagggcccaaggttcctctggcaggtgctgtgtgagtctcagcttacctcctgtctgtgtggtttgataaagctggcttggctgcacaggcccttcaccctgaactctggctaggacacagacacatgtcctggggaccattgtcctagctggatgccctgtagaacatgtgtgggtgcacaggggccctgctgagtctggaccgtggcgcctcagtgaacagtgtggggcctgcacctgcgtcacatccatcctctggtctggtgtgctgtgccgtagtggcctccccagtgccccgctcacactggccatgccatggcctctcctggggctctgtctccctgggcccagcctgtgtgtgtgaaggggtggaggtggcaggtgggtggacagatgggtacatggcggatggacagctggacgcgtgtgctcccggctgcagctgtcagagccaactgtccagtcggcatgctgctgggtggagcggggc

SEQ ID NO: 108101 - DNA, 1033 bp, Homo sapiens
tgggcctaggcccctgccctgaggtggaagtggagaggtagagcgggagcaggagtgggtcaggctgggggaagcaggccacagcccgcagcctgagagcctaccctggactcagagctgggcagacacgccccaagagtcccatctctggaaagccccgtgggtctctctgttaattaaatacatttgtttggtaaaagcaactaaaaatacttgcagcatcgtgagctgcggagaagagctggctaattaacgcctggtttgtttgggatctggaatacatttccatgccgatgagacgcccaccctcctccactgccttgccaggatgcccccacccctaggacaccccattctggagtctcctggtccactgccctagacttcctgtgagccctggcctctgcccccgacaaccaacatccctccttcaaaagcccagcctggccccagggatggctaggcacccgtgggactcctgtagccttcaccctgggtgtggccatgctgctccgtggtgggtgctgggctgtggttgtctccaggccccaataccttctggcctctgctgactgttaaaggggctgaatcacagactggcctgttggggtctgagtttgccctgcactggggctggggctggggctggggctggggctggggatgtggagagtgagtatggctggcgctggtcctctctgctcatgcatgtctgggcagctcagggaggggctttagacccctgaccttctgtggggggtggggctgggtcagggaggtatcagcacagctccagttagggccccttgctgccgcagatcctggtggacctctcaaaccccggtggccggcctgccctggcctacgagagcgtcgtggcccaggagggcagccccatcctgcgagacctcgtcctcagccccaaccaccagtacctctacgccatgaccgagaagcaggtgggtgctgcaccagtcagacggtgtggctgaaggtgggggccctcctaccaggaaccccagtcacagagcag

SEQ ID NO: 108102 - DNA, 1050 bp, Homo sapiens
gagcagggcagggtaggtgggatgaagggaccacatggcggagacctggggtcttgcggggggctgcaggctgaaggtgggagtgggtgaggggtgggctatgtggggcgcaggttgggtgggggacagtctcatggggacttggggtgcaggacccctctggctgccacagcccgttggacagtcgctctgcaggcccttccacaggagcaggcagcctgggggcctggggagagtctcgcggttctcaacccctcacactgagcaggaggcaagcagggcagatcccaggccctggtcacctgggggctgagggggctggatgcgtgtttgatgcgactgatggtggcagctaggagggtctccgggcaagttgttcccctgtctggacttgccctgtgtgggagtcctgggcaagcagtcctggtgactcagccatgctgctcgtgcaggagaccagcgggtggtgaaactctacctaaagtccaaggagacagggaagaagtttgcgtctgtggacttcgtcttctacaactgcagcgtccaccagtcgtgagtgtctctaggcccctccgcccgcctgggcctgggctacttgccccactcccgtccctgtggtcccactgtgcttgctgtctgcagacctgtcctcatgtggccaggcagcagatggtgattccatgattggggctcctgaggctgggcggtcagggagggaggagaggccactgtgagagcagcttgcaggtagaggagccagccagggcaaggccatgagtgcagagggtgcctgaggctggggcaggcgtaccaggaagcagcagtcagagtgggcggcagtgcctgccccacagggatcttgtagggccccaggtggctgtgtatggctgcaagggcacattgtgcaatgttgccaccgtgatatggacagtggcccatgggcactggcatggaggggaggcgctcagggaggagctgcgggctggtttgggggcctgagcaggggcccagacacggcccctgggtacctgctgcttctggttgtggcag

SEQ ID NO: 108103 - DNA, 1029 bp, Homo sapiens
tgcacctgacagtgattttgcctgtctctgccccagtccggggacacggatctcccacctcaaggcagggcagtcctggcccattcagcaaagatgctgaggtacacagagcatgctgatgcgtattctagggccagctgggagtcttggtttcccagcctggctgactgtagggagtggtcagaggctgcctgtggttggaggtggtctccaagggggtgccacagaggtgactgtgggaagcacagaggttcccttggaagggcacctcatatggttgctagcctggagagagggggctctggagccaggaaggaagtcctgtgtaggatgagggtggagagggagcggttgtggctgcagaaacttccccctaagctggcgccctggtggctttgtgggcgtgaggcttgggaggcctggaggccgcttagctgggaagcctgacggtgccatcacctaacagtactcctacgaggggaacgatgtcagcgacctgccagtgaacctgtcagtcgtgtggaacggcaactttgtcattgacaacccacagaacatccagggtgagtgggcgccccggcggggtgggcagtgggcgggcccgagctgaccgcacccctccccacagcgcacctctacaagtgcccggccctgcgcgagagctgcggcctctgcctcaaggccgacccgcgcttcgagtgcggatggtgcgtggccgagcgccgctgctccctgcgacaccactgcgctgccgacacacctgcatcgtggatgcacgcgcgtcacggcagcagtcgctgcaccgaccccaagatcctcaaggtagggcccccagccctgcccccacaccccatgccccgccctgcaccaccgcacaccctacgccctgtgggatgcctgtaccccagcctctgcctccctcagctgtcccccgagacgggcccgaggcagggcggcacgcggctcactatcacaggcgagaacctgggcctgcgattcgaagacgtgcgtctgggcgtgcgcgtgggc

SEQ ID NO: 108104 - DNA, 1044 bp, Homo sapiens
ggaggcattgagagggagaacgtgagtccctgccctcagctgcccacctcggtccaggccttcacctgggatggggctcctgctaggaatacccgtgtccctgcccctgcccctacccctgccccttcccagcttatgccaaccttggctgtgcctggagacccctggggaggcacctgtcctgcctggcgggtagaaggtctggctctgggttgctggctgcacacacctctccttcaggccacatgtccctggtccacgtcgggtgggtggcccaggaccagccctgctagtgcctggcatcatctgtgcagggagcaggcagcccccaggccaggggctctgtcactgggagctgccgggccactcgcggaggtcccgcccagcatccccaccctgtgtctccagggctgcctggtgtacaatgacaccaccatggtatgccgcgccccgtctgtggccaaccctgtgcgcagcccaccagagctgggggagcggccggatgagctgggcttcgtcatggacaacgtgcgctccctgcttgtgctcaactccacctccttcctctactaccctgaccccgtactggagccactcagccccactggcctgctggagctgaagcccagctccccactcatcctcaaggtgggtcaccattgcccgtaggctgggccaagccagggaagaggcccctcgtcctgggctctggctcacccccatctcctacagggccggaacctcttgccacctgcacccggcaactcccgactcaactacacggtgctcatcggctccacaccctgtaccctcaccgtgtcggagacgcaactgctgtgcgaggcgcccaacctcactgggcagcacaaggtcacggtgcgtctgtccaccgggggtgcagagctgggagagccatgccccacctgtggaccctgccccactagcacagccccagctctgaccttgcccgagactcacccctagctcagagggcgcccggctccagtgcaggccctgccgtagccttcagcctgccacctcctt

SEQ ID NO: 108105 - DNA, 2951 bp, Homo sapiens
ccagctggggagcaggcccctgggaggctggagctaggcggggatcctgctgagaccaggggagacttctgggtgaaataggcctcggccctccctgatgcaggtcccgcgtgccacgccatgttcctcgatacactactgcgcctcctggctcatgtgtaatttagggttttcatgtgatatttgtgggatggtgggtatgttttgtttcctgattttcttgcagtctctgctgggctttgggactaaggctgtacttgcctcccaaagagttgggaagtgctgctcatttctccttgccaggaacaccatggctggcactcgacgggtggaggggcaggttgggggtaggcccgggggtcctggctgcagcctcatgccgccacccccgcaggagtgcgctggggagccgctgttcatgctgtactgcgccatcaagcagcagatggagaagggccccattgacgccatcacgggtgaggcacgctactccctgagtgaggacaagctcatccggcagcagattgactacaagacactggtgagcgtggctgccctctgtcctgggtgccctggtgccccccaccccccagttgtggggctgacgctgcccccttgctccaccccgcccgcagaccctgaactgtgtgaaccctgagaatgagaatgcacctgaggtgccggtgaaggggctggactgtgacacggtcacccaggccaaggagaagctgctggacgctgcctacaagggcgtgccctactcccagcggcccaaggccgcggacatggacctgggtgagcgggcggggccacggctgcccggggtgtgtgctggagcagaggggcagggccatggcctagtactgagcttggcggggaaggccaggccagtcctccacaccaggctggtctggagggcagtggaatggcgagtgggctgtccagtcccaggttgggtatagagggtggctgccctgctctgggcagagactctgggaggtggtgggttccagtgcactctgggaggcagtgggctcttggagccctgagggggatactcaggctcatgagaggggcaggtggagccattgagggccagaggggatgggacgggtttggggtggggcccggagtcctgctgcagatgtgactggagaggctgggtccccacagaagcctcggtgccaggctgaggagttggggccctaaggcttgcggaaggcagggcagacccccttaggctggggctgctgtggcagattgggagggctgtggcacattgcaggggactatggcaggttaagtgtgctgcagcaggggcggaggtatgtccctgccctgtgctggtgctgagagctgcaggcaggccccgtcccactacactgctgtgatggaggagggaaagagggccccagcggccccaccctccagctccctcctcccccagagtggcgccagggccgcatggcgcgcatcatcctgcaggacgaggacgtcaccaccaagattgacaacgattggaagaggctgaacacactggctcactaccaggtggctcccggccctccgaccctagcacaggcctccctccccttggggcttccacagcgcagccaccaatgtttgcagcatgtgggctggacagcagctggatctgtcagggagaggaggggaggtggtcacttatgtgtgtggaccgtcccaggactcgagctgggcttgtgggattgcctagcatccctgggctgtcctgatatagagttccagactgagtgaggtggctgcctccaggcacagcactagggtgtcaccggggtccccagccggggagtgggagcctggtggtgcaggggcaccctggtgggtcacagggtccctggccctctgcccacaggtgacagacgggtcctcggtggcactggtgcccaagcagacgtccgcctacaacatctccaactcctccaccttcaccaagtccctcagcagatacggtgaggggccaggcagcgggcgagagggcagcgcatgggtccctggcctgggcaggacgtcccccgggctcccacgctgcagcagccggacgggaggacccaggggcaggtgtcaagcctgtcactcgcactcttggccttaccctccagctctggaggctgcgcctcctcgcgactgtgtgtccgtacacaattatgccacctctgtggtgtcatcggctgccccaaaatcccacatgggtgggggtgccatccccagctttcagatggggaaacaggctcgggcggggggtgcggggtgccagccaacgcgggcgctgacagcctggtgctgcagagagcatgctgcgcacggccagcagccccgacagcctgcgctcgcgcacgcccatgatcacgcccgacctggagagcggcaccaagctgtggcacctggtgaagaaccacgaccacctggaccagcgtgagggtgaccgcggcagcaagatggtctcggagatctacttgacacggctactggccaccaaggtgggcctggctggcagatgggggcaggggacgctgggccaactgagctcagagaaagtgccaagcccagagcaagggcctcacccccatgctcccatggccacttgcctagtcacccaggaggtgtaggcagccaggcagcgccctggggctcagtgtccctgcctgccccccgcagggcacactgcagaagtttgtggacgacctgtttgagaccatcttcagcacggcacaccggggctcagccctgccgctggccatcaagtacatgttcgacttcctggatgagcaggccgacaagcaccagatccacgatgctgacgtgcgccacacctggaagagcaactggtaatgcagggcagggggaggaggggcatcccccagggccaggccagatgtgttcccagggccctcgccctgttctgatccgga

SEQ ID NO: 108106 - DNA, 1050 bp, Homo sapiens
ggggacggccttcacttaaccatgggccctgcacctctgtgggcctcgtttccccgtctgcatggaaagccatgcccactttggattcggagctgggagggccacaaggtcactgctcaggagggagcagaggcctatctgagcagcgcctggactctcgcctgcagcctgcccctgcgcttctgggtgaacgtgatcaagaacccacagtttgtgttcgacattcacaagaacagcatcacggacgcctgcttgtcggtggtggcccagaccttcatggactcctgctccacctctgagcacaagctgggcaaggactcaccctccaacaagctgctctacgccaaggacatccccaactacaagagctgggtggagaggtaggtggagggtgcaggggtcgggggcaggggcccgggggcagcctggactctgctcatgtgcccacctggccactcacctgcaggtactatgcagacatcgccaagatgccagccatcagcgaccaggacatgagtgcgtatctggctgagcagtcccgcctgcacctgagccagttcaacagcatgagcgccttgcacgagatctactcctacatcaccaagtacaaggatgaggtgaacaccgtgggagcccacaggctgggctaggagggcttgccggcccctgccagagtcacctgctctgccccgccctgccactcctccctgaatctctgggctgccactgaccaccttcactcctctgcaccctctggccacctggttccttggggccaggagggagcctgccaggccgagcagagaaggccgtggtggagtcactgtgtgcagccatgtggggtcaggggtggggaagatgggatggcagcttcttcctgaggcagagggtgtgtgggtggtgagcaacttccctgaggggctcatttcagggttttctagtctgggccagcatctccagggctgggcataggctcttggcagagctttcctttcagtatcttttctgctgacttggagtgaggccacgtacatggacctggggacgggg

SEQ ID NO: 108107 - DNA, 1025 bp, Homo sapiens
ggaggcagacaggaggcagagggctgtcctcaggcaggtgccccaggggagcagaggagcagccagagactgcatgtattagggtggggagtggggacaaaagcctggggtcctggggctcaccagggaaaggggagctgaggctctctggggagctctgctttaaaggggcacagaaaccccagggtgtgaggactgggtggggacatgtcagcagcatggccaggcagccaagggatcagagcctgctgttttagggggtgagagtaggatgatgacaggggcagggctcattctccatattggggtcctggagggtccaggctcacaaccaaggtcctttggccaggggtagatggggttgaacctctggcacctactctggaggcatctgccctgggcctgctgagtgcatggaggctggtggcccggcatgctgacagttctcctggccctgcagatcctggcagccctggagaaggatgagcaggcgcggcggcagcggctgcggagcaagctggagcaggtggtggacacgatggccctgagcagctgagccccagctgtgatcatccagcatgatgcagcgtgaggacagctgagcagggaccgggacagccctcaccgcatgcgtgtggagtgtccggtggtgctcgggccgccgcagtgcagcgactgcccggccctccctcccctgcctcacccggtcgggtcccggctcttcctgtgtggaggtgatggtacctgccacaccacagctgcgcacacagctgcttgctcaggggccgggacagcactgggtgctcaggctggccaaggaccttcattgcctggcaagagctgcccagtggccttcatgggagaagggctgacctctgaggggctgaggggtgaggccagggccctccagggggaggggtagccagcttgggctgtccccttgagaccaggacaagaggctgggggtgtcagcattcccagctttccaagctgcccccaggcggcagagtctgagggtcccgggg

SEQ ID NO: 108108 - DNA, 1516 bp, Homo sapiens
gggcccgttgccaccgactcccacctccagcacccatgcccgctgcaccgctgccatcctcagattcaccgcgtgctctgcgcggccgaggccggagcaccacatccacctcgccccagagaggctctgctccctcctatggaggggctgtgggccaggctgctcagactcctgggtggcttccagacggaccgggcagcccctctccgtcctcagggctgtgcctctgggagccactgggccaggggccccgggtcgcagagagcacgttcccgttatttattcccctccgcgtcctacacaggctgccctggcagctgtcttcaagggtaggctgagctccccaccctggagcccctgagggcggcccctgagcactcctctctctccactctctctgtccctgccccagcggcttccagtgtggcatctcagcagtgtcctggcccctccagagcagtgggacatctggggactgtttttgtgtttaggggaaaaaattctgctgcactctgcttgggccttgaggtctgtggcagggctcctctggcccgcagtggcctggatctatctgggccatgagtgacgggcagtgaccagagggactggaggccagcggtgtccacccttgccctcagcaagagagaatgcattcttaaaagaaagctgtacatgtatatatatgcatatatatatatgtggctctagcctcaggctccagccccagtggggtactgtacagttaactgaagaagaattttaaagacgatttgaacaagaaaatgaaggcagtgggaaagcaatgccaaatggttgtggagaaagtggccggagcctccctggagtggagcagccctgaagcctgtgccccccgacctgcgggccgctgttttggtttgacatgacaaggaaaggacttcctgctgaccctgagagcctctggggtgccgcggcaccacggggcatgcatgattgtgctagcgtttagtctgagttgatctttttaaaactgcaagtgttgaatactagaggttgttagacccttttttatgttttttaattaatcagtcacttgtaaaagcaaacaagcggtccatccccttttcaaggtcacttttttgatggtaccgaagatcccatggacattaagggacagctaactgtggccagactcagccccatgtccttggccaggcccaaggagaggactcggccccatggggtgtgccagtcttgcagtccgccccagctgagtagcgtgagccagatgacgccacagagacccgcctcttccctgaacgcgggtcggtgtggagtcagtgactgctgactcagggagctccttggccccgtgggcactgtgccagggctggggccttctgctgctgccacacccagctcaggcctgggccagcccctgcccccagcccactgagggggtgggcttactccctgggcagtcttgggggccagagctgaggccagtccatattacagtggctgggctgtttttttc

SEQ ID NO: 108109 - DNA, 1308 bp, Homo sapiens
ccaacccccactctccttaggccttgtgctctgctctgccctgccaggctgcccttgtccatgtgagtagcatgggcgggtggtggggacggcagtggtgatgaagggggtgcaccacaggcctcatgaagcagttcccacatgggcgtgtggctggggcgtggccaccacagagcacatggctgtgtctaggcgcaagcactttagcagtatctgtttacatgcgcaaggatcaagccgactacctgtgctgtctactgggacagcagtctccgagctactccgtacctccctctgccaggtcgtggagttaggccccagtccctacttgtcactggttcccactgtgctcctaactgtgcagcacctgggagctctggcctggggctggaggccctggtaggagctgcagttggaggccgttctgtgcccagcagcggtgagcggctcccatgggccctgtgtctgcagggagccagggctgcggcacatgtgctgtgaaactggcacccacctggcgtgctgctgccgccacttgcttcctgcagcacctcctaccctgctccgtgtcctccctctccccgcgcctggctcaggagtgctggaaaagctcacgcctcggcctgggagcctggcctcttgatatacctcgagcttcccctgtgctccccagccccaggaccactggccccttggcctgaggggctgggggccccacgacctgcagcgtcgagtccgggagagagcccggagcggcgtgccatctcggctcggccttgctgagagcctccgccctggctttctccctgtctggattcagtggctcacgttggtgctacacagctagaatagatatatttagagagagagatatttttaagacaaagcccacaattagctgtcctttaacaccgcagaaccccctcccagaagaagagcgatccctcggacggtccgggcgggcaccctcagccgggctctttgcagaagcagcaccgctgactgtgggcccggccctcagatgtgtacatatacggctatttcctattttactgttcttcagatttagtacttgtaaataaacacacacattaaggagagattaaacatttttgctaaaagctcttggctccaggttttccttgctgggaagcaggggcggccgcaggagtgcagccacatcccaaacacggaagcatatctccctgggagactcagccacacccaggacagatggccacactctgtgagttgggtgcgctcagcccaggtgacacattggagcccttggcggagactaaaacacca

SEQ ID NO: 108110 - DNA, 1172 bp, Homo sapiens
tattagttctatgtctagtaataaaagttagtggaagactactgcaacccaataacgtcaggaccacggagagtgcaggtccttcaggaaggaatgggagtcaccccatcaataaagaaccacaacagaagggctggctgaaatgaaagagagcttgaaacagacagcaggaggaggaggtgatgaaaggtcactctggccacacagtcaggtacagcatcaaggatggtcatgccactttccttcgcttgctatgtctttattcatatatatttacaagttatttctttgtcccctgctcttttatataaggcatgtttgtgatgtctaacttaaaattagccttgtgccaaagaatattcgggttagatggtgactgaactggaaggctgcctaaagatgatctgacccccttttccatccaggggcaggaatgtcttggtttgtgcaagggattattgtaagcatgctcctgtctttgctgcttttgtatggaagcgtgaagaagtgtaaaaggtgagaatggcatggtgctgaggatggggactgtgatagtgactcaactgtagacgtcagccctgctctagcccttcatgtggctgggaggctggatgcctgcaaactctggggcttcttataagctggctccttgttagattcagcaaatggaaagccctagaaggagaatggaatggagatgggaagcagcagatgtagcatggggccacagacacagctcctgggctccagcccagccctcctggttatatgggccattggaactgtccgtggaattggaagggcacatcagcagtgggttcggcagtggcctcagcagcacagtgctcatgggcctggattcttgtgtccagggcagtgtggaccctgcctcctgcacagaggtggtaggagggatgaacacacagcaacagcagcagcaagtcctgcagcagccacagcaacccagccatcatgggccccaggtagccccactttctctttccctccaaccctggatggtagactcttcctgccattataagtatttgggtaaacttaccttctttccttctttgtagcccaacccttccagtgcttttctaatgaatttgctatataaatccctgttcctggctgggcacagtggctgacacctgtattcccagcacttt

SEQ ID NO: 108111 - DNA, 1094 bp, Homo sapiens
ttgtggaaacagatcactaggactattcaattgtttaaatctccagcagcatatctaaacatttgtcattgtttaaaaaaaaaaaaaaaaaagatgcccctggccaagccctgctctaggctatcgagagtccctcacccagcagtgtccatccccccgcggcatccatccccctggcagtgtcatccacccagcagtgtcattcccccagaggtgtcatccccccgccaatgtcactcacccggcagtgtcatccccccgccagtgtcacccacccaccggtgtcgcccatcaagcagtatcatccccccaccagtgtcatccccttgccagtgacacccacccaccagtgtcatcccccaccagtgtcaccacccaaaagtgtcattcccccaccagtttcaccctcctgtcagtgtcacccacccaccagtgtcacccccagccagtgtcacccactcagcagtgtcacccccagccagtgtcacccacccagcagtgtcatcccccaccagtgtcacccatccagcagtgtcatctccccaccagtttcctcctcctgccagtgtcatccccctgccagtgtcaccccctcgccagtgtcaccctcgccagtgtcacccccaccagtgtcacccctgccagtgtcatccctccaccagtgtcacccacctgccagtgtcaccccctcccagtgccacccacctgccagtgtcacttgcttgtcagtgtcatcccacccaccagtgtcatccccccgccagtgtcacccacccaccagtgtcatctacctggtggtgtcatccccccgacagtgtcacccacccgacagtgtcatccacccagcaatgtcacccacccagctagcacttgcagtgcaaacgggttttggacccctgcctgtgcttcccctgcccctggggacctgggagtgtcccattttgcatcttcgtttgccctccctggtttctcctgggctctctgctggccctcttgtctccaggcctaggtccccagatagctctctgtcttgttcaccccacactggggtccagtagtaatacccactgtgtccgttccctggtgttctgtat

SEQ ID NO: 108112 - DNA, 1034 bp, Homo sapiens
aacagaattggggagctggtactagaggggaggggaatggatgctgggtggggaaaatgcccactgcatcctccatccattcgtcccccatctgtccattctgtgaaacctctttggagaagacatcttacttgctgggagagcctgcattgtcaccacttggtggtcctggcacgtgttgcctggggagaggtgtcagggctgtggttgagaaggcagctccaaatgtgggctctcctggtataggctccaggtgtgggctgtcccagtataggtgccaggtgtgggcttcaggtgtgggctgtccaggtgtgggcttcgggtgtgggctctccaggtgtaggcttccggtgcgggctgtcctggtgtgggcttcgggtgtgggctgtccagctgccttccttcagggcgcccttcccctgtctgcagggcctgcctgactggagtcctcccttctctgtggcccttagataccaccacatgagagctgagtggctccctggtcccctccttgtggtctagcccagaacttcccagtcagaggagtgggctgtgggcaggcagagagacagacaaggggctggggaagcctggaggttgtagtggcctgatgtccctcacacctacaagatggtggtagacaggactgggaactgaggcctgctttctttgcttctctcccactgcttctctcaccatttattcatttgtgtatttattcaacagatattaaacacctactgtatgctaggcagatgtccttttgtggggtaagggggagtgcaggcagggagaaagagccagggctaaatgtccaggaacatataacagggcccagcccatcaacttttggggactttgtcctaaagagttcaggaggcagtgttaagagtggactcaggaagtccagctctgaaccccagccatgctgctgtgtgacctggggccagtggcttggtctctctgtgccccagtgcccttctgcataacagatgttgatctgctttagctatggtgttcatgtgagcacctat

SEQ ID NO: 108113 - DNA, 1080 bp, Homo sapiens
agcgcccgcacgcgagggggcggtccccggaggctccgccccgacggtccggccgcggcccaggccgggaggtggagcgcggctgccgccagctggtccactgacaactgctgccagctggaaggcgcgtagggcgagaggtggcgcgtcctcagctttccagtcttcgattccgcccgctttccgagtgagaaacgcaggcctctctcttccgtgaagcagcgtcttgtctctgcacctcctctgtgctgtctctttaagaggtcagcgggctgctccgcctcttgggaatttgattggtctctcccacttttttttttttttcccccagtgatgacttattcctataggctgctggaggttagagggcgggcctgagtgataacagggactctgggactctgggacttgtgggactgtggccgttttcgcaatttgggctggacgaaaaagacggtcttgctttcccggtcgccgctgtcgggaagggctgcagggtgtccgcgagacccgcggcccggcgagctgaccccgcctcgcctttcctgcctagccctcattccacggagccggtcgcgcccggtccttgcgcgacgcttcccggcccaggccgcctggtctggcgctggaggccggagtcccgcggcctgtgctggatccgcgcacacccagtggcggcggatgggcggccggggcggccggggcggccggtcctgagcgcggcccgggctgtcaggtaaggaggggccttctccccgtctcctgccgcagctagagggggagccccgtccctcgccccggcgggaagcccagccgccgttcccctccttgctccgcgagcggcccatttccgctcgggcgcagctcggacggccaaggcggcgtttgggagggaaggccctggatgtgggaacccacgggaggggtgccgggcagtcgggagtcgctcggggcgcgggggcacgcgaggcccgggagggagccgcacgtagcggcgtcgggctcggccccggctggaggcagtgcgggtggagatccggacctcggcgacccggtccggcgcggggtggcggcacgggc

SEQ ID NO: 108114 - DNA, 1942 bp, Homo sapiens
gcccggcctctgttgtcttgtcagcaaaatggccctggtgtgaccgaggtcacgcagccagcaagtgtcgtcgggtcccctggagcctcagcttctacctccgctccagctcccaccacagcgcaggcgagcgcacgcgcacagcgccgggccgcacacctccgggctctgggcggagcgcctcgggcgttgtaggcgggaccggaccctctggcccgcccctccgtgtcccttctggtcgccagtggacgccgacgtcatgacgtcgcgttccgtagggctcttcccgggctttggtgggtcacgtgaaccacttttcgcgcgaaacctggttgttgctgtagtggcggagaggatcgtggtactgctatggcggtgagcgcgctggcgcgtggcgggcgggcgccggggacatgggtgcggaggctgcgcgcttcccgtactctggccccggcccagggcggcgctctgggtgaggctgggccccaggctctggggcgcagctactttctcgcctgcaccctgcgtgaggcgactcgcctacctaccactgacctggggccctgggctccctaaggcgagctcggcccgttcagcctctgtcctttattcaccccacacatacttattgggcgccatctgtgtggcgctgagcgtacaaaagacaggcccccatttcactacactcctttaaactttttttttttttaatttcccaatgatccttgttccaaacactacacttacttttgtattaccttcttgtccctttgtcttgtatactgtctgttccacatctgagttccagacctcttgttttggtggctcttctatgccatctctatcacaataccttgcgcactgtgtgtgctgaaataggtctaatgcttaaggggagataatagacagtaaacaggtaaataggcaaatgacataacctcagtggtttttcatggagaaagcacggtgatgtgggtgaccccgatatttgagctggcttctatttgtttggaagccactgactcagattgctcagctgagagcattccaggtgagagaacagcaagggcaaagatctggaggctggaaggggtttggtgtgttggaggacaagagtcacaggtggagagaaagaagggaaggcccctgatggtaaaaaggaagctgtatcatgcctcaccagcttcctaggtttctgacaaccgcaccttctcttgcaggaatcatcggaatccttcaccatggcatccagcccggcccagcgtcggcgaggcaatgatcctctcacctccagccctggccgaagctcccggcgtactgatgccctcacctccagccctggccgtgaccttccaccatttgaggatgagtccgaggggctcctaggcacagaggggcccctggaggaagaagaggatggagaggagctcattggagatggcatggaaaggtaatttcattcaaggccctggactcagcagatagttttgcagagagcccattgtgtgcctggtggcctggctttgggagctgggagcagatgaatcgatggcattcttgcctttgagcacagcttgatccagggttctgaggagacaggtttacagagccatgacacaggtctctttaacttactgcatgtaacttggaaagactagaccctaagctgaggataagccccgactccataagcaccccagagaatgtaggggtctctaatctggaatactccaactcaaaaagacaggaagcaggaagcccagtgtttcccagtaacttttcaaaggaaaggtgcatgggggaggagggatctgataaataaagttttagagtcaatcagcaaacatttattgtacctaatgtgcaccatgccctttgttaggaatggtcttgtttattagtaaacatgtggtggctcacacctgtaatcccagcactttgg

SEQ ID NO: 108115 - DNA, 1072 bp, Homo sapiens
cggccatcaccgccatccatccacaaaagtcttttcagtttgaaaactgaaactgtctcggttaaacactaactccccattcttcccagcacctagcaaccatcattttactttctgtttctgtgaatttgaccgctcagtgagtggaaccatataggatttgtccttttgtgcctggcttctttcactcagaatcatgtcctcaaggttcatccatgtgccagcacgtggcagaatttccttctattttaaggcttcatcgtccatcatatggacagatcgtgttttgttcatccattggagatcttttctgagccttctgtgtttctgacctggaagcgctgagcctacccacaatggggctcctgaaccttagggaacaggcccagttcctggatggggtttggtgcttagggttttcctttttggcagtaaccacatctgttttggtgctccctcagggactaccgcgccatcccagagctggacgcctatgaggccgagggactggctctggatgatgaggacgtagaggagctgacggccagtcagagggaggcagcagagcgggccatgcggcagcgtgaccgggaggctggccggggcctgggccgcatgcgccgtgggctcctgtatggtaggtccagttgtctgcctgcccgagggactgggaagctgggaaggagtctgggaggggagtagaaggtgctggggatgaccgcagtagcaggtgtctcttgcctccccagacagcgatgaggaggacgaggagcgccctgcccgcaagcgccgccaggtggagcgggccacggaggacggcgaggaggacgaggagatgatcgagagcatcgagaacctggaggatctcaaaggccactctgtgcgcgagtgggtgagcatggcgggcccccggctggagatccaccaccgcttcaagaacttcctgcgcactcacgtcgacagccacggccacaacgtcttcaaggagcgcatcagcgacatgtgcaaaggtgtggcttccctacgcccccgcctcagcccctgtagcgcctccctaaatcctccccagaaa

SEQ ID NO: 108116 - DNA, 1482 bp, Homo sapiens
ttgcccgccttggcctcccagagtgttgagataacaggcgtgagccaccgtccccagccaggaattgacttttaaaagggacatgtagatcttgattcctgcaattccttccactgctttttgtcctgtgtttgtcagtttcttcctggctcttgtaaggcgtttcatgtttgtagctgtgtaggcactctgctcatatttaatttaaccccccagcaactttgtacactgtgtgacatgcccattttacggagtaggaagttgaagctcaggctatgtcacagctgaagtgtggtagacctagaagtgaaagctgggctttctaggtcaaaatcaatggtcggggtgggtaggccttgcttctcacacaggcattgttgcagcccagcccaggcctcatgcttagttaactctcttcccactgtgcccccttctagagaaccgtgagagcctggtggtgaactatgaggacttggcagccagggagcacgtgctggcctacttcctgcctgaggcaccggcggagctgctgcagatctttgatgaggctgccctggaggtggtactggccatgtaccccaagtacgaccgcatcaccaaccacatccatgtccgcatctcccacctgcctctggtggaggagctgcgctcgctgaggtgagctgagggcaggtgaggatggcaggtccgagctcagtgctgggtgactcggtcgtgattcctgaagagcgattgtggtgtgggcggggagggtgcagccagcagcatcctcatcgcaggtgagttgtggttgcacaggagtgtgatgggagggatcttcccgggctgggggctgggcccaatttccaggacagtgtgttgggacactctcgtctgcagcctggcctcaccctggctcacggcttctgatgcaccctctgcctccgcaggcagctgcatctgaaccagctgatccgcaccagtggggtggtgaccagctgcactggcgtcctgccccagctcagcatggtcaagtacaactgcaacaagtgcaatttcgtcctgggtcctttctgccagtcccagaaccaggaggtgaaaccaggctcctgtcctgagtgccagtcggccggcccctttgaggtcaacatggaggaggtgagagaggacacaaggtctgctgccagctgtccttaggggtgcccagtatgcaggacctgactggcctctcaggctgtggaagaccagtgtgggcagccgcaagaagcaagatagaattgtgtgttggccacaccctggggtggacccagtctgtctggccagtggacttagcttggcccacacgacgtttttaggaattcaagtcaatatttaagtcaggcgatttgtttaaaccatacaagtttatggctcctcttgaaacatgagaagatctggcaaacagggcccacttcttgccaggtcactccttcaggatgtgtgcttaccagtctccatggtgcc

SEQ ID NO: 108117 - DNA, 2046 bp, Homo sapiens
agccaccttgccagaaaatgcctcagaggttccacctgtggccacctacagccaaaagctgacccgtctcgtctcgggtggggcagctgcaggccagatgccagctgagccacgtctttgctcactcttcccatgccctgtctgtctccctcaggccttgcttctagggacctgagatagtacctggtagagggttaacagttacagctatcattcatggagtaacttaccagtgccaggtggtgggtggtttattacctggtcctttttcacagctcatgaggcaggaactgttactggccccactttgccgagtgtttagagaactggctgaggtcacccaaccagaatgtgtgttagaggtccacagctcaggcatcttgatctagagcatgtgcttttaactgcagtgccatgttgtgagataatgggtacgaaatgacatggcacagtgctggcctgtgatacttgacagtgacagccaaaacttcctgtaacttaacatttatcagatgctggattaggttgatgtatgtatgacttgctttaattcttattgtgaggttgcagagaaggcacagagagaggaagtcacttgcccaagatcacacagcttagacacagaacccaggcagcctggttccagcatcggtactcaagacagcttagctgtaaagcatagagcaggtgctgagtctggccgtcagaaggcatcccagagggatggtgtggcaggagtggggactgtcaactgatgtgctgagtcgccatgaactcattccttgctgtctttggctctccatttgccactcaggagtcggaatcctgcctgttctccctcctgttcgggggtcaaggttaggtgacatagtaagtcagtgatttgaggccttctgtgtgtccctcgcagaccatctatcagaactaccagcgtatccgaatccaggagagtccaggcaaagtggcggctggccggctgccccgctccaaggacgccattctcctcgcagatctggtggacagctgcaagccaggagacgagatagtaagtggccggggcaggctgggagggagccaagttgcagagggaactggcagaagcagttgtggctgggccggtggcggtgtctatggtcgcaggggcactcgggctaggatctgtttttgcatggctgaggcaaagaactttcttctggtggatgggttgttggaatggtgggtttaggaggggttttactgagttacttatcttggtgtctgtagtgtggagcacttgcaataggagaaactggaggaaggcagcacggaggtgggcacccctgggttaggctctgacttcttggcccctccctttccccaggagctgactggcatctatcacaacaactatgatggctccctcaacactgccaatggcttccctgtctttgccactgtcatcctagccaaccacgtggccaagaaggacaacaaggttgctgtaggggaactgaccgatgaagatgtgaagatgatcactagcctctccaaggatcagcagatcggagagaaggtaggtggaaggcaggggcaggggctgtcaggatgctgtgagaggatatggagggttgctggggctgtggtaggcacctagggctcactgctcaaaccttgccttattcccctggagctcagtaagcttgtctggaagggaggccctgtgctccagggaagaggtaaactcgcattggggatgggtgaacctggctgtggctccaccatgggccagcgaggtagtgggataacttggatgacctctctgagtctgtgtggtgggaggagtcccctgctgaggacggggttgcgacgagaagagctcttcctttagcagatcatttcaagctgtggtttgaaattggaacagaggcagggcaataggataacttgtgtcatgagggattcctagggatccagctgtggccaacgggaatttcttcagaaaaacaacccagaatggtggtgttttttgtttttttttgtgatggagatggggtctcactacgttgt

SEQ ID NO: 108118 - DNA, 3097 bp, Homo sapiens
ggcaggcacttgcatgaactgtcgcatttgtacccacccttctgtgagttggatgttgccatctctcttttccatatgaagaaactgaggcttgaggtaggccagtgccatgacagacctggttctggtcttatttctgctcttggtctgtgatcttgggaaaggcctttctgaaatatgtcaagattaggggttcagatgaaggttcttctaaactccaaagttctgtgactcttgggaagagccaactaatgaaaagctttagagtcgggcacggcttgataccagggcctgatgcagttgcagcagctgtggaagtgggtgtctttgagctggggatgtcgtggttccctgatgccagagcatgtgggtgacctactctgtgagtatctgttcccattcttgtcggtctccctccctttctcagatctttgccagcattgctccttccatctatggtcatgaagacatcaagagaggcctggctctggccctgttcggaggggagcccaaaaacccaggtgagcacccacctttcctctgcaggggtgttagcagctttctctttggggagccagcattcaaagaaggacacagtgtttttaaagcctgggtgctggggagaaagaatgcattaaaagatggtctggctgggcgtgactcattcttcaagggagagggtggccctgagttgggcattctgggtgttgggctgttggtcagggagccagtgtctgcctgcttttgtgatttaagcaaatgagtctttgcttctcttctatgtaaaaaatactttgtcttttaaaaacctgttttaagtacaaaaatactattgacacatgagtttgtatttatattacacttttatagaacactaaaagtcatgggtgaggctgatttccccattgacccccacttctcttcctagtccctccctttgtggccatttacaattacacagcaaccacagggtttcatgactacacgtgtttatttgtacaagcgcagcgtcccctgtgtgtgcccagtgctgtgcctgtgcgcagtgcatcccaccgagctctcccgctcagtgccacactgcagcatcttttcttgttagtgcatacagagcaattgccttcttttaaatgactatcatgccaccagataacgcagtttatttagctctccctttggagaacacttagattgtttctgatatttcacattcgccaaggacatctcgtgcaaccctcctctgcacccgtgtgtgtttccctgggagtgcccagagtgggactgcatggcgtagggcattgtatccctttctagagggactgtgccttaccattcctaacaagtaggttgaggaattggtgggggatgcaactgtgccctcctcctctcacttcccactctccccctcccccgcttctactcatcccctccaggtggcaagcacaaggtacgtggtgatatcaacgtgctcttgtgcggagaccctggcacagcgaagtcgcagtttctcaagtatattgagaaagtgtccagccgagccatcttcaccactggccagggggcgtcggctgtgggcctcacggcgtatgtccagcggcaccctgtcagcagggagtggaccttggaggctggggccctggttctggctgaccgaggagtgtgtctcattgatgaatttgacaaggtgggtccctgggtcacggaggctggtggaactcagggggtgtgtgtgggcttgggccttagcgacgggaatggtgttaatggggtccattgggacctcatcggagacttagtagtaggggcgtgaaccatgctaagggtgggccattttaatcttgcagatgaatgaccaggacagaaccagcatccatgaggccatggagcaacagagcatctccatctcgaaggctggcatcgtcacctccctgcaggctcgctgcacggtcattgctgccgccaaccccataggtgcagcaggcaccctgactgctggggctggggtgggacacagggaggtcccgcctgcttgaattgggagcccacggggtccccaggagccgatctgaggaagtcattgtgcagcagagggttcccctcttctgcatatcctgccagagtggggaacagtgaaagtgggacctgggacacctgggtttcctgttgagtcatgttcctggaatcaccttggatgttctcagaaggcatgggaggagagcccagtgcccctctggccaggatggagttggctgttggtctcagcagcgaatgcgtaaaagaacccaggctctgtcacccactgtgttcttggtttttcctcctggggaagcagttatgctttctgtctaaattaggctattttgggccctggttagggtaagctctttgctgtctcagacagcaggtgctaagtacccacctatgtcttcctcttccactgccctcatccccttctgccatcagagcagcctggggtccctgagatgggaggataggggaatccaccctgatggaggtgctcccctgtgtttcaggagggcgctacgacccctcgctgactttctctgagaacgtggacctcacagagcccatcatctcacgctttgacatcctgtgtgtggtgagggacaccgtggacccagtccaggtatagctcacatgtgcccggtttccatgaactgtggtttggggacctcaggtgaggcttggggtcatacagtgtgcccaacacaggggacaggtgctgcaggggccataggctgttttctagtcctgttccctcggtctcttctcatgtccagaagtcgccctgatttctctttccttcacagcacccccgacccccaccctacataacccacaatccaccaaatcctgttgtcccaactcctgagcctacccacctccctcacttctgcctctgacttgaggcactaccatcatctgaactggcctcctggcacccatgtagactgtcttccagttgaaggcataaatcagatcagccccgtccttaacaactgcttgaggctttctgctgtcatcagaatagaatccagggtcctcccctccggcccgcacccgccatctctgcagc

SEQ ID NO: 108119 - DNA, 1068 bp, Homo sapiens
cacaccactgatggctcactggacacttcctccttgcaggctcgtcagatcaacatccacaacctctctgcattttatgacagtgagctcttcaggatgaacaagttcagccacgacctgaaaaggaaaatgatcctgcagcagttctgaggccctatgccatccataaggattccttgggattctggtttggggtggtcagtgccctctgtgctttatggacacaaaaccagagcacttgatgaactcggggtactagggtcagggcttatagcaggatgtctggctgcacctggcatgactgtttgtttctccaagcctgctttgtgcttctcacctttgggtgggatgccttgccagtgtgtcttacttggttgctgaacatcttgccacctccgagtgctttgtctccactcagtaccttggatcagagctgctgagttcaggatgcctgcgtgtggtttaggtgttagccttcttacatggatgtcaggagagctgctgccctcttggcgtgagttgcgtattcaggctgcttttgctgcctttggccagagagctggttgaagatgtttgtaatcgttttcagtctcctgcaggtttctgtgcccctgtggtggaagagggcacgacagtgccagcgcagcgttctgggctcctcagtcgcaggggtgggatgtgagtcatgcggattatccactcgccacagttatcagctgccattgctccctgtctgtttccccactctcttatttgtgcattcggtttggtttctgtagttttaatttttaataaagttgaataaaatataaacgctggtatctgttggcttccattccgctttagtaagtaacctggacttccgctgaaggccctttccaccttctccgttcagagttctgtaggaggtaggtcgggttaaaaaagctgttttgtttgtggatgtagagaaagcaaaaatgatatagatatccccattgaacttggtttgcagtcactgcctctgtgatatctaagtggaatccatggaaatcctagttagacgtgtataggactagaggtggtgta

SEQ ID NO: 108120 - DNA, 1232 bp, Homo sapiens
ggtagttacatggtgcacacctcttttggccatcaccactcccacccgcccatgtgttcatccccagcaccatgcacttgagcactaggcacagggagcagttctcccataggccttaccactctgtgtacccagtttctgggcttgtcactgtacatggctgcgtgtgtgtgtgtgtgtgtgtgtgtgtgtgtgtgtgtgtgtgtccccagcccccgccccgctcaactgcatgtgtctctgggacaggccccttgactttctcatggctagaggccagggcaggaaggagcacctggtgtaagtgaacaaatgggtgtacatcttggggttcccacattccctggcttgcagctctcagagggtctccagagttgaccagagctgcctctcttggaacagccagagggttgagggtgagtacggggctgggcctagaggcagagggctcagtagagcccctttccttcactgaacacggggggctctttctgcccttgtaggaggtgttccggcagcaccgggggccacagctcctggccctggtggaagaggtgctgccccgccatggcagtggccaccatggggcctggcacatctctctgagcaagcccagcgagaaggagcagcaccttctcatgacactggtgggcgagcagggtgagcgagggcaggtgatgggagggcccaggagggcagtgggaggcgggcggcccctgagggtcacgggaaaaaagtgcacgcataagggctttgaaacttggaactccaggacagtagtttgagctacttagcttagtggtcaaggtgtacccaccagcttgggttctggggacaaggaggagggtgtgagaattaaggatggggaacaggaggcaggggaacaggtgtggtccagcacaggtgggagatgaatggacactgtacctggtgtggcaggggagaaggggtgtgttcagaaggcagtgtgtgggcttcgcaagtggctggctggtgttatacaaatcgatgttctaacagatcgatgcagtggaaagcatgtctaagagagggggaggcatgtgccttgaggatctgtgtgcaatttgagccaggaagggagacagaggctcaggccagctgttggagagcggggccagagcccttggaggggcacgcacctcagccatggtcacactgatagtggtgtttcttaccccccaggggtggtgcccactcaagatgtcctttcc

SEQ ID NO: 108121 - DNA, 1031 bp, Homo sapiens
gcgcccaggagagtcactgcctccccttgcagatgaggacacctatcgatgggcactctcctctcaactggcccccagccccacctgtccccacactcaccacgtgcttgagcttgggcagccggcgctgccagcagttgtagagcaggccaagcgcaatgatgatgatgcagatggccccaatgaccaccagcaccacgaagagcgtgccgtagtcgctgcgcacctggctggcccgcgcctggcagctgctggttgtggaatagttctggatgccaatctaggggtgggaggggccagtttcctcagctgaggtcctggggtgccatggctcctctggggtggttgcattgggctcgggtggggatgggggagcaggcttagaaggtgctggcactcccggctcctgaagttccctggcgcctgggcttgcctctaccccatgcccatcccgtttgcctcagtacacctggaggcctctccaccccatgcccatgttcccagcctccttcacatcccaccatagcttctgccccagccgctgagtctgagctcactgtggccctaggcctccagtgagagtggacccatgctgctggacaccatccaactagagagagtgcccacacctatcctaactagttagagagacaggagatgtgagccccccacacatcctccaccatacaaccgcttccacctcggtggggaggggtggaccagtcagcttcctgatgccagggccggtgcagggagggatactgagggcatgcaggccacatggggggccaccccggctgcccagcttcctcccttcccatggcgtgttcactgctggcatgtagctgcctgcatccctccacgctgcaggttgtcatggtcagtcctgccttctctggccaaggagatcggcgccaggggccaggcaggtgctatctccacagatcagcatcttagcagagagaagcaggagggcgagcaccaccaggggctcctcaggtgagggatcagggcagttcccagtgctgagg

SEQ ID NO: 108122 - DNA, 1904 bp, Homo sapiens
tgccgggtcacagccctcggagcgcccccgcggggcagaccacccggacccccgccgcagccccccagcggaagcgcgctggggcggggacactgatggccattgacccccggagggcttcctgtaagaagggactgctcagcggaggcccgaaggcgcagaagtgggcggagagaaggcgggccactgttcgccctggtagggcccggacgtcagaccccccgggcgcagggcgcgggtataggcctgggactccagacgtggcccctttctctcgtgctctctggacctggcgcggggaacacctagagcccataatcggcctccggtccctgaggattcggaaactcctgacgcagctaaagtgaatctggcgctgagatgccccctccatgggccggacgcggagggaaggggtgcccagttgggttctggggcccttcccctccttgggcttccactatcccgtttgacctccttttttcttggcccttcctcccccttgacctggtgctgactgactgcttccacctcccctgggctggcgccgggctgctgtactcccgtagcctccctgggccgctccctgacatcccgtgccactcaagagttagtgcatagtgtcaacgctgagtgggttcacagcacttccaggtgcagcctggaggcctcctttgggctgcccccgcctcagtggggctgcattagcattggcgactcccctcgctcaccttccgcatcccatcagttgctgtatcccgcgactcctgcctcctagaattgtgtgccctccacaccatcaggaggcctgcagcagctttttcccgggctccctgcttctaacagggccagcttcttcctgcagtagagagctctggtgggagtgaaggctccatcacctcctctcccaaacgctgaaaggccaaaggtccagcctcggcactggctctggcttctgtccctgtagcccatcgtcccccagcactgatagcacacagtgtctgcctgttcgaccccacctccacatccttgcctgcactttgccttgagtgcctctcctgctctggtctgcctgtcacctgccctcacctgggggaggcttccccataccaaaagggatgttttctctccgttcctttccacgggccttctttctcagaccatgaacccgtcctgacccaggctctgacctccttcctgcccaggtacctgctggagcagcgagacgtggaggtgaatgtgcgggacaagtgggacagcacccccttgtgagtgctggagagaggggtggggagggtgggggttggtgcaccccttcagcactgaggactgcctcctgtacttccttcctcccttcaggtactatgcctgcttgtgtgggcacgaggagctggtactctaccttctggccaatggtgagagcagggagcccggctcacgggtgtgcgtgggtgcatgcatgtgtgcgtgtgggtgcatgcatgcgtgcgtgcattcaaaggccttgatacacatttgcaaagcaccacgattcctctcttaccacccagtcgaatcagcaagtactattattgctactttaaaaccttttctctgtccaccttgcccatctctacttctacgacctgggcccagtcatcagcatttctccccggacacggtgcctgcctctctcttgccattgcagccaagttgatcttttcacaatgaatctgatcggctaaaaatcctccagcaagttcccattgcctctaggatacagtgagcctgcctggccatgcccaaggctccacagggtctgccctcccactggcctcattccttcggctctccctgcttgcttgctgcttgcttgctgctacactggcctcgctggggctccactgtgctatgcatgcccctgt

SEQ ID NO: 108123 - DNA, 1055 bp, Homo sapiens
gcccaactcacttaacttctatgcatttcactctcatctgtaaagaagataaatcatctgatgactggagagttagaaatcttgcatgtggagttgcagaggaacgggtgcatagtaaatgctcaggaaggtggcagcttgttctcctcctcctctttcccctcatcaccatcagcagcagtagaagttggtgggtatcgctcatggcatttactccgtgcctgaaggagactctagctctccgtaggtcttctgctaagaatataggtcttgaaaattggatagtttggaatctaaatgctgccacattcgcccccgagggaggaagcaggccctggtggaggacctgcctgccccgcgccagcactctgcctgggccattggcatcgattagctcccatgagcctcacaagcacccacagggcgatgctcttcttaccatgttacaggcgaagaaatgaaccttcatgggactggagctctgcctgagagctcacaggaagagcagggatttgggctccattctgcgtgactctgaagccccgcattttaacagcaaactcctcttatttgacaatgcctggagcccatggtgtggctcctggtgttgctgaggttttgtaagctctggtactgctgcagcacagtggcagccatctgggcgtttcttttcttttctatttttttggagacagagtctcgctctgtcacccaggctggagtacagtggcgccatctcagctcactgtcatctctgcctcctgggttcaagcaattctcctgcctcagcctgccgagtagctgggatgacaggcgcatgccaccactcccggctaatttttttgtatttcagtagaggtggggtttcactatgttggtcaggctggtctcaaactcctgagctcaggcaatccgcccgccccggcctcccaaagtgctggaattgtaggcatgagccaccgcgcccagccccgtgtgggctttcctaaccaggctcccttcttgtctctgcagggccctcatctttgtgtcccatggagccggagagcacagtg

SEQ ID NO: 108124 - DNA, 1113 bp, Homo sapiens
gttctagaacaggcagaataatctatagtaacagtatcagaaaagtggttgcttggagtgggagggttgactggaagtgggcacaagtgaattcctggggtgatcaagacattctgtaccttgattgagtgttggttacatgggtatagatattagtcaaaatgcattgaattgctcactaagatctgcacacatttcactgtacgtaaaatttacctcagtaaaaaaaaaaaaaaatgcaaaattccccaaggaatcatagttgcttctaatatttacatataaaatgtctttagaagtcttctagtcaaaatctcgcattactaatttagggagcactaatacaattccatatataaaaactaagaaaatgtgggtgtggctgaggctgttatttcaaggaaatcttgaaaacgttgttagtaatcatttgtaactacatgtcaatgtcttccaattggctggtgagaaaccttaaaatctcacttctcccagccagtatttccagggtgtagtaagggagcaggacttagaattctcttggtcattcccgactttttaagtccctgcttccactgatcttttgtctgtgttctagaacacagatctagattttgctttctttgctttgtccacactgcttctttttcttagggcaatactcataaaaccagcatgattatttcacttttccaaggaccactgattcaaggtccaattcagagactctttgaaaatgttaagcagcggggcagtttaatattgcagcatagcacattgaatcataaacatacttccgtggagcttttattgccttttttcttctttttttgagacagggtctcgctgtcacccctgcaggagtgcagtgacgtgatcttgactcactgcaacctccgcccccaggttcaagtgatcctcccacatcagcctcctgagtagctgggattacaagtacacaccaccatgcccggctaatattttgtatttttagtagagacacagttttgccatgttgcccaggctagtcttgaactcctaagctcaaatgatcctcccacctaggcctcccaaagtgctaggattacaggcgtgagccaccgtgcccggcct

SEQ ID NO: 108125 - DNA, 1412 bp, Homo sapiens
cagcaggtaatgacggagacctactaggtgacgggcgccgcggtagacgctgggataaggtccctgctccagggagcttacggtctattcactaacgtcaaagagcagtgagtgctgttacgtgtatgggagccaccagggtctccgcctgcctgcagggccacgcgcgcactcgacgcttcgcgcctgcctcagtttctccgtgaggccgcacagccccagtctcgggaggcgtgacacaccctccccgcgcgctctcgcgttaccaagtctgcgcagccgcacacccccagtcccggcgggccccgcgcgccaggccccttcccgacaggccccaggagccccgctgcatgccggggcttgaggtctcggcgaagcggcgcggcgcggcgaagcgcggcggccggcgggcgcgcgtggcaggaagcggaagcgatccgaggcccggccccggccccgccccgcgccgcgccgcgccgcttgccgccgggctagcactgacgtgtctctcggcggagctgctgtgcagtggaacgcgctgggccgcgggcagcgtcgcctcacgcggagcagagctgagctgaagcgggacccggagcccgagcagccgccgccatggcaagtgagtcctgtagggaagccctattgaggccgggacggaacagatcccccttccccacacccgtgcggtcgggcgcccgccggccaaccctgaccggccccctgcagaacgcggcccgtgcccccggcccttctcgagtatccccacgcgtccggggtgcggccggctcccctggcccctgctctcactcgtcgtgggcagaaggcgtccctgggtagcgcggaaggttacttctctgtgtcccaactcttcctgttttgtttctcccatcaaagtcaaatttctggaagtcatcaagcccttctgtgtcatcctgccggaaattcagaagccagagaggaaggtaagtaccccaaatcgccaacaaagaaggtttcaggaaactgtctggactctggaagtttacagtatgattaaaaatggcttcagcacggcaatggaaactctcccttctcttcccttggagtgtagttgtgctctgttattccggagagctgtcgaaaggtgacctggttgtgtggaaatttccactgaaatcactgtgctttatttggagcatctttggtggatgttgctccgagaacaaagcctccggttgccctgtcccaaaaatggatccgggccatgaatgaataaggcctcagttaggatagcagattgagttaccctccctttttcacctccaacgggagcagatcacgggttggttttttttcccaggagatgccctttgtatccagctgctaaagggaagggctgtcactttagtatttacaaatgattttgtacc

SEQ ID NO: 108126 - DNA, 2617 bp, Homo sapiens
aatactgtcagtctctcacaaggtatttcaacctcagaatcttccgtctgtacaataattaatgtttgttaagccctctaaagccattaatgtagtgtaggcagcaggtattagtgaagacactcagtttcagaggcagaaaacctggaagagttcccactctactctttagtgacagaggttttgggtgggaggttttctaatgatacttaatacttaatagtcatctttacagtgattcttgtcacctatgcaacctatgtacctgagaagatgtgaaaatccttaaacaaatgttactagtaggttaaacatgcaactctcctgcccttccccaatatggtttattacactgttttacccttaattcatagaaaatacactattgagcaattccaaattacttgactctagaataacaaggttttgtgactgaaactcaaatgaaaagtggttgctcgtgtgttttacaagtcatgttctattgtgacattctttgttcttgagtcttaactgttaatgctaatggttaaaagcacagtttgggactcaaactcactttagcattggggtttggtacaaattatttagctcttctaaggctcagttgtaaaataaaggtaatgctctgtggtgtgaggtgagctggggtgatgcctgtaggtccttgcattgtgctctgtgcagaggaagttacgcagtacatggtacttatgtttggtacatggtttggcttctctgctgaacagagaaaagagtctggttggagtccatttttagagaaaggggtctgattggagtccatttttattaatttgcttttcaaagtaactccctgcttcaattcattctctcctactctagattcagtttaaggagaaagtgctgtggaccgctatcaccctctttatcttcttagtgtgctgccaggtaagctcaggcttgtatttcgtattggggagggggataagagtggctggaaacaggagtgctgactgttttgctctttgcctgttcccagattcccctgtttgggatcatgtcttcagattcagctgaccctttctattggatgagagtgattctagcctctaacagaggtaggactctggctctgtcttttctctgtagagtgtaggcttacctagcttcacttagttaaattaataggctttggctttatatggaacttagagagtgacttggaaaatagagtgaagaatgttaaagtgctgtgttgaatagccttattaaatgctgagttcagcaccaaggcataccatcatatttggaattgtatttgaatgcagtacaaaacctgtaatgagaagataagtctatgctatagagagaataaaaaacatggaaaaactagaatactttttgaatacctgaaatgatgacatttccattgataacattcttcagaatatgtaatttgtttttcagctgtatctttttcatatctataggttacatatagtgtcaaaaaatatgtaacagtgttttatatcctctaaccagttacttatgggactggggaggattctgaatgtgtaggttgatactgcatttgattaactcatttaaaaaatatagttcaattaaattccaaatcagttggaagtgtagctcattttaacataatgggaagtagaggcttattcacaactagatacaattgtacaggctccttttccagactctggaaattatttgaatgttatcctttttttattaactgatgaagagacgaacatttcttatctctaaaaccagaatgaatctgtttatggtgaatttaaatgcagcagtctgtttagacaccatgtgacttcctaaacagaataagctgttgcctggcaggctgaacagaatgaattgaattatatactaatcgttgatattttggggttctaaattaaacacagctaggaaactgaaacacattggttttatataaggggtacccagtcaaattttgcgtattcatttttaaaataacgtactacgtttccaagctgatattgactgttttgcttccccgtttcctcaaggcacattgatggagctagggatctctcctattgtcacgtctggccttataatgcaactcttggctggcgccaagataattgaagttggtgacaccccaaaagaccgagctctcttcaacggagcccaaaagtgtaagaaagattgtgaataatctgatgtctatagttggaaaatttgaatttgctataagattttggtatcagtttttctttttttatttattttttatttttttttttttttttgagatggagtcttactctgttgcccaggctggagtgcagtgacgcagtcttggctcactgcaacctccacctcccaggttcaagcaattctgcctcagcttcccgagtagctgggattacaggcacgtgccaccacacccagctaatttttgtatttttagtggagacgggatttcactacataggccatgctggtcttgaactcctgatcttgtgatccacccgcctcggcctcccaaagtgctgggattataggcgtgagccaccatgcccagcccaaacagtattttcttttgtgctgcaacctccttggc

SEQ ID NO: 108127 - DNA, 1049 bp, Homo sapiens
gggagcggtggctcatacttgtatcccagcactttgggaggccaaggcaggatgattgcttgaggccaggagttcgtgactagcctgggtaacacagtgagagagaccccatctctacaaaacaacaacaacaaattagccaagtgtggtgatgcacctgtagttctagctactagggaggctgaggtgggaggatcacttaagcccaggagtttgaggctgctagtgcaccactgcactcctgcccgggcaacagagcctgtctcttaaaacaaaacaaaaaacactaagaaaacaaaaaaagtacaagcacaaattggctgttttctctttggtcttcacaatgttttgaatgttttcctgcattaagaactaattgttgtggagcactttttaaaaagtcaaatagggactgtatttgatggccactttggagtaaaattaattttacatgacagattaaataggaaagctgaaactgaaggtcagactgtacttagaggacccatctagtactgtggaacttgtcaaatgtgtccattcccttgtgcctaacagtgaaatagagtgagttgtaagaaatgaagacaccctacaaaaaggaaagcttttgccaggcgtggctcatgtctgtaatccccgcactttgggaggctgaggtgggtggatcacgaggtcaggagttggagaccatcctggctaacacagtgaaaccctgtctacactaaaaatacaaaaaattagctggctgtggtggcacgtgcctgtaatcctagctactccagaggctgaggcaggaaaatcgcttgaacctgggaggtggaggttgcagtgagccaagatcatgccaccgtactccagcctgggcgacagagactccgtctcaaaaaaaaaaaaaaggaaagcttctattagaccaaaatagcttggtacctaagggaatgggaagagcagccaaatcaatggtacgtggggttttccttttaaaagcacattaaataaaaacttgagaagggatcactttaccccagagctaataattctgtcct

SEQ ID NO: 108128 - DNA, 1109 bp, Homo sapiens
tttcttttgttctgtgtagtgacccacttggaaaacacttctttctttcaattctagtatttggcatgatcattactatcggccagtctatcgtgtatgtgatgaccgggatgtatggggacccttctgaaatgggtgctggaatttgcctgctaatcaccattcaggtaattattatgctaacatctccctttgagtagcccctcacacttacctacaattctcacataacgaatctcaagcacacctaaaaggaactcctactgaaaggaagcagaagcctaagactctgggttagccctctgaattcagcagagaaaggctttactgaccgctctctggggctgaggatgtgatctcattccgtcttcagcgtttatatcagagaacccaattactgaaggacggaaccatgtccgtggggagcagtaacacatagtcttgtatttttgaatttttacagctctttgttgctggcttaattgtcctacttttggatgaactcctgcaaaaaggatatggccttggctctggtatttctctcttcattgcaactaacatctgtgaaaccatcgtatggaaggcattcagccccactactgtcaacactggccgaggtaagggccctgtgctcccctggtggcgacagctttcagcaaaaacaattgagcaatgcaaagcagaagacaaaaatccccccattccacagaaaaataatgtcagttttaggtttatctcttctggtgtttgggtccatctgcaaagttttaaaaacacaaataggcttgtaattatgatgatacctaacttgcacttttcatataaaaatatctcctggacgtttggcacgtcagaatacacaatcctgcctcacttttcttagcacagtataagcttatattgcaacgataaagcaacgttaagtcatttccaggtttttttatcgttaacattgaaaccatgactgtcctcatatgttcatctttgtatattttggcagctgctctcagtgaataagtttctaaaaatgaaattcctaaaccaaagcacttggtcatgcaaggggcagctttctgaaaaaggcctgaacttggagcttagcacctgcg

SEQ ID NO: 108129 - DNA, 1677 bp, Homo sapiens
acacccggccagttttgtttattttttgtagagacggagtctgactgtgttgcccaggctggtatcgaacttctgggctcaagcaattctcccacctcggcctcccaaagtgctgggattacaggtgtaagtcaccacgcctagccttcagtgtatttttaaaccagcttttctgggccccttctggatgtgccaagtgcaggagtgcagtggtgggtaaggagtgggcacaagctctcggaactgggagccccagaaccagcacacaggatttcctcccttgtggcccactggacagtccccggccgggctgtgtttctgtgcagcaggctgaaatgaggcagtgaaggggatttggttctgtttggcttctcagggcttccgagtggacctgccaatcaagtcggcccgctaccgtggccagtacaacacctatcccatcaagctcttctatacgtccaacatccccatcatcctgcagtctgccctggtgtccaacctttatgtcatctcccaaatgctctcagctcgcttcagtggcaacttgctggtcagcctgctgggcacctggtcggtaagtaggctctttgaagatgagctagcaatgcagctaagttgcagtggtttctatcagtgtcttgctcatgaacagatatttcatccaaagatattttccattgtgccttttacaaattcagcacattaaattatcttttcagtaaaaaaattgtactgtgggcaccgagtaaaattgcattctttcatctgctcagaactatttttgccttgatgctaaagtaaaatgaaggagcactcacatgcgtttggtttcttcttccccaggacacgtcttctgggggcccagcacgtgcttatccagttggtggcctttgctattacctgtcccctccagaatcttttggctccgtgttagaagacccggtccatgcagttgtatacatagtgttcatgctgggctcctgtgcattcttctccaaaacgtggattgaggtctcaggttcctctgccaaagatgtaagtagaagcaaaactttctggaagggtgatgaaagtgtgactggtataaggggtgtggacttgtcacctcatcataaataatggtctgtgacgtgtgcagatagatcgtcgtcctttagggggcagttcagaagctttaagggctgacagatggagtccagcagtagatcagctgtgggtatgagaatctgaatccacactgtaaagttagactttttcatatgacttccttgcggcagttttaaagttctctgtatgaatattgtcagtgctcgaagaggcgatctgtaactgttcagtaccacttggaatgcctatttccccttcagcctccaattccaacttctcccctgtgggcaccctgcaggttgcaaagcagctgaaggagcagcagatggtgatgagaggccaccgagagacctccatggtccatgaactcaaccggtgagtggtggccccaggtccccaacctcccgtctgtggacatgtgttgtttctttccatgcagggcatcctgataggccctagcacttactgggtcactaaatcttatccttgggttacaggacagaattaaatgttatatatttataaacttgctaagtgctggacactggagacgtaaaaataaacacttac

SEQ ID NO: 108130 - DNA, 3033 bp, Homo sapiens
gaaattaaatttaatatatttaacctagtatatccaaagtatcatttcaacattataattaatgttaagaaaaaccatgatgaaatattttacatccttgtcttcaaatctccaaaatcttatgtgacatctcagtttggtctagtcacagtcccctggccacgtgtggccagtgtggccactgcctggacagcagcgccttggcctagagcgctagcatgttagtagatgactttctaggagacagcagaggggcctttgaggcattaggtcccaaagtctcaggtgagcctgttggccgcctggctcacggggagctctgtgggtgtccaggagctgactgtgtcccctcccccaggtacatccccacagccgcggcctttggtgggctgtgcatcggggccctctcggtcctggctgacttcctaggcgccattgggtctggaaccgggatcctgctcgcagtcacaatcatctaccagtactttgagatcttcgttaaggagcaaagcgaggttggcagcatgggggccctgctcttctgagcccgtctcccggacaggttgaggaagctgctccagaagcgcctcggaaggggagctctcatcatggcgcgtgctgctgcggcatatggacttttaataatgtttttgaatttcgtattctttcattccactgtgtaaagtgctagacattttccaatttaaaattttgctttttatcctggcactggcaaaaagaactgtgaaagtgaaattttattcagccgactgccagagaagtgggaatggtataggattgtccccaagtgtccatgtaacttttgttttaacctttgcaccttctcagtgctgtatgcggctgcagccgtctcacctgtttccccacaaagggaatttctcactctggttggaagcacaaacactgaaatgtctacgtttcattttggcagtagggtgtgaagctgggagcagatcatgtatttcccggagacgtgggaccttgctggcatgtctccttcacaatcaggcgtgggaatatctggcttaggactgtttctctctaagacaccattgttttcccttattttaaaagtgatttttttaaggacagaacttcttccaaaagagagggatggctttcccagaagacactcctggccatctgtggatttgtctgtgcacctattggctcttctagctgactcttctggttgggcttagagtctgcctgtttctgctagctccgtgtttagtccacttgggtcatcagctctgccaagctgagcctggccaagctaggtggacagacccttgcagtgatgtccgtttgtccagattctgccagtcatcactggacacgtctcctcgcagctgccctagcaaggggagacattgtggtagctatcagacatggacagaaactgacttagtgctcacaagcccctacaccttctgggctgaagatcacccagctgtgttcagaattttcttactgtgcttaggactgcacgcaagtgagcagacaccaccgacttcctttctgcgtcaccagtgtcgtcagcagagagaggacagcacaggctcaaggttggtagtgaagtcaggttcggggtgcatgggctgtggtggtgttgatcagttgctccagtgtttgaaataagaagactcatgtttatgtctggaataagttctgtttgtgctgacaggtggcctaggtcctggagatgagcaccctctctctggcctttagggagtcccctcttaggacaggcactgcccagcagcaagggcagcagagttgggtgctaagatcctgaggagctcgaggtttcgagctggctttagacattggtgggaccaaggatgttttgcaggatgccctgatcctaagaagggggcctgggggtgcgtgcagcctgtcggggagaccccactctgacagtgggcacacggcagcctgcaaagcacagggccaccgccacagcccggcagaggggcacactctggagaccttgctggcagtgctagccaggaaacagagtgaccaagggacaagaagggacttgcctaaagccacccagcaactcagcagcagaaccaagatgggccccaggctcctccatatggcccagggcttaccaccctatcacacgtggccttgtctagacccagtcctgagcaggggagaggctcttgagacctgatgccctcctacccacatggttctcccactgccctgtctgctctgctgctacagaggggcagggcctcccccagcccacgcttaggaatgcttggcctctggcaggcaggcagctgtacccaagctggtgggcagggggctggaaggcaccaggcctcaggaggagccccatagtcccgcctgcagcctgtaaccatcggctgggccctgcaaggcccacactcacgccctgtgggtgatggtcacggtgggtgggtgggggctgaccccagcttccaggggactgtcactgtggacgccaaaatggcataactgagataaggtgaataagtgacaaataaagccagttttttacaaggtacttgatcatgttctcttgattttaaattagattttattcccaaaaaggccagtgaggcgcaaagcttggttgcagctttgtgtgtgtcaaaggcttggttggggcactcaggcattttgcctggaaaagttcccttctgatggtcatgtcaacctggtgctcacatttgtgataaagtgatatgggtgctgggccacatgtggagctgctgcagggctctgcccgtgaggcagagtgcactggctgtcccgtgagaatgcagaggcctccgctgagccagggcgcctgccaccccgtggaagagtgggaaccttctagcaggagcctagggccccataactcgaagccctttgagcctcagctccagtacccagctggtgattggagaagtcttaacttggttgtgaggctggcctcagacccgacctgtagccaagccagaaggacccagtgttgtgtgggtggga

SEQ ID NO: 108131 - DNA, 1001 bp, Homo sapiens
ggctggagggtcacttgagctcaggagtttgagaccagcctgggccacatagtgacacccctactcaccaaaacatcaaaaagttagccaggtgtggtggtgtgtgcctgtagtcccagctacttgggaggctgaggtgagaggatcgctttagcccaggaggtcgaggctgcagtgagctgtgatggtgccactgcactccagcagagtgagaccctgtctcaaaaaaagacagatgaggacactgcgacctagggtaactaattcgcccaagttcataacattagtcagtggctagcaggtaatgggactggctgtaatccaggctttctgatccggaaacccgtgttcttaatcaccgtgccacccagcttccctcctgctagaaatctctcatctcattgtcattaggattcatgaggtggctttcctctggcagtttgtgagcaggacctttcctttggagcagtcagggcctctcctgggcctttcctggcacttctgctgctctcctgtggctggaggcccagcctgggcctgccagcatctcttaccgcatgcaggagtgctgtggggatgcatcaggagagtcacagatctccctttgtaaccagcattggcaaattactgaagcagttatggttcatagtagcaattgtatatgttacctaggagatggtgtcaatggccgggggcctcatcgccacgtaagggtgtcttgccaggtgacttgcaagggtgactgccaggttgaagccaaggcattcactgaacggaggcagaagcagaaacagtcccaggcaattcttggaaaactggcccattcttactgcgggacatagcaccttactgttgggtccaaaaccccatgtgtcctgccaaaaaaggcagcccagcacagatgtgttcagggccagagacaccatttgcctactgaatgacttgagcaatttggtgcatctcaccgagccttcaccttctctgttaaatggaacatctcc

SEQ ID NO: 108132 - DNA, 1142 bp, Homo sapiens
ctgcacaagtttaagaatgccagaagtgtagcctttctgctgttaggacccccagaggccaaggcagaagcctacagcacttgggccctccaaacactagctgaaggctggccccatgtgccaccagtggctgcgcagggcacctcagggtctggtgggttggcaaggttcctccctggggtgttattcctatggcttggctaagggttcaagagaaaaataggcaaaagatgggattggacccttctcaaaaagaagtaaaataatatatataagggaatacattcaaatgcctcattagtaatcaaagaaatgcaaacttaaggtgttacctttccctctttttctaaactgttgaaatagcaaaatatttcagaatgagaatactcggtagtgctatgatcctgtgagattagataactcatgtgtagctctataaattaggatagttattcattcaagtagctattcagggttctgtcaagcactacaacagttgctaaggaaatgcttatggctgtatgcatcaaattatcaaaatatcaataaaaataatagcaacaattggaaactacctaaatgctcaacaatttgggttaagtaaaatatttaatggattgttaagtaaatattaaacataattattaagactgttgcaagccaggtgcagtagctcacgcctgtactccaagctactcgggaggctgaggtgggaggagcccttgagcccaggagtccagggctgcagtgagctagaatcatgccactgcactccagcctgggccacagaacaagacccagtctcaaaaacaaaacaaaacaaggagactgaagcaacatgaaaaaaaacaaaaaaaacttgcatacttagtataatttgtaaaattatactatagagtataattagtatacactatatattatactatagggcataattagtatatactatatattatactatagagtataattagtatatactataatatagtatatactgtatattatactatataatttgtttatatatgaatgtttggcaaatatctagatgattatttttgagtatgattttagttatttttttcctccttcccagttttgctatgatattgatgattaccaagataaataagttg

SEQ ID NO: 108133 - DNA, 1064 bp, Homo sapiens
cgtatctaagaacccattgcctaatctaaaatcacaaatgtttatgcttgtgttttctcctaagagttttatagtttcggcttttatatataggtttatgatccatttgtagttaattttcatgtagggcataagtaaggggttggtccaacttcattattttgcatgtgaatatccagttgtcccagaaccatttgttgaaaagactgttctttttttattgaattgttttggcagcctcatcagaaaatcaaatggctgtctttttagcactcttactgtgtgtccactgagccaaggttaagtggatattaggtgagttacccatcacattacccagagaggtgtttttactgtgctttctgtcagcagaaaagctttgtgttatccgtgtccctgtagttacaggattacataaagaagcatttatgtagtgattcttaaccaggggcaaatttgttccgctggggacatgtagcaatgtctggagacatttttacttaacatgactcagaagtgctgctggcatctagtgggtagaggccaaggatgctgctgaacatcctggagtgcataggacagcccttcaaaaagagttaatttggtccaaaacatccacagtgtcacagttattgtaagaggaaagtagtcacaaatgagtcagccatgttgcacatgtggtggtatatctataggatacttttccagaagtatatttgtcttgcttttatagatacgctgtattggattccaaggagatttgggtctgtggcttcatagctccaaactgtctatctggaggaagctcactaatggccgagtttggacaattgctgaatggtaaaatgttaaaattaatagtagactgaggccaaagccagaaatgaacttctaagatgcaagaataaatctgcagattgaccaaaatgtaattattatccagcttcttattagcagttttataacattaccattatggctgccttgttaaactgtgatcctccccaccccccgttcccccagctcctgctgaggtcagcacatggcctagcaccgctgctggc

SEQ ID NO: 108134 - DNA, 1088 bp, Homo sapiens
tgccctgtgagcaaggggcagggcggagggccccacattctgagatgctcttgcggctctgtgagcacagtcgccctgaggaaatgcctcagaacagttctttcttcctcatagcttagagcttgactctagcctaagtttctggcggcatttaggcagccatatagcacactgtgtgctatctgccccactgcagtcacagtttctggcccctatgaggccccagaaatagggatttgtgtcgcccagctctgctggagcacaggctctggagccttggggctgtcagccccctccctagtagagcacagggcagctccacagaccagctccacatactgccctgcccagtttgtgggcacttcccagagctccacaggggacactgctgctgctcccctgtgaacctttatttaacctgctgctcttcccagctttcctgttgctgttttttttctaattccacctacagtttcgtcaccttaagatgttagttaaacattaaagcaaatattgtctttaaagtttaagccagggcagcaatctgagacctttctgttcgagttgtcagaagcagtttctttcttttcacacggttttcggtgtgcatcctctttggacaatccccgcctcttgcctttggtggaagacgctgcctcagatcttccagttttctatttgtgagctgctccctcctgatgataacacaggagctggtttggaaaatgagcactgagaccttagctgggttatgtaacttttgagagactcatccctctaggagctctgagattgggcctttcttcagagcctttcattcctcaaaggtttctgctcaggattctaaaagcacccacttccttagtccaggcacttgattgaaagttaattaacctaagcattgttgtatgggaccaaaagaaagggtcatttactgagtatagaacaggtaaatttgcatgtgaaaactcatttcacccagggctcccaaactccaatgtctcccagatcagacagagctagattgggtatgtgggaagtgataaggcatggtagggagtgtgacagcagtgagcgtgtgctgtgaa

SEQ ID NO: 108135 - DNA, 1022 bp, Homo sapiens
cccacctgaggtgaggcaaatgaaggagtgaagtagggatgatgatttcaagaggggtgatagggcctgtggtcctgtggacagtgggggctgggcccacccgtctcacggcagccaggaccatccttataaaagcgctgctgccagtttacagcctttggaatcaagggaaagaggagagtacgtgtcccctgtgtccctctcatgctcgttacatagggatgcaggtatgctggcccccctattttctccctggtgtgcttagtcccccagccagtctgttgtgtggtacttatgcattcacactcctgcaggtcccagtattcatgcaaacgcaaaacaggctttctccatgcacctgctagctacctcagatcccttacggaaaggtaccttacatggtgtcagaaggaaatggaatatgtattacacttctgatttacatttttttttttagctggaccccagcatttttgaaagtttgcagaaagagcgagtagaagctggagatgtgatttacattgaagccaacagtggggccgtgaaggtaatgccttccttgggacacagcattgtccctgatttgtttgccatgagaagacctaagtgacaagggagttgctttcttcagagggtgtggggtgtgtggggaggggctggtgtctgttatgaggctgatggaaggtcaactagtggccctttatgtataataaagtttgccttccctttatcttcattctttaaccttctcgcgattaaaacagatagtctgttagaaaaaatactaaaacctgttcagagggggaggacagggtgagaaaccaaaacaactttagtcactttcaaattgaaatgtgcagtgtatttaatcttccttttatctctttggtattttcttcccaagatatatgcatgtgggaaggaacgctgcattcgttggcattcttttctatctgattttcagggtcctgtacagtgttcctcactgtttaatggatgggcataatacttcatatcataca

SEQ ID NO: 108136 - DNA, 1060 bp, Homo sapiens
catcctggctaacatggtgaaaccctgtccctaccaaaaatacaaaaaaattagccgggcgtggtggcgggcgcctgtagtcccagctactcgggaggctggaggctgaggcaggagaatggagtgaaccggggaggcagaggttgcagtgagtcgagatcgtgccactgcactccagcctgggcaacagagcgagactctatctcaaaaaaaaaaaaaaaaaaagttgcatttctaatagtgcctctaatttacattgatatgtttgtattgcctttttacccatcatgacaccctggaatgtacattattaaggttgatttggcagttctggtgacatggaagttttgggctctcagtgtgagagaaaagattctgcttctcaccatggcccctctgccacctcttccagggctgcgaataaaggagaccaaggaagtttatgaaggtgaagtcacagagctaactccgtgtgagacagagaatcccatgggaggatatggcaaaaccattagccatgtgatcataggactcaaaacagccaaaggaaccaaacagttgaaagtgagtacatgtatgtggcctcttttcccttgactctcccagcactgtgtggctttgggcaggtggtgtaacctctctgcatcccagtttcctgacctgtgcactgcaggtattgatttctcacagaattggttgaggatattgtgtgtataaagcggtacctagcatagggcttgcacataggaggactcaaggaagatagctcttttcttacttactcctaggaaactctgcatgttaaaatgtgagctgtgtggttaagtcaagaaactgcctctgccatcccatgtcccatattatgaccatgcatcaaataccctgggctgggtctgaacctgggcattaatttttccagttatcagtgcccatgctcatagaaagaaacagcattgagtaatcaaataagagttgtataaagatgatggatgggcttcccaggggccacatgcagaatcctgactgcagttgcttgtgtcaggaacctgtggtcgcttca

SEQ ID NO: 108137 - DNA, 1053 bp, Homo sapiens
gggatatagaaacctgagccagcagatgaaacctgtgtcatttgtgttgtcgttgccagagatagcgccagctcagcccctttcctggctaacagccggtttcattgtccgtcacccacgtcccctgccagcttgtcagcacagagcaacttctaaacaaatgtgggggctagtgagagacgggaatgtctttcttcccctccttgaggaatttcatgccacattcatctagcagtaaatataagtaagcattccatttgaaggaatttatcgctgtgggatataaaaggtttgattttaaaaaatcaaagttcactttaaaagtacaggattttcccagtttaccacagtgttctgatatattcgtgttgtttggagaatttttgtctaagattaatgttcaggaactaagaatttggtaaagcacaaatgaaatgggtcctctcttttggggctattccaaaacttccatttataggctatcagatagaatgaaggtagagtaaaacttttccttaactttaatatctgagagtctttgtcctgactgggtttctggggtagagaaggcaaacagcccaatgataagataatgaccacatttaaaagtgagaagttacagagcgtacctgacactataggtagtgtttcttagtgccattggaatatttccatatcagaacggaggtagcttaatggtgagaacaccaaatccttatcaagccaccctgccatcagaactagtttatgtctccacatttgtgagttgaatagtttttcatttattctttagataactggatctcaactgtgtctgcactttggaatcatggggggaatattaaactaatagtgatggcaggggcccatcccctaggatttggaagcaagtagtctgggtacagccagggcgtgattcattataggggcccctcaggtggacctaaaggttgagaaccatgaccataggctccagcggagatttagagcagtatttcgtaaacttaggccatcagtggtcttacttcaccgggtcccactggtattatttac

SEQ ID NO: 108138 - DNA, 11614 bp, Homo sapiens
tatgacgttcaaatgtgctaatggataggacggaaggattaggagtggtacccgggggccactgcctcgtgcaacgccccagccctagatcaaatccggggcgtggtcccactgtgctcccgaccccagcctcggcaggaagcgccggctacgggggaagccaacccggagacacagacggaagtgggtgaccggagctctagcagcagccgcgatgggcgcagccgtgagcctatggagagcggaggtgttcccgcttccaccaatggaaagccggtctaggcgggcctttgcaaattgccctagtaacggccgcatggtaactcaggcgccgggcgcactgtcctagctgctggttttccacgctggttttagctcccggcgtctgcaaaatgaagattgaggaggtgaagagcactacgaagacgcagcgcatcgcctcccacagccacgtgaaagggctggggctggacgagagcggcttggccaagcaggcggcctcagggcttgtgggccaggagaacgcgcgagaggtgtggccagtggaccagggagttgggggctgcaagcagggctgctgcggcgagagagctgctgaagtcggtggctcggggcgggatgcgcgcgccaggggtctcccgccattatttcctcagggaagtgaaaatgggccaggggctcggggaggggcgccgccctggagctgggtgaggggccgccccaggatacctagtgacgatccactgggggcagttgacggtttgccaactcatggacaagtgctgatataaacccacacaaccccgtccccttaattcgtaccaggctctattcgcgacactgggatacagcgggaattaagataggagcttacattttagtgtagtgagagacgataaacgtgtacaccaataaataaaaataattatcttatcttggtggggttagttactgcagggctttgtcggccacggtcaggaaattggattttattgtgaatgcagtggcaggctatgggacggtttaaagtagggaattgactaaactttaaaagctcattttggttcccaggatccgggaactgagggagagaagtgggaattatggagaagagcaatctggtttatccacccctccaagcatcctttttgaccattccaattaaatctcctttttctaagtgctggtgatgccaagtactttcacatacatattattttttggcaggtgaaaatattgagttggggagagggcacttcacgtatatgcttgacactcgttttagtaacggtaaacctggggtttgcacccacgtgtatttctgactcccaaatcagtgctctatgatgatacagccaccctctctgcctgctgttctctaaggtcacagccatgccccttggcctttggagagccttagcttctacaaaaatcttcacttaatataaagttaagctactgcctcttagcctgatttttctaaatggaaaggcctcaaagaaaagcctcaggtttccattttgagcatcatctttccaaaaaggaagtgtttgaccctggcttactaagcagctagtactgcaagtagctaacattggttgagtgctttccatgtgccaagcactgtgctaagtagctatatgtccactgccttgtcatatccaacgtattagttgtcccttccccgctttagtatgacagttttcagacacaaaaaaagttgaaagacttgtaaatacttgtgtgcctaaattctataattaacattttactgtgctgctttatcatatatcttttcatctgtccctctcccaatccacttttacatttcaaggtgaattgcaggcatcactacactttacccctacaccctttaacctgtgtgccattgactagtatgaactctgttcaagtgaggaaattctggttcatagaggtcaaataagtaggtccaaggttactcatctggtaagtgcgagagccagtattttaactcaagtctatgtatttaaacccagagtgcatgctctatgcctaagtgcatgctctatgcctaagagtgatgctgtatgcctaagacccacctcagctaccaggttcttgtgtgactctggtcacatcagtaacctccctgaaaaatgagagttagactaggtgatcttttaaagacccttccaattctttttaaatgttagaattcaagcttatctcacctgagagtagttggagtggaaattgagggagaatggatggaagaggtcctggtctgtaaataaacgcacatctccaaggtttgtaaagtctcttctaccttgggtttcccaaagagcttcagtgctggggattatgatatgacagggttgtgtggaaagaccatagtagttttttttttttttttttttttttgagacgaagttttgctcttgttgcccaggctggagtgcaatggcgcgatctcggctcactgcaacctctgcctcctgggttcaagcgattctcctgcctcagcctcgtgagtagctgggattacaggcgcctaccaccacgctcggctaatttttgtatatttagtagagacagggtttcaccatgttgaccaggctggtcttgaactcctgacctcaggtgatcacctgcctcggcctcccgaagtgctgggattacaggcatgagccaacgcgcctggctaggttttttatctatttagaaatatagcatctgggccgggcgtagtggctcacacctgtaatcccagcactttgggaggccaaggcaagtggatcacctgaggtcaggagtttgagaccagcctggccaacatgacgaaaccctgtctctactaaaaatacaaaaattagccgggtgtggtggtatgcgcctgtagtctcagttattcgtgaggctgaggcaggagaatcacttgaacctgggaggtggaggttgcagtgagctgagatcgcgccattgcgctccagcccgggtgacagcgagactccatctgaaagagaaaagaaaagtagcatctgaagaatatcttctaggttctattaagggcagtgtgctttggtaactgaagtggaaatgggatggatatagcatacccacacacattgcttacatcattttttttttttttgagagggagtctcgctctgtcgcccaggctggagtgcagtggcgccatctcggttcactgcaagctccgcctcctgggttcacgccattcttctgcctcagcctcccgagtagcaggtggattacatggtcgggagattgagaccatcccggctaacatggtgaaaccccttctctactaaaaatacaagaaattagctaggcatggtggcaggcgcctgtagtccttacatattttttgaggggctgccataagtgtgggaccaaggtacttcacagtccatgaggaatagaggtagaagagataagatgtattcacaagactctggcacagtgtggtcactgcccagagagaagagcaccttttagatagtcacgtattcagttattaaatcagtgtagcaaaccttatattatgtaatcctgagatatagatgctcagctagtgtaactttctcagtgttccccccttatagtcaaatattctaaaatatatgaagttccatagcccatttatggaatatgtgtgtgtatatatacacacatgtgtactgcaaatggttaataaaattcagagatttataatgtatttaaaatatactaacagatgataaagtaatttaaccttgaggattcaaaacatattcaatggatctaatagtgccataggtttaacttcacattcagtatttacagtgttcactgatggccagctagtactctatgtcattgattcttaccccttaataggttactctgggaatttgatgaaagctatggatcctttctctggaaaaaatgtatatatgaacataaacacagtttcgttcccaacttcaagaggtatttgggcccctggcgtctatccctgtaccctgggccaaaaatcagtgttcccacttgtactcatactgtgcattcttcacacagtagtagctagcaccatcttttaaaaacaaatcatagcatgacacatagtcttcaagaccttttcagtggctttgtattatttatgtagaataaaatccaaactttaccacacactgtaagttcctgttctgcgttctggccgctgtctacctcttcaacctcatcttcctggtctttttcgctatactttggtcactgcaacctttctgtcccttggatatgccaagcttgtttctgctttggattttctgaattcgctgttttctttgcctggaacgctgactcctgctcctcccagaggttcacatatcaaattaaatgtcatcagaaagacactccaggatcactttctagccactcgttctctctcatcatccctttttcttcatagtagtgatgaagattatgtgtgcaatgtttgtatgtttgtatccctccctaaaacatgagctccacaagtacaaggcttttctgccttgccttcgttaccctcggcacctagaacagtgactgcagtgcactggcactcagtgttagttggatgagtgtgtgacttgtgtaggccagggactgagatttttccccttgtgaaacattttaatattgatttattatttctttccattgtggtgtgtaggcatgtggcgtcatagtagaattaatcaaaagcaagaaaatggctggaagagctgtcttgttggcaggacctcctggaactggcaaggtactcattttctctcattttttaaatctacccaggagaatgatcctagtgtctaagccaaattgaattcatgtcttaactagtctttgtttagctaaatgggttatatgtatgtttttaaaattaatatgcaataatacaattgggtatctaaaatccctgcttctaaaattcaaattatcctggcctacctccagagaagaaagaatgaagtccttgaaggggtctcattgtctctagaatttgtcctttttctctttcaagtctcctttgctgtggaaatacatttctgttggcctagggcttcataaagatcttctgagtgacatcttacttgaggggacaaaaaaatgagtcaagcattcttccaaatgctagctttacgcatcgctattgtggctgtgtgggagatgaaaaaaaggaaaacaagaattagagacatgatttttatcttcaaggggcttacagtctctccagggcagaaagaaaggaaatcatgacagcacaggaggactcagtatgagtgctcagctttgaggtattgactaatattaaatgcagctggaatttaaggaggcagcactgtgggctggtacagctggaagggttgagacttgacattttcccttcagagctgggagaggatttggctttgcagggaagataagggcctttcaggcagaggacaccgtgtggcttcttgggattcgtgaggggactggccagatacttgaaactcaccagagttcccaatttgagcttgcttattcttcaaaagggccgcttgatgtgggcaagtaggagcttggggttgtgtgtgaaaagaaatgggctttaaattccagctctagtattgacttgctatgagacctgaggcaggtcccttaacttttctaagcaaaagcatactctacctatttcaagcaattattaaactgatcgattgtaagataatgacttgcattataattttgaaatgattactgattgtgtatcttatattggtatcttacaagaggaagaagtgctatatttgtgaacagttttttctcttcctatataaaagcaaattgtgaacagttttttaaactgtaaagtgccatacagatgtgagcttcagttacctctctccaggcaacattagcttgtccagtgcatttaccatttatttgcttgctattccttatatcttagaccttctctttccctccatttttcttcttcctaaagtaaataatttagaaatttcttctagaagtttgttggtgggaaagtctctcacgtttgcattcattatgttgcccttgttttgaaaaagagctatgttggctatataattcagttgacagatattttcttcagtactgtttcacagtacttctctctcaatgttatttgctcctttggcttctgttgtttttgagaagtctaattttgagggttttgagtcttctttctgcatgtttttgagatatttttgggtttggtgtttcactattatatgtcagagtggattaatttttgtttatcatgcttaatgctaattgtgcttcttgaatctgagtattatgtctctgctcaattctggaaaattgtcagccttaggagaatcgcttgaacctgggaggcagaggtatcagtgagccaagatcatgccattgcactctagcctgggtgacagagcaagactacgtctcaaaaaaaaaaaaaacaaaaaaactgtcagcgttaatctcttcagctattgcctttccccattctctttgttctttccttctggaactccactgagatgaggttaagattgcagtggttttcaacctggggcagttttgcccttgcaggggactttgacaacgtctggagacatttttggttctcacgacttggttgggggtgctactggcatctagtgggtggaggccagggatgctactaaacatcctgtagtgcacagagcagtttccataataaggaattatctggccacaaacgtcatggagtcaagctgagaaaccctgggctagagcttctcgttttgtcctctttgtcttttagcctctcatatttgttatctttttgactctgctaaattatgggtaatttcttttagatctttgttccagtctaattgtctcttaagctatgattaagtgactgattaatccaatctattgaatatttttttccttttcattttgaaaagtttggaacctacaaaaaacttgaaagaatagtgtgatgagcccctctataccctatacctagatagccagttataaatattttgtgacatttgctttttctctagtttatttctgaaccacttgacagtaagttgtaaggatgtcttcctacatgaccacggtgccatcatcagacccaccttgctaatgctattatattcccccaatttttgtcaattaaaaattaaattaattaatttttaaaaaatgagcagcagagccagggagagaatggtgtctcaggaaccaagaaaggagaacctttaaagaaaggagtaggtaaccatatccactgtggtagagaaatcacaaagatgagggagcctggcagctcatcatatgattccatgagcagttaacaaatgtgctttcaaagacaacgaagttaaattgttttaatgaaaagaaaatataggtgatagaaatcagaaaacatctttccaagttgtttcagtttttggctttttaaaaaacaccagaatatcaaaatgcaatcaaagattacacactgcataaattgttacaagttataatgtcttttttttttttttttgagatgaagtctcgctctcttgcccagggtggagtacagtggcgtgatcttggctcactgcaatctctgcctcccaggttcaaacgattctcctgcctcagcctcctgggtagctgggattacaggtgcctggctaatttttgtatttttagtggagatggggtttcatcatgttggtcaggctggtctcgaactcctgactttaggtgatccacctgccttggcttcccaaagtgctgggattacaggcgtgagccactgtgcctggcccccagatgtattttgttatggcccaccttttttactcatgtgtggcccttcaagagtcctcttttatgttttttttttaattgtaatgtttttgtttgtttgtttgttttttgagacagtttcagtctgtcgcccaggctggagtgcagtggtctgttacccaggctggagtgcagtgatctcggctcactgcagtctctacctcttgggttcaggtggtcctcccacctcagcctcctgagtagctgggactacaggtgcacaccaccacgctttggctaatttttgtagttttcgtagagatggggtatcgccattttgcccaggctggtcttgaactcctgggctcaagcaatccacctgcctcggcctcccaaagtgctgggattgcaggcttgagccaccgtgcccagtcccggttttattcaggggtttctatcttaagtgctataccttgctgagctttcctgtatctacagtctctgaactttcaaggcaaatagtttactgctctgaatgttattatttattcaattctaggtgttttgtaagaggagaggttttcagtggacccagtgtgccatattgctagaagcatatgtctttcattttttttggtgatattgtattgctttcctcccaggaaatatgagaagtgctcagcactgtggtattaccttataagtttgtccactcccttccaatgtgtatgaaggaatttggtgacttctgcttaatggtttgctgcagggtcccaaagtttaggcaacttacctgggtgacaggcagaaatactgcttattttagagatgcaaatgcatggttcatatgcatttccactcttgaggacctcacactgttaataatgggtttgggttttagaagaaggagatattcagatgagattgaaaaatagagatttcttcaaccttcttttggcaacaacctcttttttgtgccacttgtcactcacatggggtgagtacaaaaaaaaatggctttggagattggggtttgcatcctggtgctgctgcttgcggttttaccttgggtgtgttggtaacttttgagtttgtttcttaatctataaaatacaaactagatgatcaaggtcataggctagttggggagattcgatgaggtctatgcagcactctgtagtaggtgtaggaatagtagccatatcatatactttccctctggaagtctttaaatggaggaaacgagacacacatgaagctttttttttttaaccaagtatttatcatattttaatggaagtatgttcatctcttctgtattagttaaagggagggagagtgccattgaattggatgtggtcactgtctttgaagttcaaaactgagggtagggaattggggctggcagagatacaaggaagagaaaggagtaactgggaaggggtggtcctgtccagcctgtggccccacggggagtctgctgttagagtgctgctcctctcattgtgccctttcatgttccagagatttttttcctttgctcttagaagaataccagttttcaaggtgtcagccttgagctcacaagtgcagatgcctaatgaggcaggcaacggggatgagggaagtggctgggtgcactgtggcgtgtctgccttgagccccaggtgctcggccttgctgaaggtcaccatgagactgcaggccaaacagaaccaggctgtgagcaacgagtttgccacttgtgatctagcatggcactttagtactttcatttgacagatgaggaaatcgggcacctgagatttgctgagtgcccaaggtcacactgaaaattagtggcagaaccagcactaatctttctgttcctggctagtgcattttatactgtgctatacactgattctctaccagattttactacctcaaaactatcaccaaaagggcatagaaaagaaaatctgagaggaaccttgactgttaattttaagacaccgtctcagtttcactttgttcttcagtaacaagcttgttttcagtcttagcccatatacctggggagctggccttactcgtgctcctgtttcagagttgaggaaagatgaaaatggcatttagaggccatggcattgcccagttctgtaccaactttaaagcatttgcttgccatacttgacatttgaccgtacacctgtgaagtctggttctgtttagcatttgccagctgtaattatcttgtcaaaaatcaatttgtagtttaccacagggcgtgtttaagtgtaacttgttaagaccaactcatagcttcaaaatcctacttgaggtatccttcttcactctttgtgggctacataacataaaatgaacaatccattcattcattccttcattatttctgatgggttgtagattggtgttttcctgtatttgtaaaaagagaaagcaggtatctcaaagatccagtggtgtattcggagcaattaggtcagagccatatattgatattgagagaacaattttggatgactgtaaagttggcccttcctatctgtgggttccacgtatgtggattctgccaaccacaaatcaaaaatactcaggaaaaaaacaataaaaaataaaaatacaataacaaaaataatacatacttaaaaatacaatataataactatttacatagcatttatattaggtattgtatgtaatctagagatgatttaaagtaacaggaggatgtgcataggttatatgcaaataccctgccattttataccaggacttgaacatccatggattttggtatccctgtggatactgaagagtagactcttctaattatgataacatgatctttggagtcctgctgccagagattaaatctgcgctgccattttctagattatggtacttacgttgcattacttaatgtctctcagtttctcatgtgtaaaatggggagaatactagtgtctatttcataggctggttgtgaggatcatgtgaggcatttggagttgggcctgcactgggtaagtctgagtgaatgataacttgtaattatagggaagataagagatgccatttatgatttaaattgactgtccacaaaagtcatcaaacatttattgtgtgaaacatgctaaatggtaggactagatgttcagctgttcctagttcctggtggttctgtagcatgtgtttctgaactgtcatgttttcaggactgtgaactgtgtttccgttgctttcttttgtagacagctctggctctggctattgctcaggagctgggtagtaaggtccccttctgcccaatggtggggagtgaagtttactcaactgagatcaagaagacagaggtgctgatggagaacttccgcagggccattggtaagtagtgtcacatttgtgggaggagttggtctcacttcctgaagcctgtgcaccgaagcctctttgtggtgaagatgcctttatgactggtattcgtggcactgctgtttttcttttggcacttagtagtgcattatttttcaaataaaacaaaaccccagtttttctcattgaagtgcgttagcaattggagcaactatggaccctagctgtgagcctgcgcttcttcatgcaataaatagatgtgtctaaaagtgtttttttaatgagtcatattttcctggaagtcttattttgccattagagatgactatccactgaaaaggttttggactcaagccagaatctttgtgtgccatgtggccagaatgcccctggtcct

SEQ ID NO: 108139 - DNA, 1051 bp, Homo sapiens
gaccgcggcgactaccgagggaggtgaggggcgggccgggcgggtgtccgaggcggcggcggcggcatggcagggcggcgggtgaacgtgaacgtgggcgtgctgggccacatcgacagcggcaagacggcgctggcgcgggcgctaagcaccacagcctccaccgccgcctttgacaagcagccgcagagccgcgagcgcggcatcacgctcgatctgggcttctcgtgcttctcggtgccgctgcccgcgcgcctgcggtcgtctttgcccgagttccaggcagcgcccgaggccgagcccgagcccggcgagccactgcttcaggtcacgctggtcgactgccccgggcacgcctccctcatccggaccatcatcggcggtgagcgcgggccggggcgggagccgggctcagggacgcgggcggagcgaccgggccccgtgtccgaattcgctcgagcctttgccgggacgggaaatcgccccacctcattggtggggctcctgacgccccaagaggcggacgtgacttgcctagggctccgcagcaagtgagcggaggctttgagattcagcttttcccatccagcagaaccgagctgcaaggcgccttccttaaaaaaaaaaaaaaaaaaaaatcaaaaaatccctaccaaatgtgtttataatacatggtcaagtaaagaaaactcaaaataagaaaactcacaagctacaaaaagggtatacatacaaaggctgtcttcattcacctgtcatttggtctgattcccgttcctagagccaaccgctgctaccagtttttgtatatcatttcagaaaggctccacgtcaatacaagcatatctgtgtgtatgtataaatccctctttccctcatccttttagacacgatttcactcaacattgtgtctggagagtgccccatatctgtacacaaagctacatcattctttttaaagctcacatagaattcaactgcacccttgtaccaacattttctttttctttttttttttttctttttgagacagagtcttgttctgtcgccc

SEQ ID NO: 108140 - DNA, 1028 bp, Homo sapiens
ctgttgccaggaacttgcatctatgcaataccaccctgtgtggtgggagtgttagttagccttatttctcagatgaggaaacccaagcaaagtgccttgggctagtgttggaacctaactccgccacccctaacctggatctggttaataccttcatttcacctcatggtccacaaacttgtgggcatctttgccttcttgaaatggcccccaaggccatcctggcttatggcacctggacttctacagttctgccccctgcctgcttattctcctcctccctctgattcattctctgcacagtgggcattgctctccttttacaagtgttcatcagatcatgtcagccctacacttgacaagactttccagtgagttctcattgtgcttggagtaaaatccagccactttgtggcccataggacaatggtctggctctgctttcctctgatcccatcaacgatcccatcaacgactgctccccactctgaccttcagtcacggtggcctcatttctcttcctccagtgggcccaccagctgcttccctcaggacatttgcacctgttgttgcctctgtttggtacatctggctccttaagtctctgctttaatggcacctcctcagcagcctctcctgccccacctatctaaagttgtctcttcaaccctcaccccctcatactttctcatgtccctgtttcattgccccagcagcccttttcactacctgacgttcttcatgtgtttacttgttgagtatctgtcctctgctagaatgtgagctccatgagaccagagcaggaaccttgtttgtctcattcaccagtgttctcagcacttgggccagagcctggcataggatagatatttagtaagttctggatgaatgaagcctgtgtaccagctcctgggctagccagttttagtgagcagagaaccttctttgtgggttagtggacagaaggcaactagcttagggcctggcctgtagtgaattatgcaggttggttctttgtcctccccttt

SEQ ID NO: 108141 - DNA, 1022 bp, Homo sapiens
atgtatgttttaaagacttgggtgggtgtgagggacttagactcatcctcaatctaactctggcaggaaagaggagggctgaaaaatgctggtatcttggcttggcaatttatagtcctctggtggctgtgaggattaacagtgtattgtctcccagtcttttgtttcggttgttaatgaacagcactgctacttgtcgcctggacctcttgccttctgtacacactattttagcggtgcctcctgcgtgggtctgaccctctctgagccctccctgccaagagctgaggagggctgcaaaagacttctaagtctgactcaggttactctccttgaaggagagaaacatccaagagcctacaagatttttgtctctgcagcctggagagaacattctttgtaaaacttaagcgactttgccttttccttttttccagccttctgtgttcttggcgcccatgtggagaaggctcttcccctttcatctgttttattgaggtgtgtgcccttcattctttctgcagatgccctctcttgactcgtaaatgaaacaaggggttcttgtgtgtgaatgaatttcaaccagatttttttgtgatacccgttaggcatctgcacatatccccggaaagcagcctgctccaggcagaaataacatactgggggcttgaccaggtaggccttggtgtccttgaggaatttgggtgttactctaatgcaaaagcaaacaaaccaaacaccacttttggttttctttacccctagtcttttcaggagaatctgtgtaggaatatattatgtgaaattgtggtaattatgtatgtttgtcctaaaatactgaggcatatttgaaggagttctaagtggaaatgctttcttcagctttacttctttagttcctagtatccatcaggccttagttccctgtttctttgtgcccatccagtgagagctgtttctttctcttcttcactgaaaggtacacaccataactagaagattctactctccagtactgcttc

SEQ ID NO: 108142 - DNA, 1095 bp, Homo sapiens
ctgcctcttggagggagatgaaagaatggacttttggagaacgcttgctgtctgctggacactgttctagacccgtggctcttgctgcatcctcccagccagtctcctagggaggcgtttccatctacattgctcagctactagaaatgaggctctgagcagtaggcagtttgctgcagggcgcacaagtagccagtgccaggctctgtttcagaggccctggctttgcccagaagctgctctcagaccttagcacatgcctgcttccatagaaaattgtggctcctgaggaacactttatatataaatcaaattgtcaaaaatagagatttctgcttctattctcccctcgattatttgagtttttgtcttttgttaattgggtcttttattttcttgtgctgtgtgattaggctcctgctgctttgaagtggcctttgttgggtgggtagggaggacttagttaatgtgggtgatcctctcttggcaggagaaaaaacaacttttgctgttgagagagaagttgactttccctctttccatatctcttgtgttgtgatgattcctctcttgtcttgaggccttcaggaagactaaaataatttcctttgtctctaacctacttcctgaggatatttatttggtgccatgcacaggtgctgcttaaagataaacctgacttttttctttcaaaattagtgcttgaaatttgctagcattgccctgtctggcagcaggaacttgccttgcttggcctggtggctacatcccttaccatagatttatttgggttgcttagagctccagagggtcagtggcttgtccttggtcatttgacattggcactagagctcagtcttcccagatacatgacggtgtggcacttgaggaaaaaatggccctgtttgtggtcatttccaggtgagtttcaggatctttcgccatgaacagtaaaggccctcgggtttgtgttctcagcattctctattttctaaaaagatgatccaggggacattcagagatgatcttcagaacttacgctctagagaggaaagactttacataagaaggactccatttcttcggcacttgctg

SEQ ID NO: 108143 - DNA, 1835 bp, Homo sapiens
ttgtagagttgggtttgagctgtcccctacatgtgatttggttataagaactgtcatcttcctgagatgtcctggcctggggtgactaccacaggcccttagattccaccctctcagcttcttcaccttcctagtgaaggacacctccactctcccaaggtgcggcccttgaactgctcctcagtgtgtcctcctccttcacctgcctctggatccatcaccacgccttctccctcctgcttgctctctgtctttgcatttcccatcaccacagctgcgacctgaagacaggcttctgctagttcctggccggatgagtacagcattccctcacatagtctccttgattccaaccccccgcagaaggtatagggatagaagagagtttaaaaactacttccctgtgtagaagtctttgtttgctctctgctggcataaaggcttaactaagtcttagctggctgacgaggcccctcctgaggggttgagatctcaggactccaggccgaatgaaccacatgcaggtctgtggacagacagactgtgctctctcatgctgcatattctggctacgtgcacttttctgggaagggtcattgtccaccctcctcaggctagattaggtcaccctcatttgagggcctgtaacatcctacacattcccctatgatctcattttctccccatcttatgccttttctgtttactggattatgttttccactggacttgatctctttgagggtaggggcctgttagcattcaactgtatgtccgagggcccaggacaggccttggtacagagtaaatatttggtgcatgcatatcggaatgaatgaatgaatgaagaggtcatttcccactgcctgcaccaattacccatgctcttatggtgctttaaacaactggccaaatagagttcaacagtggaggaagcttgccttgaggttagacaagttaatctttcaatggaaattcaatcctcatatttcattttcaggccactttgcgtagcaaagtagtttaactcatagcagatttctgccatgctgatggttaatttcgtggcccacagagggtcagcacactaatgccgggaacacggcgacctcagtgcagctcaccgcacacagtgagggcccagcggccctgttgttttagagaagcagttctcaaacatccttctgattttgagttaacaggggtgaccctttcaagaacatttttaaaagctataacatagatccctcccagatcgtatattttcctttctccatgcagttcaaaggggctgagttgtctcataggtttttgccggcaatcttcagcttgaccctggttgtttaaatctgccggaggaaatttgaacaaagttgtactttggtaattcttctgcctctgtgaacctttaaccttggggtttcttttcgagccagggctgcattgtcaccagtcgtccctgctggggctttcaaagagcattgtctagggcgtctgttttcactttgctactggagttcttttgaggaagggtattaattcagacctgactctgagacaggacgagcacttttaaacttgccccagagcttggggatggggaaatgagcgtaatgcaagcctgtggctgatgccagtaattgttctgcaaatagtctgtgagggtgaagggagaagaggccctccagaggcagaggaatgtgccagctgtccagtgggaggccacagctttgcccagggtttgttgactacatgacaaaaagaggtcactgtctctgatcactagttctgggtccagagttcctcctgaatgtaaaattcctggagtgccaggt

SEQ ID NO: 108144 - DNA, 1008 bp, Homo sapiens
tatgtttcaaagaaggaaatgaaattcttgaatttttttaaggcaaagaagagggaaaaatagatttattgttttagttggctattcaataggatgcaggataaagctggcctctctcctgtctaatgtcatcatcggcattctctctttttctctccttctcttcctccctctcctccccctctgctctactcctcctcccttctcttcccacgcctccccccgctcctccttcccctcctcttcttactagtactgctgcaaacccccccttttctccaagtcaaccccaggtcctgagcctgggattaaatctcatgctctggagatactctaatgctaggaattatttcctcttttgtggtctttggtctttccttcaggtttcctgttgctttctaagggaggtgccaggtgctggccctgtggctagttttggctagtgaggaatgctgtaaagcagctgtgacaccagcgtgcagcagtcctactgctgtgcagcctgggcagtgggtggtgacagggtggcattggagtgaacaaggtgtggggaagacgagcgtaggtggaaaaaatgtagaccgaccttctcggtaaaactggcctgggatcccaggcaacatgaaggctggcagatgctgagggagttctctaggggaggctgataaaattcgacatcaccttaccatttaatgagtcccagatacatgggctatgccagcccaacagagtgcaggctttggaaagcccaaatgaaaacgacatggtccctgctgttgggggaactcatagtgctgggagaagcctgctgggcctctttttcagaaggagggagaacatgggtttagtagtgagccctctaattaggcctgcaggtaggcctcagcgtggggcctggatttgcaccctgtccttcggttagaggtttgtgacacccatagctgtgctcagttaagtggagcagtggaaagagctgaggctcagcatgctggtccacgtttgaatcct

SEQ ID NO: 108145 - DNA, 2254 bp, Homo sapiens
gaagctcatggcaaaataatgtaccataataaatgcaagttcagcaaataaaacatagttcagagtcgagttatgtggtaaaaatgcatgaactaagtaattttcagtgaaggttttattattttataaatgaggtctttttaattgccttaaaagactctcttttaggaaaatttgaaatatgaaagtcatcttattttcatgtaaaatgaaacatttaaataccttttttctcatgaaaatttctagcatataaagtgaaactggaagtagttttgttaagtaacttgtattttgggggctgaggaaaagcactagaaaattcagctcctaaagatcattcttcatgagatgtcaatagcctccagacaaattatcatgtgaatattttctaaaccataaacaaattttgctaccattgtgtttagactcaaagttagtttaaaagagaaatttctaaatgaaacttcctaacggtcattctttcgggggcaggcagattggtagaagtaatatataaaacccaaggacaaaatggcactttgttttttttctattaaactcttttgctgtttgctgtttcaaaaattcatactgaatctttacaatgaaacatttgtgagtccaggagcccagaaccctaaatgaattcagattgacttctttttctgtacggtctatcaaaaccttttcactttaccacagaccagaaattatttctcactgttttctgtgccttactcctttaatctccaaatacctgttactactattgtaattgttattttattgtaacagttattgttgttactgctattgaacaagctttggatgtttggtttgaaaagattcaatcaagtattttgattatgatgactagtgcctgtgtatagctaagcagtgaagcaatgcagagattttataaatatttttagggcatttttttactgtgattgtagggagtaagatatttgtttttacaggctggaaagattgctgtgaattttaacacttgggagtcacagctttaattctgatttagtctactaaaataaataaaaattagccgttgatactcttttaaatgaatggaacctatttctgattctgatttttctgaagcagtctctacatttcccaaagtgccacttcccaaggtggacaaaacatgttctgtgcaggcgaaatgtgagatgctggctgcataggggaggaagggggagaggaagctgtttgcaaaactacttaaaataaatttgaagggtcaaacatggaacacagttgcaaaagagaaaggaaaaaatgccttaggtcagttcagctagaatcgtgtaggcattcgcattggctagagggttagttgtgtatttcttgctaatcagatacaattggagcagataatatttgagtatctgaggctagatctcattgcctctatatcagggaaatgaaccaaaaggggcaagttttaaaagtttgatttggggaaacagataccatttaggagagagatggtaggctgtgtttacctcgttgtccgaaggctgctcagactttagtcagctctccaacttgcagcttgtccctcagagatgcagtagtggcttgggccggcagacgggcttgcgttagcatttcatttaaaagcgatcggtacttttaaattaaacatgcaaagttatcttggtgaggtattgaatgggaggttgctggattattgaatttggcccaaaatttagccagttcagcagggattttggggtctgaagcaattaatatgcaagtacatttgagtcagcaaggtaggagattactgtcttatcagagtaaaaaaaaaaattctttttccaagatccatacttttttggaggtagataaaaactccattgtttgagattcatgtttgtgagtgaccacctcaaattgccaggttttaaccactaaaacacagaggagggaataattgcatttaaaatctctgatctgttatttgcattatgcttagcatagaggagaccccaatttccttcctcatgtttttggtttttttttgccattttgttaacatagattgagaggaaacttaattttctttcttgaaaaaatcattcactgaactgctcaaaacacatgaagttgtttttgtctcatcagatcgagtacttaagacaaaactacgaaggacttcaatatatggttaacctctcatgtgctctgtgaatctagacacactccatccgagttgctgtatgat

SEQ ID NO: 108146 - DNA, 1040 bp, Homo sapiens
tcatagactactggagagatattcgagaattcttcaagtgtttgtagaatggcttgacataagttgctttccattccttatctgtgtaaggagtgatgttctggagtattaaattgggtgagtgtgggcacagtttgtgttctgaggtttagtgtgactgtgaaaacatgctttttgcattgcctgagaggatacaatagaccaccagcaggaacagcagtgcagaccactgagcagctttttgtagccctggacccagtgttcagtgttccagagagatggtaagaataaagggagaggcatcgaagccaaacaattcctagatttgattgatctggccttccagataccctcaaattccaccaacaactacttttagtgttttttcctattttcttccaagttaaaaaaaattgtgataacatattcataatataagatttacctttttgactatatttaagtatacagttcagtggcattaagtacatgcatattgtagtgcaaccatcactgctatccatctccagaaccttttcatcttctcaaactgcaactctgtatccattacacacttactccttatttccccctcccaccagctcctggccaccgccattctattctctctgtgacttggactactaagtggaatcatacagtatttgcccttctgtgactggtttatttcactcggcataatgttctcagagttcatacatgttgtagcatgtgtcagaatttccttttttaaggctgaataatattcctttgtatatatattttcccatgttttaaaagtatagggtaagtatgtaagtatctatcagtatatttatttatagccatctctgtagttctgtattttgctttggcttaacgtgtatttttcaagttattacttaaattttgtgagtattgttagtgataccatactgttctgattctgtttaaaatgaaggacattttttttccttatctcttatagaatgaactagctgtattacactgtttgcatatttctagaattgacatttcca

SEQ ID NO: 108147 - DNA, 1047 bp, Homo sapiens
ttttcccccagcggcttagggattaggtaataatagtagattgctactgagccatggggagggctgtttctccaactcctcagatatccctgtgcttaccttcccagcctgtcttcctgtgtgagctccatggcacaccctagggacagtgtctgaggacagtgctgaggctcatggccacaggagtggtagaagcaggttttcagactgataatgccattacatttcaaactttgaacatttcaaaccttgaacatgaatatgagatgttggagatcccaactgggaaggtgtagctacccagcaagtctcccatctctgaatactctgctatacaggagtgggtacccagggaccacatttgaacccgggcaccctgactgcctccagccccattgatatttaattggttcagggatagatacctgagccaagatgtactaaacaagttcttctgtgggaatttgaaactagggaaagagaggcagggacactaggagttctggaaatcagcatgttgatagaaatagtgtgctagaccagagagaaggctgggagctgttctgcttctgggctttcccagagcttctgtgaggtacctggaatccttcttgtaaaccctcctttttgtttacaattcttcagccagttggttacttgtaagaaaaaaaaattcttcatcaatgaatgtgttcacttggtgaagagtggatgtcatttttgttatttttttcttttgcaaatgtacatttagcacctgctgagagcaggacattctgaatgttaggcactgagaacatctggcagataaaaggtggccctgccccttgggactcactgttcaatgagttggagggtaggggatagaccataaagcagatgtactgaatatgagataggtgcatcaaagaccatacaatacaccagagggtttcagaggtgcgagtcagggaagacttcacagaaaaagtgacatttgtgtggagtcctcatggatgattaaagtctgcctggtagcaatgagagattcagtttcagaaaatgggc

SEQ ID NO: 108148 - DNA, 1426 bp, Homo sapiens
ttttttttccccaaggctttttctttcccaatgttattttctaaaatttctacaatgaacattattagttgaatagttaccctcctccctcctcgctcctccttcttggagctggtcagccagtgctgcttttctcctcctcccacccctccccttctcccacccgagcactgtggctggtttccagtagcagcagtacaattaatattttacacgatcttcgcctaaagtctggtggtagtttgagatacttcttttagtctgaactcattttcaaatttagggcccaggctgttctatggctttaggagttgaggaaacatgaaagaaatctgccttctatttgtttaaatattaaagcatttaaaatattttttccttctttcagataatcaaaacacagctgacttgccattgctgcacagtgctgaaaggtagctctcaatgtgggtgattaacaccatggcaatggagggggcaagttttaaagaaataattaaatagatcttggaaaatcattattcttttgtctcataatagaaaaccaggcctgtgtctgcagctgagcacagtatttggtgatcagcagataaaaggacactccaaagccaaacttggagccactgtcgtctaccagatgcattttatctggcggaatgtgtgggacctgacagacacaggggaatccaggctctgcgaacctctgctgagcctcgtctcctctctccataatggagatgaaggcgcctcccattcacaagtgtagttattgcataagtgtttccctctgtcagttttcagtggctaaaccttcctatataatatccttggaagataggttggggcttgggcttgaggtcaagatggtagagacaagggatttgtcccagacttcatggcaagagtgagactggcatgtctagattagtgattagagagctctttgagaaactggggagagctctggcccttctcccaaacagaacgcatataactatttcaggaagtgtttggacccaagatgaagaactgctcttcaagaagcaaccgtggcctggctagacttgggcaatggcatgaccctgtgggtattgcccccaccgcctttctgcgagggcctgcaaaacggggcccttgtccacgtgtgtgggtcagtgctgtagccaggaggaaggcctgagacagtgtgtctgtgactctctgctgtttgattgtgtgagagtctgtatgtgaagaggaaaataaaaaggaaatgaaaccaatttataataattgtcttctgacatatataactccaaaaaactgcaaagacaaggttctgagccaaatgaaattattcgtttatgatcaattaaatgatgaacataaacacaagaaacacacgattttccttgctcaagatttggcatgtgtattttctgattct

SEQ ID NO: 108149 - DNA, 1076 bp, Homo sapiens
tggagtctcaccctgtcgcccatgctggagtgcggtggcactatcttggctcactgcaacctccacctcccaggttcaagcgattttcttgcctcagccttctgagtacctgggactataggcatgcgccaccgcacccagctaatttttgtatttttagtagagacagggtttcactgtgttgaccaggctggtctccatctcctgacctcaggtgatccgcctgcctcggtctcccaaagtgctgggattacaggcttgagctaccacacctggcctgtgtgtatgttttttcaagtgtgtgcattttttgtgcatttttacatgtcaacacaccctgtttgtttttaaaccttttttctcactacaaagcttctatgactccagcattttataaatgccttcagagaatgcaagagcctcctcacccctttacggtgatgttaacagagggttggtgcctattcatctgactttgtccacatatatgtatatttatgcttatgttagtctattagtattgtcactttaaaatttgtttttaaagttaagtgtggggctatactacatctgctattttgcattttgttttccctctgcttagcaatgtcttggagcatgagttcagagagttcaaattcactctgtttagtggctgtaggatattcccttgtgtctatttaccatttaaccagtcttttaatggatgtttttggtgtctccagtcttttgctaggtgaacgtaatctctttgcaccttgtagaagtgtttctgcaagtttctgtcttagaattggaaattgttggggcagttgcattttaaaaagtattgccaaattgcccctccctgcaaaaaagtcatactggttgtctgttttataaaaataattttttttttgagatggggtctcactctgttgcccaggctggagtgcagtggcaagatcttggctcactgcaacctctgcctcccaggttcaagtgattctcctgcctcagcctcccgagtagctgggattacaggcgcacgccaccacgccctgctaatttttatatttttagtagagacagcgttt

SEQ ID NO: 108150 - DNA, 1098 bp, Homo sapiens
gcacctttctttgctttagaaagccagtttgtgtacttttatggatggtggtggttccgaatgggtaagactggaggcaggaaatccattgtttaagaaaaaaagaagcccaggggagaaatgcagaggtctgggctttggggctatgcccatagaatggtaggagaaactgtttcgttatttagtagagagaatggcaggactgggggacaaacagagaagggggtcccagaaatgacttggcttggtctcctggagaggtcatagcagctcagactgaggttggtagttggcagagaggcagattgagtagttggcagagaggcacgctgacttgaggcttctgcaggaagtcagtatgtaggtgtccaggggagtaagggattatgtgtatgtaactccagatctctggtgggtggaaagagaactgattttagagccaggtaaatctgtgcatgacccatggcttcacccctcacatctaggatcttggtttcctttttcgacggtgaaaaattgtaaaccccaaccttaaggatgattgggaaggttactagtggtagagtgcttgggataactgtggcacagggcagagcccagagtcagcaatgtttattttaagttccttctagcttcccaattacatctctgaattttttggagaaagctagcctcagattcagccaattcctacggatttcccctggaatgaaagaagccttgattcacacgtgtcatgacattgagcattcttgtgtttggtgggaattttggtatagaaaatgctgattgctgaccttttatcttctgcagaagagctccttctgtcagggttcagagacttaggcatcaggccagctgggcatcactggcattttttcctgcccatttctgtctgctttctaggcagcagaaatgaaaatgtcctgccaatctgttagactgacttcgccaactgccaaatggccttgaaaggagtagtgggaaagccagagcttggtggtcagacatcctctgtcgcttactggctgtttaagcctggacagtggcatgtccttaagtctctatgttgtcatttgcaaaacagggttaataata

SEQ ID NO: 108151 - DNA, 1031 bp, Homo sapiens
agccaacatgatgaaatgaagcaagcataaacaggacgagtgttgcgagttcaagccggccaccagcctccccaggcagtgatgggctggcgctgccacatcagccagctccttccagggctgccttcctgggagcatggcagccacatcccggggagcagcagtcctctgctagcacacatctgcagcgccagcttccatccttggtctcatgttttaatagcaaatctgacaaattctcattgaccctcagtgggggttggctgcccaccacaccttctgcattgcctcatgggtggtatttctcccaaggaaagccttggctagggtgagtgggagggagagcaaggacgctaggtccgagacctgggttgtggcagttgctgcattacttataggctgtgtggcctgggcaaacctttcgtcttccggatcttaggctcctcacctggaacatgggattgatgatacccctggttggtgataccaggtgaagggtctggggagccttagctgtgacgggaagaaagtgcttggcatgtccttggcatgtagttggcgtagtagaaaatgcagtctagctgatttggagggtgtgggtaagctgcttaatctctatgagcctgttttcttgtctgtacctgaagaattgacacttcagatacctggcccagtgccattcaagacatggtagaggtcacaggcatgtaggtcctgaacgatccagaggaagaaggggctctgtagcccaggaactgccttacacagtgccagggcccttggggatgctgagctcctgcttgtgggggagtcaggtgaagctgggcaggacccagcagggttgaggtcatgtctcacggggagtgccgggccacgtgagggaagaccagtggacaggcacattaagttttaaactcacatacttactttaatgtacgttagaaaaaaatcaaataagtagtacatcaaatctgtactttttatggaagtttttgctttctttttggttttatagttttagtatttaaaaa

SEQ ID NO: 108152 - DNA, 1149 bp, Homo sapiens
cctgtcactcctcaggtggtctggtttcatgctgctttacagaccaaagtgctgggcacagaggcagatgtgtcttattgtcttctcagagtgttaccaattatttctagtttcagttgaagagactcagttcattgatgcaagagattgactctcaggatatgccggagaacagagccccaataagaatcggggcaggagctcaggggctgtggaaacactcgttgccagcaagtgtgctgagaacacaaaggaaatgcttgtgatccttttagagtgactgggagtaaacatttatttcaccttgaaggaaatgaatgtttcaggaagaggcccaggagcttgacgaagctagacagcccatgccgtaagccacataaaggaggacatcagaaccaattgggttagagagggcctaataaattgtgtccctcacaaggacccagcattttctgttccttgggtgggccacatgtgctcttgagaagattgggaacagctgtactgagttgttgccattgagtcatatctggtccaggggccagcggttggtgcctctggtcattccgtccttttctaacaaagctcgaggtgatctggccatctccccaaagatcctggggaagtgcatgctcagcatcctccgtgcagcactggcagctggggcttccgtagccccctgctgtgtcctgtgccctgaatggccccttcccttagctttccggcctgctccctccctccagttgctaaattcccctcttctatgcttgcttagcagaaacttctcatttaacttttacatacttcactgtgttgatgttgtctgtatgtgtgtgtgtgtttcccccagaagactctgaagcttctcgagggcagggactgggttggattaatttctgaagttcagaacccagcctagggacagccatacagaatgtaacagaagcaaacttttatttctgtgcccagatatggtggtgcacagagggttgtgtggtgcacagagggtagctggttttgcaggtacagtatcaggcatcttgagaaattaatagtggggaaggagagcccactaaggtgggaatgcttgcctgggacaccagcctggcctgcctgtcgcctccaccagggggcccccctgccccggcc

SEQ ID NO: 108153 - DNA, 1074 bp, Homo sapiens
atgagctgatgtatgcaatgcacttagaacggagcctagttatagtgaacactacattaaatgtcacctataaaaacagtgctcatttcttgtggaaagggcttggtaagaataacttctgtcccagaggaaattccagcctggtgtctctgaggttttcctgcttcatgatccagggaaataattgtcttaggttattcctgggctttctacctcctggggctatattgagactcagtatgaaaacctatgtttgaaattctagggaaaatccccactagagagaaaataatgtcagagactgtttggagctttcacatgcattaactccttcagtcctcctaacagtctatgaagtaggccctgtttttacacagcatatgtatactgtggctatgatactaggtgtggggcctcggtccagagtgttggggagcgagtgtttggcagcctctgcacggccttttcatcagctttggaagaagccaaggctagagagcgaagtgctctccccacgtggccccactggaggggcaagggctgagtgagattcgtctgctctcatttggaccccagagagcccattgtcctttcctccaggatgaccctcctggcatccaccttccccacccccaccatgggcaaaacatgtctcatgggagaaagaaggagtgggctgtcaaatctgccctaccccaggcatagcggactgattcctgagtgcttttctgactccaatagttacaggcctaaaaggctagatgtttattctgtttcttcgaactttcctttctagcgaaaactccagagttctcacactagggagctacaggccagtcttggcccatggacatgttttgtttgggccatgctgtttaaacatttttttcaattggttgtcaacatttaaacattggcgaatttcatataatattccagatttttggcatctcttaaaaaatcagaggatctggcaacttgaggcctacattcctgtctggccatggtgtactggagctgaggagaaacggtcccctccaaatggggtgcgggagtttctgttccctttggtct

SEQ ID NO: 108154 - DNA, 1049 bp, Homo sapiens
taagaccctgcctctaaaattaaaaaaataaataaataaataacaaataatggcacacatttacctacataacaaacctggtcatcctgcacatgtacccctgaacttaaaatataagttggaaataaatttttttttctttattttaaatgtaacattttttctccttcttataatgcccatagctttgacttttttaaaaaaaaatctgattttgaggttgctaaaatatgttcaaagtataatgttaagtttctccagctgaaatatttttttctgaacatattttattccttcagtcccaaaaggaaaattacacctcacagataacttatgctttgttaaatgctgacccttgtaagtttttcattatttttgaaatgattaagatatataatttacagaattggaaattgtaatttttaaatgtactgagaaactttaaccctattataattattctgcaaatcttttaaggatactatagtcagtacaactagatgaaaaactctgatagattgggaaatatagaggatcatttataagccttgatttttttgtcttgtgtttcccacccactcactcgctatgtccctctagtctcagagcgattttctaccctgggttcatgggaattgggaaggacactgtttgattcattctatgaaactactagggattttgaaaaaggcaagacgggccagttgtgtcacttcctgtcgtctgatcaaaagtttgatgaagaaaagaaagtaactgagagctgctgccaggcagcaggcagttgcctggtgatgaccccgggtttccagtgctagtctggttcccagtgtggccagtcaagtccctctgacctctgggctccttagaagtccctggtgctggctgcgctgcacggggtccgctcaagagcctggccttttggaacaaagacggcttttggatgctggatcaggctgcagatgaaatcccaactggctcctgagtgtttgggtcctatctatgcttagttttctgggtctgtcaatcagtttcatttcccatccaca

SEQ ID NO: 108155 - DNA, 1196 bp, Homo sapiens
gatgctgtccactccctaatcctcccccttctgcctcctctactttctcagtcttctctcatttcttagcaagggcaagtatctagccatttgccaagcctagtacgaaacttttttttttccccctgctgagacatttcttcctctgtcaaatggaatgaaagtgataggattggtgcaatagaaaggcacgggttttggagttagatgagcctatacctaaacccagccctattgcgtgttagcagtgcgatcctgggcaagctctctgtgttttgtggacctcagtttcctcatctgccatggcagttctgaagcttcaggtccaagtgcctagcacagggcctgtagccagaagctgtgtagtcaccatttattccactttgctcacttttactgcagtgctttgacctggggcattgggcaactttctgtggggctcaccaccccttttccctttctaaccttctcttctcttattccaggggcccagatcattgatctgatgatgctggtcatcgatgtgaccaaggggatgcagacccagtcagcggaatgccttgtgatcggccagattgcctgccagaagctggtcgtggtgctgaacaaaatagacctcttacctgaaggaaagagacaggcagcaattgataaaatgaccaagaaaatgcagaagaccctagagaacaccaagtaggtctgctaatgagagcaatgttcactgcataagaaggcttctggggcctcccatgttcatttcacaaacatgaattggacaggcaggtgtcagcctcccgtcctagtaagtgagatctcaacctggcatttgctcacataagggctgcattaaatgaggtaaaggctaacgtgtttttaaaagaggccaaaaaccacaggagcataaagaaactagaatttgatgaggcacaagcccttctgtgtctcagctcacaggaaggagaaggagcacagggactctgtgcccagtgtgcaaggcctggactggcaagggttcagatcctttctacttagcttgtcttgataaaaacttagtcccgcctacatatattggccatactttggtgcaagagaggctaggactgtgttctcttgctatctgcttctctacaactcgattatcaaaaggggaagatcaattttggtagatgactggttgtttctgttacagaagcttg

SEQ ID NO: 108156 - DNA, 1944 bp, Homo sapiens
tttttgtttaagtcatctttagttttttttggttttttttttttttttttagcaatgttttgtagtttttagcgtacaaggcttttgtctcttcgatttattcctaagtattggattcttttagaggccattgtaaaggaattattttcttaatttattttggattgttcattgctggtggatagaaacacacctgatttttgaacttgtaccctgcaactttgctgagtcctccccccatcttttctttacatatagttgtagtcatgaggcatgtacatttttatttctgcttttattacttaacattttacatatcatttgctcatgtaaccaccactctgttgacctactagactggcttaagtttctgttcttaaaaataaagccttaaggtgaacatctctgtacatcattaaactgtattttcacctttttcctcatgatagatttgcaggtatgagattattagatcaaggggtctgaacatttctaaactttttgctgtgcattgccatattattttccagaagtgttctaccattttacacaggtgtcagcagattactttggtttataattttaaactatacttgaaacttagtagaaaatagtgttttagtagaaatggtaacttagtagaaatggtattttgttcttgttttaatttgtggttctttatttcctgaagtgttttgaacagttgtgcttttgtatgtgtgaattatgcccatgtaaaaattttgtctgtttgcctcttgcaattttaatttttttttaatttttgggagtgtttaatattagtaaagatattgctgttaacccttctatcatatttgctacaaataagtctttggcatttgttgtctttccattttagttgctttttttgacatgcagaagtttctaatttttatgtagtcaaactctttgttcttctttgtgatttctttatctctgaaagcatttaaaattactcttgcataagcatttatcaatgttaacagaaatcaaaacagaagataaaaatgtacccacaatcttctcaatgcatcaaattaaagtgtttttcccccaggatccctgtcagtctttcctgcgtgtacataatttgaggtagttgttatcacagcattgacactgttctgtgttctaggcttttctgtttatttttccactaaatgttatcatctgacagcatccttgatacatcattcccccagactccctttgtgtttcttcctgctttttaaacactttctatttccttctgtctgttttagccagagccctctgtctggagcccaccagggactccattgatcctgcctccctccctgtgaatgggttgaatgccaatctcaaggaatttctctgctactgagtggactttgactaggtgtattttccatactagctttgtggctgactaactgtgtgtgcttgggcgactcactccatctctctgagctgctatttcttcctttgtaaaaggggagctgaaaagttcagtctcatagcgtttaatatgagggagcatttcacgtggagcctggcacaccatggatatgtaggaataatagctgtaacatgtggagaacctgctgtgtacttggcactgtactaggggtttcgcatgcatagttcgtggaatcagtcggatccttacagtttcctaagaggtaggttttgtgtctggcttgactattgagaaaagtgaggcttaataaatgttggctgttttgaatctactatcccaaaggtaaaatttatttatactctatttgtttatatatctttatatggattataaattcatatatatatgtatatacacacacatacacatatatatttatctgaaactttttttgtgtgctaacgaacgtcagcttgcatacacagtcagcacgtctaggcccagcaagcaccgcaacatactgt

SEQ ID NO: 108157 - DNA, 1555 bp, Homo sapiens
ctcacccccattgctcttgggagccctttgtgtattcattgtgcacgttccgtggagactggcgcagaggaagtacttagtaaatgtcctgcacttaaaagggaaggagacagaagtgaccttgtaagaaaatcagccataagctctgatgggtaaacagaagtgggatttgttttgaaatatgagaagaaggagaaattggatgttgattgaaagtggcagggtgggggtgtcaagcaagagggcttttgtcccaagaggagagaaatctggggctgtaggagtctctggatgtgagtccagggaagagcttggaggggctggggagcggggccggggctggggtatcagcatgggttcctggaaggcccccatagacctggcagcaagcttgggctcttcccttcaggtgcctcttcttgggctggatccttcgcctggcttctgtttggggctatagtgggggaatgtgaggggatggcctagggtctgaggaagatggaggcagtattattcagagtgagggacgtgcaccacatgtcacacaagatccatctgggactgtgcttggatgtggcaaaattgcaatgaaagttaaccttcttcagttatctttaaatctcttttattaagtcagaaaaaatgtctcaaattggtactgttgtgtcttaaagatttccctaactttttaaccaggctcagtgccttcagcaggtaatagtatctagctagaatttaatagctctattttgttttctttgtgtttatttttgtagctacagtagtagaagatttcttgtcccctgagattggactgtggttggttaatcaaaaaagtcccttgaagcagagaatcataaaaaatgacacattcatgccttaaacataatattttaacttaaaacatatacgtgcatatttatttaataaaatcaacaataaaagctgttacagaagaaatacaacattcgcagcatcatgcctccctttcctcatcagcaccaagacactggcagccgggccaggctggtctggggcttcttggctgcatgtggatttgagttctgaattcgggcctgactccacttcttcaggctgtgcttttgaagaatgtttggtttttgtgtcatttataatttcagttttccatgcatgatcacttataatctatatgttatctttaattcatttggtctgaatacagttaagtaagctatattctgtatgttcttcttggtcagtatgtatgtatgtatttttgagacagagtctcactttgttgcccagtctggatctcactataaccttgaactcctgggctcaagcaatccttctgcttcagcctcttaagaagctgggactacaggcatgtgctaccacatctggctaatttttaacacttgttttatagatgggttctctctgtgttgcccaggctggtatagaactcctggcctcaagtgatcctcctgcctctgcctcccaaagtgctggtattacaggtgtgagccaccatgcctggcccagaatttatgtttttgaaagctctagagtt

SEQ ID NO: 108158 - DNA, 1027 bp, Homo sapiens
aaatatcacagcttccctcaggcagctgtgatgttaaacaattgcctctgattattttcaacaaactcccccagggaaaaggctatttgcactaagcaagctccaaggcaggtcaaataaatatagcattgtgagtagggccttccagggagccaccagactggaaaatcatgatcgttctctggaagaagggctttgaaggagctcaaacccattctgcccctttcagtgcctggcatgctactggttttcaccatgattggttttcaggacagctgcagagttagcataggaagagggcaagttaaaacatcaaaagctcacttggttttactgagactcttcttgaataaacactccacagattgctcaagcctttggttaatttccagagttctgaacaagttgattctgatcatttttgccagtgttctttgtttccatggaagagggcttttcagatgtccttgctgtatcattttgctgatctattagtgagtattcactcttagatgtgtaccccacgaattcatcccacagccaaggcaaaaaaaaaaaaaaaacattcatgcccgctgacatgtttatcacagtgtaatttataatagtgaaaaatttgaaatatcacaaataagtaatggaggaaagcatgtacaagcatgtaaattctgggtcgtaccattgtccaggtgtcaacaatgaaagaacaggcccaggtggagagaagtgtgacaaagagactgagagccctggcttcagactcagatgggctgggttcaaatgtggctctaaggtttatagccaacaacttggagcaaatcagttagactccctaagcctcattttctcatctataagatggcaacaactccatcatgtgttgtagatgctttcatttaaacctcacattataggcttggctcagccatgtaagttgttattgttgttgctgtcattcaacagaaagttctttgtgatataatggtaaataaattagcaggatatgaaatcgtatacatactataac

SEQ ID NO: 108159 - DNA, 1033 bp, Homo sapiens
tgggtgaggcttttgttactttttcatcaggctcctgagagcacttgtctgggagcctgggatagttgtttttgttaaagcgaaatcctcaaaaatgctgctttgaaagatgtttgtatattcctttaagaagcccctacataaatctcagaccaagcctgttttgtttgaatctctagtgtttttccaaaagaattgttatcacaagactaagactttggaacattcaccactgaatacttttttgacagcctgttcccttacgaagtgaaaaagtagcaaacacaaggaatcctagtctttgttttcatttgtttattggtgatgagccctgacagcatctcccggcacacaggtggcatgaggagaatcggctggtgaggctgaggcgtgtggagtccgcagagaaggaaggaccctgggaacaatcctttcctcctccctctccccacatccccttgtttcttcttctttcacttgtcattctctcaggcatgatgccagctactggagatacctggctctcacagccctatgggggagataataaagagatgatcacaggagagtgttagctatagtgatgggggcaggggaaacgtggccatacagagaagcctgtccagaggaggtattgctgcagtacaggcgaggctcagccagctggtaaaactctaggcctgctggcggctggcttctggcatacgtcagggagtggcggaagatgaggcctaaaaggtacctaggggctagatgatgaggagttttaaattctgaaggcatcaggaggctggggaaatgcatgaggccagggagcaatgcgacagggtgtcctttagtggctactctcctgcagcatggagggcctggcaggacagaccattgtagcagtcccacgggagaagacagacgaggcttctccaggtgccctttccttcagactgagcggaaagagctgagagcatggcagaagcttggaatgcagtcagggagttaggtggttttgatctcctgtccaccttgccagggcatg

SEQ ID NO: 108160 - DNA, 1035 bp, Homo sapiens
aaaagaaaggacttggctctggccaggttccagagctccttggatctagtgggaggagtcgaatggcagggccccaccatatccaaggagccctggaacctggccagagctgggtgttaggatgtcccccagacactgtgagtcacagtcccctcctttacctgctgtcatgtcctcctctgaagaccattggtcccagaaaaagaccacttgaataaaatctagtttaagccagggactaaaagtgcaaatcttcaaaaataaagcacaaaagtgtaaaagtagattcagtttatatttaacaaaattaagattactttggtgactgtttgcagattctttgctagaacagaaaatgaatcagtactaaatttctttccagtctctgtgcttcctaagtcagacctctgggggccactctgacctggcatcccttccactctgggagaagacatgcttgcagcttgggagaggacctgggagtatgaaagaggtgtcaaaagagggctctctggggggtggggtagactttgaattgggggtacctgaggttctagagggagaaaaaggtttttgataagagtcagtggctgcaatgttagggctgagggcatggagaagggctgaggcagagaagtcagtagtggtaaggaggcagggatgttcgagtggggtcctgttctgagctttttggccaccctctttgtccttataaaggtggaacttgcctatcaggatgccagttactgatctttagtacttgggcacatggcaggtgcttggcagatacaaatttaattctccttttacttttgtgcacctgtttttccccagcctactttttaacacttttggtgtctactgcctgatgatctaatttactagtcaggaaaagcagaacttgtaagcaatgtactgagacatttggttaaggagatttctaagcaaactgtgaaagatgctgccttgtttctccattgatgcttatagtaaaacatgagggaaaaggaatgaattgaggaaggaactgttagc

SEQ ID NO: 108161 - DNA, 1283 bp, Homo sapiens
cctattgggcaccgggacatggggggccatggccctctttccaaacacagtgacatccctgtcagatttcactaatagacttggacacatctgaccgcttgaactcccttggaggcagggcacagccattccaaataaacagtcacattcccctcccagtctgggctggcctgcggagcctgccataccctggcccccgtttctgttgcccaggtctgttcccagctggggccaattagctgagcaagaaaatgttggggaacagggagtgaaggagaaaaaaattccatttagtccctagaacagtttaaaggccacttatcctaagaatcaccagctttctgctgaggcattttgactctctcgatcttcagcctgagaaatccctctgataagatttgatcttcggggttcaggctagtgatgtttctggtgatgattggctatcagggttgtaacatcagaaactgttgaagccacagaccatggggaaagagagcaggggctgggagtgcagagggactcaaggcaggcatgtaccagctctgtgtccacaggcaagtcagtcaacctcttcgtgtttcactggttcagctcaaacttgggatgaccactgtgtgcttggctctgtccaggacctctggaagatgggtcagggtggtgtggtgtggactagggataatgtatataaggttcctggcatctaggagatacaagctttagctgatactcttgtcatgtttattgttgccatttgatattattctcatgtagaatttttgttgtgggttccggaagtagtaagtgtcagggcaccttcctgggtgtaaggtcctgttcagggctactaagtgagttattgaaatgcaaatatgctttgcggaccccactatgtggaccccactatggtccactatgaatccaatcaatgttctgataatgatgacaaacattattagatatatttggatacctatttagttgataaagcttttagggaagagttcagaatttgataacatagtcctcccaaatcaagtctatattcagattgattttcttcttcattgaaaaccccccagaaagggaaaagaaaaccttaaatactggtaggtgtttttacttttacctttgcctctgctctttgaagctaatcacaagggtgagataagattatgacatctggaaagaatccattttcttgcccaaacaagcctgcagtcttgactcttccagatctgcccttcccccacctccagcaacgctgtgcactccccttccca

SEQ ID NO: 108162 - DNA, 1024 bp, Homo sapiens
ggctttcccctacctgcagtatgctcactttccagcacagctcagggctcacatcctttgggtagaggtgtgccccgtcctctgtgctgcctgctgcttgtatttgtctttgtgcctgcatctcctgtggaccctggtctccctgggggcagaagctgagtctcctccatctttgtattctcggcatccatcctgggctcggcccagaaaatatttggtgaaaggaataataggaaaaagccaataaaggaaataaacaagttgtttttcagtaggattttgattggaaataggtaatgagtgacctgagagggctgtgtttggagtcactgccaccctggggccatttacagaaacccagagctgggcagccccccacttcctgctggggctgtgcccctgtcttcaaggctgcatcctgatgctccatcagtaagcagcagtggagatgctccctgtgtccctgtgctgcctcattctgggagcagtgactgtgaatcaggtgcccgaggctgcagagctggctttccaacacctgtggatatcggctctcaaggctgagctccctctgctgccatgtgtttttatctagaaaatattgagtgaccttcatcctgaactattttctgttccagaagatacataaaggaaggcagtttctgtgcatttgatgtttcatggttgtctggcttttggcagtggaagcttacgggattctgctctctgtgcccatgtgtggtgcaccagatgcacagggttggagctccctgggaaggagagaaggcagagaaggaaaccaggaaggttttgggaaagccagaggaagccatgctaggccctttgagcagatcagcccacccttggttgtcgccctcaggagggacctcgcagatcaggcccttcctctgcagcaccatggccactgctcaggttcaaactcccgggccctgcagggccgcttctgtggcatgctgctcctccccttgcctcccaggtcttcttcttgagtccagcccagccctgc

SEQ ID NO: 108163 - DNA, 1272 bp, Homo sapiens
gactctggccaatgatatgtgaagggacatgtcctaggggtttggggaaaagcttttctgctttttggaactcaacaggaaaagacagcttttctccttcactggacattgaagggaggaaggatgtgacgcctggactcaggggctgaacggccaccttactcccaggctggaggtttgcagaggctgggaggcaggagagttgcccagaagcagagcctgcacctgagggctgctgtgtgtctgccccgcctcagaacttcgtgtattgtgagagctctgtctccacacggttccagtcagggctatctgttacttttggaccaaagtatcatttatgatatgagagcaaaatggcatctctttcctagctgttaggaacacaattaaggaacaggctgctcctggcctggttggacgggagctcatccctgtggatgagtacagtgctctaattgggctggctgggttacatgtccacccctggagctggaagggacaaggtgggagggatggttcactaagaaatttgggttactcctaggaaatgcagaatagacatcaggcaggcaaaactgagaggtatccactggcttggtgcttcccagtgtccacaccatcacagctcaggtgctggacacagatggactatgtttgagtcctgccccatcactcacggggcagttacctcccctggcttcctccagaggttgtcatgaggatttgacaagagccacgtagcgtgcttgcagcagggcttgacgtaagcctcactgtctttatcaccaccctgtacaactctgcatcttgtcttttctttaatgggcctttttacttggcccatggagtgcagagacttggggtggggtggtctgagctctgcatttcctgcctgcacccaggaccccaagagcctctgtgaggtcttgcctttctcctggcttgaggatttgaatcacacctgcagccaagttgtaatatcctgttgtctccctaaggaggcacagctgaggaaggacagtcgccaggcaaagatggaaggttgacctcacaggaggcagggaactcaggaagacttctctctgcaggtgctgttgtcagagatcaatgctcagtgtcctaaagctctggcaggttggaggatgctgcccctgcaggcctttttcctgtggaagcttggagcttgttcttaacccccaaaccccaagtgaatggcatgcccttttccatcaggcccctgagaatctgttgcagctagacgaactgctacca

SEQ ID NO: 108164 - DNA, 1054 bp, Homo sapiens
cccttctgggcagagcggctctgcctgccccctctcaccctctggcctggcacctcagggagggcagaccacacctgcagtctgtgtcgggcccctcactgccctggcatcactctggggctctgctgggactttcttgtttgttttaaaggaaagttgagtgtttcctgagtgtgcgtaaagccaatgtactacttaaactgagtatttataattctttcttttaagaaataaaacaataataaaataccataaaccttgctttaattattcacaggtgtcaacttgtaatcatcatggggaaagggccaatgagatgccttatttaaaaaaggcacttgcctgcttttctttgaagttttgctaaaatgcttcattataacatgttcttgtttataaataaattccagcctttcaaagtttgggtgttttttgtttttgtttttgtttttgtgtgcgtgttttaaaagtatttaaatgagatgattctagatgagggtgattgattcacagagtgagccagccagagctgtctgtgagtgacagctgtggctcccctgccctcctggggcagcatagctaccttagcttgctgtcagctgtggtgtttgtgaagctatccattgtggatgtgtagattagggtgaatcccgatttgtgtgctcgcatttgcctacctgctggacttactgcctggcagacagctctgcacgtgagcacatgtgcacatatggcctgagatggggccttcccaggacaggggagagttctctgagggcagatagcaagggaaccaacctgggctgaagtcaggggaggcttctcaggtccgaaggaggaggaagacttactaggagaagatgagcaaggtgtgggtagagaggattctgggcaaatgcaaaggccccatggtgggagagagcctaatgtgtttgaaaacctaaaaggaaggcatttggcatctggactggagcccagagacaaatgtggggtgagaggtgctgtagaggtaagtggcaccagaccatgcaaggccagttcaagttctgtctat

SEQ ID NO: 108165 - DNA, 1150 bp, Homo sapiens
cagattgaggtggcttggatcaagctggcagcaatccaatgggcattaaaggcattcaggagatggaattaacaaggctttgtgatggactagatatagggacagtgaaggggagaggcatattaccgatggaccccagatctctggcttcagtgacaggccaggtggaggagccgttggtgagagagaatccagaacaatctggaggggagagtgaacagagccaggagtatggcttgggcttcactaagttggggacgtttggggaacccacttggaaaggtctaggaagcaagctgacataagtgtctgaagctcagagaagtttgggataggacatatatttatgtgctgttggtggctccaaccttggtagttggggcctctggctagaaaagaaaagttaaaaagcaagcttcagctgtttcatctaaagttataattccgatgctttaaaggctcccaaccctcttcttgttcatggtgggggagccttcctagttgtgaaagggtctgagtggctccagctttggcatattagggtgcaggggagggtatttctagggacactctgggagaagctgcccagcctgcatggtgctagtgccagtctgcaaaatctccaggtaatagagagggcaggcccctgcccacccccttgcagcctccaatgctgctgctgtggcagctgctgctgcgaaacaaaccagggtgactgggcggaaggtcaggagtttaagagcttgtttgattcaaaactaggctaaaagacaggaggggagtgagctggttttctgtgtggatcctggtattttcctttgagttggggaggagaatggtggggcagggagggaaggccggccgccagagggaacgctgccaagcagagcgcagctaatgtgaaccatacggcggcggcgttgggcagtggcggccatctcccgcccagcttagtacagcccttactgcgggcaggggtgcagacaggcaggaaggcagctcgggctgtgcggccacttaacccttccagtgctgaactacaagcagggctccttcacctcagcacattgatgtttcagccaataatcctctgtcctgggcactgtagatgtctagcagcatccctggcctctacccactagatgccaat

SEQ ID NO: 108166 - DNA, 1028 bp, Homo sapiens
ggagctggcccctaatttggctcctccatggcccagctttctgcatgcagctgctctggggtccctaggagtgattgcagcccctccagggtcacttccattttagctgagatttggggtcttgagagagaaggggcctgatgtggtgtggcagcctccagcccacttctagtaagagtatgttccagaaacttgactttgtatgcagaggtagcatgggtaagttggggatggggtggatgaggatgtgagacatgaagataccagcctcttggaggttctagaatcccaaaacgccaggcagtaaggggtttgggcctggctccaggaagttcctggagagtttcaccaggatggggtttggctgggtctcactgtcttcctggatggaccagggaggacagaaccagcatgccacctctgggatccactccagggcctggctggttcaagcatgtcctaaggacagataggggaggaacctctgaggcaggcactcaggggtcctcctctgggccctgtgcgggggttttgagccttatggctgatgggggcctggcgacttgcactctccggttctcagctgttttgtagttgacagtgtgtgggaagctggggcgttcccctgagttagtggtggtcgtgggatctgagcaggcagttgcagacctgatcctgctttggctctggagcctgaatggatttctgacaggagaagctgaggctgtccagcctgccttgggaacttggctgcttcaccaagtgggagctctgagactctcccacaggtcccgtgctccccacgtgcccttacagttacctgcccaccagggcccagaggaggggctacctggagcaagggtgcctggactgggcctctgtcttcccctgctgtgagcagagttctcacctcctgaccccgacttggtctaaccctgtgacccacatgaaatgccagccactggtggtgggaagtgggtggctggtctcttccaagccaggagtgcatcagctccagcctccttccc

SEQ ID NO: 108167 - DNA, 1082 bp, Homo sapiens
tgggtccaggtgagggttgatgacggcttggtctagggaggtgttgggagagtgggagagaacaggctgggcttaagaggtacctagggtgcctcaagtcttcatgatgccttgagcacggggcaagatgaagaggtggggtcatgggtacttctgggtttctggctcacatgatgagatgggtgatggtgctgtggatgcagaaaaccatgtgtggggaagaaggtgcctctggcgtgggagctatggtgctgcagagcctgggaggcatggggtggaaagcccagtgctgtcagagccagagtcgagagtgtccccctgggtgctcacactgtggggctggagaaatcagcttgggagaaggccttgcttttggagaactgtagcacataatggctgggcagcagggacaggcctgtgaaagagatggctgggcctgagaggtagaggggagtgaggagggccagggctggagcactgccgtgtcccctcctcctcaccacctgtagcatgtccacttcctctgtccagcctgcaggatcctctgtgtttgggtctaccctcttgtgcttccctactgatccccaatctgtagttgttttcaaaaatttagccatggtttcctccctcgcacagccatcatggacaccaacccagctcccctcgcccacgctcccttagcccattcctgtccagcgtcaggccagtcccacgttcctggagccgccagcaccctgccactccctgccccttcacagccatccccatgtctacgctgcattcttgtgctttacctgtgctgtgtgtgcttcaccttaggcgtttaaccatcattctttaaaacattttcaaatttatgtgaaaagagaacttgataatatctgtgaactcatgagtttgctctgctagttatattttttctatctggaatttgatataagtacatctcccacatgggtttgtagtcatgcatgtgtgtacagcattgtttgctctgtcttgtagataaatggtgacgctctgtgtgtaccctatgccaagcttgctcttcgcattcagcactatgattttcaggtttctct

SEQ ID NO: 108168 - DNA, 1053 bp, Homo sapiens
atcgttatctccttttttcctgtatattaatgataacatagtatacacattgttttgtaccttgtttccccccgccccccccaaaaaactctgtctttgaagatactctggtatgagaacagatagacctgcctttctttctttttcactgctgcattagtgataatacaggtacgccatcattcatttgtactggtcttccagtgacgaacacttctgctgcatctagtctcttgcttgacttctgtatttcttcttttaaagtgtaaatgtttggcacaggtgcttttttcagttatttcaagtaagcgattttggttttcacaggatccctaggagatggctttggcagacaaaactcggctctgagggatgatgtgttttggtcaaggtcatagagttgacaaatgggaacttgagtttaggtctccttactccacttccagtgtccttttcactgtattctagaccagaagaataaagaatatataaatccacatataagtcgtatgtgccacagcaaaagcctgagttcctgcctttctttaccagtgatctgcaaatcagggtctgttgagtggggttttccttgttgtgacttgtctctgggaccccaagatagggccaggcccagagcaggagtcaggaatcccttgttgaacaaatgtgcaccctgggccctgagatttggggctcactgtggccattgacttcagggagttctcctaggatacagcaagctgccagtacattggttggagtagaggacctatactttatactttgcaggtgaacatgttgacttaaccatcagaagtctccagatggaaatgtcttgccccatcactgtagtttaagtggtattcctttaagaagaataacttggatgccagaaccaaaggcctgtgctattggactgggccagtgaagacagcacaggcattttccagtttcagtgaagttatttttggtcaaggcatttcctatttgaaaacatttgcagctcctcatgggtccgttggtgcctggaggtatagggcttttcagaggtta

SEQ ID NO: 108169 - DNA, 1048 bp, Homo sapiens
cagtgtcctccttaggcacctcttccttctgtccttttccctagtggcaactttgtttctctcctggagctgtggagttactcttgacagactggaggggagaagtcctgaggggtgagcctgggaatggggcaggaggaaagagactggtgtgcagaagggacttacacatgtcgcaacatttaatgaggaggggtagagcagcagttcctgggagaaagaactcccatggggggcaggaaatgaggctcagtggaagaccccactgggaagctggcaggcagaccagtgtggtcaggccatgcagaagggacctggggggctactcaaagttacctaatggagtgaagatgaatttttctcattgaagtggaaaaactgctgatttttatcagggcaagttggttagagtgttagttaaaccatctgtcaaagctcatttagttgtcaaaattaaatcattttcctccacttcctagtggattggttataatgataactttcttggcatgacatttatcatcttggtccaaaggcagtcgggggtatggggctgggaagagggcaggaatgtaatgcatagagtgatacgcctgttccttttgtggtagaaagatgctattttaatactgtttaatttttattatcacttataatattagtgtgcattttgctgtaactgcacctggtttcaaagcaggacaaaacccatggccatattaataaaggagggtgaagggaagagctgggttagtgccccttgtctggtgcttcagatggtaggagaggttgatcctgcaggccgactgatttaatgccctgatttccagcttaggtttcatatgccagtcataaagtgtaagaaataaatatcctaaaacaattatttttttaaaaaagtttggcttataagcaaaatatctaaaaacatttctaatttttatacagaagaggaaaaaataatcagataatcattgattttgttttttgtttttttttgggggaggtaagttatatatatggttgggaaattctaacagcacgaaag

SEQ ID NO: 108170 - DNA, 1436 bp, Homo sapiens
tgttttttctgagtgtctgtagctactggtgcatttttcagatgaactttaatattacttttaattgccaaaaaataatttttggtattataatttgaattgagttgaatatagatgtaatataaagagagtttacatcattataatatctaattttcctgagagcattgtctttctttccacttacttagagtttctgagtttttttcaaatagatcctgtacatttcttaagtttatatttaggcattttggttgctattattaatgtgatttttattttcgttataatttaaaatttttctttgtttagaatagctgttgattttaaaatataatcctgtaacccgccaccttcccaaaacagacttcggtattgtttttattgtcttttccgttgattctcttgagttttctaggtatataattatatcattggcaaacagtgacaatttccattcttccttttaaatgtttagaccttcaattttatttgcttatcttattacattgcttagtagttctagaacaatgttaaatggcaggcatcttttcgttgtttgtaattttttttttttttccctcaagacagggtctcactctgtcacccagactggaatgcaatggtgcgttcagggctcactgaagccttgacctcccaggctcagatgatcctcccacctcagcttctcaagtagctggggccacaggcgtgtaccaccacacctggctaatttttgtattttttgtagaaacaaggtttcaccatgttgcccaagctggtctcgaactcctgagctcaagtgacccacctggcttgacctccaaaagtgctggaattgcaggcatgagccaccatgccagcctgttgtttgtaattttaatgagaatgtggtgagtgttttatcattaagtaaggtgatggcttttcgatctcatttatcttttctctcatcataaggaaatactcatttatttttatttttttaaatcaaggattatttttaattttggaaaaatcttcatggcgtattttggagtgatttatggtttttgtcttttgaccttttactatgctgttatattaatatgttttctagtattgcattctggaaggtatcctacttagttgtattctggtctttcaataatatttatattattctttcagtaatatttatgtcataattgaaatgtctggttggcaatttttgtcatgtcaagtcttggtattagtatgctagcctcacaaaaaggatttggaaggttttctcctttattctttttaaacagttaaaatagttatctattccttagaagattgaagaaatttgtctctcaaaccatctgaatttgatactttttgggggtagcactttaataacttaaactgttttcctttgtattattagtcttttgtttcagtctctgccaggg

SEQ ID NO: 108171 - DNA, 1351 bp, Homo sapiens
aacaaagtcagtgtcacctatttgccagcatggctgcccatggcaagccattctggtcttgcctggagtgtcacagacagtatcccactcctcttcctgagtggccgtgtactaacaggtaacagatggcagatgtgtagacgagcagcggttgatgcctggcttcgccaccgagggagcacttgggccaggcacctgcgtgtacagcagctccttatcctcacatcacctgcaggagtaaggcggtttttaccccattgtaccatgaagactcagaggcccagagaggagaaatgacttgccggtgttcaagtcctggacagggtctgaatctaggttcagacagggtgcaacacatgaagtttctgcccttttggctcctcgggaattcttctcaaccatcagaaagagaaagcctggggattttcacacctgtcccacctggaacatgtttcatgttaagtgccattcctttccccactgtgtttttctgaggtcctgacccccctccaaccccttgtcccattttctgtggctcctgaccctcaaggcagaagtagcaggccagcgggcgggagccagcttaccctgcctgctgcctcaccaggggacagcaggcttcagaggctctcctgtaatctctctatccacacagccctcattttaatttgcaaaattgaagccagatcgagagcagtaaagccagaggatggtaaatattcatgcctcagtgagcgagggtggctccattaccgttctgagattgagagaattacctgggggattatgtatattcatgggccgatttttatttgcgatataacatgactcacgttggcctgtgtgttacaggttctaccctcaacagactttgcacaaagcgtatgcccttaagcttctgaaagtcatctcaagtggattgcccatcgccttctgcctcctaggagacaggtcagaataataagcacaccagtgaccaaccaggggtttccatgcactcctctctctgccttacaagctgtgggcactattcttacgtccaggtcacagaggaggagacgatctgaatgccacaccatgttctgtttatgtggctgtccctgcactgtgctgccatcctctcgactgcagggatggtgtctcattctgtcctgtgtgcccagaacataataggtgctcaggaaatggctgccaagggagtagcccctcttgcaggcctgctctgcagacacgctcagttctgccgctggcccctggcgtgtgtacagcacctgctgctggcagcacaggtttggccctgctgattggctgggtgtctggcttcaataggggcaggtcagtgttcctgttc

SEQ ID NO: 108172 - DNA, 1030 bp, Homo sapiens
gcccctgcacagctgcactggggtgcaggggatcatcagttgagtgtgacggacgttcctgagcatgctcctctgtgccagggacggagattagtgccacccagccccacccccccccacccccgctgatgctctcagtctggacaggaggcaggagctaaaggcatggctacatagcaagtatcggagataaagtgggggtcaagtggcgggggctgtgggggccaaggtgggcaggcagcatgacctgctctagctggagtaaggctggaaggacgaggaggggcctggcagtcaggaagccagctctgcccaggcacagggctgggaggcaccatcgggcctctaggccatgagttggacttggcccaagcttagggtgctgagggcagtgctgaggagtgctcaggagccagccagatggccacaggcctgtgtgcccatccagcagcctgccctgaggggcgggagctgtgggagccacacataggagggacatggccagtgctgggctttcataaacctggctgaaggacagggtagccttggaactgtggggatctttctgtccaccttggatccattcctttaagacccagacccacctgggctctttgctcaggcccagggcccacaggtgaggtactgttcactgctccatggcggtgatggcttttctggctcagccctgaaaacagagctggatcccttggcttacctcccaaggattccttaccccctaaaaagcccagggatgtcattaaaaacaaagtcccagttgtatagaaaacagaagaatccagcattgctgtaattcatttaaagttttatgggatggcaaatacttggggtggctgggaggaggagcgtaaagctccctggtgaagctccctggtaggccccttgtcacttttatggttttccattgttgcagtgactgggaggttaatcacgagggtttgtttgtaaggtcgccacagatggtcaggggcctttgctgggccacatggtagaaagccagatcattccc

SEQ ID NO: 108173 - DNA, 1064 bp, Homo sapiens
cgctctgtcacccaggcgggagtgcaatggcgcaatatcgggtcactgcaacctccacctcctgggttcaagtgattctcccaccccagcatcccaagtagctgggattacaggcacccgccataatgcccggctaatttttatacttttgtagagttggggtttcaccatgttggccaggctggtcttgaacaggtgacctgaggttccctctcgcagccccagaggtggtgctggggagctgggatctcaacctgcaggggcagcgctggcagtctccagggcccatactgctctgtcctcatgcacagccctaggtttgacttgttgtgtgtgagatgtgattaaatgcattaggcgggggaaaatgtcttatctgtacccagcctaggtcgaagaagagggagaaataagagcagccaaattgaaccttattaaacaaaattggttaggtctgatggagccaaacctagactgatctttaaaagcttatttcatttttcccctccagcctgaacctctttgaattgaagtaactgatcctgctgtaagcttattagtgtcaaaccttgtgtgtttcttttcctctccgatttacattttattaagtaatgatgaagttgcaaggtcccaaccctagcccttggcacaaccaggagcttccaggctcattagtggaacaaaatggataatagaggtccaatcttattatagctggtacattattacaaaatctctgcacattagaaaggctgctaagcacaagtctgttacctgcttcactcaagcatctgttgattctgtaaaatgctggagggaccccccaacactgctgttcctttaaagtttgttgtgatggtgtgggctgtccatttcttacctgacagaaggagtgcccatgttagtgatatcgctgtgctgaattgtgtttcatcttggacttctgtggtggagtgtgtttttctggtgtgatgtagtaagagaatatgtgctttaatgacaggcagattgcatgctttgaataaatgtcttaacctctgggggcttcaatttccttgtctgta

SEQ ID NO: 108174 - DNA, 1038 bp, Homo sapiens
aattcctcatgtattcagtggtgatctaattaacatctttcttctctagaagacagcagactttatagaacccaactgtctaaaactatctgttttgctcgtcctgctggcattccagagcctgggcctggtcctgagagaaggttgctacccacgtgttgagagaatgtgcgtgcgccacctcagctgcgccccgtggacattagcgaatgtttgaggagtgagttattcagtagatggagagaggccctcaaagttggctagaagataaatgactaaaaggaaagcctgtttttctcattcttaggttggtaaaattatctacttttctttatctctggtgttctaaatgggtcttctgttccgaagcgtccctcagtgagcgtgggctcactgaccaccccgtgtggcaatgctgtctgcatgcgcctgtgagaacccatgggagtgccatgctgccctgtccccatctttatctgctgcacaatttcctgtctaggcccttaaaatcttgatttgcacagttatttatctttgtgctcttcatggtgccctggtaaggcattctttatgatttcagtcctgagaacacaagccctgttgaaaagagaacatgctttgaataaagcctgcttgacgttcggcttgatggggaggaggagggggaaggggcatcagggcagcatgaggcccctggccgccctctctcacaggaaggctcataaacacaaggatctcgctcaagccccggcacgtctggaatctcagctcggtgctttgccaggtatgattttgccacaaggggcatttcttttccagaatctgatgcagtcactctcttcagagcggctgggcgtttatctggacctgtcacaaccaggtttctcagcagctcctgtgctgggcactgaggacgcagcatagggagagcacagtccttgtctcgggatttagaagggaagagatgcacatttgataggccaaaattaagaaatctagcagtgccaaatgttggagcagacgtgtatcaatggggtg

SEQ ID NO: 108175 - DNA, 1022 bp, Homo sapiens
cctgctgtctccctccccacccttgctgtagccctcctgcctcggtgtattcccagactcaccaagctactgccctcttagggcttgcacttatcagttgccccatttagagctgtctttctgtgggtcttcacacagctgtctgcttcttatgctaaggtcttagctcaaattcacttcttcgagacctttaccccacccaggccttctctatcacatcacctggccttgttttctttatagcatatgttgtctaatatagtcatataatattaatgtagattaatattatataattatattaatatatatttgcatgcatgtaatttatatattaattttatattgatatgaattgaattaatatatataatttttcctatataggtaattttgttgttgctgttgtttcaagatattaagctctttggaaacagaggtcactgtatttcttcccctagaacagtgcctggcacacaataggcactctgggaatatgtgttgaatgaatgaagagagatcctgccctaggctacccacaagccagcaggcagcagatacacaatagacagtgaccatgcagcaggctgtgggattcagaggggctgggttaccactaaggagtcagggtcaagttctgccactgggagttgggacaggctttccagagcagtggtgtttgtcccgggctttagagggcaaatgggcacagcttggccagctgagcagctggggaggccattcttgggggaggaggcaggcaaacctggacagagggctggaaaatgctagcatgattgatggaagggaggaacttggagggactggagcctggattggagcaggggtgaagggaactaaggtagtcagggatttggctgctatgacccctgcctttcccccagaagaacagtgagacttggagagtggggccctggccctgctttgctggcggccctcggccttgtgctttcagtgtggtacctgctctggtccagaagagtgtgcctgggccccagacc

SEQ ID NO: 108176 - DNA, 1089 bp, Homo sapiens
tgcccctgtacctagacctgccctcaagtgggggactgaggagcaaccccttcctctcccttcctcagacccagagcttggacccttagctccgggggggccgctggggcctgctcagggctccatcagccttaggccagccccaagatgctgattgaagatgaaggtgataaagtgtgtgtcactcgtttgtctagcctgatttattagcagtgtttggagtataattattctatagtaaaatatctatgagagagtaatatcccaattggtgtggctcctgggtctaattgctcccactcaggcctgtcaacagcggtgcagcagtcacttcctttgagaactgggagggagggtctgtgaggagcaagtaaacatatggcctcaatgactcatgcctccgaagggctgagggaggggccaggagacatgcctggcctatgtccttccaccaacctggggccaccagcattttcctgctcagtccagggaggctggaagtggaagcacaagaactgtaggcagtccacagaagctgagtccaaatcccatatagacaaccctgagcagagacaggcttcctccaaccagggacagcctcacagggtgactgtggatgtgtgcagaggtgagatcctatgagcccagggctttggtcgaggaagaaggccttcctgaggctccacaagggaggaaagggcatgggtgcccaggctaggagcagctcccccaactcgcaaccccctgaggctctagctgaatgggcacctgccttaatgctaggggctggctgtaggctggggcttctgtgccacatgctctcctctgggccccagggcaggaatgagcctgcctcctgcctccctccactctgtcaccactctactgattaagcatatactatgcgcctttactagctacatactttattttgaaaccgtttaataaccctgaggaagaggtcattatttttcctatgtacatttttccccaattaaatcaatcaaattatgtgcaaatatttaggaaaagtaatatatgcacatggtaaaaaatttcaaacaagacaataattattcagtgtaagga

SEQ ID NO: 108177 - DNA, 1041 bp, Homo sapiens
tttggctatagttttccaacccctaatataaatggttaatagggctcttgaaatagaatgagcaccctgcgaggaaaatgctaataattatctgcagctgaaagcattaaaccctctcagcagtccttaggaattgggctttttcttgggtgcccactgtctctgtgctaacactgggatgcatatactactttatgtgctgtgttttttattcttggatacatttgattttttcacataagtccacgtgtacttctataagagtgtgacttgtaataaagggttaatgaagaaaaaaaaaaaagaagaagagggagcttggattggtagagacatccagaggtctcacctgagtgggagaagaaaagaagtgaaagtgttctaaatggctaatctttctggggagagggtttaggaaagactactagagcatatggtgataagggaaatagttggtatcctgtttcaaagtaaaaatatagaaatatgtgcaagattttgagtacagagaaagggaaagaaactatatgaatgcagtgaaaatgtaatagcactttcacattctcagaggagaaactggaatgaatttgattaaaccaacaaaaataaggaaaaaagaacaatgttaataaataataataataacagaaggaacaacattaagtatcagtcattacactaaatgtgaatggccaaattctatttaaatgctaacgctgagagattgggttaaatactgacaaaggtaaagaaggacatcatgtaacgataaaaggctcggttataaacttgtacataccaaacataaaaataaaacagtagaaacctagggacagcttgataaaagatggaattataatgatagggtggcacttcagagtccatattttaaaatcaggcctactagacataaggacaacgaggcagaatatattcaataagcttgatttttagataaatgtaaactcttacactccttgaatagagtatacattttttttcctatggcttggaacatttacaaaactaaatattcagcag

SEQ ID NO: 108178 - DNA, 1059 bp, Homo sapiens
tctggagccccagatctgtacattcatgcgtcaatcacctctgcgtgccaaccctcagctcaggctaggactcagtggcaagagagacagctttgggcctgcttcctggagcttccacagaaggggtagttggtcaggcccaggagcataagcttctgtgcagctgcgtgccgtggaggaagagggcaggtctgacacggaaggggcatcttcgtggggcctgcaggaaatgcagggcacttctaaggaagcagcacccaggagacctggcccggggttcagagtctacagggtagcaggaagggcattctgggagggatctgcacaaagatgttcctttccctgaggtggaaaaggaaagagcagaagggcctgtggctggggcagcagggagcagggggaagaacagtggagcacaagtacgctgggccacgtgaggacgccatccactacctcgggacgggaggagacactagagataggcccgaatgtggttctgtgaagccacttcccaggtggccccaggcaaggccctctcctctctgagtctcctgctctctagaatgggggctatgacgcccagctcctggggttgtcaggaagaagaaagcactgcccatcatgacctctctgtaagcccctctgggctgcttgtggagagaaacccaaggcctcaaatcagaaatgcttccttcagactcctgggccttgaggcaagtgtcatgggaaattggatgccaaccaagcccagggcagacacgctgtgccaggattcagcagagcagggagcgtgcagggagaggcaaccctatgccctcgtctcagagcaggctgtgtgcgcccagcggacacggcaccagcaggagctgtgtgggctcggctccatgcaggtgcgcctacgtctatgtgtgtccatgtatgtgtgtgcgtgctcacgcttttgtgtgtgtggtgtgtttttgacaggggggaggtgagtgagaggccagcttcctgacagggcagttgtaaaacattcataaaacttttattggacttgccacccttccagataaatat

SEQ ID NO: 108179 - DNA, 1049 bp, Homo sapiens
gctttgtgcctggccctgtcctgggcattggggacccatttggtcacataggcctgagagctgaggtggacacacggccagtgggtgacacgtgtgcagcaggagtgcagccagcatcagaaagcgtgtgggcattccagtggggcggtggcgggggcggggggtgcggaggtcagcccatgggcatacctgcctcccctgggccttgcagccacaggccacctctgggatctgcctccgagggacagtgtgtgggcacatggccatcagcacagacacagggtgccaggccccagcccctgtacccacgctcaccctgggcctcagcccctgcaggtcagggagggatagactgttggagtctgcagctttcaaatcaggagtgtgggtggggaccagagatgccacgccacccctgcccttcccctgtcagcaagaggacagccagcaccgccgcctgcccacggcctctcgctctgctctgggaacagggctgatacagtaatcagggtgctacatatgggctctggaaaatgactgctccccgggcctttgttcgccttcattattctagacggtttttttcccccaccaagtcataaaaatgacatttttaatatgtggattttttttttaaagaaaagcaatatgaagaagacttttattgtcaataagctctaccttttaaaccagttatcttagtttctgctctaggtattttaattgaagattaactgctgttaaagagtatacacatttagggagtgagtgtttggagtattaaaattcggctcccttggtggggatggagctccacgggaggccaccaggaaccatgctcccccaatggccagccttggggggctgtctgaggaggagggccgcctgcaggaggggcccatccttgcctctggccacagccttttctttcattggaaggggcaggctggggtgagtcctagccccacaggggagcagaggacagcctgagagcatatggctgtgtggtcagaagggcatcctggcccggcctctgcacccttggttga

SEQ ID NO: 108180 - DNA, 1090 bp, Homo sapiens
taacggggttgagccattaattagcctgctcagccggcaccaggcttggctgctgggagttggggcggaggcagcagtgggtgctgggagtggggctcgcaaggctctacaggggctccattccctttgctgagcactggtgatgctcggggaggtgatgggggcgctatgaacaatgtggccggacctcgggcagccagggaggcctagaaggctgtctgctgggtgtgggaggccttggagccccacaagggcacaggcagggggatggggcatggtgtccagttggggtttcaagagacccctctggcctcctgaaggagccaatggcagggcctggaggtcagggctcccccacccccaacacaaacagggggcagaggccatatgggttggagaggacctgggaccagtggttggtgattggatgtggcagccgaggggaggggacagtccgagctgaggcctgggaggaagaggacgtttgggaaggctcggggattgaaaacagagaggtgaaacttgagaggagaggtacgtttgggaagaggccccaagttgagtgctcgaatatttatgaggcctcctgggtacaggccctgccactgtgctggggcaccagtgggggagacggagaccctgcccgcatcccagccttgtgctccctggggcaagcccagtgcagggacctcagagggcactgggagggacagcatggaccctagatcactacctcccacctggcagtgtggcctgcggccccctctgcaaaggaggctgtcgggccggccccgaacccctggcccacccaggccagcaggttgtaggtcacatggccacacccctggagccctgaatgaggtgttgctcagtccccacgtgctccccccacgttatcactggcccccatgagggagacagtgcagcagagagaaacggccacatcccacagccacaggtgaggcctctaggtcaaggcctggctgggagcccaggctgacctggccctggggcacggtgccaggcctcaccccccaaggtcattccatagactcggccccgagcctccagcatcccacatagccaccac

SEQ ID NO: 108181 - DNA, 1074 bp, Homo sapiens
tgctgttccccagggccagactaacacacagtaggtgctccataagtgtttcttgaaaggatgtttggagggatggatggatggatggatggatgggcaggaaattatagacgggggcaaactgccaaaggctacagtttagttggcagcaaaaaaatcgtttctgagaacgcatcccactgaatttagaataaaagccaaactcttagaacctatgtagtggcccttactgacctctcagacctgatttccttcttcctcactgcagccacaatgactctcttcttgttccagagtgttcccaccccagggcctttgagtctactgtcccctccaccccgaatgcattctgactccactcaagtgtcactctccaagagccaagttgctcccctgtcccctgctcttctctgtctatgcattcttttatagtgcttaacacagtctgaaatagtctcgcccctgtgtgtgtgttgtctgactccccctctagaataccaggatccttggaggtgagggagttcctgttttgcttgtggctacagctcagccactggaatcatatctgacaattggttggcatcagtcgcaactctgggaatgagggaatgaggactagagggggctggacgggcccagccacctgccttcatcattgtcatttctctttatcactacggtaactcctccttcccctcatgactttggaagtcattcagcagccactccagccccaccaacctgcccctatcccagaggggcctgggatggagggagagaaccactgaggcccctccacatccctgcacccgctgtgcccatgggggcggagaacacatctgacccggctctgagggagccgtggcctctctagggagggctggcctgctggtgagacttcactcataatacaagataattataccagagttgtcatgaggcggtggtgattaattgctgtgcgtggggcacggacggacagcgaggtatagagagtggagagaaggccgcagcccagctgggcttccaggtgggagctcagcctccccatctctgccgtggaagggactcaga

SEQ ID NO: 108182 - DNA, 1030 bp, Homo sapiens
ggtcttgaactcctgacctcaggtgatccacccacctcggcctcccaaagtgctgggattacaggcatgagccactgcatccggcctcattatgatttctaaaagtcagcaactccgagggtagacaggagtgttcaggaaagggcgctgccctgggagggacagggactggaagaccagagggagggctgcatgcgtattgttacaaataaatgcaatctgaatggctaaaaacaaacaaacaaactatacaaacacacaccaaagaaaaatccactttgtagtgggcactgttttgggcaccagcaatatgatagtgataaatgctatgaaggaaataaaatgggtgatatgataaatggatgtagtctggagggtcaggagggcatcccttagaggagactcctgagctgagacccaggacagctgagagctgggcagggtggtgtagcagggtgtgggctgggtggccataaatccttcagcctcttttctcttggcctcttcctcaccccatccaggcctctggtggctgcaggacctcctgcctgcaagtcaggtctcatgcatacctgccctctagagcgctccagcttctcagcttccagcttcctctcccctaggcttgggtcctggtgcctgcaatggccccagcactcatgccccctagactttgcgtcaaggagctgtcatactcatgccaagctcctgatgggtgtctgacccactcaagcctccgggctttctgtttctcttctctgagcctcacattgctcacctggagaatgaggaccataacgatatcaggactggaaggagctcagaggtatgctgcctgggaaagcccctggcgcagcaccggctcaaggagcaggagtctcttcctttgacagataccagggtgacaagtataatgctttgatttgaactaagagtagctgtttacaaagtgctttctttataaatgtccatttattcattggttcagactgcagatcgaggtctcagcagtctgaaccacctattgggt

SEQ ID NO: 108183 - DNA, 1615 bp, Homo sapiens
aaacatttgttgaatgttgaatgaatgtgactataccagtcctcaatgtgacgtacagtaggtgacaatgcctgtcacccccccttcccttgccattgatcttttgcctaattgaatccctggaactgatttgacaagctgcaaggagagaagtgatgttcatagaggagctgctatgtgccaggggcatgataggtgctgccaagtagtttcatactcagtcctcagagtcctagaatggagatgaggcccagggatggtgcagggcttgttcacaagggcgtaagaacggggcttgtgggtggtgaagttggcatttgaagccaggcctatcttcctccatagccagccctgctgccctgggacactgtgctgttggctgcatttgtggctgatacctgtggagctctggggtctgtaggcctgggagatggtggggcctgctgagtggggtgggaggacagctcacaagtcctgccctgctcttgcctcggccaggtgagcgaaatgcagaagctggatgcacaggtcaaggagctggtgctgaagtcggcggtggaggctgagcgcctggtggctggcaagctcaagaaagacacgtacattgagaatgagaagctcatctcaggaaagcgccaggagctggtcaccaagatcgaccacatcctggatgccctgtagcccctgcccgcatcctccagggggcccagggtgcctgcactttgctgtggcaggcagattgggtggtagtgggaggttgtgcatggaggccagtgaaagctgacatctgtaaaaggccttcaaggaagagaaaccaggccctgcgtcaggcagtgtgagtttgccgtttgtccttaactttctttttttttttttttaaaaaaagaaaactttaaaaaaactcccattaaaaacaaaacatctttgtgttttgaacaaaggaattttcaatatttgattggtattctgttctgaagtctaagatatttttcagcctataaagccccctgttttatgcccttctaattctgatgtttgggtattgtgtgagtgcatgtgtttttttttttttttttaaagcgtgtgtgaacaaatggaaataaagcagggactgtgaacatttgtttttggtctgttgaagatctctcataatttaattcttaattttgggaatagtgcttttatcaagtgctttttattcattaaataatggatttgcttctcagcaggtttgcaaggcaagcatttacattttacatattagaacactgagttattctagtaccagagtgttgaaagtggtgccagagtgttgaaagagttgacgtggcttatgtcacagaatggagtagtggagtgaggcctccatttttgtagtttttgcatccttcctgtgagtcatgttttactcagcatcaaggaaacagtgatgagcaaagcagagatggttcctctcaagaggcaagggattgaaaggtcatgtggggaatcgacagtgccagtgagtgccaggctttctgcccctctttcctctctgcaggagttcgctccctgtctccacctaatgaattcctgctcagcctcaggatgtgttacttaaggttactgtgtcagg

SEQ ID NO: 108184 - DNA, 1117 bp, Homo sapiens
ctttttttttttttttttgagatggagtttcgctctgtcgcccaggctggagtgcagtggtgcgatctcggctcactgcaacctccgcctcctgggttcaggtgattctcctgcctcagcctcctgagtagctgagattacaggtgcctgccaccatgcccggctaatttttttttctatttttagtagagatgggatgtcaccatattggtcaggctggtcttgaactcctgacctcgtgatctgcccaccttggcctcccaaagtgctgggattacaggcgtgagccaccaggcccggctggtctgctcatctttatggccctagttttgcccattgctgaacctggtccagattaggtatcagtaggggtttgactttgactttccaagaaggtggcatttcatttttggatggctgctggtggcagatgttctttgggagataaggtcagagtggacccaagcctggatgttgtcacacatggtgcctctccttccttcaggatccagccgcagaagccaggatgaaggtagcctgcatcacagagcaggtcttgaccctggtcaacaagagaataggcctttaccgtcactttgacgagaccgtcaataggtacaagcaatcccgggacatctccaccctcaacagtggcaagaagagcctggagactgaacacaaggccttgaccagtgagattgcactgctgcagtccaggctgaagacagagggctctgatctgtgcgacagagtaagtgtcgggcgtcacagagttgcttggcttggggccctccatgcctcactgctttgtctagggcagacactgggcagctctcttgcttacctgcatgcttgtgggataagactgcatctggccataacttttcatgtggtgccagtccttgtggaggaaaaagggatttttggggtcctggtgtgagctgggtgtggaggaagctctgctagcctcgtcagcactgcgtgcccttgtggccagtattgagagtagctgcatcctctcctggaggccagactgttctaggtcccaggctgcttatgttgtggtaaaatgaacctagactttagaatcaataggtttgaatccaggctctgattc

SEQ ID NO: 108185 - DNA, 6019 bp, Homo sapiens
caagctctgcctcccgggttcatgctattctcctgcctcagcctcccgagtagctgggactacaggcgcccgccaccatgcccagctaattttttgtgtttttagtagagacggggtttcaccatgttagccaggatggtctcgatcttctgaccttgtgatccgcccgcctcggcctcccaaagtgctgggattacaggcgtgagccaccgtgcccggcctaaaccatattttttaagtgaaaatttgaatagaaaaaggaaaagcatattcatagtactgcgccacccaaacacagctgtcattttgatctatttctttgttcttttgtagtgtttttaaaaaacattttatcatattgcatatacagtttttaaatcttttttgtcccataaatgaaatcttataaacttttttttttacttatgtatgatagaaggggtcagtatgtgaacaaaggtattataccttcctcccatgatcaaaatacactgacagatttggaagatacaataaagtatatcaggtagaaaaaccctttctgtaaccctaccacctagtaatttgatgaaatttcttccgtcttctatctttacttttcttctctgcaaaataacttgcaagattatttttacctttgtattaagtcttcaatgttcacaaaggtatttgcatttcccttaattatttactgtttagaagaatttgggtagttagcacccttgattgagaagtcgacgcaaacctttgtggggaaagttagacttttttaggttgtttatgtttggggactattttaattaagtagtaccatgtgaggatcttggtgcaggaagtcttctgtgtttaggatcatttcctctcagctggttcctggagttttagaagggcatatccactctcttgcagaccatccttcctgctgctgcccaggatgtttattaccgggatgagattggcaatgtttctaccagccacctccttattttggatgactctgtagagatggaaatccggcctcgcttccctctctttggcgggtggaagacccattacatcgttggctacaacctcccaagctatgagtacctctataatttgggtcagtcttcaatagtaagggagaaactaaccttttctttaatttcgtgaatttttttctttcaattatcagtctttatagatggggtgtgttcatttgtcattctgaggaaggctggttttatcaggaacaactttttataagtgggtacgagttagtattgtaaaagtaatacatgcatttgatagtcaatccgaacagtatgtaaaagtcttcttcttacttgcagttctgtcatcagatggaaccgctgaaattcctttaaatagtttttgagttatttaaaaaatgaaaattcagagaataataaaaaacacttttatatgaacacccagaactaatgattgaaaacattttgtcatattttctttcaagtctttcttttttttgagacggaatctcactcttgccacccaggctggagtggaatggtgcgattttggctcactgcaacctccacctcctggttcaagcgattctcctgcctcagcctcctgagtagctgggattataggtgcccgccaccacgctcagctaattttttgtatttctagtagagatggggtttcaccatgttggccaggttggtcttgaactcctgacctcaggtgatccacaggcctcggcctcccaaagtgctaggattataggtgacagccaccatgcccggccaagtcttttttttaaacctttttactgaaaaataagatacagaaaaccatacaaaaaatgtatagctcagtgaattattatgaggaagaccttgtgccgctccccaccccctcctgtcaagaaatcaaaatttgctagctactcaaaaagtgttccatgtacctcttccttctcaaagtcattgccccgactttgagtaatcactttcttgaatatctttgtagttttatcacccaagtgtatatctctacatactataccttagttttgcccttttcaatctattcaatttgccttatctattaatctgcagttaatacctacatctgtttttcttggcttgatcttcactcactgcaacctctgcctcctaggttcaagcgattctcttgcctcagcctcccgagtagctgagactacaggcacccgccatcatgcctggttattttttgtatttttagtagagatggggtttaactacgttggtcaggcaggttttgaactcctgacctcaagtgatctgctcgccttggcctcctaaagtgctgggattataggtgtaagccactgtgccaggcctgttttttcatttaaaacttttctgggaggctgaggtgggaggattgcttgcactcaggagtttgagaccagccggggcaacatggtgaaaacgggtctctacaaaaaaatttttaaaaatgaaaaattatctggctcacacctgtagtctcagctactcgggaggctgaggcaggagtaacacttgagtccaggaagttgccctttagcctgggtgacagagcaagaccctgtctctaaaaaataattaaagttgcttttctttgcatttatgttaaagcattattatttgttgttattcactctaatccatcttaattagccttaattcctaaaatgcctcttttatttctaaatttttttcctgatttctatcatttttctgaatttttcttttttttttttctgtctcactttgttgcccaggctggagtgcagtggagcgatctcagttcactgtaacctcccaggctggagtgcattggcgcgatctcagctcattgcaacctccgcctcctgggttcaagagattctcctgcctcagcttctggagtagctgggactacaggcatgcaccactacgcccagctaattttttatttttagtagagatggggtttcactatgttggccaggctggtctcgaactcctgacctcaggtgatccacccacctcagccttccaaagtgctgggattacaggagtgagccaccgcgcccggcctgaatttttctaattattgtttacattgttcttgcatgacttacatgattttattaatacctttagcttgttttggaatagcaggagcagtctcctggttcgtttttatgggcgtcttgctggcatgttttcattttcttacaggggtgttcttgttttcatcccatttttcttatataacttaatcttttttttttttttttttgagatggagtcttgcactgtttcccaggctggagtacggtggcacaatctcagcttactgcaacctccacctcctgggttccagtgattttcttacctcagcttcccaagttgctgggattacaggcatgtgccaccacacctgactaatttttatagttttagtagagatggggtttcaccatgttggccaggctggtcttgaactcctgacctcaggtgatctgcctgcctctgcctcccaaagtactgggattacaggcatgagccactgtctgttgatcatttttaatgtgacctttccgaaggagggatggtttagagtggcttttgtaccttcccagatctctgctattttagtgcaaaaacatgtggcttgctttctgagctttcctctgtgcggtttttgagttccattgtccctatcatgttcatttttgattgtgttgagcagtttctcctcactgtagggcactgtcccagaaggggagttctgctctcagggactagactgctgcagactcgtagaccttctgcaggcccgtttcactcaccattaggcagggcacaactgctccgagtttcagccactcctcacactggcctgctgtgctctctagggaatcccggttgtgtgttttggggttctgctgttctcaagcccatcagttgccctgtttcttctctctgcgttctccttcacagacactgataacgtgaaggtcttgtggctgtcggtgttttgacccccatccctgtctctgtgttgtggggttcagtagagatactttgttgcctggttttgttgtaaacatggtccgtgggtttttggttttgctgtctacttgctctgtctttatgtgagcccctgtacttctttctctcctgcccatttgatccgttttccacatcattgcttatgcttgcttgatccttcaggtgaccagtatgcactgaagatgaggtttgtggaccatgtgtttgatgaacaagtgatagattctctgactgtgaagatcatcctgcctgaaggagccaagtgagtgtgactgttcctctcctttgcacccgatttctctggttgtacccttgtggtaccctaaggagagcctatgttctaggggcacagtctttgtgtcacttttctctagatttactttatcagggaacatctacttggcctctcttgagtcacatgtccactctgactgccagaatgagagaccccttgattttcttcctgtggagaatgttccatagtggaagagtagttcctcatgcaaatccaggctgtgctgtttaccaggagaagggacagtgggcctgggcagacaaaagcaggacatgtcccctgccccgtaagaagctcttattcatgtgaagagaaagaacattcagaacagctcgtgaggcatctgttcaagcctcccagggattcactgggtaggatgtacaggagagctgtgtcaactttgtgactccaaggagtggggccagtactggtgagaacttgggagtggaggattcagagggacagttgttgccccagcagacaagggctttaaaacaaagggctttctggcactggctcccctgtctcaagagagtgggtgttctccatagctgagaagggagcagagtggaggagtgtgaatttagtgatcttgaaaggctccttagccttggaattctctgatcctaaatctggtttattgatgtagttggttggaggctatattttattcccatcttcttccaggaacattgaaattgatagtccctatgaaatcagccgtgccccagatgagctgcactacacctatctggacacatttggccgccctgtgattgttgcctacaagaaaaatctggtagaacagcacattcaggacattgtggtgagtggctccactgtttgccttccatggcgtcttccccagacagtgggctctgggggccaagaactcaccttctgtccctccttgggctggagtcatttgagctcatggcgtcttctggtcttggggtggggcagcaggtcgagtgggccagcctgggtgagtctaggctcccatgtccctacagccccgatgaagcctgtcctcttgcttctcccaggtccactacacgttcaacaaggtgctcatgctgcaggagcccctgctggtggtggcggccttctacatcctgttcttcaccgttatcatctatgttcggctggacttctccatcaccaaggtaccgtctctgccttcttcctgcttgtcatttgtgtccttggtaatatttcaccagcttgagcactgatcctcacagtgagcccagggcaggacgccatggccaaaagacccctgcctgtgctcatccttgccggaagggtactttgtttttgttgcttgtggtcactagcacaggaggttaagtccctgcttctgtcttgctttggctctggagacagagtaacttggatgctcagttgaggtaggaaaaacatgaaaagattggtgcttatttagctgttttgcttcttgttattcagtggaacttggaggtggaagtcccctcttagtcccctctccctccccacctcccccttggtgattccttgttgggagcagaaaccactgacctggccctgtcagcaccgttctccccactcccactctctgctccctgacaggctccgtggctccttggtcctccccaggctgcactgctgttatcctcaggtcatcctc

SEQ ID NO: 108186 - DNA, 1292 bp, Homo sapiens
ggaggctgaggcaatagaatctcttgaacctgggaggtggaagttgcagtgagctgagatcatgccactgcactccagcctgggcgacagagcaacactctgtctcaaaaaaagaaaaaaataatttaagtcttctaagacagatatgtagctgtttctctcagggctgtttataaatagcaagagtgtaaaacagtgtaaatgttcaacaatggaacaaaagttaaaaacattctaataggtaatcccagctattcgggaggttgaggcaggagaatcgcttgaacccaagaggtggaggttgtggtgagccgagatcgcaccattgcactccagcctgagtgatagagtgagactccatctcaaaaaggaaaaggtgatctcttaaagataattgcttttgtctttggttcaaaattttgttgtgactttgaactgctactactgttttcagtatcctcagtctctcttacttctcttgccttgttcttcctttagtgggagattcttcacagtcaagctcccagttgctcttgatcctggggccaagatttcagtcattgtggaaacagtctacacccatgtgcttcatccgtatccaacccagatcacccagtcagagaaacagtttgtggtgtttgaggggaaccattatttctactctccctatccaacgaagacacaaaccatgcgtgtgaagcttgcctctcgaaatgtggagagctacaccaagctggggaaccccacgcgctctgaggacctactggattatgggcctttcagagatgtgcctgcctatagtcaggtaagctcaggtggagtccagcccatccctgtctgcttcagagaatgtcttgcagagtgactactggttgataggcttgggtggtgtggggtggatgaaatctgcagtcatttctaaggtcatcccaaaagtgtttaacctgcagtgaaatgactccatgggggtcttgtttctccttgggggatcacaggtagaggctaggggtagcatttggagaggtggaatgggtgttggagatggaagcaaggcattccacgcagaggcagtaagagggacaaaggctttgagatggtgtggctgggcagatactggggtagcaaagctgttggagtggttgagggccttccttgaatgttgggccttggttggaacttgaagagagagggagcaattaaggcttacaaagattttgttactatggcaaatcgcaaacatgccaaagtacaaagactagtataaactcccacacacgtcacttagattcagc

SEQ ID NO: 108187 - DNA, 1891 bp, Homo sapiens
cgggcgtggtggcgggcgcctgtagtcccagccacccgggaggctgaggcaggagaatggtgtgaacccgggaggcggagcttgcagtgagctgagatcgtgccactgcactccagcctgggcgacagagcgagactccgtctcaaaaaaaaaaaaaaaaaaaaaaaaaaaaaaaaaaaaaagtaagtacactcgcactacgaacagaaggatatcccgagcagctctgagagggctttagcaatcaggcgccgggtcggcttcccggttgccccggagacagggtccttccttgttcggcgccgccatcttgtgtcaccagcccttgcccaatgaacggctgctcagtggcgggagggcgggctaccgcgcccgggccctacccgccctggcgcactgctcttcccggtcatggaggcgccagccgccggcttgtttctgctcctgttgcttgggacttgggccccggcgccgggcagcgcctcctccgaggcaccgccgctgatcaatgaggacgtgaagcgcacagtggacctaagcagccacctggctaaggtgacggccgaggtggtcctggcgcacctgggcggcggctccacgtcccgagctacctctttcctgctggctttggagcctgagctcgaggcccggctggcgcacctgggcgtgcaggtgagtgtgggcgacccctcgccgccgctcccgggacccttcccgcctcccttcctggcggtcccccgactccgcccgcgcccctctaggcctcaggaaatgcggagacccgggcggcgggcggggcacagggggtccgtgggattgcctcggggcccgcgaggagtcctgggtggccaggggccccggcgcctccgctgcccccggtgcgcgcccgccctcctgcctgggccacgtcagcaccggcctgcccccgcgcgggtcgctgctcacgtgggcagctgctgggatccgcggccgaccagcctcggagcttgcccctgtttgggccgttctcggcaccgctcgggagacctcgggccggtagaacgcacctcccttccgtaaggcgagcgcggcagcccctcggcccggtgccagcgggcgccagacttcatttctcacggcccgacgaggtggctcaagtagaggacaaataaatgaattaaagtgaatttcattctcttaattcagtatctggtccgttgtaggtgcttctttctagacatagagaaccatcagaaatgtaacaggtttcgcatttttaagttggtaatcacttgaaatccctatgaatgtgatgcattttaaggttcctagtgaacgctttctaaatgttaaaactctttttaaagttagttttaaaactcctgcacgtaatataagttctcttatgctgtacagaaaaggaaagtccaattttctcccttccccctgctgcttctcattcttacacctcggcaataaatggctgtgtttggcttaaatgtttccaggtatttcagtgatcaccaaagaaaatgttgggtttgggagtaaagggaatgtacatacacagaggtttggtttttattactattgttgttaaacaatttcattaaatgattacctaattatttgttgagagaatagtcattatagtgtcacatttcttctaagcacacttcgttctctgactgaatatggagctataaagatgggtttatagagattacgtttctgaaatgactcctattttctttcatgcgttgtccatgatgaaataaagttttactcaaaggcttgtggaaagatagatcaaaacttcatgtaaatttgccttgccatctttgaatgtcttgaatgttaaatcccgttctttatagaagccagttgtgatttaatgagcttgttacagtat

SEQ ID NO: 108188 - DNA, 1049 bp, Homo sapiens
cttttaacagatcattatgtttagttctttgaacaaccctctgaagtaccactgttgtgcccacttaacacagtgggaagttgaacagagaggctaagccatttggccaaggtcacacagctaataagttacgaagcagagatgcaagcccaggcagtcagactccagagcactgtattaaatttctaggttgtactgctttcacgtacccctgaagcttgctggtttatcttttgctacctggtatctgtacctcagtgcctcccaccacctcctttctttctattgatgtcatttgaaagtctttctggtagcatcagttctcccttaaagccataagaaatgccgtttgcgacttatcacacatattgtggtgtagtgtcaccgaattaggagctcttgaataccggcagggtacttaactgaggtttgaaaaattttgcaggtaggcctggcaaacctgcctagtgaacctttcttacaaccttagttgatggctgtccagccggctggttcttccctattcaaaatactgcatctttggtttcctaaagaacggactcttgtctctttcttgtgacttaagcagctgatgaagcacatgatttctcatccatggatgaataaagtctcctcttagtgtgtttctctcttcaaacttgggaaggtttgttcagatttgagtttaaggactggaaggtgagttaggagtacttcttctgaagaagggaccggctaagttaaagcttagcgttcacaatcctgttgtattcatatttgtcttttttttttttaactttgctacctagcctaaaatatttaagtgagtaataagtactgtggctttatataatgtttgagtttagagtaatgataggcacctttttattcattcattaagtattttgagtatccattgagtatcagcaatgtatcaggcattgtgggacattgactcagggagataggcgtggttcctgtcctcaaggaatttttaaaaggtgaatgatcttggccagaaattctgttgtggaataatttggcggtag

SEQ ID NO: 108189 - DNA, 1480 bp, Homo sapiens
caactgtgtctaagctcaccaaccctgtaatcagagaacaactctttatagtaaagtgtggctttgaatcagttttctgaccccactgccaagtgaagccaaaaaattttggttatttgattagcttttaatatgtcttcagctgggcacggtggctcacgcctgtaatcccagcactttgggaggccgaggcaggtggatcatgaggtcaggagatcgagaccatcctggctaacacagtgaaaccccatctctactaaaaatacaaaaaattagccgggcgtggtggcgggcgcctgtagtcccagctactcgtgaggctgaggcaggagaatggcgtgaacccaggaggcagggcttgcagtgagcagagatcatgccgctgcactccagcctgggcgacagagcgagacttcttctcaaaaaaaaaaaaaaaaaaagtcttcaaagggatcttcactaataacgtttttgctcttactttggcattagactttgtaaacaaagatgtagcaaacacagaccacgcaaatatgacagttgtcttatgcacattcctctctggcatttgacacaaatattttagtttttcctatgataaagtatttatctccccattcatttaattcaacaaatacagctgagatagatttgaccagatgttggacttggagctgtaggcaggcttttcctggggaggtaaggattagaagtcctcctgaataaggctaaacagaggttccccttggcattaaatgtcttcttctgaaggcgactgaaactcgagaaatgaactccccgcctccccccttattttttggctattggcttgctgttgatgattcttacctctcatgtaaggaaggctaccattgtattctcaggcatccattcctttgtgttaccacatgcttatctgttaatattatctaatagttctctatgcttctctgtctgcagtttgctgcagaaacatttttgcaatatgctgatcttttcagttatttgctcttaaatcttctattctgtttttccccacactccatatggcattaaagacagaaaaatagtttgtgttttaaaactttttttttttttttagacggaatcttgctttgtagcccaggctggagtgcagtggtgccatctcagctcactgcaagctccaccttccagattcatgccattctcctgcctcagcctcccgagtagctgggactacaggcacccaccaccacgcccggctaatttttgtatttttagtagagacggggtttcaccgtgttagccagattggtcttgatctcctgacctcgtgatccacccgcctcggcctcccaaagtgctggaattacaggcgtgagccaccatgcccagcctaaaacttatttttaaaacatttcttaatggtggtggtcactgcgatttgtgaatcagaggtaaaagtgatgtggcgagtgaaatcaaaacaagtttttta

SEQ ID NO: 108190 - DNA, 2478 bp, Homo sapiens
tgtgtctactgaaaatacaaaaaattagccaggcgtggtggtgggcacttgtaattccagctacttgggaggctgagacatgacaatcgctcgaacctgggaggtggatgttgcatgagaatcgcttgaacctgggaggtggagctgagatttcaccactgcactctagcctgggcgacagaatgagaccctacctcaaaaaaaaaaaaaaaaaaaaaaaggaaagaaaagaaagaaaggaaaacaccgcttcagtccagtgaatgagcagttagtcttccatagttgcccatagcttacttttatagtctggactccattcctggtggtggaattggcctgtgaaagagtaatctgtggggtgtagatctaaccatagtagatggtgctttcattccaactctcttttttggtcagacacttgagcccttagaatatcacattctatcgtacatatgctagaaataggtctgttttgcatattctgactgacccttcagatattagtgggcctttcaccaccagccttttggctgcgtgatcttcagctttgtgtatccattatagaccttagtttgattgaaataatattacatgactttgcctgtcttccaactctaagccacttgaggacaaggatgaatcattattctagaatggatcttgaaatattactaagcttttgtttaaattttttccagttctagcttttcagagtaagttaccgtttatagcatgtaagttatgcttctgggtcagtggttaatatatgtgggtttcctgaatgatgaactatgtgttctgtgttcatttaacaggtttttcttctctactataagaaaacactgttggcccctgtggagaattattcaggaataattgtaaatacagggcagatgagagttacttagtttagagttgttcaatgcctggggtggtgaggggcatgttgagtggatttttaaataaattggtaggcaggtgagagttgggaaaccattatagttggaaagaatggcataagtcaatgaatggatgtagggattgcagtagctctaatttgggaatgactgtatgtatggaaaccagatcctggtagggagggcaggcactgcaatcccttgttagaggatttaagttcaaccaagtggcacttcactctgtaatgctggaatagacacagcataatcctgtcacttgaacctcacaattaagtcagatagtaccccagttatgggtgaggaatggctttgatgttgtaatttgtctaaagaaaccatacattaagagcttagtgggctaggattgaaatactacaagagttgtgcttaaactttcagagagttgcttcttcagaagtggctttaatgaaaagttaaacatgggagctggttaggggaggtgggatagaggaagagagcagttagtttggttttcctctttagccagcccattgtgggctcctcttagcaatttatgggcagtctgttttactggttaaatgcctgagataatctagggttgatatcaaactatcgaagatagttcttatgtaactgttttactagctatctgctttccagtttgccttaccaaaaagaaaaaaaggcaggaatcatcctggtctctcgttagagactaaacttttggcttagtacctgggttcagaaagcttgatgacagtggtgcatcgtattgaagaatctattgatccaggagtgaagtcctcttcacaagaattgccttccaagacactcttctttgtgtaagttgcctttgccttttccctcccagcaggaatgcagtactcagagcaaagtacataaacaatgtctttacatttcatagaggttgttaccttgtttaaacttcacaatttaagcagcatttgatttgtctctttttttttttttagatgaggaaatggactaaaaggtcatgctcagtatcttggagccactgtgtgttagtgggactgggactagcatccagtattccaagttgacagataattctttaataatggcagaagaataatagcatcttctgcggaagaacagcctttgtacattttatcattcagttttatttaaatgtttttaaaagagggatttcagactagtctgtttcttttgaaacatagattttcaggtggtgaatcttcaagcactatcagacagaataagctaggttatgctgtagtaaccaataacctcaaagtggtcaaaaagagcatgggttttctagaggctctgcatcattcttactccaaccaaaggagcagccgtgataggagtattgatggctgtcttggcaaagggaaaaagaactgttggaggcagttaaattccagcacgtacagtttaaatccagcacatacagataaatttaaatactgttaaataaagttatttaacagtatttaaatttaaaaaaatttaaatacagttgaatacagttaaattccagcacaggaat

SEQ ID NO: 108191 - DNA, 1029 bp, Homo sapiens
ggcgacagagcgagactccatctcaaaaacaaaacccatggttgtgatcctaaaaccggaaggttggctttccattgtcttgttttggcaatttctagccatctttctttccccagtgttcagtataattagcagtcttcctgagaatttgggagcatttccttctggttacctacaatagggactgtgatctcaagttccttaagcatctttgaatgggacaaaatagaacctggcctgctaccttgcacatgactagctatggagccttagacaagttgtgtaaatctcgaattctcaggaagaaaatgccatttgagctctagctgaatggagaaacactgcacatgccagaaccgttctccctcatggtccatccaggctgatgcccgcatgggtggagatgcttgctgtcttcctccctgtgcccttttcccagcctcacaagcagcgtgtgaggtcacctttgatggtgccacataagctccatgggctggctctaagggacagcactgtgttcatggcacaaaggcctgctgtgaccagtagtaacagcaaaagtgactgtaccttctgatacttagccaccccttcttgtgacacacatcagcatgcctctgttgtccatagtaggctctagtaggatgcagggctgtcagcagaatttattgaaacctggaaatggcggggtggggggtgggggaagtgcccaggcattctttatgtcttgtataatctctctagattttgtttactctcttcaactatttattaccaaaggatcacaggtcaccaagcatgaggaagtactgtctatacgttttaagtaagagtccaggtaacacttattgttgttgctgcttcagagaattctccttggccagaattgtcagcccaccttttcttgcttagtggtatatatgaggtgtcataatgggcaagaggttcaaagtcttcatttgagtaagagagtgtcttgtgctaagcatctgcagccctcaggggaacctaaaagaaggcactctcaca

SEQ ID NO: 108192 - DNA, 1039 bp, Homo sapiens
ccaatccaatccatcactagatgccatccacctttactttctccccattctcttctgctttcacactggtctagtgcagtcctctcttgcctgaaggtggcgcagcatcctcactgtccaccgcagggtctcctaccctccccactgcaggcaggcagggcgctggctctgcaggatgaacactgctgcttagaaatctccacaagtcaggcttctcattactctgtggttttgggaccttagtacggcccactgtgtcctgcgtgatcaggcccaggcacctcattttcatatccccctccaagtaaggccttgcatgtgcgttctttaaggaaaactgtttgttcccttttcccccttcatatccaggttcagttcttcccagaggaatccttccctaattctcccaaccaaggtaattacccttaaagtaaacttaacacgtcttgatcacagtagtattttactttttgcatttggtatgatttctccttatagtctcgtatctacttttgcccttggtatatgtttgattaatatagtaagattaataacacaatgattagtagtcctggggcttaagagttctattcatggcatgattttttttttttttttttggagacagtctcgctctgtcgcccaggctggagtgcagtgatgcaatcccagctcactgaaacttctaccccccaggttctagtgagtctcctgcctcagcctccctggtagctgggattaccaaatattggagtagagcttcttaactctgtagaagagagaacagaattacatttttgcatctgggcacagtggtgcatacctatagtcccagccactcaggaggctgaggcaggaggtcacttgagccacaggagttctgggttttagggcattataccaattgggtgtctgcattaacttcggcatcagtagagtgacccctcagaagcaggtgaccaccaggttgcccagggagggtgaaccggcccaggttgcgaatagagcagatgaaacatctctcctatgctgatcagta

SEQ ID NO: 108193 - DNA, 1023 bp, Homo sapiens
agactagattaatatagtacataaaaatgtcaattagtggtaagtgctctgaaggaaaagcaagcagagtaacgggatagagagcaaatgaggggttatgctgctttaaataaagcggtcacttctttgagaaagtgatactgaagcagcgacctgaatgaagcaaggaccaagctgttgagtaagttggagcattagttcaaattgccaatccattcaattgatccaccacccaagtgagagaatacattctctccaacagcttgcaggggcaggatggccctgctgtgctgttctgcctcgctcttgggtccagagttttggtgagtgatactgttttttatcagtgccccctggtggaaggaagatacctagcaggaaggttcagggccctgcactgttggggctgctcagacatttgtgcaagggaggtgttttgttttggtgtttccatcacactcacagtgatttctccttttccccctttagtttgaaggatgacctctaggaagaaagtgttgctgaaggttatcatcctgggagattctgggtaagttactcatgaatttgagctaacagattggcttagagctaagcctctctgctgtggagcccacactgtccgtgctgccacttcttgctttcatagtgaggcttagggccttacatgtttccctccacggcagaaatttagatgatcccttgttatataaccttttgttctctagtttttagcatgattttttatggggaacggatggctatttgaactcaactaaggataggcattttcatggaatcccttttctccaagctggccaggctggggagtcttccttacgtagatgtattgccattggcatctggcgtagcagatgtgctttttttttttttttttggagacagagtctcgctctgtcgcccaggctggagtgcagtggcgcgatctcggctcactgcaagctccgcctcccggattcacgccattctcctgcctcagcctcccgaggagctgggactaca

SEQ ID NO: 108194 - DNA, 1088 bp, Homo sapiens
ttaaagcagcaaattgtctgagtggtgtgtgtctgctgaaagccaaggtcttcctcctggtgttacttcatcaagctaaatagcagccactaaatggagaaacatctaagatagcagggatactgttggaatagcagaacagtcttaatagtgaagcttcttttagaaagcagtatatttgctggcatccttctagaatggaaaaaataatactaggctctaccatttgacctggctgtgccaaaacatgtaagcagcttttccacatctgccccacatctgtaccctatatttttacccagagagaaaacacaaaacttcaaaagtgtaatgctcggaaggctactggcattgccctttgctgtgagggcagtttcttgtccttcaggtcaggcagattcttttaaatgcttcaagtaattcgtgtcagtttcaggaccctcctatttgacttatacttatggtttttctccaatttcagagtcgggaagacatcactcatgaaccagtatgtgaataagaaattcagcaatcagtacaaagccacaataggagctgactttctgaccaaggaggtgatggtggatgacaggctagtcacaatgcaggtaagcacatgtcttggctgtgctgaccaggccttgatagttcatttagtcttaatctttcctcatgcatagacattttccttccctgttcttcaaatcttattatcttatttgtagataattggctgatactcagttaaatttgaatttcagatcaatagtgaatacttttttagtatacttctagtgtatctcagatacgacttgctaagacacactaaaaaattcttcttaaaaaaaaactcagatttatcctttcttgttttttgttgtttttggttttgttgtttgctaaatttggcaacctgcaggtctctgtcttgtgcctctcttgacatccttgcccagtgctttaggtaaacatctttgtctcacctcagtagtgagacataaactttatttttctgacttcctatttcatacgtaacttcaagagttgtgtgtctattgagccaatcttttttttatgtatcagcttat

SEQ ID NO: 108195 - DNA, 7980 bp, Homo sapiens
aatgttttgtctctcacagatatgggacacagcaggacaggaacggttccagtctctcggtgtggccttctacagaggtgcagactgctgcgttctggtatttgatgtgactgcccccaacacattcaaaaccctagatagctggagagatgagtttctcatccaggccagtccccgagatcctgaaaacttcccatttgttgtgttgggaaacaagattgacctcgaaaacagacaagtaagtaccaacgatgatagatattgtcacagacacctgctccccaggggccttgtgaatttggagggttctctgctaagctcacatggctctaggaggtgctggtgggagtcttcattaccatatgccagcccttcaggccaactgcctttaaggaccgggacccaggtgacctgggttaagtccccatcctgcccccagctggctgtgactttgggccattgtcttggctgtctcagcttcacttccctttctgcactttgaaggagggaattcggttttgtcattctcagtagtgccctcccagtacctccaggccatgcctggatctccatgtgtgcagaatattgctttgggctttgagtaaaattgctgtactgtagtttcaaataccatttctgttggaaacatagactctttgattaattacaactaggtttatttctgaccacagatcttttcttaagtgacttagtccttatctcttggctgaaaatgggctaggggttggggaaggaatgagaatgtgtgagtggcataggtgacatcacactagcagtaatggtgaagggactataaaccttaagaccaagctgctgggcatttcctgtcctgggatctctgaggtcccagtaaacactcttcatttcttcccggactggcttcttactccattcacaaatggcttttaagtataactgagggtcagaaggtatgagctgtagaccgagacaggctttgagctctctagctgaatcctagctatcctgagcatagctagcaggacaagtttggacgggtctgcaggtctcctccaacaccctctttccccatgtctgtgtcctcacctgtactacctgtagacgaggggccatgacacttcctggggaggatggagtcagtgctggctgcttctgtcatgagcctatgtgcaccctgcttcttctttcaggtggccacaaagcgggcacaggcctggtgctacagcaaaaacaacattccctactttgagaccagtgccaaggaggccatcaacgtggagcaggcgttccagacgattgcacggaatgcacttaagcaggtgggtctcccacagctgaccagcccactctggtgatgcctgaccactgacccagtccctgcctggcctcctgcccttaatcttcttccctaacccactcttttctgtatagccagaataccctatgtgttcatctgggaaggttatgacatgttctgcttaagcttccagaaatcccactttggggggaataatataaaagatgcagaggctgtgaagtctgaggctgcccttcttttactaggcttgttcttattttctttgctgtgattaggagatcaggtcactgggagaccccgaacagattgctgcttctatttaaggaggaaataaacttgaatatgaatcccagctctgctgcgtaccaatcgttatatctagtttgggcttaaaaaaaaattatggccgggcactgtggctcatgcctgtaatcctagcactttgggaggccaaggcgggctgatcacttgaggtcaggagttcgagaccagcctggccaacatggtgaaaccccctctccactaaaaaatacaaaaaaattagccagacctggtggtggtcgccagtaatcccagctactcgggaggctgaggcaggagaattgcttgaacccaggcggcagaggttgcagtgagccaagatcgtgccactgtactccatcctgggtgacagagtgggactctgtctaaaaaaaattaaaaattaaaataaaaaaaattatatctgaacttctaccccctcacctgaaaaatgggaatacctgcttttgcagggtgattatgaagattaaatgagacagactcttccagctctcacatactgactggtaacttttttccttaggaacagttaagtaaacaacacaaagaaggaagaagatgtaggaaaactattcaaggaatataatacctagaatttcttatttactgtttctgtgattagatacaaccactcatgcgagttgaaagtctgttttgatgtacagctctgttaggggcagtggtgattaaggcaggtcacgaggcctcatcagacagtgtctgggggtggtcagaggtgtggcaggtttgggaggatgcatagaacacttgaagcacatggtggctgtgaagggcaaggcagattctgctgactccaggaagccggctgaatgaaggtaatggctttcagcaggacaaagagttgtttgtaatggttgctccaaggaccagggaaattctggcatgggtggggtctgcactaagtgttccagaatgaaagggacagatctactcaatgaggaaattgttccacccagaatgccaggagagccctcaagtggtaaggagcagaccaagatgcagacttggccacgcttacccccaaataataatgtttgtgtttttcttaatgttcatataagggaatggaaatccaaatatgtgtaggaaagtgtttcccacctgttccctgttgcctggcatcactgtctgagtttttctcttccatcactactgtccctgttgtctttatgcttttatttttagagctagcccttaagaagttagattgttaaatcggagggtgtatcttattgtaagtcagggtgccaggttgctttccccaaggggaataacatttcagcaatgtgggcttgctttcttctacctccttgccagcaagcaataggtgtcacctgtcactgctgacattgccgatctttgggtgtgtaaattgccaccatcgtgactactggtccctctgagttcccctccctggggcttagccatttggattttctctgctgcacacagccggcacacagcacatggttgggcctctctcagttctcatgagctgttggtgaattgaagttaactctacttgcatcttaagtgacttttccaactctgtggtctttttaagtcctttgaacatagggaaaaagtaattttttatttggttatgtcattttaagtttctatgtttcctgtgtctacctcagatttttctgtaattcagctggaatttgttttggcttatggcagaaaagagagacttgcctttcctctcaagagagctcagccagttgtttgaaatcattcagctatgttacacaagccgtttccctccctgaatagaccgtggcctgtgctaaatgctcgtatgtgctgggatctgtttctggtctctccagtctgttctggtgatgtccatgccatgttcccttatctggactgtgttgatttgactgcctgatgaggcaagtttcctcttgccacagtcttttttttttttttttttttttttttttttgagacggagtcttgctctgttccccaggctggaatgcaatggcgtgatctcggctcactgcaacctccgcctcccaggttcaagcggttctcctgcctcagcctcctgagtagctgggattacaggcatccgccaccatgcccagctaattttggtaattttttagtaaagatagggtttcaccatgttggccaggctggtctggaactcacattgtgaaccgcccgcctcagcctcccaaagtgctggggttacaggcatgagccaccgcacccggcctgccacatttcttttttaataattttgtttccaccattttcctctcttaccttccacaccccaaataaaactctgttgagattttgattggaatttttttcttcaagcccactgttttttcctcattgattgcagttttgttgtggctgttgcattagtctgctcaggctgcgttaacaaaaccccacagcctgggagggtccaacaacagacattttgttttctcacagttctggaggctggaagtccatgagcaaggtgctggcacatgtttctggtgagggtgcttttctgggctatcttctcactgtgtccctcccatgccctttctgctgtgtgcacagagagaggacacatgagcaaggtgtctctggtgtcacctcttcttataaggacacgaattctcagatcaggtccccatcctgcaacctcatttaaccttcattccttccttactccaaatacagccacctgaagggttagtgcttcaacacaggaattttggaggaacacaaacattctgcccagccgagtgcggtggctcatgcctgtaatcccagcacttcgggaggctgaggcgggtggatcaccttaggtcaggagttcaagaccagcctggccaacattgtgaaaccccatctctactaaaaatacaaaaaattagctggcgtggtggtgggcacctgtaatcccagctacttaggatgctgaggcaggagaattgcttgaacctgggaggtggaggttgcagtgagccgagattgcaccattgcactccagcctgggcaacaagagcgaaactccatctcaaaaaaaaaaacaaaacattccacccatgatactattttaggtcttgtttctgttccttcagtaagattgattgattctttttttttttagagacagggtcttgctctgtcagtcaggctgatacgcagtggtgcaatcatcactcgctataacctccaacttctgggctccagcagtcttcccaccatagcctcctaagtaggtaggactacaggcacacccatgctataattgatttataatatgatcctttgcctttcacagtaaacatattcctaggtactggtgggaatataaaatgtcactatttgtaatagccaaaaagtaagaacaactcaaatgtccatcaactggtaagtgaataaacagggcagcttatccatgcattctaatattattcagctataagaaggaatgaagtagtgacacatgctgccacatgggtgctaagtgaaggaagccagttgcaaaaagaccatatgttgtacgattccatttcagtgaaatgtccagcccggatgcagtggctcatgcctaaaatcacagcactttgggaggctgaggccggaggatcacttgaaaccaggagtttgagaccatcttgggcaacatagcaaggcctcatctctactaaaaattaaaaattagctaggtgtggtggcatgagcttatagttccagctacttgggaggctgagactggaggattgtgtgagcccaggagttagaggctgcagtgagctgtgatcatgccattgcactccagcctgggcgacagagcaagactctgcctcaaaaaaaaaaaaagaaagaaatcacagtccactagaagaaatggggaaaattaaaataaataaataatgtttaaaaattaagtgtccagaataataggcaactctattgagacagaaagtagatgagtggttgctgggtccaggatggtatagaatgggggtgggaaggaactactaatgggcatagggttttttggggggtgatgagagtattttaaacttaatgttgatggctgcccaactttctgaatatactaaaaaccattgaattgtacacttcatggcatgtgagttaaaacccagcaaagctattaggagtgcaatggcaccatcttggctcactgcaaccttgacctcccgggttcaagcaattctcctgcctcagcctcctgagtagctgggattataggtgcttgtcaccatgcctggctaatttctgtatttttagtagagacggggtttcaccatgttcgccaggctggtcttgaactcctgacttcaggtggtcgacctgcttcagcctcccaaagtgctgggattacaggcgtgagccaccatgctcagccaaagctgttatttttttaagtatgtattcctagatgttttatacttttatagttattgtgaatggaatgatttttttcctagataacttttaatgaatagaaacagttcctgctttatctccaaattctagaacagtcactggcacacaagtgctcagtgtttaagtgacattgttttcctgcacccaaaagtagaatgctgctcctcattggaagcatgttactttagcaaagtgccactaaaatgaccatagtccatgtgctctgatcacttgtcacagatggtgataaaattcattcacagcttcctttctaggcctgcagcatttgggagacaaaactctgctaaacctttggaagaaaaaagagaccagaggccattggtcccgaaaagtggatggaagatagggaggtagaaggaatgttacaggctgagagggcagctcacactcagctccagccacttcacctcgtgcacacactggctgagggttgccagatgtttgagaaaagctagaaatccagaccattgttaaccattggcaactatagggaacatacagaaagcatctgaactggatgtggtagagctcccagatcatgatctgattgagaatgtccatgaacttctgtcctgattgctcagtgcagactgctgcttcttctggcaagactcctctcttcacattgacctggagttgtcacaaaatctgtttttctcttgctactcccctgagcatggcaccttctgccagagcgctcccttaactgtgtgggcaggctctgcttcacagctccccgcccactctgcccaagcagaagtgagcccctcctgggcagaaagtgcccgcaatgagggctgaaatgtttctattccctgagtaaccaacctttctctgtttccttgtccaggaaacggaggtggagctgtacaacgaatttcctgaacctatcaaactggacaagaatgaccgggccaaggcctcggcagaaagctgcagttgctgagggggcagtgagagttgagcacagagtccttcacaaaccaagaacacacgtaggccttcaacacaattcccctctcctcttccaaacaaaacatacattgatctctcacatccagctgccaaaagaaaaccccatcaaacacagttacaccccacatatctctcacacacacacacacacgcacacacacacacacagatctgacgtaatcaaactccagcccttgcccgtgatggctccttggggtctgcctgcccacccacatgagcccgcgagtatggcagcaggacaagccagcggtggaagtcattctgatatggagttggcattggaagcttattctttttgttcactggagagagagagaactgtttacagttaatctgtgtctaattatctgattttttttattggtcttgtggtctttttaccccccctttcccctccctccttgaaggctaccccttgggaaggctggtgccccatgccccattacaggctcacacccagtctgatcaggctgagttttgtatgtatctatctgttaatgcttgttacttttaactaatcagatctttttacagtatccatttattatgtaatgcttcttagaaaagaatcttatagtacatgttaatatatgcaaccaattaaaatgtataaattagtgtaagaaattcttggattatgtgtttaagtcctgtaatgcaggcctgtaaggtggagggttgaaccctgtttggattgcagagtgttactcagaattgggaaatccagctagcggcagtattctgtacagtagacacaagaattatgtacgccttttatcaaagacttaagagccaaaaagcttttcatctctccagggggaaaactgtctagttcccttctgtgtctaaattttccaaaa

SEQ ID NO: 108196 - DNA, 1097 bp, Homo sapiens
ggttcttattcagctccttgaccgctaaacagtgaccagtgtttccaactagccaagttggaatttactaaggctgggtctcgtttcatctacagccatctgctgggtgaccttatttagtgtcctggctttaaatatcatcaatatcctgatgcctcaagtttctttcttcagttcagatttctccctgaactccagattccttttgctttttcagagttgggggctttctctgtcacctgtgctggagtgcagtggtgccatcatagctcactgcaaccttgaactcctaaggctcaatagatcctcccacttcagcatccccagtagctgggactacaggcacgccctgccacacccagccaagattctttttttaatctacctttgtactcaaaagctgtactaagaggtctaacaggcatttgagattaatagatcccaaactgagttcctggttcccacccaatcctgctccttccaccagccttctttatcatagataatggtggctctgttgttccacctgttcaaacagaacacctggagtcaccttgtactcttattctcctagtccacttctaattccacagaagatctggttttctctacttttaggttcttagaatctgaccacttttaggcccttctgctgctactttggatcaggccagtgtcatctctcacagccttactgggattagagcagaaacatgggacatgatgcttagaatctcagattgtgtaggccagtggttgtcaccctgccctaagctggacccaagctattcatggagtgtcctggaactgctgcagggatgggtgggaagttgagtgggtgggatttgggtgcctgttttccctatcagcagtctcagtcagagccgcctgcttctgtctgttttacatatttggtttctgcactagatttctttgaataacaggttccacttttttagataatttacaaactgtttattgcaattgaactctcctcccctaaggcattgacctgatttgataacatcaggatctttctcccacgcccctgcaatctctcctgtgtggcaggttttctgtggttgtacctgaaggcc

SEQ ID NO: 108197 - DNA, 1044 bp, Homo sapiens
actgatgaaaatcgggaagaacctatttgaacaggggagggagatggatgtgggtggtggagcctgcacatagtttctgtatctcaggaaccttgtgaggtttgctttccagttccttcagtacgtcatgtcccgctggccagggtggagtggagcacatgtttttccttcccttttaactgatatttccgtgatgggagtgtgctaaaaattaaattttttagaaaatatttactatttttagaaagaagttttcccatttccagaagttagccaagatgaacttaatgaaatcaatcagttcttgggacccgtggaaaaattcttcactgaagagggtatgtatggttttctttaccattgccgatttccattgtaagggctatttggttgatatttatattagaagtgacatacataggagaagtcttcttgagggagaaatggtttccactcataatattttgctttaggtttcatccctattgccatttaattaaaaaacatccagttaaatgcttctcattgtatttgtggttcaggagcactttaaacatttccatactgttccaggtcaacacttccataaagctataataaaaatgaataactaaaaaaattagatggcaaaaagccaaggccacacaccatacaagcccatggagcatgtgttggttgttgtggcagtgtacagttgctcttagtgtttctaaaggttgagtttcaatttctgtactttggtaattgtaaacaaagagtgatttgtggaccagccacagtttggcacctgcatggtgaggcagcatttgacctcaggtccctctctcagagctgttggccggtcctccagccagggccttggtggagagttcagtgatggtggatggacagcaggtcttccctaatagtaggatcctggagagcttttgtttatatgaattttatctatcaatatttgccatcttaggggttattttatttttattttactttatttttttgagaaagggcctagctctgttgctcagactggagtgtggtggt

SEQ ID NO: 108198 - DNA, 1030 bp, Homo sapiens
ctgaagaatgagaggtgtccctttaaaggtgccaggcctcacagccaacataagccagtgtttctcttctctgcccttcttcccctcatgctcccctccacccccaccctaggggcacagtaatccaaaatcactgctggaggccaagtacaggttgctagtagcattttgtctccttcacaggagacagctgctgggaagctggctgtgactccacccctcatgggggagcatatgtgtggctcccctgaggagactggctgctctctggcaggtggtgggtttgggggggttcaggctgtagccaggggcccagcatacccaggccagaggggggcacggagcttctgggtgccgaatgggccatgttgctggacagtgagcgccagcagcgaggcctccagtcacaggaccatggactttctgcagtgagcttaaacaggccaaagtgagcacagtcatggataccgttggccggaggcttcgggactccctgggccgaactgtggacctggggctgacaggcaaccatggagttgtgcaccccagtcttgcggtgagtgggcctaacaggcataccccctatttcaatgccctcctgccagatctccttgtggcagaaaagatctcactgtggggggtctgggcttctccaggggaagttggggaacaccagctagtccatgacaccctggattgcttcccccagatggggcatctctgcctggtacccgggctgtgagacaggacagggcactgtagggatgaggtgctgaactgagtcctgtcttggttaataggacagtgccaacaagtttgaggagaacacctactgcttcggccggaccgtggagacactgctgctccgctttggcaaggtaaccaggccctcccaggcctgggtcgcaagcggtcctccaatttggccagcattcatgagactactttttgtcaagcatcctttgggaccaggcctagaacagaaatgttgatcaccctggagggatggggtggtgaggtcaggctgact

SEQ ID NO: 108199 - DNA, 1089 bp, Homo sapiens
tgacggccgtgctgtcgcgggccagccgctccatccgcattgggctccgcaaccacgaccacgaggtgagcccagcccagcctcacacagggcctggctgctgccatctgtcctgctgcactttaatgaagttgattgttgaggagggtgtggtcgggtgtgggggaggctgtgcaggttcaccatgcggtggccgtgggagggtctgtgctgctcaggagatggggctgttccctttcttcttcctgactgagagaagagggggtgagtgacaggggttcctgatcccagtgcccctacccccagcaagggacagaccctgcacattgcccgctgtgctggagggaggcgggtgcagtctctgaggacccactgtataccaggatctctgcctgcactttccagagcacctgcagataccaggattgtgacatctgcctttcagaggaaacagggtcagagatgttgagtcacttgctgttggggaaaggctgttggatcagggctggaattagaacccaagacggggtgactcctgtgccaggccttgtgacccctgccatgctacccagtttggctgataggctgggtttttgaagctcagaggtctgattccaggaatttgggcatatcttttctgtcctcggttctggcaggttctcttggccaacaccttctgcgtggaagcttacttgcagaatctcttcagcctctctcagctggacaagtgtgagtggcatgtcttgggggagggaaggaagggcccacttctaggcccctattgatggtgagctgtttctggaccctgtcaagctcccagagcctgctagctactcacagacctctgccttgagcgagggcctgggtaggcctgggcttagctgcagcagtgcccaccaggcactgtaggtgcatacctgccccattcaccaaggcagttgtatgtatatatgtgtgtgtgtgtatgtatgtatgtatgtatttatttcgagatggagtttcgctcttgttgcccaagctggagtgtaatggcgcagtcttggctccctgcaaactccacctcttgggttcaagcgattcttctgcccc

SEQ ID NO: 108200 - DNA, 1013 bp, Homo sapiens
cttgtttcctccccttggcaggctaagctctcccggcagcccgggctctggggcggaaggagaacagtgtcatctcttcctttgttgataaattgccaaagagtgggaacaggtggggtcaggggccagagtgcaggggagggggcaatggtggaggtggcggggggaagcagagggaggtgggctgaggcctcggtggggccagtgcgacgctggcttaaggagctggaggggttcctaatacacatttaattcagtttctcttccctaagaggctgccggagttggggcctcctccagcagagaccctcggacccctgcagggcctggacttggggtgaacagggcttcagtcagcgcaagtattccatttgcatttggtaatttttcatgccacctatttatgaatatataaatctttataccaaatctattttttaaaacatggaaaagttgcctttatggaaacttggcagagccagagtgtacacattcctaaaccattaaacagatttctataacaagccactgcgcccaggactggttctctgatctttgagcccagaggcggcccaggtggccacgtgcctcaactagtctccaggcccggggtggtagacaagctgccccctgccagtctgccacccagagcactgtgagaccttccctctgtccctaaacccttgggggacccccctgagcaagaagcagttggtgcctgaggggcagaggaagcttgggctgggtcccttctctgggacaccccaggttcctcccattgggtttgtgttggagagggctctttggtgattggcaggggcaccctcaccccgacctccccatgagggaagcgtcactctcctgagcacacaggcctggatgaggaatcccttgcccgggtcttgtagccacattgatcccacagtggcaggaacaacccaccccatggtcgaggttccccccacccctggatcctgggctgaagacatttcctacagagaagtgttctcacc

SEQ ID NO: 108201 - DNA, 1126 bp, Homo sapiens
gggcaggccaggcatggctcagtgcagtccctgggccagtgagaggcctcccccatgcctccctgccctctgcactaagcactttccaggcaggcctggccatagggcaagagcaggccttacagcagtgccacggtgacccaagaggcagggttggggcctggacagggtttcctctgctgagactgagacaagcagggcttgatgctggtggtggagccagcatctcacctgccaggcttccttttgggcagggaggctacctgtggaatggctgagcctggttctgcaggggaggaaggctgccaggagctgaggggctagcacctgcattgaggggagtctgggtgcatcagattggggggcgccagaggcgaggctgcctggctccctttctcagcagctttgcttgtggcaggggtgagagtggagctgagtggggtctgggctctgcccctgcgcctccactgcagtgcctgggctccccttgcagggcagacagtgcctggcactgaggggtgcccccagaccccgctgggactggatgtgccgtgggcagtgccttcctccagcctcacaacctttctgctggggctgaagtttctggggtcacatggtcagaaggggctgagctggtctttcactgcaggcccactctgaaagagaaatcccatgaagcctgtccttgcagagcccctctgtttttgggggaacagggagcattcacagggtcttgggaacaaaggcctgggcctccccgtttgaatttcagccccagttccagggcaagtcccagccacccaagcatacttaccagtactgcccaccaccacccactgcccacctctaagaagcccggctctcctactctgcttccaggctggggcctcacaggtggggctgttaccttcctcagggcttagggagggagggaggacatggacagggccttccaccctggctccttcacagggatggtagctgaccggtgatgggttcatttgtcaccttggactgtgagccacttccacttctcgccccccaggcaggagcaccctcactccaagggcttggcctggaaaggcaggctcacctgggactcaacgttccttcccccgccgccact

SEQ ID NO: 108202 - DNA, 1095 bp, Homo sapiens
ggcttgcccagcccccatggcctcatgctgccccggctttcctccgcagggaacaagtcagacctcagcgagcttcgggaggtctccttggctgaggcacagagcctggctgagcactatgacatcctgtgtgccattgagacgtctgccaaggactcgagcaacgtggaggaggccttcctgagggtggccacggagctcatcatgcggcacgggggccccttgttcagcgagaagagccccgaccacatccagctgaacagcaaggacatcggagaaggctggggctgcgggtgctgaccaggggccgggccggcagactgggggttccccacctccttgctctccccagcctgccaagcccagccctccagagccagccctcctgggtaccggcaactacagcagccgggtgaagctctggagctctgcatcctgtggcctggctgcgggatggaggctctccttgaggaaggggaagcaggataccctggcgggccaccctgccagccagcagctggccctccaccatcttcacattccaagactggcctgaacccgccggtgtgggccacagtaggaggggccagcagtcctccctgtcccatgcctgctggctctgaccgtttcctctcatgggtttgctttacctgtggcagcaggttgctgctttccagggatgtgtccagtgccctgggttcttcccggtcatcctggggctctgcacagagcagcagagctagagccatgagacccacagacttggtgcctgagcgcagctccagggaagccccagccccttccaggcggggaacctgcttcctgccttcactgcccccgcagcactcacagacatctccctggggtctggctcactgccttatcaggacctctgagttttctgactttctgtgtagcttctcattttcatcagcacagcatggggtcacggcccacagctaggtggggtcacggcccacagctaggtggggactgtctgctggctcagggcccagtgttttgccactcaggttgcaaaattagctaatccttcagtgccagcactcagaagtctggcaggtgggggaatgagat

SEQ ID NO: 108203 - DNA, 1050 bp, Homo sapiens
acaagtcacttcattgacctgttgtcctatcagtaaagtgaagacaataaaggcaagagactggcccctgtggctatgctcgtactagaaatagagctatacagtgaccccaaactgatcagggattgtgggaagtagaggcacacaaggcctttaccaccttttgtctccatgctgtgactcaggatatccacatgtctgctttccttgctttcctcttgttcgttgtttagcccttgtaggtttctttaccttgcactggcctttgtgtagtgctcgggctgtgattggcctttgctgagacctcatgctaggcggttttcctgggtgctttgggtatgaggaattctcagagttcagtaataagaggagcaactctccctcaaatgtgcatgcgttttataagtttccatcgcttttctcatgagttgttgcatttgatcctcatagccaccctgtgggagactatccccatcttacagaagaggaaatgaaggcccatttgtggcaaagtctgaaccagagccaagcttttcagctcctagtctggtacttttctcctcattgctgtcttgtgccctctcctactaccgcaaacacacacaaacccacaaatgaaaaaagttgggactgatttaaaatctaggccatcttgtattgcttgcattttacacattgattagcagtgtcatgtcaacattttaatgcccagtacttattaaataaatgtttattaattcagatgaactgggggtagtgttcggaatggccagtgtgaatgacagaaaaatcccactttctagactggcctgtgaaatgctgttttattgttgatgtggcagcagaagctaaccaaatgctgttacataccagatctttcttttttttttctttcgagacggagtctcgctctgtcaccaggtggagtgcagtggcgcgaggcgtgatcccggctcactgcaacctccacctccctggttcaagcagttctcctgcctcagcctcccaagtagctgggactacaggcacacaccaccacgcctagctaat

SEQ ID NO: 108204 - DNA, 1993 bp, Homo sapiens
cagcttcaaattaactgtttttttctgtctgcccctatagaaggtaagctccttgaagacacagggatccagtgggccagtgtcaaacacatggtgtccaatatgtgcctgttaattggttcctttatagagagaaagctgaggccaaggtcacttacaactctgtggcaaaaccaagggtttggctggctcctaagcccagtcttcatttttacttgaccacccttctgatttgctctgagttcataaagatgaccgtgagattctgaaagtgaatggatctaataaaaatgcagttgtggccattgcattcactgagagaagaatgtggaatggggcattttagaaagattggggttgacagttaaagagttttagggtgtttggtttattattaaccaaaacgtgtagatatacccaaacggctcagagacactgctgtacgagtcagtaaggctttgtatatggtgatcatttccagtgttcttgtggatgcatttgactgtagctatgagaactggacttataaagtgaatctgagtgctgcttatcttgcatactgtggagtctctgacagagagcactggactaggagtctgaagttctgagtcttgcttcaaccctgccacagacttgggcaattcattttttttctccttggagcctcaggcttcctcatctgtgaaatgggactaatggtctttgctctgcctctttcttagggttgtcagaaaactttgaacatgcttaaaataaagtttccatgacttacttttgaatagataaaccattcacatggttcaaatttcaaaattttaaaaacttcaaagggtatatatagtgaaaagtctcccttccgtgtttgtcccgtaagccacccagtgtcctctaagaagaagccatcagtgttactcatttcttatttaaaaacaaggatttataaatatatatttttttattgctgcagttactgttttcctccctagatgagacagattaggtctgaatttgcccctcccccacccctccctcctccccacctcagtgtcctcaggaaatctcagctggctctaaatccttaaaacattctgaagctcctctactcactcttatctgggacaacacaaaggcctgttatgtaaactcgtttttgcagatcactaggcacaccggcctcaagtccagcgcagaggtcagccttatggaactgtacccctctattcagctctctctcaggctcactgtctgctcgctagggatgctgccagatctctccttcatagaggtaaagtctgtgcccttgggcctggacctccagatttcaggacctttggccttgactctcaagcttccccttgccctaggagtcaaatttgtttttgtagctgctcctggcacttcaaaaagagggggcagggcgggataagaggaaatggtttctggttaaagtttgcattcacagtccttccaatcaagagtctagttctgctcatctgttcttttcctatttggataaagtttgtttgactttttcagttttcattagaaatagcaaaaggactgttagataagaaagaagttctaggtcgtgctgattttctgaagaaatctgttcttgataccagggacagccatcctaattgcaaaataaaccttgcctctcgaggtttcttagaatcctgagacagcatgtctggtggagagatagtggaaagagggccagctttagaactgcacagcaccaggttaaatcttatcctcaatggatatgttctaagacccccagtggatgcctgaaacttcagatggtactgaacgctatatagactatgttttgtcttatacatacatgcccatgataaagtttaatttatgaattaggcacagtacgaaattaacaacaataattaataacaaaatagaacagttataacaatatgccagcatcgctattcctgcgctttggggccattattaagtaaaataaggattc

SEQ ID NO: 108205 - DNA, 1061 bp, Homo sapiens
agggaagcaccatcggcgtcgacttcaccatgaagacgctggagatccagggcaagcgggtcaaggtgggaggccggccagggcccctggaaggcgctccctcggagggtggggcgggggcagcggagcccctggccgcggcgagcgcaccccgcgtccatctgaagtttcctttggcttcccctttttccttcctcgggtcggagcaggcctgggccccggggtctgggccgggttcaagtcctcaaagcgccggccgtgggttgctggggggggggggggcgagggagtgtggaggaggcggccctgccctccggagctcacaccctaggaggggactgtgctccaaaataactttagccattggaaggcagggggttagactcccctgttccaggtactagcggagcgccttggagtgcggagatcagaccccccacctccatccaccgcgatggcagcccccagctcagcccaccggcggggcactcagccagagaactgcatccccaccccaggactaggagcgatcaggaagtagttgcttttaggaccagagggccaaaactttttgtcagaatttccggcctggccacgcctccctgcagtctctttgtggacctggtggtggaactttactcgactagggccagccccggttccctcccccagctggagtttgatagaaactgaaaacttcacagataccggaaggtgggggagagaaccaagctttggcaatggctccgaataaaaacagcaggatgtggttgccacaatgtcctggcagtggtttgataaatatttgtgatgaatgaaatcagagtttcttaacctaggtgttagtactccctaatcaaccaggagatcctgggctgaaggcactcagtaacttttctgaaccgcactgtacagaaatctttgcttgctttcatggtttcgagcccccatgatcttcaggacaccctcagggcacagggctgggacgatctctgccagggagatgggagtcactggagccttgctgctgctgggctctgcctctccgggtggctctaggc

SEQ ID NO: 108206 - DNA, 1016 bp, Homo sapiens
ctctaggccattctatcgttcaaatgtttccaatgggagggagttaggactcttggagactattctgcgtatttaaatcagactccttgatggacttctcccacggggacttcctcctggctgggtctggcaggggttgaggggctttgctgaggagtgagccctgcactcttaatttccacagattgaggaggcactggtgcgaaggaagaaaatggaactcctccagaagtatgcaagcgagaccctgcaggcccaaagtgaagaagccagaaggctcctggggtattaggacccagctggggctctccttggagttcttccatcccccagtggtacctcaggacccagggctgcagacacaggctggtgctgcaagggctcctgccccattctcagccttccttccctctccttgtctcatgttgaccggagggtaggggtctgtccctggtcttcctggtaggttttgtacacatattttgctactgtgtggatccatttatttttattgtggagtgtatacaacaggttgcgaactggctgcctgtgtcttattttgacttgcactgccattttgaggggagaagaatcaattagtggcaaacatttaaaaatgcaattttttgcagaccaaagtataattttaaaaaatgcaaattttctaaaagacacatctcttgaaaaatgagatgatgtggccaggcgcagtggctcacgcctgtaaccccagcactttgggaggccgaggcgggcgggtcacgaggtcaagagatggagaccatcctggccaacatggtgaaaccccatgtctactaaaaatacaaaaaaattagctgggcgtactggcatgcacctgtagtcccagctgcttgggaggctgaggcaggagaatcacttgaacccgagaggtggaggttgaagtgagccaagatcgtgccattgcactccagcctggcgacagagtgagactctgtcccaaaaaaaaaaaaaaaaaaagatgcacgcaacccaca

SEQ ID NO: 108207 - DNA, 3295 bp, Homo sapiens
cattgaccctaaccctgtaaattccatcacttttatcaaggtgtatattataataagtctataatacccaatcatgtagttgtgtgattattttatttttttgagacagagtctcaatgttgcccaggctggagtacagtggcaccatctcagctcactgtaagctccgcctcctgggttcacaccattctcctgcctcagcctcccaagtagctgggattacaggcgcctgccacttcaccgggctaattttttgtatttttcgtagagacggggtttcaccatgttagccaagatggtctcgatctcatgatccacccacctcggcctcccaaagtgatgggattactggcgtgagccaccatgcccagctatttttttaaccaatatattagctagcttttttccccagaataattttccaaaaatacatttaatagagaataaaagttaaaagaactttcagtggtttaatgctgttacttttaatatttcaaagatctgactgcagccatgagcagcaatgagtgcttcaagtgtggacgatctggccactgggcccgggaatgtcctactggtggaggccgtggtcgtggaatgagaagccgtggcagaggtggttttacctcggatagaggtattttgtcgaatagaaaaatttgaagtacttcagtatttgttagtatcaagactggtctgactagccgaattctttgtttttgctcaaaacaggtttccagtttgtttcctcgtctcttccagacatttgttatcgctgtggtgagtctggtcatcttgccaaggattgtgatcttcaggaggatggtaagtatttaacacttccttttcatacccctctagagcttggagaggtgagcacatgcaactgtgtatagcatttccacctttgaggttttgtattgtataatttaaaacgtaacactttgtaaaggttttatagtcttggcctgtttcttttccttattgttgaagcctgctataactgcggtagaggtggccacattgccaaggactgcaaggagcccaagagagagcgagagcaatgctgctacaactgtggcaaaccaggccatctggctcgtgactgcgaccatgcagatgagcagaaatgctattcttgtggagaattcggacacattcaaaaagactgcaccaaagtgaagtgctataggtaaggtgtcagaatgttgttagaagaaaactcattgcagagattcttccagagatgaattagctataaatggaagggccttagtaaattcagtgaaacttagctgtgaccagataagaccaattttcagcatatgtaactggcagtctatctgtatataattctgtattctgccctgatatcctgtggcttatggtacctgggcagttttcacaactggacttttttaatatataaaagtaagagtgttataatttgaaacttccagagacttcatagaaagctctgtaatatacataaatcttttatcatgtaaccagaaatctttgcctgtttgtgacatgtaagtgtataatttgataaatgttgttgtgtacatatctgtgaaaccttaggggttaattgcatgaaaacaaagatcaggcgttttgttctgcatggtgactgttgctttggtagacagtttttttctgaggcccattgtgaaaacttttaatttcttttttaggtgtggtgaaactggtcatgtagccatcaactgcagcaagacaagtgaagtcaactgttaccgctgtggcgagtcagggcaccttgcacgggaatgcacaattgaggctacagcctaattattttcctttgtcgcccctcctttttctgattgatggttgtattattttctctgaatcctcttcactggccaaaggttggcagatagaggcaactcccaggccagtgagctttacttgccgtgtaaaaggaggaaaggggtggaaaaaaaccgactttctgcatttaactacaaaaaaagtttatgtttagtttggtagaggtgttatgtataatgctttgttaaagaaccccctttccgtgccactggtgaatagggattgatgaatgggaagagttgagtcagaccagtaagcccgtcctgggttccttgaacatgttcccatgtaggaggtaaaaccaattctggaagtgtctatgaacttccataaataactttaattttagtataatgatggtcttggattgtctgacctcagtagctattaaataacatcaagtaacatctgtatcaggccctacatagaacatacagttgagtgggagtaaacaaaaagataaacatgcgtgttaatggctgttcgagagaaatcggaataaaagcctaaacaggaacaacttcatcacagtgttgatgttggacacatagatggtgatggcaaaggtttagaacacattattttcaaagactaaatctaaaacccagagtaaacatcaatgctcagagttagcataatttggagctattcaggaattgcagagaaatgcattttcacagaaatcaagatgttatttttgtatactatatcacttagacaactgtgtttcatttgctgtaatcagtttttaaaagtcagatggaaagagcaactgaagtcctagaaaatagaaatgtaattttaaactattccaataaagctggaggaggaaggggagtttgactaaagttctttttgtttgtttcaaattttcattaatgtatatagtgcaaaataccatattaaagaggggaatgtggaggactgaaagctgacagtttggacttttctttttgtacttaagtcatgtcttcaataatgaaaattgctgttaaaaggatgtatgggatttagatacttttgcaaagctatagaaaattcactttgtaatctgttataataatgcccttgagttctgtgttcagtctgaacaggttttttggtggtggtggttttgttttgttttggagacggagtctcactcttgtcgcccaggctggagtgcaggcttggctcactgcaacctccacctcccgggttcaagcaattctcctgcctcagcctcctgagtagctgggattacaggcacccgccaccaccccccgctaattttttgtatttttatttttattttatttttttatttttttttgagacagagtgtcgctctgttgcccaggctggagtgtagtggtgcgatctcggctcactgcaagctccgcctcctgggttcgtgccattctcctgcctcagcctcctgagtagctggggctacagg

SEQ ID NO: 108208 - DNA, 1076 bp, Homo sapiens
tgaaagttgtggatcctaaattcatctgggcagaatctcacctatgatttcagaaagctgagagtttcagagagtgactgtagtcagtccttagtgagtacaaaattgagaatacatcattactttaaattaatggtgcagtaactcttgtgactgatagcaataatttaggtgctttgttgttagtacttgattagattggattgggtcagttagtttcaccaaattgctaaagacacctgtccccctagaattaaaatactgagttacataatggctactaaaaggataactatatggggtgttcgatgattcaaaggtgaattacttggtctctaccttcaaggaatatgatacaaggcaatatggtactgccattagacagatattaacaaagtgtcttgggacttaatagggagggtagttccaggctgggagatgtagtcagattcttttatagagttggcatttgagttggcccgtgaaggttggaaaaagttgtgacaggtggaaaaggagcaggggagaccaggacagtgcagtgaaattccagccaggagcagtcacaggcaatgagacagactcatggagccatgattctcagctgtcttaccttaccttagttttcctaaggaatatcatggaattctgtaaagacctttaaactaaataatgttcatatgagatgagtgctaggatggggacctgctgcctaatataagtagtgtgagtctaaaacattgtggaaagtggttagtttaataatgttattaaagagacaagtctatcacaagggaccagttaccagtgaaactgtagaccacctgattcactgcgatagggttagccaaagggaggagagggcagattgcatacatagtacctaaggccactcaaagacctcttttaaaatcacgtgtcatgttgatgacatttggaggctattaatgtttttcttcccttttaagacttagtgttttctttattagcattaatttactctagtaaacaaaattatgtgtgactaaaaatggcaaaacaggctgggcgcagtggctcacgcctgtaatcctaac

SEQ ID NO: 108209 - DNA, 1977 bp, Homo sapiens
gatgaaggggggatggggtgggtatagtcgtgcaggccatgtgctggggtcgtgcgcctggcgggccatgtgccaagggttttgggggccttagaaaagggttcttaggccgggcgcggtggctcacgcctgtaatcccagcactttgagagtcccaggcgggcggatcacgaggtcaggagttcgagaccagcctgaccaatatggtgaaagttggtctgtactaaaaataaaaaattagccgggcatggtggcgggcgcatgtagtcccagcagctcgggaggctggacaggagaatcgcgtgaaccccggaggccgaggttgtggtgagccgagatcgcgccactacactccagcatgggcaacagagagagactccgtcttaaaaaaacaaacaaacaaacaaacaaacaacaacaaagggttcctgaagaagcctttgtgtttggagtggcgagactgctggaagacttgggagcttttagagtttatactccctatccttgatagttttccgattcttgaatttttatcgtcatttaaatactaagttgcttgtgttacattaccattccaaaaggggctgatggggctcacattccaagagttaacactatttaagttgctgggatcctttaaaagcgccattaccagaaaaaacacgaatttgtcaaacctccaaaaccacagcagcgggcggtagtctgcatcatttcttggattaatgaaacagatgtaattacaaacgagacacgaaattcaactagctcccctccatctagatttttccatatcgtgagaacctgttttagaatggcataatggtccacatttgggtttaggtgttgattttattatgggtaaggcttgtgcttgttcccacatgttaaccatatggcctcagccacagggcacttccaaaggaagtgactgtttctggtcttgggggtcttgtaaaaagagaacattgctcagtaatcgtctgtgattttagctagtgtgtttcaggcattattcagaaggactcaggtgagataagccaaaactgaatttgttttttgtctttctcaaagtgaaggaggtctaatgaatatccccatcttgcttttaaattacatttttaaaagtagatttttccccctttcctattgtttgacccaattttggagtgaaacgtaaccagttactatttccattcgaatttaaattagcaattttatgttatttgtttgttcaagcagtataactggagtgtagagctttgagggtttcaaaaagataagagatatagtacttatctcctgggcttccccctcccccctcctaaatagttttaaatgcttctaatgagttactctggttaaggataatcaaacacctgtaaactgccaggatcctaggtacatgctgtttttagtttgttgagcctgattcttgtctacaagagttctttgtgtattggaatataaaaggaataatttattacattcccaagggcagaattaaagacttaagtttttccgatttcatctcttgataagtttttctttaaaaaaataacagtttgtgtttttctgaggaaccaaaggtcctcttttttttcatattggtaacaggagaggtaatgtatttcagatggtgcagtctgtaaaatattttgaaccaaatcagtggaagaccaggggtttttctttttttttttctgagacggagtctcactctgtcgcccaagctggagtgcagtggcgcgatctcggctcactgcgacctccgcctcccggattaagcgattctcctgcctcagcctccgaagtagctgggattacaggcgcccgccgccacacccagctagtttttgtattttagtacagacggggtttcaccatgttggccaggctggtctcgaactcctgaccttgtgatccgactccctcggcctctcaaagtgctaggattacaggcaggagccaccgcgc

SEQ ID NO: 108210 - DNA, 1072 bp, Homo sapiens
agccagaaagtaaaaataaagtgttagatggcgattcgagctgaggaggaaatcaggcaggggaaagaatctgaaagcgaggagtgagtggctggcaaggctccttcggaaggtggcaataacagtcatagaccggtcacatcaattgggtgtttactgcgggccagtgtgtgccaccaacctcacacccgaaagccacaaagactcacgccacaacgcaacgaggcaggggctcctcctcctcccttggtatacggaaagaagcgtagggagcagagttgggatgctagtcagtacccccctgcacctagcccttgcccctccgtctggctttccccactcccgctccggcggagctaaggttaacattagacgaggctgtggctaccggaaagagcgcaggcgcagagcgcggaatgcgcctgcgcagagcgctgggcgacgtggccagtcggggcccggaagtggtccctgtagaaccactgtggcaccgctactccgtgccgcgcccgtcgagcattgcgttgctgcattgcgccccaccgactccactatgttgaagaaattcgacaagaaggatgaggagtcaggtgagggggccaggcctgggtctgagggaggccggacccccacccgccgagctttccttctggttctctgtcctgacccggaggctgaggcccagtgaggggcaggggcttgtgccagggtccacagctagtcagtggcaggcctcggagagcccgagcatgcgcggctgtctcactcttgtaagctcggactgcaattttctgggtgaccttgggcgcgacaaacacccccccccccaggcctcaatttacccatctgtcaaaggaggggaccatgccgaatgttctcttgttactttcttcgtccaacctcttgggattcgctggggctacgttggtgctggccaaactggggtgtaacctgcggagccagcgtcctgtgactgggaactctgaccccatcattcatttattcagcaaagtatattgagcagttactgtatgccaggtactgtacggtgtcctggatactgcaacagagc

SEQ ID NO: 108211 - DNA, 1051 bp, Homo sapiens
caagcgctgggtgaatgaggctcaggaggcagcatccagtgataacatcatggtccaggtgagatgtgagcaagggagtgatatttaaaacactcaggcaggtggtaaggcactggccagttggcatggacacttgccaccgagatccttgtgacccctggccatagcaggctttaatcctttcgtcattggatcatgggaggaattaggaggtcctgggttagagaatccagggtaccacttggggcgcttgggttacagactgcttaccagctggtgctgaaatattcaagtattttgataaccagctgagtattgttttggagcatatgatgtggcaaacttggccaaggcaggcagagggccgcctaaatttaggcctttgccagcctggctttgttatgatgtgtggaattatcttgatgaggctttcatccactttactcttcctcagtgacctaggacagccgttccttttatctctctggctcttggtttccttgtctgtaaaatacgaatgaaggttactgcctcacaaagcagcaaggacgagctgagatcatgcatgtaacatgtgacccatctgggtcatgagtgcctatcggcgctccctgtgtgtttatgtattccctttatctctcatctgtcttctcatcctttgcacgattcttgtcttcagggccagctgtggcccctcaaaacacttatgagggccagataagcttcccacatagaaggcttccacagctgccatatctttgcccccaaatgtcgctcctttaggaaacaaaagagagtatcgaggacaggaaataactatgagacctcacatctttagaaagggagtctctgggcttctggccctccaggcctagctttgtcagtaccagccaggagtctttgggcaagtcagcaaagattaaactgtctaccttcagggttgttgtgggtaatgcaagatttcatggctaaggtgtcccacacagtgacttacaaaacatgacaatgctcagggtctggctcccaccttctctctctcattgtctgattg

SEQ ID NO: 108212 - DNA, 1337 bp, Homo sapiens
tgccaagggggaagttctgttggatcctgtagacacagtaggagagaggagtggaatattacttcacagaggttaagggcttaggctgcaggtgcaggcagtcttggaatttaatcttggttctgccacttactggctgccaacctaaagtttgtttgctttcccctttgtgcctcagtctccttatctgtaaagtgggctagtggtggctgcaagctatagaagtgaggcatgtccactgtatagcacagcacctggcacacagcagatgcccagtgaataacagccctcactggaacccctgggtgctcacagacattatggcctctgtccatggctcaggtgcgcagggtgaggggagctctgtgtcttgggttgggatgggggtgtcagcagggaaatgagctgagcagagggtttgagtcagaacagtagcccccggttttcccagctgcccagcagtgaaggcaacctgacatgtggcatccatctccccacagtgctccagcttttctgcagctcacccaaggctgctctccgctatgctgctgttcgtaccctcaataaggtaagagtccagcttgggggttggaggaagctgtctgatccaactggaggtgtgtcctagcctctgacctggctgggaaggataatagccctggtcacagttagtttcttctagatggtgagatgatctcatccaaaggacttctgactgggccaaaccatcaaatgtagtgacagcattgggttcctgccctctctgtcactgtcctcccaaaacaggttgccatgaagcatccgtcagctgtgacagcttgtaatctggatctggagaacctggtcacagattcaaaccgcagcattgccacgctggccatcaccaccctccttaagacgggcagcgagagcagcatcgaccgcctcatgaagcagatctcctccttcatgtcagaaatctcggatgaattcaaggtacctgctacccccaggacacccacggcccccagaggaaggagctctgtccctgctctctgtggccacagccttcctgccaggactgacctgaggggctggtcagccttgaggactcagaggaggccagcagtttgctctgcagagacttggccttccgagaaatgtgcgtagtcctgcctccaggcctccatccatatcgtccccttgtactgaaagaacagtagtttccaggccagttaagggttcattgatttgttgtccaagtatttcttgagcacttgctgtctgctatgtagagtgacaaaaggggaacatagcagtgaacaaagcaggtgactgccctcctggagcttcctttc

SEQ ID NO: 108213 - DNA, 1016 bp, Homo sapiens
taagccgagatcgtgccactgcactccagacagagcgagactccgtctcaaaaaaaaaaaaaaaaaaaaagagtccttctggagcagagtggaggggtgactgggtaaagagactgttggagtaattcagaaggagaggatggtgcctgaaccggcgggagtaggagaggtgggacagtgcaagagctttttgagggataatgcctgttggcagggttggtgtgagggttgaggggtggatgtcaacagagatgatgccattttctactttgagctgacagtggtgctcttgactagtttgcaggggaggaaaagatggggtattggatgagggagggggaaggagatggagatgtttgtggttgcagacatgtggagtttgaagtgctgtgggcgccaggtggagttgtctgacaggcagttggaaaaggcaggtcttaagctcagacaggagataaatattgggagtcagtggcatataagaggcggttaaagccatgggaggggataagattgctgaagagactgtgagaagagaagcggccaaggacagaataccccagagacaggcttaaccaaaaaggagccagaggagatgatgggtgggaaccatcagtgggagccagtggtagggagagaagcaggacaggttgggtggaggggactcggagacttaagaagcctgagtagaagagcagagtttggggaacccagagtctgagagtctgacactggggctgttggcactgccttgggtgggctcagggattgtgcccttcaagcttcaagcgtggagttgagttcctctggtctccttgcccttgtgtcatgcccaaggcctggccttacctaaggaaggactcagtgggcactcagggaactgagtcaccccatcttggtggcagggcctgctgctcatgcacgtctatttcatttaggtggtggttgtccaggccatcagtgccctgtgtcagaaatatcctcgcaaacacgccgtccttatgaacttcctgttc

SEQ ID NO: 108214 - DNA, 1080 bp, Homo sapiens
tgggattacagacgtgagccactgcgcccggcctccatctgtcacccaggctggagtgtggtggtgtgatcacggctcactgcagcctcaacctcctgggatcaagcaatcgtctcacctcagacccccaagcagctggaattataggcatgcaccaccatgcccaactaatttttctattttttgtagtgatggggtctctccatgatgcccaggctgatttcgaattcctgagctcaagtggtccacccacctcagcctctcaaagtgctgggattataggtgtgagccactgcacctgaccagccttttgtttgacaggaaagagtgatagaggcccagagaaccaagtgccctgtctccaagttctgtgtttggacaactgtccttggtccagctcaggtcttcaactcttttctggagagagcaggctccttgcttagctcagcttctctctgcagggtggctttgagtataagcgcgctatcgtggactgcatcatcagcatcattgaagagaactcagagagcaaggagacagggctgtcacatctgtgcgagttcatcgaggactgcgagttcacagtgctggccacccgtattctacatctcctgggccaggaggggcccaagaccaccaatccctcaaagtacatccgcttcatctataaccgagtggtcttggagcatgaggaggtccgggcaggtaggtctgagccagggctgaacttggaaacttagcttacccttgaataaatgtcccagcaaagggacctgagcctccagtggggatttgtgcactcagtgttcttgctgcacaagctgtttttcataatattgtaggcaggaccttacatgtcatctagttgaacagttctttgttttttgttttgtttttttttttgagatggaatctcgctctgtcaccaggctggaatgcagtggcgcaatctcagctcactgcaacctccgcctcccgggttcaagcgattctcctgcctcagcctcccgagtaggtgggactacaggtgtgtgccatcatgcccagctaatttttgtatttttagtagagatgggattt

SEQ ID NO: 108215 - DNA, 1608 bp, Homo sapiens
ccgcggtcttgggcccctcttcaagtcctcgcctgagcccgtggccctcaccgagtcagagacggagtatgtcatccgctgcaccaaacacaccttcaccaaccacatggtttttcaggtgagcaaggtgggctgaggccctgctggggcatgcgcccagggagttgtcccaggtctggcaggtcctgtagggtcatgggtccccacactgcattggttgggagcccaacttgatgacagaatctgtccccaacaggtcggtctctcatatctcttgactcgggacatccatggctcccgattgtcagcatgaagacagggaacctggggcagggggactgggatgggaatcaccttggtcaataggaaagaggtgggacctcctggcttttcctctgcagcatggctcggacctagtgcaatgtttaagctcccctctctttcctgttcagtttgactgcacaaacacactcaatgaccagaccttggagaatgtcacagtgcagatggagcccactgaggcctatgaggtgctctgttacgtgcctgcccggagcctgccctacaaccagcccgggacctgctacacactggtggcactgcccaaagaagaccccacagctggtgagcccctctccagataccaccctatcctcctgggagctcatggggtcaggaggaggtgggcggctgggcaccagctgtttgccttctattagagcttcagctccttgatttcagtcccaagaagaagaatagctgagtcccaagtgctcttctttaaaaatttttttttttaaagagacaggatctcactagaactcatgactttcctgtcctacaaggtggcaccctctgtccagctttgtgggattggatggcttgttgctgctactaataacatagcaggggcctagaaagcaggctgtgacccctgcctgcttgtcccctgcaggaggagcccatcccctgcaggctggggacatcctaactacccagcctctcttccccacagtggcctgcacattcagctgcatgatgaagttcactgtcaaggactgtgatcccaccactggggagactgatgacgaaggctatgaggatgagtatgtggtaagatcctggtgtcaggaagctcagttttgtgctgaggctgcaaagcaactcccttcaggaactgacagtgagactggagctgtttttggctttttagctctttaaaattttatttttttatttttattttttgagatgaagtttctcttttgttacccaggctggagtgcagtggcgcgatctcggctcactgcaacctctgtctccctggtccaagcgattctcttgcctcagcctcccaagtagctgggattacaggcgcccaccaccatgcctgccaaattttttgtatttttggtagagatagggtttcaccatgttggctaggctggtcgcgatctcctcacctcaggtgatccacctaccttggcctcccaaagtgttgggattacaggcgtgagccaccgcgcccggcctaaaataactttttaaacttatggaaatacatgttcatgtgtaaaaagaaaacttgggaaatacaaaaacaaaatt

SEQ ID NO: 108216 - DNA, 1065 bp, Homo sapiens
tgaggatactgaagtcctgagagacagtgactttcttttttttttttttttttgagacggagtctagctctgtcacccaggctggcatgcagtggcacaatctctgctcgctgcaacctccgcctcccgggttcaagcgattctcctgcttcagcctcccgagtagctgggattacaggcgtccaccaccatgcccagctaattttcgtatttttagtagagatggggtttcactgtgttggccaggctggtctcgaattcctgacctcatgatctgcccacctcagcctcccaaagtgctggaattacaagcgtgagccaccgcgcctggctgagagacagtgactttcacagtgaaatccctcactcagggatttcagcccagctctcctgcccgtttcactacaccagagctgccttcatgggttgctgcaaatgccatccttagcctgccctgtacagtcccttctgctgtatatatctgtacttctctcttcccttctaggtgtgttccggggtggtcatgacatcctggtgcgctcccggctgctgcttttggacacagtgacaatgcaggtgacagccagaagtttggaggagctgccagtagacatcatcttggcatctgtgggataagaggccagcctgcataggacctcatacccttccccaacactacctggaagttgtgccttcctcatgaaactggcagaaaccccttcccaagcttctgtattgaaaaacaattaggaatcattgcagatttttttttattctgctcccacctcccacccgggactacttgctggtgactttttttttttttttttttaaataggggatgattttagcttgtcctaaatcttgctgtccacccttccaggaaagggacattgtaaatgaataaaacattctcaactcctcttgaatctatcccccaagaaaccatcttatccctgtaataaatcagcatgtatttattgaatgattgctacttctgcagactcatgcttcagggctccaccttccccttcaaggcctcccctaaagaggcagaacacctgc

SEQ ID NO: 108217 - DNA, 1016 bp, Homo sapiens
gctagctgcgcttgccctgcttcgctggactgtgaagccccctccgctgcggctcttcctgcgctcaggcaggcatttgcagagctcctctcgggacttgcctcagtgccctgcacggagctgggcagtgggctcagggagcgaagcaaacgggcacatccttgtctttgtgggactttttggggaagactttagacggtggtcacggaggggcacggccctgtgggaacggaaagagaaggcggggactcaaggaataagacctaatatttgagatacgtaagccttttccttacgttttgtaatttaaaggttgcgaggggcggtgttgaagaatgtgtgggcgaacatcctgtcacttacctagagatgttctcacgagagcttgcgcctaccaggatcggcggggccagcagcggctcccggagtggagggaccctgataagtactgcccctcttacaacaagagtcctcaatccaacagcccagtgcttctgtctcgactgcactttgagaaggtaaccagcattgcactatgctagcccctcgcccagcctcgtgatggtcatctcctatttggtttggtgtgtgctcagcctcttgggatgacattaaaaaccagcctttactgatatattctgacttccagttgagaacctctcttggcctcatgaaagaagttttatcagtggcttctaacactgataaagacgtatttttcaggctcaatttaaatgcctttgctatacatggcatactagccttaatatatgccaaatttatatgagctttgtgttttaaaatagcagctttcactgatcatcagggtcattggagtatcttaaaaatataataaaaaaatttaaggccaggtgccatggctcatgcctgtaaccccagcactttgggaagccgaggtgggaggatcacttgagcctaggagttggagaccagcctgggcaacatagggagaccccatctctacaaaaaataaaaaaatgaggtgggaagatcac

SEQ ID NO: 108218 - DNA, 1021 bp, Homo sapiens
tctagtaaatatgattgctaaagaactcaagttacctacatcatgataagtcattaaattgtttttggctggttgtggtggctcacacccacaatcccaacactttgggaggctaaggtgggcaaatcacttgagcccaggagttcaagaccagcctgggcaacatagcgaaaccccatctctataaacaatacaaaaattagctgggtatgggggggcgtgtgtctatagtcccagctacttgggaggctgaggtgggaggatggcttgagccaggaggtagaggtggcattgagccaaaatagcgccactgcactccagcctggatgacagagccagaccttatctcaaaaaaaataaaaaaattgttttcaagtagattccctgtttaaaaataatcttgaattctttatatttcaatactcctaaataatgtaataaatacatatgttaaattaggttagaatttcattatgatctcctcactagatcttctctccgtggcaggatgcagactcatctgagcgtatcattgctcccatgcgctggggcttggtcccttcttggttcaaagaaagtgatccttccaagctgcagttcaatactaccaactgtcgtagtgataccgtaatggagaaacggtcatttaaggtaggtggctggtagctattagtgccccgtatacctcagaaataaggttccaaagggtgtttccatcctagcctacagaggacaaccaaaaataaataaataacacaaaaaagaatgttcccagttgttaatgtggaatgctattttgttactacataacaaaccacaccagacttagtagtgtgaaacaaaatgataaacattatctctcatattctctgggttgactgggctcatctgggcagttttcacttggaagttctcatgttgcagttagatggcagctgaggctggatgtccaagatgacttcttcacccacatctgacccttcagctgggatgactagaacaactagaaggctttccatat

SEQ ID NO: 108219 - DNA, 1103 bp, Homo sapiens
aacttctgtatcactgctagaaattctttagcgcattttcatctgtacttgtggcttctcccaatagcagaaagctttgaaaattgtcgccatgttcgaaaccagtaaactaaccactactagcactaaaaggagccacttgtggtatttaagattttatttatatataggccttatttatatattttttgtatgaaccttataggtgcttctttttttttttttttttttttgagacagagtctcactctgtcgcccaggctggagtgcagtggtgcgatctcggctcactgcaagctctgcctcctgggttcacaccattctcctgcctcagcctcccgagtagctgggactacaggcacacgccgccacgcctggctaacagggtttcgccatgttacccaggatggtctagatctcctgaccttgtgatccacctgcctcggcctcccaaagtgctgggattacaggtgtgagccaccgcgcctggctggagtacttcttgaagttgttccagccatggtcattttttttttgtagcatcatcactgatgtggactccttgatatcctttgctcaggaaataatcacatgttctcatttttcttccaggatcttttactatttcaagcttcttttcaatatttaaaatgtctccattcacatgcattgcctaccatgttttgagccaggaagcttagacatgtttgagatgttaaatgtgcatctttatatatatatatatatatatatatagaaaagttcagaaaggcaaaagaagagcaaaacacaattttgtaaaatagtatgcagtgagccaaagtagcagtcagtgtttgagatgggtgcattttgtggctcagttcatctgggtgcagttttctgtgttcaccttgtgtttctcacagatgaaactgtgcataagcaaacacaaaatttgcattgtgctccaattgctctctactgtatcagtggcattggaacagatttgcattttaaacataagcattggcagaactgactatacttgtattctacctttatactttctgccagagctgagtactccctgaagtgattttttggagttctcctgaaaagaa

SEQ ID NO: 108220 - DNA, 1108 bp, Homo sapiens
tccttttgttcacaattttcttactgtaagtctttcagaggtggtgaggcttgagattgctgttgatagacaagttttcaagatctattttcccttcattctaggctggggtgtcatagaaagtttaccaatttactagagtggacactggagtacactagaccagttagtactcttcactgtctttgccatgaaactttataacatggctctccaggtgttgaatctggtgccctgtcaccctgtgctcagggaacacatggcagcaatcagcatgtgaggcgcagagggagggcaagctccccttgtgatatttgaggtatcagctgactcaagtctctctcccttctctccttattctcatgctacctctcccaaccattgtcttaacttccctggccaggatgcctgccatattagatggagaggaggcagtttctaaatggcttgactttggtgaagtctcaactcaggaagctctgaaattaatccacccaacagagaacatcaccttccatgcagtctcttctgtggtgaacaactcgcgaaacaacactcctgagtgtctggctcctgtcgacttggtggtcaaaaaggtaggggcctgtgactggtacagtcctttttgagctttctgtcttctgtcagtgttctctttctttcaggatgtggccttttatgatcagccctttaatttggaccatcaaaagctctcatactccttgtacacagcaaggtagtgtagagcagcaattctcaaacctggctgtgactcagagtccccaggagaagaactctttcaaaatgtaaatgctagaccctatctagacatcctgaatcaacatttagagctaggcttggacttttgtataattaagaagcttcaggctgggcgcagtggctcacgcctgtaatcccagcactttgggaggccgaggcaagtggatcacgaggtcaacagatcgagaccatcctggccaatatggtgaaaccccgtctctactaaaaatacaaaaattagctgggtgtggtggcccgtcccaagtagtgatcccagctacttgggaggctgaggcaggagaatcacttgaacctgggaggtggaggt

SEQ ID NO: 108221 - DNA, 1232 bp, Homo sapiens
attttggactagacgctgcccatttctgccatggtctttttttttttcctttttcttttttagagacagggtcatgctctgttgcccaggttagactgcagtggcatgatcatagttcactgcagcctcgaactcctgggctcaaatgatcctcccacctcagcctcccaggtagctgggactacaagcgtacaccaccatgcctggctcatttttttaaattttttatagagatggggtcttcctatgtttcctaggctggtctcaaactcctgggctcaagcgatcttcccacctcagcctcccaaagtgctgggattacaggcatgcaccactgtacctagccctgccatggtgtttactccaaaagatgtcacattctggagaggtggcattgtgctaattcagaacctttcagttcaggattggggtgtgatgtaaaggaagcagaagggagtagtgacagtcaagaagaggttgtacagattgtctgcacaaagaggaaacaatttagccttatcacagtggctgttagaaattcttctgtatctctccagtctcgttttccaacactccccctgggtcatgctgaattacattcttttccctgagaatgcttcattctctgcacatttggaatgcctttcagctctcttctctggctggtcccacacaatcctctgtgaaaccttctctaagatctactttcctgccccttagagcacactcctctctttccactcttgactggtgggccccagctggcccttagtaacattttccaagcctgggtaagtacctaatgcctcttcccctgtttcttcccttggacttggccttttcccaaaagcttgagctgtatggtttgagctttttcctctttcttgtaggagctcagggcaagtggcagtagccagaggatgttgcagtggttggccacaaagtcacccaaaaaggaagactcaaaaacacctcaaaaggaagagtcagatgttccccagtggtccagtcagttcctgcagaagagtccactccccaccaagagaggcactgcaggactcctagagcaatggctgaagcgggagaaggaggaggaacctgtggccaagcgtccttacagccagtgacacaggactttcagagaccaaggccagggtctgctgcactgctgttctgataataggttcttaacattgtatgtatatgtgtttgctttgggaggaggtggcact

SEQ ID NO: 108222 - DNA, 1103 bp, Homo sapiens
cgcttctgcaggtgaagggcaccggcgccaacggttccttcaagctcaaccgcaagaagctggagggcggcggggagcggcgcggagccccggcggccgccaccgccccggcccccaccgcgcacaaagcgaagaaggcagccccgggcgcggccggctcccggcgcgcggacaagaagcccgccaggggccagaagccggagcagcgctcgcacaagaagggcgctggcgccaagaaggacaaaggcggcaaggccaagaagacggcggccgccgggggcaagaaggtgaagaaggcggccaagcccagcgtccccaaagtgcccaagggccgcaagtgagcgtgtcggccggtcagagcggccggcgtgggcttttcggtgtttttgtttttctaccccaagtgacgtagattttgtacggctcacgccggccggggccgcgaggcctggtctgagcctcagggaggggccccgggtcctctcagtctttcccctcccccaacgatgtagcgtttttcgttgtttgctttaggtttttgaaacagccccggcgacgcctctattggctctcggccttggcaacggccgtcgtcatggttactggcccctaggcgccgatggccgaggccgcgcctgcccaccgggcggggtcgctggttggccgggcccaggcgcgcggggacgcggaggccgcgcatcctttcccagctccccaccctccttgcctttgggtgcgcgacaaacaatcgctccgggctcagggctgcgcggctcttcccttcattccatgggcctttttttgggcacaataaagcgtttaaacctttcagcctctctcgtttaatctgagtggaatagggatgggcgccttcggcacgcggggttggatggcgggcccctcgggtccttataccccagatctgttggccagggtaggcctggagccaggggccttcagcaaggggtgggaattgctggcttgggacgaacttaaagtacctgggacagggagatagacaggatcggtcccttaggagggatggatctatctgcccccacagggggtccatcggccattgcggggagcgggatgggggaggg

SEQ ID NO: 108223 - DNA, 1020 bp, Homo sapiens
cccgcgtgccgaaggcgcccatccctattccactcagattaaacgagagaggctgaaaggtttaaacgctttattgtgcccaaaaaaaggcccatggaatgaagggaagagccgcgcagccctgagcccggagcgattgtttgtcgcgcacccaaaggcaaggagggtggggagctgggaaaggatgcgcggcctccgcgtccccgcgcgcctgggcccggccaaccagcgaccccgcccggtgggcaggcgcggcctcggccatcggcgcctaggggccagtaaccatgacgacggccgttgccaaggccgagagccaatagaggcgtcgccggggctgtttcaaaaacctaaagcaaacaacgaaaaacgctacatcgttgggggaggggaaagactgagaggacccggggcccctccctgaggctcagaccaggcctcgcggccccggccggcgtgagccgtacaaaatctacgtcacttggggtagaaaaacaaaaacaccgaaaagcccacgccggccgctctgaccggccgacacgctcacttgcggcccttgggcactttggggacgctgggcttggccgccttcttcaccttcttgcccccggcggccgccgtcttcttggccttgccgcctttgtccttcttggcgccagcgcccttcttgtgcgagcgctgctccggcttctggcccctggcgggcttcttgtccgcgcgccgggagccggccgcgcccggggctgccttcttcgctttgtgcgcggtgggggccggggcggtggcggccgccggggctccgcgccgctccccgccgccctccagcttcttgcggttgagcttgaaggaaccgttggcgccggtgcccttcacctgcagaagcgtgtcgttctgcaccagcgccttgatcgagtacttgaggtaggtgcgcccattctgctggtcgaaccacggaaccttcttggcctcggtgtagatcttggccagcgacgagccgttgcgctcgcccagcctacggat

SEQ ID NO: 108224 - DNA, 2256 bp, Homo sapiens
gttccagggaccagatggggtcagaagctaaactggattgtattgatgactgaatgagagagaggtgagaagggtgtgttaacaactccatggtgagatttttgggtgtgaggagaatggggagtttgaggagacccagagaagtggaatgtctgaggtcacacagctggcaagccgtagtgctggggctagaaccctgctgcatctgtggctattccacacctcatgaatcttgcttatcctgcaggctgtatgtagtgagatgggatgcggagcagggaagcacattactaatggcagcctgaatgatgcctgtcatgaaagaaaaggtcttgattgggtcaagtgggttcatcaactgggagggttcatgaaccacagagcctgccttcagtttccaaagacccaagagatttggaagcagtaacctgatggctcagtctttgtggggtacgggacatgctgccacctcacttcacagaggagagtacggggtacccacactgcttccctgtgggcactggggtcccaggacaagaggctggaggtggcctgcagtcatccctggaatagcccagggaacgtacctgtattcccccaggctcaaggtttccccactgggatcccgggacaagaggctggaggtggcctgcagtcatccctggaatagcccagggaatgtacctgtatttccccaggctcaaggtctccccccggtcacagctcctgagcaagaaatcacatcagctgggtcacaggtgaaatgagaaaaactccaacctgctttatgtagaaagggcagaggtcaggggagggaaatagtcaaaaactgcacgtcattccttggacacatctaccctctgagacactggacactttgagtccagagggaactggcccccggtccatccctctttgaaaggatttctttagtttgactctttgacactcctcttgtgtctgggctctgggccgctggctgcactggcccctggcccaggaaggctgggtccggcaacacctggctagctctagttgatgtagtacaccttggcggcatcataatgggcgtgggtcatgtagttcttgttcctaaggggccaccagtggtcagggtggtaggtggctgggtagacatggggctggtgttgaacacaactgaagagcgccaggctccggtctgtggccacagtgggcaggtagagctgcagcttatccagaagatgacccggccagaaggaattggggtgtgtttgctgcagaccactggacctcttcaccttcagcttcctggaaaacaagaagacacagggatggttgtcatggcagacaggccagagctgaggcttcatcgcagagcccaccaactgtgaccaaagtggagatttagcactgtgccaagcacttcagcacctcagtcctccccacagttccatatggtcagctctgttatcctgtcgacctcacctgtgaggacccagaggcctggggaggccgtcgcacactgagcaagtggccaagtgcaggcttcattccttgtccaatgcctctaaactcaaagtcttaagcgcgaaccatctgttatctggaggcattttaatgtggtgtttggagtacggcccctgcagccaccctagctgggttcagatccccactgcatcacttcgtagatgtgcgactctgagcatgatatttaccctgtctgtgcctcagtttcctcctgtgtaaaatgaatatgcttagtgtcacttcgtagggctgttgggaggatctgagtgagtgaacacatggaaagccccagagcaatgcctcctggccctctctgtgttgtgtcactgcctctcaggccagggcaccgagccccagctgttgtgccaggagtgcagagtcccagttgtctcaggcgaagctgcccctcctcccaccttccttccttgtggagttagatgattgccacagacctggtaaattcctcaaactccttaaagcgcattttcttgcttttctttggcgttttcctagtggagaagagagaggcattttgtgaggagagtggaaatccaggccaatggggctttagggagtaggtcagggccgcaggggtggacccgtttctaagtctcaaacgagagctctgaaagaaaaatgtcttccacctggggtggaccctgactctgtgcctccatgctccaggggaacacagtgggcttgggtcagctggacctaccctcagaatctggccaggtgacctgggca

SEQ ID NO: 108225 - DNA, 1049 bp, Homo sapiens
catactgtgaggacacttaagcagccctatggagaggtccatgtggggaggaactgaggcctcctgccaatagccacatgggtgagccagcttggaagcagatccttttgccccagtcaagccttcagatgactgtggcccaggccaacatcctgactgcaacctcatgagagactctgagccagagcgacccagcaaagctactccctgatttctgactctagaaacggtgtgtgatcataaatatttgttgctttcagtcatttgggggtgtttgttatgcagcaatagataactagacaactaatacacctccctctcaagacttctgtttgctcctctgtgaaatggtgtgaactatccctatccagcctaacccaagggaataaaataatgatgcatccctaaacccttggtgtcttcatctggcaaatggggctgctcaccctggtggtcctggtagttgcctgggaggcatttggctgggcactctgctcctcgtggatcatgtgtaagaccttggcctctgaaggcgtgatgctgggcttgttctccagccacctctttacatcaccaaaggactctagctcctgccgcagcttcgacctctggctcagccaggtcttcctgtcctctggctgctcttggatatctctagcttccagaactttgaagctggggatgggctttgggggagcctgaggttgggatgcaggattaaggggtgtctgatcctccttgcgaggcaccatgatgattcgccggcgggtctgaggcaggcggaagtccttctgctggaactgcttgaagcagtgggcaatgaccggttcaggatcaaagacgggagcattttcattgatgggagtcttagacgggcagagtccttggggtaagagagttaaaagatgagtttctctctggaagaggactgaaaggagccaggaaggaaaaacacttttgctccaggctgggcaacagggccctggatcccaggccaggctttatcattgtcttgctgtaatcgtaaggataatttcatctaatgttac

SEQ ID NO: 108226 - DNA, 1062 bp, Homo sapiens
catcctgactagtcctgtttttcacatcaaaaatattgtaaaatgagaagtgaaaaagatgctatacaaatgcaaggtattattaactgatattcaaattgcgagggtatggttaaggagtattacatgtgattttagaaatttgagaagtctgataacactggttcccaatagatagaggttctcaataggtagttgtctcaggtgttctagggttcaaattgtaggtttttctgcagattctgttttgtctgtatccctttttttggtaagcgtaaaagtaagtgttcactgcagaaattttggaaaatacagaaaagtaaagaaggaaagaaaaattagcacttggcaacaaccattatatcattttggcttatttcattcttaacttctgtattgttatttatatatgtttccccttttttataaaattgggatcatatgtagactcttgctttttcatttagaagttaataggaaaatattcacaatagtctaaaaaatactttaatgaccacattatacaaatgcatcgtaatttaaaatattccatactgcctttaatttttcaatactataaactctgaacataagtcataaagaactagtgtcacagagtggttaaaggtgaggactcaggagccagactgtctggatttgaattttagctgggacacttagtatctgtgtgatcttgagcaagttacttagcttctctgtgcctcaatgtccttatctgtaaagtggagataaaaatagtaccaagttcatgggtcattagttagattaattgggtatttatgtaaagggcttagaatagtgcctggcatgctttgtaatagtgttgatattattatttgcatccctcaatattgctttaagctaaaccatagactccataaagtgtttacttttccttttcagaagataccatcccacgaacacagatagaaagaaggaaaacaagcctgtatttttccagcaaatataacaaagaaggtatccctttcccaatcagaacagcaaattctaattccattttgggttttcaattctgatgca

SEQ ID NO: 108227 - DNA, 1036 bp, Homo sapiens
caactgctcaccaaccaggaaagacttcactggtgagaaaatatttcaaggtatccagtgctttcaagcactattaaacattatgtgatgagaaatttataatgctgcatcttgtattcgtgcccatacatggttaagatgtgaaaatagagccaagaaatagggccaaatatgagataccagttgatcctaatactttatcttaaactgatattcaagcagtttcctatggcagagagaaaatcggctgactgctgtcgtgatgccatggcaaaggagagtattactattaacagctgccatcgtctctccctggtgcagcagctgggactctcctcctcagcagtgctttcccttcttcccatcctctttccagccagtaatcttaaaacttgaaggaaaattaaaagccttcacttgtgaaaaatttagggaaggcttcttatatacataaatgagtggagaatagttggtgtcttcacacccctcctgatacttactactaagtgtgacttccaatttaattttgtatatatcatagtcatttttatcttctattttaatgtaatgcttctctaaaatgctttagagctctaaataattcaaaagtataatcacatagttcatctattatttgtaatatgctcttaatacagaattcagaacttagcagttttgtctttataatacctcagtgaataagagataaaagggagaccttttgagcagccctgtattagttattcattatgccattatggtataatgaataactcctttaaagaataataattttacttaaactcctgtggggaaacagcctggagaaatttgtgaagcaggagattaggtttgattcttgttcccagttctacccatgattttatgtcttttctgtgcctggagtttctctgcctttaacacaagatggccatatatacctaggaactgcataagaattcttcaagtctgtgtcctagacactgagcttcttgaagaaagctttgaggtttatgtagatttattgctagcaaaa

SEQ ID NO: 108228 - DNA, 1050 bp, Homo sapiens
ttttggatctgaacttcagtccttgtgggctagaaaatgatattaaaggaaacttactgctagtaaatagaagggacttttaaaagaactggaccacatttcagatttctaattaatttccaaatgttgccataggtatctgtcatttaaaaatgaaaaagagtgataaatggcacttttaaatggtttcctctatgacaatataaatttataaatataactaaaatgcaacctacccgttaaccattcacagaaggagggacaaaatgtatgtaattttccccaaatcacttgatgtaattaatagcaacattgaaagaatagaatctgcaatggttttatggtaaaaatataaagaagctaagattcctgctatgctcccactacctgcccagacaaaatcatttggctgtactatctttaccatcttatatgcttacctgataaagtacacatcaaatcttcctgctgtcttcccaaataacctttgcttcacaactctttcccatccacatgggacagacttacggcattctgttcctgcagtagcaccaaactgagcagaagcgatgggttcttgtagcaagggattacattcactgcttctttttatcatcatttgttcctcatcttctcccactctttccaattccatagcaacatcttctttgctggaaaaacaaagtctaagtgattaacttatttaaaatttatcttccactgcctactcagttttaatccatgacaatgcaggaaccacatagattatccatattaaaatgagggagattaaagtcagtgtggaccagtcttgtgctatgggagtattttcctgtcttccaaaagcttcccatatcctctagcacaggttaaaaggtgttggaaatctctgcacaacaaaaaagtcaagctagaaacttttcggattaatcactgagtagggctattataaagatttctgggggcacttaccataaatttgagaatatgaaccaatagctaagctcttaagcaccagaaaatgcttaaataaatcagtgagttacactg

SEQ ID NO: 108229 - DNA, 1039 bp, Homo sapiens
gccctcggcccaggcagcaagcccgctgcccccctcaaacacgctgcagcggctcgcgcactccccgcgaggactcgacctcctgctcttcgcgaaccgccccgctcctcaccagtgctcggctttatctctccacgtcaacacggccctcatcacggcttcccttacggctcgggctcctcctacccgcctcagcgtctgtctcagcaaccgcctcactaacggtcgccactccacaagccactttggctacctgcgttacccctggcaacgtacatgcgcggtaagctgagtgcgagggcgccttgctccgagcgcgcatgtccgaaagggaaagccagaaaagcagcaaaagcaatggtggcactggagcccctaaggcgccagcgcaaccagagcgcgagcgattggtcggggcgtgtgggggcggtgcgtcttcctcgagaatggatttgattggtggagcgtggaaatggcggctgtagccgagggggcggccggaaagcagcggcggcgtctggggcgctttcgcaacattcagacctcggttgcagcccggtgccgtgagctgaagaggtttcacatcttactccgccccacaccctgggcgttgcggcgctgggctcgttgctgcagccggaccctgctcgatgggcacgactgggctggagagtctgagtctgggggaccgcggagctgcccccaccgtcacctctagtgagcgcctagtcccagacccgccgaatgacctccggtaagttactgtccccttttgggcctcagtttcaccacctgtaaaatggtatcgggagagtggacagtgtgtgggcctttctaacctttgacagagggtcggcagaaacctcgaagcccacgggtttagttactagggtctggagcccaggtgctcttcctgtgcgatcagccctggggtgcgctcgacttcctcatctaagatgactagggagactgggggggagccgggaggttttgtgaaagaggtccccttggggttggaggatcctaggaagtcattaga

SEQ ID NO: 108230 - DNA, 1114 bp, Homo sapiens
tcaaatccctgaaaagttggctagaactttaccaatctattttatttttcttctgaaagaatgatagattcatagtaagttacaaagatggtaccaagaagtctatgtacttttcatccagtttcccccagtggatccatcttatgtaactattatacaatatcaagaccaggaaactgagactggcacaaagtgtgtatattatatagttctgttgttttatcgcatgtgtagattgccatcagcgtgacacagaactaagccatcaccatgcagttaccacttagtgtcatatctactcaccttacctccagttatctccaaaccctggtaaccacaaatctgttctccatttctataattttgtcattcaagaatgttatataaatggaatcgtacagtatatgaccttttgagattatgttttttcattcagcataaaatcctggagatccatctaagttgttgtatgtttcaattatttgttcctttttattgctgggtagtattccaaccaatccatcttcttttatattattgtgcattgaagggttgtggtctcctgaacagaagtctgtctccaaacacaaatcaagcagcaagatcatctgctgcaggtaagtgcagctctgacgataagatttatgttccttcatcttccacacagactctcaaaatccaattatttcatgcagcagagaaggtcttgtgttaggtagttggtttaggcccctgtatttccttttttcttctttcttcgtctcctcgatgggaaagacttgtgcctttgatcatgaagcaaaagagaactacaagttgccttcatgcagttacttagcaacaagcctcaacatccagctatactgagtggaggcttgttgaaaatgtgaggctgtcattgtccaggcagcatgtgtggggaagaaagctttccctcccacactttgatgctagacctgaattagaatccagaatctctcattgacaggccatgtgacctcaggaaagttactaaatctttctgagctggagctttacgttcctcatctgacagatagggataaaaatactgacttgacgagattgttgtgaaatgcacacaaactcatgagtg

SEQ ID NO: 108231 - DNA, 1032 bp, Homo sapiens
tcagcttctaggagtatatcccttccgttcagcatctgttgagcaccttctacaaagcaagcactgttctaggggttggaagacaccaagtctgttcttaaggtgctctttaagtgggaggggattgagatggagagtgggaagtggtggctggcccagagatgtaggcacaagctaagggctgtcatagaggtatgtacagagggctgggggagctcagaaaaaggcaccaaatggtgccttcacttctcactgtttattacagaactaaatagcattttaagtttgatcctctgactttatgtcaggaccggcaataatgaaaccatatcccagctgttgctgcctcatcagacttttatttcaaaccaaggcatcatcctcactagttttaccttctgtggggtgcttcccctatccccatgccttttgttggttgtgtacacagctggacaaatgatggtcagtacctggcgctggggatgttcaatgggatcatcagcatacggaacaaaaatggcgaggagaaagtaaagatcgagcggccggggggctccctctcgccaatatggtccatctgctggaacccttcaaggtactcttaaagttgtcctccttctagaacaaacaccatcatgaagaagggctttttgtcttcctgaggtctccctacattcaaaggcttctcacctcacttgaatggtctgttttagaacctgtcccatttgtatggattttttttttaatagtcccgctacctgagaatgtatggaatttattaagagcctcctcaaaagttgagtttaggaatgaatcctggacattttagcaaagcagatgagctatttaggacaggccaaagtgtgtgtgtggcgtgtgtgtctgcgcacatgtgcatgcacacatgtgtacgtgtacatgtatatgagtgtgtgtgtgtgtgtgtgtgtgtgtgtgtgtgtgtgtgtgtgtgtggtgtgtgagtgatgcagcaggaccatttccttatgaatcaatagtggagctctttgc

SEQ ID NO: 108232 - DNA, 1047 bp, Homo sapiens
caccttccctgtgcaccggcagaagctgcagggctttgtggtcggctacaatggctccaagatcttctgcctccatgtcttctccatttctgccgtggaggtgccgcaggtaactgggggtgcctgtccactcttagcactggcaaggctgacaagaccagggaagctgggccctttgctggtgctttggggagagagtagcaaggagagaagaatggcagctgtgaggtcgtgggaggcagtctgggcctggaacctgccgccctgtctccactccttgcaacctgtgtgactgggggcaaacagctcaacctccctgagtatcagtttcttccttgtcccctttctgtagggatgggaggggtatgcagtgttgtcagcagcgtgtgttttgcagagagcccagcgtggggccgaatggagtgagcagcaaagccgggagtccggcagggtgtgtgtgtgagtacgtgtgtgatggtggtgatgtgtgtgtgagagagaggggagagagagaatgagtgggtggggggtgtgggctgaggtctgtgagccaataagggagcatgggactctgcacaagctctctgaaccaggaggtggccagaacagaaatggggcactgaagggtggagccacagaatgggggagggcagaaccacagacaggcgcctgagattgacctcccgaatgcaggatggtctcccctccaccttctgcaccccaggcagatggtgctcactgtagaattgccataaaacagagacgtgcatagcgagaaactgtagccttcagcatcccatcctcaggacagaatcactcttaaacatgttgaaatacatctgcttagcgcttttctacgtgtatatataatatatgcataatatacaattaggagcatgtggttttataagaacatttttaaacaaaagtggaatcacactgcaaatacttttcatgacttttatgtgtatacgtattgctacctatagatggaacctcagatttactgtattccctgagcctggcctgtaaacaagacttctcatc

SEQ ID NO: 108233 - DNA, 1906 bp, Homo sapiens
aggctgaggcaggagaatggcgtgaacctgggaggcggagcgtgcagtgagccgagatggtgccactgcactccagcctgggccatagagcaagactctgacttaaaaaaaaaaaaaaaaaagaattcagaggagggaggaggcatctctatggagggagcttccctctcctgccccacccagaaatgccagcagggagggagacgacaaatccctagaatagaaaggattgtaaaaagccacaaggtttaatatgagtgtttactgatatttttataaatatatatatttttatatatttgtttaaatattgagacggggactcactgtgttgcccaggcaggtcttgaactcctgggctcaagcagtcttcttgcctcagcctcccaaagtgctgggattacaggtataaaccaccacacccagccagatttactatagttgaaaagtaagtgtatgtggtatatatctattgtgtacaacatgctgttttgaaaaagccacatgatattgaagataggctggatgttactatttcatctaaatcccgagtaccccacctctttactctgtgccaggcactcaggctcaccagcttggatatagtggttcctagagatggacagccatccccactagatggcagagaagagctgctgagctcccgccagaccctgagcagagctgcaggttcctccctattcccaggcttccctctgctgagctcattcaggggccttgtgactctgaccaggcaccctgacgctgcaaaatgtgtcaggttgaaggaactcggaaacagatttattaatgggcaaatcctagacactagcacagctgagctacagctagaaagacccttgagagggtgtcagtagcaggcccctttccacaaagaagatggttggagcccagaagcagagaagtaggctcagagcgaggactcagacctcgaatgctcctttccctcttggccactgtgctgggctttgcagggttgccctctcaaggcgctttaaggaaacccagatctagagggtgatgtgtaagacctacagcttgggacacaggtagtcttagccctgtgttccttggcccatgtgatgcccgcattgcccttttctacgaattcctcttcacaaacacttgtttgccaggttctgactctgatgcctcccttaacgctgcctcccacccctgctcatgctcagaccattcatccgtgttctccaggcatgtggttcgtagttggagagctcttagctctgggaggtgtcatgatctgtttaattgaccagctttccctgttagaatgtggacctctgaattgtggagggggacaggggccgagacatgtttctccctgggtcctcagtctcttgacaggaagcctggtcctgtgggatgaaaagataaagttgcattgtggtcacctgcaaggcaggccggggacttgctcatctcccgaggtcttttcaggagggaggatgccatgctgctgagcagaggctgcaagtggtcaggattgctctgcgtgttcagttcaaagggctctggagctgctgcctcctctaggcacaggtcagcccattttgaatggggcaataaatggtgacagcaaagccacctgaaagcagcctgacctggtggcttgtgctcctccaaaccctgggcagaatctgaaagcagcaaaactagcttagctaacaccagtctgcttgttcctcagaaacttctagaggtccatgagttaaagtctctggctttactgtgagttcaaggcaagggctgcaattttagggtttacataaagagtttgccttccacagacttggtgggattcattccctacccctccaccttcttccagaatctgtctttataccctctcagctttcccctcctc

SEQ ID NO: 108234 - DNA, 1036 bp, Homo sapiens
gactgtgttgttactgaatccagtcgcttgcatattgctgttaattgccttttgttttcgaagagctgatttgtttttgcatttctgtgggtagttttttgggggaggcactctccccctctgagttgtcaggctggcaaaatatgatgtccctaatggattcagccaagtacagtgttttcatgggggctgcaggggcagctttattaagacttcatttgctccttcccccaggcctttgctttgggtgagaagcatcctgagtttaaggatgacatctacatgccgtatgctcagtggctagcagagaacgatcgctttgaggaagcccagaaaggtaggcaacacagactgtcaccttctagaaggagcaggagaagttactgccaagacatacatttcaggaaggctaccaagcccttcccatctgtagatcccaagatagatgacttcatcctggggatgtgattgtttggtggtgaaagactgtggagcatggaaagaccattggccttggagtcacaccctcctgggccacactcacttgccacaggcccttaagaggtgctgcctcctctccaagcctctgtggttactgagcaaagtgctgtgcactgcagtgtatcttcccgtttaatcctcgcaacagccctatggtatagctaccatcattatgattcccattttgcagatgagaaaactgaagggtaaagaggtgaagaaatttgcctgaagtttcatagctaggaagtggcagggaggtaatgtgagccagggtaccatgaggacaataagggaggattgccacacagtgtgaggcatggtctctactgagaatagaaactcagcttctatttctggctcagataaacgggtgacttctgctcctcaagaattctgttggtaaaatgggctgcacacagcgtacaacagcatctgaaataggagttaaagcaagtatagaactttcgctgatgttattaatcatattttttaaagttgacttccctctctgtgtcaggccctggctgagcac

SEQ ID NO: 108235 - DNA, 1043 bp, Homo sapiens
tttggcctggaaaatactctcaccctggggctaggaagacctcggtttgtacaaacttcctcaaatgcagagcctgagggctctccccacctcctcaccaaccctctgcgtggcatagccctagcctcagcgggcagtggatgctggggctgggcatgcagggagaggctgggtggtgtcatctggtaacgcagccaccaaacaatgaagcgacactgattccacaaggtgcatctgcatccccatctgatccattccatcctgtcacccagccatgcagacgtttatgatccccttttccagggagggaatgtgaagccccagaaagggccagcgctcggcagccaccttggctgttcccaagtccctcacaggcagggtctccctacctgcctgtcctcaggtacatccccgagggcctgcagtgctcgtgtggaatcgactactacacgctcaagccggaggtcaacaacgagtcttttgtcatctacatgttcgtggtccacttcaccatccccatgattatcatctttttctgctatgggcagctcgtcttcaccgtcaaggaggtacgggccggggggtgggcggcctcacggctctgagggtccagcccccagcatgcatctgcggctcctgctccctggaggagccatggtctggacccgggtcccgtgtcctgcaggccgctgcccagcagcaggagtcagccaccacacagaaggcagagaaggaggtcacccgcatggtcatcatcatggtcatcgctttcctgatctgctgggtgccctacgccagcgtggcattctacatcttcacccaccagggctccaacttcggtcccatcttcatgaccatcccagcgttctttgccaagagcgccgccatctacaaccctgtcatctatatcatgatgaacaagcaggtgcctactgcgggtgggagggccccagtgccccaggccacaggcgctgcctgccaaggacaagctacttcccagggcaggggagggggctccatcagggttactggcagcagtcttg

SEQ ID NO: 108236 - DNA, 1482 bp, Homo sapiens
ctgtgtcgccgccaacggcattgacccagccttcctctgcagggccttgctgcctgggcactgacatagtgatggcagcaactcactgacctttctctcccactctccccctgcagaacctgaacgtgtccttccagggctgtggcatggactcgctgagcgtgcgggccatggacaccgacacgctgacacaggtcaaggagaagatcctggaggccttctgcaagaatgtgccctactcccagtggccgcgtgcagaggacgtcgaccttggtgggtgggaatgggggcagagaccccgtgtcaggcgcttcagccggggctggcccctgccttgacgggaaacactcctttcacctggcatgggtgcatgaatgtggggacactgagaggatccaatgaggccccctcagcaagaagctcttactctgtaggagacaagtcctgcagtgtgagtgaactacggacaacagcaaaaagccttcaggaaaggcttcctaattcctaaaggagggatgctggagtagggttggtttgtttgtttgtttttgagacgggatctcattctgtcacccaggctggagtgcagtggcgcaatctcagctcactgcagcctcgacctcctgggctcaagtgatcccctcatttcagcctcctgagtagctgggactacaggagtgcaccaccacatccagctaattttactttttgtaaagatagtgtcatgctgtgctgcccaggctggtcttgaactcctgggctcaagcgatcctcctgcctcatcctcccaaagtgctgggattacaggtgtgagccaccgcgcggggcctggagtgggttttataggagtcttggttaggccaagggtttcatcagcaattgtaacatgaacagccttgcagacaaggccatttccagagctcctcctctgtgccctccaccctggcaccttctctttgtaccctcacactctcccccagctctttcctgccctccccattttacagatgggaaaatggaggctcagagagaggtatggcttgcctcagtttacatggagagagcgagaggcctctccctatgtggctgggccggtacctacccctcaggcccagctccctgcccggaccctgatggcctgtcccttgtcccccagagtggttcgcctccagcacacagagctacatccttcgggacctggacgacacctcagtggtggaagacggccgcaagaagcttaacacgctggcccattacaaggtgcagccctgccccccgcccccatttccccaccctcatgcccccaccccaacctccggcctctgacctcggcctctcccctcccatcagatccctgaaggtgcctccctggccatgagtctcatagacaagaaggacaacacactgggccgaggtagtgcgggtgcacgtgggaagggagcccaggctgcgtgtggacaggggcttccatcccatgcccca

SEQ ID NO: 108237 - DNA, 1048 bp, Homo sapiens
atcttaaaacagtcctttaatatgaaccaacaatctggagcacaccgaagggcaatctaaattgtggcttgaaggactgcactaaaacccactaaaaagatgcgaaaacctgatgagggcaaaccagttaaacctaacaccctgccttgtctgggctcatcacctctccctatcccagactaactttactgtgaaatcctaccacattccatgtctgaatttttggattcggggtggattttcgttgtccgtggaagaacacatggatctctctggctttctcacccaagttggccacttacgctaatcctggaagtatgatcacttttgaacctgccccttaaccttgacgaggatacaaaagtgaaagcatcatcccccaaaggatcactgcacagtcctactacagtatttttaagtagccctctaaatacttaattttaagcaaaatcccttggccgcacttttaaggtttttttatatgtgtatagttaccaacctaaaaataaaaaatccgaacagcatacttgaagaatgtaatactcaaactctcagtgcttccttatggtttctaataggattttttattattgttattattattattgggtttttttggacagggttgggagggtcttttatttttcctttgaaataaagaagtgatgtttttaaatgaagaaatgtgtggatatttaagtgtgctgctccctcttgtcttgaaacagtttgagtaagaaagtcttgctgtaaatgctgccctctgccgcctttgttttgagatgcagtttaaactccctctggctgctgctgctgctttttggtgtcccgacatacctacgcccccgttttatgggtttggcttagttgaagaggaaagggttgtgcaaggagagcaggaggctgtttccaaaaaccagtgtagtaggatagggattttttttttttttttttgccccaagaaaacgttcacccagtgatcttgggctggggttgtctttaggaaaagttgagactataagagtcataaataagtccttgtgtttcc

SEQ ID NO: 108238 - DNA, 1060 bp, Homo sapiens
cattttaagcattttggggaaatttctctgccttcttttacaaagtacactgaatctaacttaatggaaagagcttagatatggtagtattcagcttagagtgatactctcaggttagtgaagctgtccatttatgtgcctctacagtaaatggccctaggcttttttcagtttgtctgctttttttatagttttttctcctttccatttcttctccacactgttagtgagctacccgcagcagcctctctttactaattctacttctactctgttgtaggctttgctttttgtgtaggaagaaagtaggctgtggatggacttcacagatccttctgtgaccaagaaccagttaatgcatgcgtggatgctcaggatacattttttttctacgctttagtttattttactagtatctgagttgatgagagggaggccatgcacagtgttgctgtttgttatttgatgatgatggtgacaaggccactaccacgaacagtgttaaactcctgtgatgtgcctagtgctagatgttttacgtacatttgccaatcctcacagtaggccctacaggtaaattgtattattcccattttaaagatgaggaaattgaagctcagtggggttttaaaagttgccagaggtcactcagtaagtggtaaagccaggattcaaaacccagttttgtctgacttcaaattcagtgttattttcataccaggatgatttttttcaaagctcaatcccgaaatctatatggttgaaagcctagctctctgaagcattagatgcattggcagtgggtattaggcctatcccaagttgaagtaaatgtttactaaaagttgagtcactgtttttaacatattttataaaaatgctatgaatatgcaagctctggaaagtttcctaggccagtacagcagtgtaaataaataggtgaaaccttcttaaggaaatccctacttcggtcattatttccccttctcagaatcccttctcaataatgtccttcgcttaatgtgtttccattgctgtctacccaagtgagtagctccaa

SEQ ID NO: 108239 - DNA, 1068 bp, Homo sapiens
gccacagctcctctgcagtttggaagctggaacaaatggaaagagcttatagccaagagaggttgtgatttttttttttttaccatccaagctttctctggcagtgcacaaatgaaggatgagctttgtggcaagcaaaatcagcagactgcctgacagggggttttggtaagataaatgtgttgtgatttttttcttattttttgacttttctatatcagctgtatggaattgcttcttagcaataactaaaacattttgcaaaatcatgtttgatggaaaaggatgaccaagggaaccagaaggagaaacataacttgtggtcattcagttgtgaccttcagagataatccaagttttctcatgtgtctctcaacagacagaagccagaaatttccagagcaaagaatgcagactaacaaacctcttttcttttctttgaatagtcataattatgcttttttttccctgctttttctatagtctgaagcgggagaaggaaaaataaagccttcctcctgttatagagttgttgccactggaacagtaataggctgagaacataagtatggaggtggaggaaggcaggataaggagtctgctattttcatagctgtgcgttggtgggtatttgtcttgggttcattgtcattgctgtttgatatcaagtggttgtgaatgctgtatctctttgcctctactatgactgaatctcttttatgttctcttttgtatattttctttgccagactcaattctattgatatgaagcctttttctgttactgtttatacatattagccgttattagagaaaaaatagttgtagagagtagccctccaatatttatggacctcaaaaaagataaggatgttgtttttctctttaaaatgtatgttttacttttagcagattttggagtcttgcttctggattctttaataagtgttttattacaaattagagaaatgagttgcattagatttgcaaaatcctaccagaatcaccttgctttaagttggatcttatttcttatgttttttttctaaacattaaagtttacttttc

SEQ ID NO: 108240 - DNA, 1403 bp, Homo sapiens
accggttttgtggaagacaatttttccacagatggggtcggggtgtctgtgggcaaggttggagtgggatggtttggggatgaaactgttcacctcaggtcatcaggcattagttagattatcataaggagcatgcaacctagatccctcgcaagcgcagttcataatagggtttgtgctcctatgagaagctgatgccaccactgatctgacaggaggtggagctcaggtggtaatactcgcttgctgctcacctcctactgtgtggcctggttcctaacaggccactgacctgtactggtctgcggcccaggggttggggatccctggattaaactatttccttgcttccctacctttgtctctctcttacctgaactatttattgattggtaaactaaaatattctcattgaaacaatgattaaaatgttcacaaatgaggtacttgcccctagtatctaaaacttttaatataacaatctagatacataaaactgctatagatagggtttcatatatgacctccttgcatgagattgcacacgctttgtgttttttgtttgtttgtttttgagacggagtctcgctctgtcgcccaggctggagtgcagtggcgccatctcggctcactgcaagctctgcctcctgggttcacgcgattctcctgcctcagcctcacgagtagctgggactacaggtgcctgccaccacgcccagctaattttttttttttttttttttttgtatttttagtagagttggggtttcacggtgttagccaggatagtcccaatctcctgacctcgtgatctgcctgcctcggcctcccaaagtgctgggattatagacatgagccactacacccggcctgcacatgctttgtgaagagttcattccaaattacagaatgaacattttgaaggcaggatttgagaagaaaaaatgtagctgactctgtggtcccagctacttggaaggctgaaatgggaggatcacttgaatcccggggcagggtagggcagtggaggttgcagtgagctaaattaccactgcgctccagcctgggtgacagagcaagatcctttctcaaaataaataaatacaataaagcagggtaagaggaattggaagtgctggacattgagggtagactgccatttttaatagaacagtaagcataagcttcatttaaaacaagacatttgaaggaaggcttgaaagaggagagcaggttagccgttcagctgaggaatgagcattccaggcaggggtacagccagaataactgcaggagttttcacagtgtttacaaggaattaaaaagaggttagttggtatgattagagcaataattaagagagggaagagtggcaggaattgggagtgtgagagatttaatac

SEQ ID NO: 108241 - DNA, 1714 bp, Homo sapiens
tgcccaggaacagatcagatcagaatcagtatgttgtttatgatacagatcaaattaactaatgattcttccagttttcttcttcctgattatttcctccagacacaaaatagggtcaaggagaaaagttcttttctaccattaaacttttgagctgcctgtgtttgggattcaaagtattttgggtgcttattgcttaactgggctgaagattatctcatgtgacaccatagatctcttgttttggaattgccattactttctagaacaggcattctgtacagctgccaacatgccctgaatcctcttgcttcatattacagtgatactgctttgtcagggtagaattcagcctcacagggctggagtaagtctctgctgacctcatgccacagtacaacatgttcaaatctgggagaaacctgagggttattcggcatattcctcctcctcctctctcacaagcatggagccctcactctcctcggaaaccgtatgttgtatatgtgtgtgtatctgtcttttaaaaaaaaaaaaaaaaaaatctcatcctgaatcctatagttagttagtcctgcagctttaagtgggggctggttgaatagacagacaaaggaaatagcctgagctgctgaaacttagcgtttttcagcagtagatctcagccaggggcatttgctattttaggactgacttgtgtaaggttgtaataatggagaagcataatatgtgtttcctagttgttcattttacccaaagctatttggacagaatgtagagggtgctctgtagctgtatggacatgctcagatcatcctggagtgtcccgtctcttgtgtgtaatgggctgcttcattgcagagtaagtgtcatcctcactttctcaagcgaaatagttactggaaaatcagtgtttctttcaatgaacaagagtttcatttgccttggactgcttgggaaaaacatgggttaaattcgaagatgccaggcatgcataacaaataggaatttgatttagagccacctggaatacttattaaattaaaaaaaaaaaattcttgatggatctaggtggccaaaaaaaaaaaaaaaaaaagaaaaagatttcttagtgctcagctacttattttcaaagtatttttcccaaggacttggaaattttctgaattgtaaagcaatatacacatatctcagtgtgaaacttgtatctccagatcagcagaacaaatctctgagataaaactggattggaggatgatccagctttattcaacacaaccaccattttcacatttcatccatagtcctgagtacaaacttagcctatagtttgattttaccattttttttagttgaccttgccattttttagttgatcttataaatgatacatattttctaagagataaatactaaagcaaaggagattctttatagttttgcctgattctgaagttaatgtacattcatattgtttgctattgagcagttggatttaagatccaaacagatttttcactgtgaagtttgatattgaattaccctcttatgccttatggttgataatttaaatgccaactttttaagcagatttgtgcctctggtctgtaccctctttttctgttgtttgctatatatcttggattcaaaacccctgacacatctctgtttgttctgaggttataaaaggtcagtttacttatctattttatta

SEQ ID NO: 108242 - DNA, 1022 bp, Homo sapiens
tggctcatgtctgtaatcccagcactttgggaggctgaggcgggaggatcacttaaggccaggtgtttgagaccagcgtgggcaacaaagaaagaccccatctggctttttttctttccttttttttttttagggagagtctcactgtgttgcccaggctggagtgcagtggcacaatctcggctcccgagtagctgggattatatgcaggtgccaccacactcagctaatttttttatatttttagtagagacggggttttaccatgttggccaggctggtctcgaactcctgacttcaggtgatccacccgcctcggcctcccaaagtgctgggatttacaggtgtgagccaccatgcctggtcccatcttacttttttaaaatgagaaaagattcagctgtgtctatttaaaggcttctctctctctctcctttgggaaggacatgctttgtgcagctaaaatggagaaagagtggctaagatccttaggatccagaatgtctggcaacaagccctagtggctgcaatcacaactataaacatacagcatttcccatcagggcatttgctctgaagaggaggattcttgtggaaacaagtaggcttagagaaatgcaaaactactcttggcacaggctgagctgcggagtgaagcgctcagtttagcactgtggctgagaagctgttggtgttattctctgtgctcacaagagaaggtgtacagttggtgtaggatatgacaacaaaatgttttataatctcatcatacaagcccaagagaagagtgaatttcaagaagtgtgagtgcatgtttaaaattgtaacgaagtttttttctctttgtttttgtacttttgaataaaaatcttcctagtagatagcagtgcctccagaaatggtagctgataccttgaaatctagtttaatttcatttagcacatgacagtgcagtgcatgtcttacaagaaatttttattctctccattattactcaatatgtctacatctccccttgaaat

SEQ ID NO: 108243 - DNA, 1504 bp, Homo sapiens
atcctggctattatgtttaatttctttttcttttttttcgagacagggtcttgccctgtcacccaggttggagtgcagtggcatgatcatagctcactgcagccttgaactcttgggctcagacagtcctcccacctcaggctcctcccaagtagctgaaactgcaggcatgtaccaccacacctggctaattaaaacatttttgttgttgtggttaagatgtggtggtggggttgtcatgctttgttgcccaggcaggtctcgaacttgcgggctcaagtgatcctcctgcctcagcctcccaaagtgctggaattacaaatgtgagccaccacacccagccttcaatttcttatctgcatacacccccaccaagccagcaaatgtcattgattctactttctaaatattctcgagtagcaggtattgttcagtgagtactcttgtctctgtccccagcatagtacctggatccctgcagcagtcttctagtggtctccttgccttctatattatcccccctgtctaattcattctggatgctgcagacaggtttaattatggcatttttctgctgaaaattcttcattacctcccttaggataaagttcaaacttcctaacatgatctgtagagattctttatgacctggcctctgctcttcagcctcacattttaccattcacacccttgctccccacagccacacaaaactactatttatttcttagtagtctagctgttttacactcgttcccttttcctggtcttcccattgcctattctcacttccatttccccacaaaacaagcacacattaaaaaagaaactcctaaggtcccttgggtcttagcctaggtgtcatttctccaaagaggtttctgatctgccagctctaggttagttgcccctcttttgtattctcttagtaccctgtattagttccaaccatgatactgtctcactgttttgaattgtgtctgttttccactagactgaaagcttcatgagggcagggacagtatcttccatgttcaccattttatttccagcttctagattcttaacatacatttattgaaggtgagctgtgggaagaaaggtagtatattaatagaatattcatagcatttttttaggtatgataatttatacagcctattgatacttttctagaaagaatattaaacatatttagttcataaggaaactgatacctctgtactatataataaactggtcagtgccctaaatattattctcagaagtggcccataagtcttttccacatgacccagcagtgtatatgtaatcacaaaagccaagaaacaaaggtgtttcagcttgatatctttcctcctccagacctagaattggctacatttctccaaggagccctggtttctttcagtggaaaataatatttagagaccatttaaagcatgaggtatgctcattactgttatgttgtgccaatatgacaactgaaaacagttaatttttt

SEQ ID NO: 108244 - DNA, 1004 bp, Homo sapiens
aggccaaggtaggcagattatttgagcccaggagttcgagaacagcctgggcaacaaggcaaaaccctatctctacaaaaatacaaaacaatagccaggcgtggtggcctgtgcccacaatctcagctacttgggaggctgaagtgggaggatttcctgagcccaggaggttgaggctgcagagaactgagattgtatcactgtactccaacctgggtgacagagcaacaccctgtctccaaaataaataaataaataaataaataaaaaggtgactttcgatattaaggcttagtcttcttaattttaatatggtgaaggaaacctggcttaaggtatataactccagcctggtttttagcatgtcttatatttaaatattactttgaaccatgtgaaattgccaatactggagcagtttttggctcacaaaagtggtgattttatatgatgcaccataatgaagtaccataacagcttagttaaaagattcttctgtccaatataggaattcattccgtagcattcttggaaacattctggtaggagaaaaggatgaggtaaaatggggatttttcatatcaagtaagggggagagttgaggtccccattgagtacaactagtaggtcctagagctgcattagggttcctgtggtgtgctataagctctatgctactgaggctgaaggctgtaaattcattgatgtgacaattagatataccgtgcccacaaatctgaatactaccacatactctccaaatacctggctgacaagctatggacctgtataggatttcagcaaatttcaatttagccaaaatagtattacttaatttagtttactctgtgtataattttcctatgtgtttccttaggttagtagttgaacttcaaaatgataataaaactgtcctggggtttaaaacattgtaaaaataaaatatgcaacaacaatagccaaaggggtcaggggaggcctaatggaggtaaaaggccttgtat

SEQ ID NO: 108245 - DNA, 1081 bp, Homo sapiens
ccagcctgatttttgctcatagttctgtatcagtatcttttgttgccttagggtgcagagatgtgtggattagtacagaaattcaagacaagtttgactttcacatgttgttttcattgttatgaggatttgtagctctaatgtttttctacataaaatcagtaaaactaaataaaatcagggtccttatttagatgagtaacttgctttgtcacatcaagattaaatgtactgttttagtgggatttacctaaaaagaggtaaaaaaagaattggctactactgaaaccgggaaaattgtttgcaaaatgcattaatgttcagtatggaaaataccaaaagctattcttttttgcaggatttcagtactttaactaaatgtttttctataaatactgtctttacctctctctctcttcttttgcaccctggagattttttttttcttcctgtcagtttgtatctcttatcatttactgtctgtggcttcacaatactgtattgttacagtaccatttaaaaaattacagctggaagctctgaaatgcatcctgacaaaggaaggctgaattgtgtggctttaggccaacagtaagctacaggaacaaatgaaattaagaagttaatattatttcagatatgtgtttgtgtccttagtcttacagagaattattaaaaccaggaatttaaaagtcatatctgctttccaacactaggagtatgaaacattttacttgcttgtgaatcttctattttaaatgttattttttgtgaacaactttctgtagatttatttaatataatcttccagaatttttttttttttttttttttgagatggaatcttggtctgtcgcctaggctggagtgcagtggcgcgatctcagctcactgcaagctccacctcctgggttcacaccactctcctgcctcagcctcccaagtagctgggactacaggtgcctgccaccacacccagctaactttttgtatttttagtagagatgcggtttcactgtgttagccaggatggttagccaggtcaggatctcctgacctcgtgatctgggattacaggtgt

SEQ ID NO: 108246 - DNA, 1054 bp, Homo sapiens
ggagcttctaaagggaaagtttggaagttatggattcaggttctctattaaggttaatatcacttcagagctcactatatcatcttcttatttatagccagatttaggaaaagcagtgtatattaggctgcaatgagggaagctttttggattacttataggcagaaggaaagggaaatttttgtaatgcctggctgtacctggaagatagagaaaagtggaagaagtttgagggagatgtatgtgttcaaataaaaagatttctaagtttgaattagttgaactgtaagcaaaactagtaatgcaggtgtactgttctcccagtggggaagaaatgaagcggggaaaaggataattcattttgttgaccaccaggtggtgccctaggtgaggattggtaggtggaagtgaggggatggatgcctgacaggacattgattaaccccggggtgataatttaattagtacaggaagtcattaggatgtgggctagcttgagcacagtgactattaaatagtgatagtgctcttataaatattgagctgaattgataactgtggaagtggaatggacaatagaagaacaggtaggatttgataacaatgttagaataaaaaattttaaaatctgaagtttgcttgggagaatcagaaaatattttccatttccactaaacagttgaaaaattgtattttttaaggaaaaccatttagtttcagttgggtggctgacacctactatgaagagaatgtcttataggcctttaataatacggaactggaacagtgggcataagttagaaatgaagatgtattttggctttctcattgttctcccttaaagatactttacgtagcaaaacttgattgccaaagcaagtaacttacaggtttattgaccctacctctgaaagccagaatgtttatggctatgtcctttcccccaatactgagtttcctttaatataaatatgtattcattggccccaaagatattttgattatccttaatgatctcatgtgggcatcaaatatagttcttgtaagagtagaa

SEQ ID NO: 108247 - DNA, 1059 bp, Homo sapiens
gtttggccagtagcatgtttttctttgttttaacactggagtttctgcatggatttataatataaggttttttttttgtttttttgtttttttgtttttaacattagataggcatgaagccttcgtctcacagctgcatgcgtagtcactgttgaagcaaatgcctacctaatttgacactcttggtgtgtttaaaaaatttttttgagtttgcaaataagcatattaagtctactgatggagccttcgggcagtgaacagttatttgaggaccctgatcctggaggcaaatcccaagatgcagaggccagaaagcagacagaatcagaacaaaaattgtctaaaatgacccacaatgctttggagaacattaacgtgattggccaaggcttgaagcatctcttccagcaccagcgcaggaggtcatcagtgtctccacatgatgtgcagcaaattcaggcagatccagaacctgaaatggatctggaaagccagaacgcatgtgctgagattgatggtgtccccacccaccccacagctctgaatcgtgtcctgcagcagattcgagtgccacccaagatgaagagagggacaagcttgcatagtaggcggggcaagccagaggccccaaagggaagtccccaaatcaacaggaagtctggtcaggagatgacagctgttatgcagtcaggccgacccaggtcttcatccacaactgatgcacctaccagctctgctatgatggaaatagcttgtgctgctgctgctgctgctgctgcatgtctaccaggagaggagggaactgcggagcgggtaagtttgtaagattttgtttttctgttaacttactgtttttcatacctaggactctccagactttcctttggtaactaaaaagatatctcagcaaataccttaaagttgtggtaaaagaatttttccccttttcaaatgggtaaataataattatagctaatgaatgaatgcttagaattatattcctatttccttcctaacatagtgctatattttattttatcctttcgttaaaaccttaag

SEQ ID NO: 108248 - DNA, 1183 bp, Homo sapiens
ttctgtaatcttgttctctcttcttttttggatttgagtattttaattctttctcctttctatttagtgtgtttgttttccctctggagtaacattagttaccagttacctgtccaccattccagaatgaaatagtctgtgcatatgcagtatgtactcactcctttaaaagtagtagcatgatatatacatggttctgcactttggattttttaaataaatacactttttaaaaacatattgcagattgcttgccgcttttacactcttggacagtacaagaaccttggaaccctgtgactcccaagtatatgctcttgattatgtatttttgttctttatagaaacctcatcacacgttattattgctttaataattaaatgttgtttgatatatctctctttctggattctaaaacagagtatctgtctccttggtgatgggttgctaggtggggctggttcagctagataattaggaaaaactaagcatatgctaacagatgggaaaagcctgtcattaaaatatatatatatatatatgaaagagtgagagaaaccgtgactgaattttttttatgtttggaaaagaaaaacttattcacagcatgaaaacacagccatgaataggaaacagtggtcataataagatcttcactaaggaccttaggaaaaaggatttcaagaggatcaaaggaaagagggagaagctttcttgggtagttaaaacgtttccattttattgtggcataaatgaggtgcaaaagaaaggaaaactgaaatttcatagttgtaacatcttcggccagggtggtgagagagtagagaaatatttaagcaggtctaaaggaataagagacatcttaccaaggctggatgcaaggaaatagctctcacaaccgtctagagggagcccataggatttgctaaaaggcaatcaatttctttggggctaaatgaagtatggatgacatttaattgttgaaataagatgcaggaggatgaattggatgattgtactcgtaatacgtttccagctgagaactataaatactcattttatcagatgcttttttagcatctgtcgcaatggtatgaggaattcctgttgactcttcagtactttgtgcgctcattcctttccattaacttttttattccattcccagccatactaatgggc

SEQ ID NO: 108249 - DNA, 1900 bp, Homo sapiens
ccagccgatatagagatacttacaaataaatgcactagtctaatccttattaaatcttgctctgttaaatttatgatcatgatgtggtacatgtttaatagtagtagtagcagtaagaaaaagttatagtagctcttagtattcttttgtgccaggctgtatattaagtgttttccatgtgcatattgtgtcatttattctttacaataagactgtagaatgggcaatatttttatctccattttggaaatcaagtaatttgctcaaggaccaacaattagtagaggagcgagccatagtagcagaatgtttcaatgatgtaggaagtcaggtcataagaggaatgaaggtgggggagggagtattagatttgaagagttaagtgtgaaatagtccttcatgagaatatgggagtgaatagactagagaaacatagtcagattacagaatagaatcaaatgctcatttgaggttagtggacatgaatttaaagtttcattggttggcacggatttgtgtattttcttgtactttcaactgcacagtgtactttcaactataagggttcaggtatggaatcagagttagattggcaggattggggttttgccagttgtttgaggaaaggaggccaaggaagctaagggtgtgcaagggaatgtttataatgatggctcatataatctaagctaggggacttattataggagaaggggttaaatagaatggaagtggagttatttttatcctgtgtatattcactcttttcaacagatggtcctagaacaattggagattcatacgcacacaaagaacctcaacccttacctcacaccagacacaaaagctaccttcaaataaatcataggcctaacttgaagagctaaaaccatgcaactccagaaagtttttgtcagaaagaaaatacaggagaaaatcttagtgaccttggggtaggcaaagatttcttaagacacaaaaagcatgaagtataaaggggaaaaaatcgctaaattggatttcatccaagttaaaaacttttaatctttgaaagatacctttaagaaaatgaaaaagtacgccttgggctgggagaaaatatttgcagaacgtgtgtctgacagaggatgtgtatctagaagatataaagaattgtaactcaagaattgaaagacaaccccataagaaaagggggaaacaatttgaataaagttcatcaaagaatataaatggcaaataagcacatgaaaagatgcccaaagtcgtaagtcattagggaaatataaatttaaaccataatgagataccactgcatactccctagaatggctgtaatgaataggattagtcacatggtgacaagaatggaggatcatctggaactctcatacactgacgataggaatgtgaaatggatcaactactttggaagacaattgggcagtttctttcaaagtaaatgtgaagatgccatacgattcatccattccatttctaattattcaagagaaatgaaactgtatatccacaaaaaagacttgtacacaaacattcacagcagctattatttattggtaatagctaaaaactgtaaacagctcccatatccatcaagtgtatggataaacaaatttggtgtatttatacaatggaatactactcggcaataaaaagaacagttgatactctcaacaacctagatggacctcaaaataattcggtttaatgaatgaagccaaacttaagaagagtacattgtatgtacttggagaactaacttcttgcaatagatttttaagcactattaggagcatatgacttaaacagtttttaaaagtcagggagtaagtatgcttaaataaaatacaatctgtgaaacaaatctctgaattattatcac

SEQ ID NO: 108250 - DNA, 1315 bp, Homo sapiens
ctgaggcaggagaattgcttgaacccgggaggcagaggttgcggtgagctgagatcgagccattgcactccagcctgggcaacaagagcgaaactctgtctcaaaaaaaaaaaaaaaacatatatatatataaaatatatattatgtatatataatatatattatgtatatatgtatatataatatatgtatatattatatattatgtatatatgtatatatattatatatgtataatatatattatatatatgtatgtatgtatatagctgtgggtctttgtacaccattaggaaacaaatgagagatgaagtctctaaagcataatgtgtatttatttcataatcgtaagtttagaaatcagtaggataaaggtcagattgggtgtcagggcatccagaatagtgggtgtattccattttgatctgcatatcttattctgttgttgattaagagcagtgagagtccataaactatggtatatgatagctgtgatctctgatacaagcttcatgtagatgacactcaaatctgcacattcagcttgcacttccctactgcctgctggacatctgcattttgagatcccgctggttcctgaaacctagtgtgtcttctaccaaagtcattggcattttgcagtgatatttttttgcattcccataaacctatacctcctctagttttacttatcttgattaatggcccatcattcatttagccaaccagtctacaaaacttggggttttctttaatttctttcttttttacttctgaaacatgtcttccctgttgaaccttaagagtgttcatttattcactcattcactcgtttattctgacatttattaagcatctattatgtgccagacattatgcaaggaattaaggatatagtggaaaataagatcaattttctgctcttacagaccttatagttcaagctttcatcattttctccctatcctctttgggctattttgatagccatccatattttttctggttataaacataatacatccttattttaagaagtgcaaggatgccaggagtggtggctcacgcctgtaatcccagcactttgggagtctgaggcaggtgggtcacttgagcccacgagtttgaaacaagcctgggcaacatggcaaaaccccgtctctataaaaaaaaaaaaaaatgatgtggtgtcatgtacctgtacttccagtgggagctgaggtgggaagatctcttgagcctgggaggtggaggttgcagtgagcccggattgcgccttgcaccactacagggaaaaaaaaatgaatgagaagcc

SEQ ID NO: 108251 - DNA, 1049 bp, Homo sapiens
tagcaattatcaaaagaatgaaggtataactttaaggaccaatgatattttaaactttttttttttttttttgagatgaaatcttgctcttgttccccaggctggagtgcagtggtgtgatctcggctcactgcaaccccgtctcccaggttcaagcaattctcctgcctcagcctcccaggtagctgggattacaggcatgtgccatcacacccagctagttttttgtatttttaatagagacggggtttctccgtgttggtcaggctggttttaaactcccaatctcaggtgatccgcccgccttggcctcccaaagtgctgggattacgggcgtgagccacggcaccggccctattttattattctttggtaaaagtatccagtctatgtagcatactcagccagatgagcttatgtaaataaccaaagtgggtgggtgtggttagacataacttattcttggcttttatggaagacctctttttcttcatttgtttattaaaaaaaatatgtattgcttactttcatatttgttggccctgttgtaggtgttggagatacagtggataaaagtttctaccctaatggagtttatgttttagtggaaatgaaataacagattggggccaagacttgttagtggtctcacactggtatgagtaatcttttttgggtgtgtttgtgttgttttttttttttttttttttttttttgagatggagtcctcctctgtcccctaggctgaagtgcagtggtgcgatcttggctgactgcaacctctgcctccagggttcaagcgattctcctgcctcagctgccaagtagctgggattacaggcgccggctacctcacccagctaattctttttcgtatttttagtagagacagggtttcgccatgttggccaggctggtttcgaactcctgaccttaggtgatcacctgcctcagcctcccacagtgctgggattacaggtgtgagccaccgcacctggccattttttttttttttaaatagcaatggaatcttgctgtattgctcaggc

SEQ ID NO: 108252 - DNA, 2287 bp, Homo sapiens
ctccgctcccacttgccccccattctctctctctctctctttctctctctctctctcttgctctactctcgcccgtctgcgttctacattggttctgcggccgtgtccctttcgtgtgtgtctgccctgtgtttctccgtcgtctccgtgtggatctcggtctttgtctcgccctctagctctctcgtgcgcctgtgtttaatcgtgcgcttctctcaatctctctgtccctccctttgccccctacacgcgtgttctcgtcaacagatctccagaggtggtgcagaaacgaccccgcgccggcgccccatcctgcggccagtgcctccgcgccccggctccggtccccaccgtccccgccccagatttccggaggagcaggcgggcggggtcccgcggggccggctgccgtcagcgccccttcccggcggccgcgacccctccccgctgacctcactcgagccgccgcctggcgcagatataagcggcggcccatctgaagagggctcggcaggcgcccggggtcctcagcgctgcagactcctgacctgccgactgcggatcccgagtccccggatcccggacccatcctgtggagcccactcctggcaggtaaccgccccaacccctctccttccgcagacggtgtccgggagcactggaaagggagccctctcggcccgccctcaccttcggttctctgagagcttcctggagaacagggccggtgcacaggcgggcgctgtgctcgcacccccgggtcctccccgagcgcaggccggggacccgacgggaggcacggcgcgggcacatcggaggctctcgctgctgggcactcaggtcgccagagtccgcagcgcggggtgggagctccgcggcaccccctgcctgggtgccgccggacagagctgggtattcagggcgtcggcctgagaacctgggagttcgaatcccaatctcaacgctagaaatagaattttagcgttgaagttaggattttagcgttagaatcagattcctggcttagtcatgaaagcttagcattagaaatagaatcttagctttgcaaatagactttgagctttagaacctgaatcttagcgatagaaatgggatcttcgcgttggaatgaggacgtcggccacggagcttggagttagaacgtggcgatggggacctttgggggagtcttggcggggacgcaaccgttagcgtcgcggctgtgcctggcgctgcaatctcaatggttgcactcccggcgaggcagtcccagcgttggcttccccagttccgcgtcacattgaagggtggcggtggcgctggcgatggggttcctacggcctcctgccttgcgcaagcagaactgggcgcaggcactacaggcacccgtgggggcgaggacgcctagaggtgacaggtgtggacgcagagccggggcgaacccgccgctgctcccgcccctgcacgaggggcagtggtcctgcttctgggagggcggttgaactgtgcgtggtttgtttctggcgggcgtcgggggagatggagcgggatgtgctgtgattcggtgcgctcaggctccctctgtcccctaacccagacgccgcgatgcccggcccttggttgctgctcgctctggctttgaccctgaacctgaccggtgtccccggcggccgtgctcagccagaggcggcccagcaggaggcagtgacggccgcggagcatccgggcctggatgacttcctgcgccaggtggagcgcctcctcttcctccgggaaaacatccagcggctgcaaggggaccagggtgagcactccggtgagtggatggggctgttgggggctgtggggctaggctattgggagagccgtggaaacctgccggcaaaggggaggggaggcttggtcagctagccttctgcctttcggaagctcagaaaccctccctggctgcgcctaggcgggatctggagttgaccattcctcggggtcagattcctcccctgtctcaatgctgggaatatttcacagagagcaggccctgggtggggaagcttctgtgtgctagggagagagtttctttgtgtgtgacagtttgaattactactgtctaggcacttctgtgccagacactattccaagcacttcaaacaccttatcacactgtttgatcttcctaacaacctcttagttaggtactgttattacgattttacacagaagaaaactgaggctcccagagatcaattgagtcgcttatggtcagacaactagggagcgccagagctgg

SEQ ID NO: 108253 - DNA, 1605 bp, Homo sapiens
ctgtgggaccccacaaacggcagcaccctggccgacgagaagatgaggcttcatggtcagtcgatgtaacccagcacaagcggcagcatcctggccggcgctccccctggcttgcatatgctgtcccgaagcggcagcacccaggcagaaggctggcagatcccaaggctcaaaggagctgggaagaagaggaggaggaggaagagagagaggaagacctgatgcctgaaaaacgccagcatccgggcaagagggccctgggaggcccctgtgggccccagggagcctatggtcaagcgggccttctgctggggctcctggatgacctgagtaggagccagggagctgaggaaaagcggcagcaccctggtcggcgggcagcctgggtcagagagcccctggaggagtgaacccagttttccctgaagtcgagtttgtggtctaaggatgtcttgagccctgtgtgccccaccattcatgacctctgtattctctagttagatccctgaccataagcctgagcccctccctcccagccccatattcacacacatcccagcccctggccttgccctcttcctttaggcatgtgagaaaatcagcctagcagtttaaaccccactttcctccacttagcaccataggcaagggggcagatcccagagcccctctcaccccccccaccacaggcctgctccttccttagccttggctaagatggtccttctgtgtcttgcaaagactccccaagtgggacagggagcccctgggagggcagccagtgagggtggggtgggactgaagcgttgtgtgcaaatccagcttccatcccctccccaacctggcaggattctccatgtgtaaacttcacccccaggacccaggatcttctcctttctgggcatccctttgtgggtgggcagagccctgacccacagctgtgttactgcttggagaagcatatgtaggggcataccctgtggtgttgtgctgtgtctggctgtgggataaatgtgtgtgggaatattgaaacatcgcctaggaattgtggtttgtatataaccctctaagcccctatcccttgtcgatgacagtcatcctaatgataataaaacctgcatccagataatcacggagctctgtggttgctgttctgtcgcagctggcatgggattcttctttcgcattgagagggatatttaaaaggggatgggactagagttctcagctctgctgcagagggaatcagggaccctgggaggatgacaagtcctctctactgtccccatttcagaacacacttgggaggtggatggggttctggagcccatttgactcctggggagactaaggcctggagagaaggaagggcttgcccaaagacacacagctggctgaggtggagccatgggtctgagaggccagctcagggatttgccttgagtttgcctgatttgggaggcgggggtggtggtgagaggggaggtttgaggggaggactagtctggctcaggtctgtaatcttcatggttctgttgacagcttgtgtcaccaaacagcctgttaatgaacaggaacaaggagggcagaggaccaggctgcagt

SEQ ID NO: 108254 - DNA, 1082 bp, Homo sapiens
cccgcaagcattaggagggtcaccttctgcaagaggggcttcagagctgagtgcaaggacaaaagctagctccagatgttgtcagattctccccaaactcacggccacatctgcagaaactgcaaccaagttggaggaagggacttgcttagaatgcctaatgatttcacaagtttgactttattgggggggggtgactaaaatgtattgttctctctttcttcccagggttctcaaggtctgaaaggcagcagaggacacaggggagaggatggaaaccctgtaagtttttattactccccctcaccccctgttgcacacacactgtacacacacacacacacacacaaacacacacttattttctttttcataaaaaaagcttattttcatacaaaaggggtagatggggttttgtttatatgtttatttttatatgttgatatgtttattttgtttatatgtttatttttgtgcttttttgtgggaagaagggttgcctttcttttcacttttccttgtctgaatgatgaggcagttactaagtctaagtttggggtaaggagggaacaggcttacacgtgtagcctggcatgtttttatcagtggcagatacctgggcaccctcctctctacccccaagcagggcacagcaggttatctgccagggagctctttttagacctaaaacccagtgcttagtacatggctttgggccaaggctggagtatacacccttccatggaaagggaagtcggcaaagcatccctcaagatgagaggcatggcttcacggtcaaatgctacacagaggtttgcgaatctctgtgtttgaaaccagaactctcactttctcatcaatcaaattgtgagaaagaatttgaagaaactgaaaccacttaggtggctctgttagggatggaaaaatttcagaaagcatccagactggatttctatcaccttagatcaagtccagttcctcatctgggcaggaagttttaaggattgaaagcaaagactctagagtcaggctgccaagagttggcctagatatgggtccttgaacaagatacctaacttctt

SEQ ID NO: 108255 - DNA, 1077 bp, Homo sapiens
agcagggtaagtatttctgtggacatttatttcccctccttgccacttgaagatgacagaggcattcagaatatttgttgtgcacagttggctgattcagggctgaaatatttttcagggcttctccatcttgacactactgaaatttggggccaataattatttcttgtgaatggctatgctatgcattgccagatgttttgcagcatccctggtctctacccactagtatcagtagcaccacccctccccactgcccacttgtgacattcacaagcgtctctaaatattgtcagatgtctgtggtggatgtagtagtggtgagtttgagaggcaaaatcacccctggttgaaacgactgtaacatagttggcctttccctttccaccttccaggtgttttgggatgtctttgaagagagccaatgattttgacacaaaagctctcctttggtagcttacataagaatactatgaactaggtaaatatactttcgctttacatgttgccaatgagaaagaggactcacaaacaaattcttcctaaatgggccaaagcactggcaattagggtcaagtggcaaccttgaggtgctggcataactttacagcatcccacgttatatcaagcctatcacagcaaaaaatggggatattggacttccatatctttttaaaaggagcaaccaagaaatcgcctttccttctgtagactactgaagctggaagtgatatttataatgtattaaaaactcctctctcatgcgctcagcatggacatcattagaagagaataatggacaaagtcctagatttggctctgagttttgttcaagaaggaattgaaaatgcttggatttcttttctagtacaaatttggaatcttattattttgaaggctgtggctgattgcccttctctctgggatagatggtgaagaaatgtgtttttataccacttgcctttgtttatcttgaaccacaattcttaaaggaaaagagctggagttggaaggggttaggctttccagtgcttctggtaaaattctttgggactttgccctcttcttcacacaaga

SEQ ID NO: 108256 - DNA, 1034 bp, Homo sapiens
aaactgctactcgacttgcttaaagctaactctacaggggtatcagtatttctgaaatatgactgatagggctttctgtgagccatttgcatctttcatggtcatatcattagtcatgtgagcaccggaagtcagagcatcattgtcttacttccctctgtgacagaaggggaagctgtggtcattctggagagtagcttcgtagcacatggttgtttagtcatcttatgaagcccactttacatgaagcccaccttaagcctggactcgtatggaagggcctgtgtagctgtgcctattctaaggtcttcccaggaattcattattttctagaaaattcaggtattaggaccaaactggaatttgggattctcttgagtggttctggggtccctgaaccaagctatgagctagcagtttctctagattgggtagggatgggaccagcctagatccattcccaggctttggggtggatgtgggggtggcaatgacagttacttcagatacctcagacacccgtgggtccctttgacactgagacagtgaatcaaggctcacctgatggctcctgggcagcccagggccagttcacagctggtacttcaataggaagaaacgttactgccacctctagtttttgcttctgtgtgagataaccgcatgagaaccacgtgtttgatggcaaatatggcagaaaaatagactttgattcttctgatagaggtctgctgctaagacgcccttttgtgctaacttgaaacaactttactctctactttacacattaataagggctttggctcaggtaacccgtccctttaaaggaattcatctgactgttgtttgtgtcttacttcctttgcttataggtttcatttcccgctttggcctatttttatttcctctgtagaagagggatgaaggtcttatatccaggccgggaattccttaaagagatctggaccactgagtccactgggcctgtcctcaatgactcttaatacatgcttaatctcagggttaaaaggctg

SEQ ID NO: 108257 - DNA, 1162 bp, Homo sapiens
gaggagctgggactacaggtgcacgccaccacaccctgctaatttttgtatttttagtagagacggggtttcaccatgttggccaggatggtcttgatctcctgaccttgtgatccacccgccttggcctcccaaagtgctgggattataggcgtgacccaccgcgcctggcctatacatcttttaattatattctatcccttttttcttttgatgttggcaaaagttaatatgcacagaatattgacctaagataagttttccatagttataagtggctactcatgaaatccaatgactaggaccctagaatgtcattttggctcctctactccttttgctcaatgtattcgtgaaagcatgactacaaaaggtgttaacttaaatacaacaacagtatctcagaagcaggactactgacgagaggaaaaatgtggtacagacttttaacctctggcttgctcccttttaatcaccaaacaggaaattcagaataagcagaaagtaggaccaagtgatgacacccctcgaaggggcccagagtccctgcccgtgggacatcatgacatcatcactgatgtcgccacattccagaccacacagggcttcatcgtaactgcttctagagatgggattgtgaaggtgtggaaataaaacctactgatttgtataaattttaatagttataaatataatactataactcgagaaaaggcatttctagagaacagattcatttgcttaattttcaaaattatgtctccatattactgtttcatgactgactgactaaatgacacccaaaatggttaagatgtacttgactagtttacttatgcatctctttgcaagaatcagccagccaacaatgtctgggatttttattgtatatgttatagaggtgagaaatgtaaaatatgaaaatgaatatgtttattttgtattgaaaaagatggttgaaaagatggttgtaagctattatagtataaacacatttttgctattaaaaatgctattcaaagcagttaaactgtattcatgcatcctaagagtttgtggttttggtggtatttttaaatggtaaatttaagcagaggaataatccctccattaagcagaggaataatctctccagcagcatttgttctaaggtgaagaaatg

SEQ ID NO: 108258 - DNA, 1071 bp, Homo sapiens
gttaagtagcttgaccaacatcatataagtagttggtagtagaagtccgtgattccaaagccaatgcttttccttctgtgccaagctgtgtgatagaataactgaagggtataagagtgagggtttaagatattccaggagttgaagaagataggatcaggaccacaagtatgggagttctcattagaaaagagttcaaaaccagcctgggcaacatggcgaaaccccatctctacaaaaaattagccaggcatggtgatgcacgcctgtagtcacagctgccagggtagctgaggtgggaggatcacttgagcccaggaggtcgaggctgcagtaagctgtgatcgcaccactggccactacactccagcctggcaacagagtgagaccctgtctcagaaaaaaaaaaaaaaaaaaagaggagaaggaggggtagtctatgatagagagaagtgtgtgcagatggccatttgaaaatatcggaagaaaaggcaatttttgtaacagttcttttgagaggaaattcttgtttttgtcctgagatcagggagattaaatggaccccaaagtaataattttgcttgctaatggccatgtggatatttaacattagcagtgacattggttcataaatgaattttatttttctttcattcagatctattcttacatacagccgaattggaggacgagtcaagacgctcacattctgccaaggctcccactatttagccatagcatctgataatggtgctgtccagcttcttggaattgaggcttctaagctgcccaagtctcctaaaatccatcctctacaaagcaggtatcttatcttttgtctttcttaaacattgtatttagtgcactacagtaccttaagtctcctttctaccctgcaatgtagttgggatcaactaagggcctcttacattgcacttctttttttaagcccataaaataaataaataaataaataaaattttaaaaatgtgcttccagctcaaaactgtcaaatgtggttagtctcagaagatggtatctatgtatcttatcttctgcaaacttgtcaag

SEQ ID NO: 108259 - DNA, 1060 bp, Homo sapiens
tggagtttgttgttgcccaggctagaatgcaatggtgtgatctcggctcaccacaacctccgcctcccggtttcaagcgattcttctgtctcagccccctgagtagctggtattaccggcatgcaccaccaggcctggctacttttgtatttttagtagagacggggtttctccatgttggtcaggctggtcatgaactcccaacctcaggtgatccgcccgccttggcctcccaaagtgctgagattacaagcgtgagccacctcgcccggcgagtccttgtttctaatgtcagggctacagagcgaaggaccatatttttagcttctgcaagcaggcaatatgaacacttctacataattttttttttttagcttagagttcttcagtgctcttctatacgggactgtacttgagacacatcatgggtaaagtaggcctttctagaccagcgtagcattgtttctatgggaaaatatgttagtagttccagttaatagacttaacatacacttttggaacgttacccatatgggagttggaatctgtactccagattttcagtagaacttaaatcaggagatgactcatggaagggctgttttcattagatccatctacaatagctccctgttttatttgtatccatttaatcaggtgctaataaataatacaaaatgatttcactcctttaaaaaatgagttacatttttaatgattttttatttttgcactttttgacagattagtataaatacaggtttaaaattcaaaagctataagaagatatataatgcaatgttaagattttatctaatccctgccctccggccagggagtttctttctctgtggattgtgaattttatgttgggtgttgaattgctttgcagtgttggacttgttctgctgtgcagttacttggaatcagtttcatccttttaagctttgcttttaagctttgttaagataggtttaggataggtccagaccaacccttaattggtcactttagtcccactactaagaactcagaacatgatgctttgtgtatattaaga

SEQ ID NO: 108260 - DNA, 1058 bp, Homo sapiens
attgaatttgaaaataactgtacatgttatatttttggctgatcctttttatttttccaatatagattgaaagaaaacttgttctgctcagtgttttaaaggaaccagtaagtcgttctatatttgattatgctttgaggtctaaagatattactagcttgttcagacatcttcacatgcgtcagaagaaacgaaatggttctcttcccgactgccctccgccagaggatcctgccatagcacagcttctgaagaagttgctctcacaggttgtatcacccttccaaagtcttacatttaaatgcgaatttcataaaaatattgaagtgtccatttagttttttaaaatgtttttgattgattagattacatcataaaaatgagtaagtaaatctggcaaacatcttaggcatttgcttttgattcctaaacaaagataataataagatgatgataaggtatcaggttaagctaaataaggaatcatgggagacctcttaagtttcttttgtaattactggctaaataaatgagggaaagacagtagaaacaaccttagatttaattagtagtcttgattcagttctatgttttaccaaaaatgtaatgaaatttagctggaagaaacattgcaaaacacagatgcaatatagaaaaatcctggttcatttcgatccaaatttgtaattaatacttgtaaacagctgaaataacttgtatttagaatgcatcttaggtttaatagaccagcagtttactggtatatcttaaaagcctatgaatttgaatcaattaacaaaatcttactacacttggcattggtaatgcctctttagaaatatgaattgtattcatgacaaaaaggccaaaagcaattgcaacaaaggccagaattgacaaatggatctaattaaagaggtctgcacagcaaaagaaaccatcatcagagtgaacaggcagcctacagaatgggagaaaatttttgaaatctacccatctgacaaagatctaatatccagaatttacaaggaacttaaacatatttacaagaaaaaaaa

SEQ ID NO: 108261 - DNA, 1036 bp, Homo sapiens
cagggccatctgtaatatatttgtatataattttttactgctttctaggatgatggagtcacaaatcacttagcagtcaggttctgaaagatcctttaaatcgtatgtaaattgcctttgtagctttcatctggtttacttttctattctcaaatctattttaattccttttcttcccttggtataggtaactcagatgattcaccgtgagccagataaacgtttagaggcagaagattacttaaaacagcagcgtggcaatgcctttcctgaaatattttacacttttcttcagccctacatggcccagtttgccaaggaaacgtttctttctgcagatgagcgtattctggttatacggaaggatttgggcaacattattcacaatctctgtggacatgatctgccagaaaaagccgaaggagagcctaaggaaaatgggctggttatcttggtatctgttataacatcctgcctacagacccttaaatactgtgattccaaactagctgctttggaactgattcttcatttggctccaagattaagtgttgaaatccttttggatcgtattactccatatcttttgcatttcagcaatgactctgttcctagggtgagggctgaagccttgaggacgttgaccaaagttcttgctctcgtcaaagaggttcctcgtaatgatatcaatatttatccggaatacattctgccaggcatagcccacttagcccaagatgatgctactatcgttagactagcctatgctggtaagagtttattgtccaaatattagccacttagatattttttaagttaatgactataatactgcttgtttttctgatttgtttgagaattgcaagtatgaactttgctctttgaactatttgtgtacattttgataatatttctagttactctgttcctgggaatcaacgtttgtgtgttctctcacttttgaaatgatcagaattatcaagtgatggaattttgtggttttcttaggaatactacattcgacttggaataagac

SEQ ID NO: 108262 - DNA, 1034 bp, Homo sapiens
gctcgcttcttctcacgccgggagcaggctcccgcctcgcaccgctgccccgcgagcagctcctcttctcccgaggcgcgcggggcgcccccgcgagccccgcggctgagaccccgcagcctggaggagggctgtccggggctttgggtgggtaccagtattacctcctgcccccatttctagaaacttccaggttctgaaggaaggggaggttcgggtatcccctggatgggggggcatctctagggcgccgccccgctggcgtgagctggggacgttgcgggcacacgacggggcgggtgcgggatcttggggaggggggctcccgagatagtggctgggcggggaactccttcctcagcctctcgtcagcgccgcttctcctggtttctcttgcagatgctgctgctaggggtggtgggagcagccgtgggacgcgtggccgggagcgggggtgacagcctgggattccgggggcttctcttccttgtcctcctcctctcctctctattcccagtgtggccgtggctgacactaaagactttgtagccatcaacccgagtgcagtttcgatggaaaatgaaggtaaaggcccctggccgaccggttgcaacgcggagttgagggtgtggtggtttgcttttaagttgtctttgtttttccacctttttattttcgtgagcttatttatttactgtgtatgtgaagtgtccaaggatttgcttacttagggtatccagcttttattttggtaacatggggcatttgagagattgaggttctgtgggtgactgagcttgattcagctttcttgaggaattcctgctctcttcagcttagggaatgagagggaagttttcatttcagatagcgtctgtgcatgtttaaatagctatttgaaaggaattactcgaggggaagtggaaatgggggacaaggggatggggctgcatctctgtatattggcgtttcaagcctcgatgtggtgtgtggcaggattcatttataagaaagcaagccatgttttattatgt

SEQ ID NO: 108263 - DNA, 1145 bp, Homo sapiens
atccatgtgttggttccttcagcaatggtggtattttctttggcacttcggtttagattcttctggacttttttcctagggcccatttaaactttctcagcaaagcttgaccaatttttagctgtagactccaggatgtttcatgaacactttctgcttgtcactaggaacgtttaaaatgttaatttcctggaatttttggactacttaacattcagtcgtgagttaggattttatccagatcctttggaatttgtttttacatgtttatcacaaatctaaacagatcccgcttaggcatcttgagatgcacaagtaaacagctcttacctgatttttaaaagttaattgcatgtttaaagtgatagcttactagaaaagatatgtctagctggagaagcttgcacataggttttcctttctagtaatggatttattttttggaataaatttggcctttcccatagaaaattcagtgtgactttaatacacatgaaactttaatatagccttaaatgtttgactagtggatagaaatgtaatagtcttcaggatttcaggacatggttaatttaagattatagacagagctaataggtgtagagaacaatgccccaatcttttttgtttgaaaatggttgtatttacactttacttttaaaagcagtttcttaattcaatttcaaattgttaatcagctaggaatgtctcaagaaaaaattgcattactatagttggagaagctatagggaaaaagggatgagaagccaccttaattttattcctttaactgaaaataggaaaccaggttataaaaatatatctttgggtgtgggaaatatagtttatgttgtttgcagttttgtccataaaatgatagtcttaattagtactctgaaaaagagttgaaactaaaagagattatatatatgacattttgtaaactgtagtaatttaagccagaggatgctgtagagagtacttgtatgcaataaccttctgacagttggattccaaatacttgatttgtcttcatatttttgtcattcatttaaagtcagcagaattcaggtctgttaacgcaaagcattatgaaacaaaatagtttcctagggaacacacccctaggggcccaggactgattt

SEQ ID NO: 108264 - DNA, 1711 bp, Homo sapiens
gtcttttttcctgttcagcccttttctctttctttgttacttccttctccaaaggtgagaaactgttctcaaccacagtatattgacttacttgtttcatccgagtacacacaaacaaaagtagttttagaattagtgacctattcattccctggtgagaaacacagttttaaactagagtacaatatttgtctttaactttatggtatacaggcaaattctgttttcagaagttacttgggttcttttcatccctgcctaagggttatgttagtcacttgtaataaaattaggttcacttgttattgtttgtatgctgttttaagttcctcctacatcctgtttcatcatagcacagtatccctctcccatttatttatgataaagatgtgttcttaaaaggactggatttgcttaaggttgggtacagctgtaattgctttgccagacagcagttaaaggacatgtgctttggcaatcattctcttgggcttgcttgcctggttccttagtttcagctctcatttctacatcgtttacacttgggaattgatatcagctgtggccccataactgtcagtgcttgaaatcatgcccatcgactaaatcttatttgttctgtatgcacagttttagacccggagccacctacagtatgaatactaattctctcatagctgtggtaaatcatgaagtattttgtagaccctgtcctttactgggtttttctttttcaagatagaatcacttaccacaaaatttgtcattttaaagtgtataattcagtggtttttagtatagtcacaaaattgtatattgatataattctagaacatttttatcaccccagaaagaaaccccttacccattagcagtcacttcccattctcccctttcgctagcccctggtaaccactaatctactttgtctttatggatttgcctgttctgggtatttcatataaattgaatcatacaatatgtgaccttttatgtctggcttctagcacgtgttagtacttcatttctttttgcgatgaaataatattccattgtatggatatacacattttgtttattcatcagtttctactttttgtcaaaaaataacactattgtgagcattcatgtatgggtttttgtgtaaacatgttttcagttttttcaggtgtatacttaggagtagaagtgctgggtcatggtaattctatctttaatttattgagtaactgccatagtggttgaaccattttttcattcccactagcagtgtatgaggctttcttttaattaatttctccacatcctctccaacattttgctgttttttttttttttttccattgcatcctagggggtatgaagtggtttcacattgtagttttgatttgcgtttcccaaatgactaatgatgtgtcaaggatcttttgcatggattcttcatgcaaaagaatgaaggtggactcttatctcacagcatatgcaaaaatcatttctgcactctgacttctaatctgttggtttataagtctttgcagatccaagtaccacaatgttttggttactgtagattttgcgataagttagttttgcaactaggaagtgtgatgtgcttattggttatttgtatatctttggagaaatgtctattcaaatcttttgaccattttgtaatttggttatttacttttttgttgagttgtaagagttc

SEQ ID NO: 108265 - DNA, 1020 bp, Homo sapiens
agatgtttacctaagagtgttcactgcagcaatgtttataagataattatcagagatatggtttgtaaatatttctcccattctgtggattacctgttcactttctgaatggtatcctctacatcagaaacttttaaaattgtgatgaagtccaatttatatatgtgtttcttttattgtttgtgctttatatatctaggaaaccattgcctgattcaatgtgatgaagattataagaattttatagtttaactctcacgcttgatccattttgagttcatttttgcatatgatgtgacataagggcccaccttcattcttttgcatagaatatccagttatcccaatactgtttgttaaaaagactattctttttccattgaatgtcttggcacccttgtcaaaaatcaattgaccagaaattatgggtttatttctagactctgaattctattctgttggtttatatgtctttgctgatgtaagtaccataatgttttgattactgtaggttttgtagtaagttaattttgaaactggaagtgtgagacctttaacagtgtctgcctttcttttttttttttttcagattgttttgtctattctggatcccttgcatttccatatgaattttagaatcagtttgtccatttctgttaaaaaggcagttggaattttcataagcattgccttgaattgtcctttactttgagaatataatattcttacttaggtacaaacataagactttttgagtactatgtttgggtgtgaccttattctaggtaacaagcatttcacagaaatagaaggccaaaaggtacatgaaaagatgttcaacctcagtcatgaagaaatgcaaattaaaaacaaaattataatttttcacttgtcagattggcaaagattagagtgtagtgatgactagtcttggctagactgtggggaaaatagaagcttctgagtttgaagtttttgacacagtccctttggagatcagtagcagtagctatcagaata

SEQ ID NO: 108266 - DNA, 1024 bp, Homo sapiens
ttcccaccccatatagaaatggcaccaacatctctcctagaaacttcctggtgattggaaactttttatctgttgatgctggttctgtctttagggagaatgtcatgtttcatgtaacatatcttaaaatatttgaagatacctgtcatatcctttatttagaaatctttattgaaatccaattaatggtcaggtactgcccttcatacttctctaggccgaatattcctaattccttccactgatcatcttaagacctcatttccagaaatgtcaccatagtatgccatgcttggtagcaggctctaatgatgccctaaactgaatatagacttctcaaggtatggttggattgttgtgaaatagtctaggctcattgactcgcttggactaaaaagctatctttctcataatgcagtttaggataatgtttacctttttagcaacaggtttacactgagaatgcttttacagctctttaaatgatgtatgaggtcaacttaacccatgtgtttgtctgaattattattgtagagccttagcatctggtatgttagtagttggtttttcggtatagtagtaggttttatatatatatttatatttatatttatttattgtcaatagagttagggtctcactatgttgcccaggttggtcttgaactcctgggtgcaagtgatcctgctgccttggcctcttaaagtgctgcgattacgggcatgagccacggcacccagctagtagtaggtttttacatttatttctcataagtatacgtgtatgcttttgtaaatgttgaggtggtggtatattgcctcttctcgttgattctgcctgataatcagcttgttagaattttgttttggtttgtagttctccttgaagaggtccttcacatcccttgtaagctggattcctaggtattttattctctttgaagcaattgtgaatgggagttcactcatgatttggctctctgtttgtctgttcttggtgtataagaatgcttgtgatttttgta

SEQ ID NO: 108267 - DNA, 1024 bp, Homo sapiens
caatgttgctgtatattcaaattgtaaaaatcatctagcttatcatgaaacaagctgcatttatcatcagagactgtcaggtcatcatctccacctgcagacagagcttaagcagcatctcacctatctcaaagatgacagactcttgtcactgttgtcaaaggggttgctgttctgtttcctcagtgagctcccagagttggttccttccttgggccctgtatctgtttatgttcccattttctgtctctggctccttttaccaccatcagggtaggcagacttggaacaattctctccaaatgggcagcttccatgttcttcgttaaaatacctacatgccttatcactcttcatctccttgtattcctgaaatgagtttctgctaccttctactccacgcagtactcatgtggaatgacaaagttaaatatggcctggcattctgggatggactttaccatcttgcttttctgttgcttagtactcctccacttgtgaacacacttgaggtgcaggtgtggttgcagctggagagcatctcaaagcagccctttatatatttagagagtatcatgcccctttagtgttttattgtttattatatgaaataataccgtttcctactctggagatttacagctactttgagcccatggaatacccccaaagggttttatgtaaagtgtgttcaaatgtagaccctatctatataccaactaccaaaggattagttgagaaacattttatgagtaaggctgtcatattgcatgctgggtactagagttagcaatttccaatatattattgatagaaaagtaaacattaataggaaattatcatgaactgactttactcaccttgtttagtctgtattgaccttgttggaagaaaagtattaatagctgtcatttgagctcttactagtggtaagtcaaatgctgtgttagtgtatttaatcctcaaacatctctgtttagccatattatccccaggttatatatatgaagaagatgaggtttgg

SEQ ID NO: 108268 - DNA, 1017 bp, Homo sapiens
tcaaacagacccaggtgattcaaaaggttgcttcaatttgcacattttacatttgaacaaataatttgtttttcaagttattttctgtcatcttggcatcttaagtgtttagaaacagtctttttcttggttcttatatttgccttttcctcagacaagcctactggaaataattttttaagacaagttgcatgaattttttttttttaaccatggttgtttctatttcgtgttacagtgtgcgtgaaggaaaattggagcatacacttgcccgagacttggttccaggtgatacagtttgcctttctgttggggatagagttcctgctgacttacgcttgtttgaggtaaatttgggatctgattgtaataagtgaaaatacgtggatgtagattaaaggataaacattactagttttaaggaattaacacatagttgatttgaaccatttggtattctactttaaaatgtgacatatataaacttttttttttccttaaaatgtatctgtctctactgtaacatcttttgaggtgtttgtttagtgaatcagcagatctttatagaaacctgcatattagggactgtgggagatacaaagatgatatgacagaatacttgtgactagggaacatactatgtgtacacaaattactcaccataaaatagaactcagtaattgagtaagagaagttcaaagaataggatatagacatttaaagaagggagaggttccacctgatttgaatgagatcagaatatgcctcagaccacatggctttggcagtgataattgaagagtagtactggacaaagatggggaagacaatgaagcaacaccattcaaatcactatgaacattccagtgtatgaaactctgttgggacatggtaagggtagaaaacgtgtgatggaatcagatttcagaggccttggatactaggcttaacttcagatttttttggttaggagttaccttttgaggctcctgtgcagttgctaaataatgttatcct

SEQ ID NO: 108269 - DNA, 1018 bp, Homo sapiens
taggagtgtgtatgttagacatcttcactgtaggtaagactttgaaagttgttggatgtgtgtgtgtatgtgttttggtttacatttcatctggatgtaaatgtattttcctgtttttccccttagggtgttgtcattggaacaggagaaaattctgaatttggggaggtttttaaaatgatgcaagcagaagaggtgagtacttaatatgttaatgatgtatttgttccaaatctgaaattcttcattgtaagtagagaatgttggattattttatatactattgagagcaatattttattcagaatggaaatcagttgtctctgtttagaaacataattggaaagcctgtaattgaaaaggtctaaattgatgttgttagtattctaaaggattttgagctttactcattgtttatagcagaaaaaggcttatagccacttatttgtagatcttattattttcagaaattagtgttgtggtaattttaaggattagtaattagtatatttgtaccttggaatatgtcttctatcaaattttttcaacttcacataattccaagtaagggtggcagggaaaagattgccaagtaaaataacctacaagatattctcggctaaaagtattaaagatgagttcattttaaatactttcttattataaaaagaagcttcattctgcaaatgtcgtgttctccccaaatcctctggatttctcaggtaacctgccaaaactccagtatgcgatgcaaagtgggaactcattccaagaggcgtggcagtgaagggatgaatagagaagagggttagcagttgagggaggattaaaagacctgggttactagcatgtttgtggataccaaaagggaaaaattggaaaagcaagtgagagagcagctgatggtaatgaagtcctgcagtggttggtaggagggagaacagatttttcctcaaaaggaagcatagagagaacggaccttttcaaataataaacaggtttttaaaaatagagaatt

SEQ ID NO: 108270 - DNA, 1050 bp, Homo sapiens
ttgagccaagtcgtaagtgtccctttgtgtgtagtatggatttgctgagaagtgtctggatattgtgttatggaaaataaagttttagggtttaattttgcatatttgatattaaatagaagacctatatgtttgctgccaccttctttttttcattgtatgaacatactggtaatttttaaaaaaataataaaatattactgctttaagggatggtaggagcagtgtcaaccaaaagtaaaactgtgtgtgtgtgtgcatgtgtggtgtgtgtgtgcacacatgtacgtatgtgagtatgcacagcattcacattaagcagtgttaactttaacctcccctgtttaatggatttttataaaatcttctaattgtgatctgatatgctttcccttttttgtcaagggacgttttagattccttcagcttgttctgttccttctaggtgattgtatgtaaaagggaaaaataactatttaattatctttcaggaatcatcatgttggttggctggttactgggaaaagatatcctggaaatgtttactattagtgtaaggtaagtctcaatactttataattggagtctcttttgcctcttttatttctctaatggacatagcttacgttttattatggagatcagtattacatggagcccataagagtataacatcgctacataaatagttcagaagtcatatattaaaattatccttagaaaaatgaaaatgtatgtatatggtaatgaagaaaacccatactagatgtctggaattactaatgcattattgcctttttatatataaatatacaattaaggattgtcaaattgaaaactagcaacatgaaagagaaagttcacaatatagaaattgaataatcaatttcagaggaaaacgaaacattgaagaaatgatgacaaatttaaaaaccaagtgtttgtattttcagagacttgtgaagaaactgcatccatgagataaattgttgtagaaaaggatcagagaacaaaaagagtttttagaaattaagattatgattgttgaaa

SEQ ID NO: 108271 - DNA, 2086 bp, Homo sapiens
taaatttacagtagttatattgctgtaacaaaactttatgtgcaatatgctttgaaactccaaaaatgtactgaatttaatttctagtttgtattttaatatcttctccatatatgagaagctgaaataccttgaaaaatcctgattgaagaaattatacgggtttatatttagaaactctccaaactttctagaaaagatgttatataagatcattacataaagctaatgtgaagtagctttgtagaaactaactgtatataaataagaacatgtcatcatctaatttttatttttaatttcagaaactgtaccttatgctgaaacaagcataatgagagaagttaatctaaaattaacaatgagtttgatttctataaaattcagagaagtaggacaggattctagtctttgatttgttttttaagtgaacctatatttctccttgattcttttggtgacttgtaatgatttaattctttaggctgctgtaatgtgatttgttcagataaaactggaacactgacgaagaatgaaatgactgttactcacatatttacttcagatggtctgcatgctgaggtactctataggtttttaaaaacaaacaaaaacagtatccctttaagaaacttggtgtttaacattcctaacagttccagtgtcttaccttcaaaagggctgtaaattagtagtggagttattttctctctctgtgattttaccaagtctttgtctcattccacttgtacacttgttcaatccaaaaactttgattcctccttgacatctctctttcagtcaccccttcatctatccataatcaaatcctaccaattttgacttcctaaagaattttcccagccatctactttatagccagcttctttaagttaccgccatttctcacctgccattctgataaagctttttgactggtctttttccattcttgatgccctcactccataagcagtttgagggatctttttagaaccaaattttaagcatgtcactccataaattaaggtactccaatggttttccattgtgatcaggatcctgaactgtggcgtctcaaagccgtacatgttctgtcccttattttctcctctacccttatatgctaccctttgctttctgtgcaccaagtatactggctttatagttctttcgatgtgacacaattattcctactttaagaactttgctgcctttgtcactgtttaggatagtctaatgcctcttcatcctttgcaccttaattccaacccacttcttcagaacacccagaagtggccctatgttatatgttgtcttagcatttcatacctcttagtccttatcttaggtaaaattttctgtcccttttccccattataagagagcaggagctatattgcctagcacacagcctgcttcatagtaataaatactcgataaatgaatgaatgaatgaatcactttattttaacaattatatattgatacattgtctcttaagtgcacatcactgtgcagtagttcttcctgaaggtgcttatggacaggtctaatcctactcagtctatgcaggatttctgactggaatgctcttaacactacttatgttgggtacagtgatttaaaatgtatttatagctaattcattgagaaaaataagcagtaggcaaattgacagaagttgtacttgggtttatttacgtccattttacataggttttgaaaagagactcttgatatttacggtgttagatctggtcaaagatcccccatgctgtgttggtgaatgtgccctttctggatgattcagaagggtcattgggattacatgtgcttatatgatccaggtatggaaggtagaatattagtttttcttttgttttaaggtcatgctatatgtaatgcattaactatttgttaattgttttatctctcaattaatgtcattaaacattttttatttatttttatttttaatagagatggatcttgctttgttgcccaggctggtcttgaactcctgggctaaagtgattctcctgtcccagcctcccaagtgttaggattacagatgtgagccacc

SEQ ID NO: 108272 - DNA, 1248 bp, Homo sapiens
tgatttttaaaattggtgtgtaatatgctgtgttaaagtgatttgtaagtgctagcatatatctcaatgtctccaggcctgcatgtttgcaaaaagaatactgcttttgtctaagtcacagctttgtgttgtatgttacatatggtaatgcatttgagttctttgcaaactgtagtatgctatataagtgtaatgtcatataagtttaagcttacttatgtatattttcatagcttattcttttaacagtatattgtaattagaaaacaatgtctttttagattaataattgtgatgagaattagaatctatatttctttactaaatgtcctttttaaagacaaattttaatgcttttctaggtgaacacttttaacagtgtcattataaataaaatgaacagaactcattatagtttttgggttttataggtcttgtcaccaccaagtgtttgtagtgtttgtattattgatcccactttgtgatctttaggttactggagttggctataatcaatttggggaagtgattgttgatggtgatgttgttcatggattctataacccagctgttagcagaattgttgaggtaaatatttttttttccaagatggtgactttcttcataataacttaagacacagtgataggttcatagtttatgtgtatttttcttaggcgggctgtgtgtgcaatgatgctgtaattagaaacaatactctaatggggaagccaacagaaggggccttaattgctcttgcaatgaaggtacgtacctaaatttctcttctttgacatttgagacactgccctcacaacagaatgcagtgtcatcaatttcagtattactggtttttaggtattgagtgaaaaaaactcatactatttcattgtttttactatcttttaggtatcagttttattcctataaatgtaaagtatagacttttttcagtataactttattgttcacatgcaagttacaaactaatgagcagtcattgatttcttgtgaagaaatgttcctgtcttccacaatgttgagatctacatgtgaaatactttataaatgtgtgtaattgctgataaatactaacttttgaatgaataaaaggcaacattctttagtatttctatgtaaagataataacacagtcatgagaaaatagctttgttttcccagtctttcctttctctcctttgttaatttctcaaaatgattgtgaagttataatttgttttggggaga

SEQ ID NO: 108273 - DNA, 1031 bp, Homo sapiens
agcaggcctagaaatcagccaattagaaatggaaagaagactgaaggagggtggtctccagtaataatatagaggtaatagcttatctgcttctttgttgttgtgaaaaaataccatgagaagggttttatattacattgaagagtttaggaagaatgaatgataggtatacagaaaacaaattaaagaggtggttattaactttataaaagacaaaacttgaacaggaaaagaagtatcctatttgagctatcaatcaggataggccatgaaaacaacatcatgctctcctgctgcctccctgtccccaaatatctgctcattgtagttacttgggaatgcaggcagatggaagctccattttaatgtgagcacacactgtcacagcaggggtagaagaataggaaattgtgcactggcacctacatttccatttggaagtgacacaagtactcatgtttattggccaaagcaagtcatacctgaccgttgtggagtgaggacggcaatagggaaatacattcctgcctcccaggagaactgggatatttgtgaactgctatagtcattaccacacttggcttagcagcaaagagtcttgttgtaaacaaaatactggcagattttgctttagctatatcataaagatggggagggggggaatagatagtggaaatggggaaattaacatctgtcacaatagacagtgtataaaattgataactgatggagtagcagtataaacatgttaaaaacatgagggtaaatatcagagaaaacagctaagagagttaaaattattttgcttccatggagtaggactagtggtgagaagcgttgaacaggaaactgcagtatttcattataagcttttgaagattatttaccatgacaaaaaataaaagaaaaagtgcgataatacccataaatacagtgtgattgggagaattaaatggtgttttaggtagatagatatagacgtatatagtagctaatagagaacttgaaccattgtgagctgttatttctct

SEQ ID NO: 108274 - DNA, 1712 bp, Homo sapiens
ggttttaaagtggcatggatttagaggacttaaagaggtcttgaaggtctaatatatgctccctctttttgttagtttctggaacaaagttttcctacctcattatattgactaattcttttcatatgaaggattgtggaggtttgtgtatgtgtgttttgtactgtaacattatgaagtagaccagagttggtagaggggaaagtttttgttgcacagagttttgggaaacattctgctcatttgtctcttgcttcatgtcttttcttctttatctacccttgtgctccacttccatcctccccctgagattaccgtaatgaagaacagaaagattttaaacctcagttgatatgtacttacattacatcttatgaaacaagtttcttaaaatactgtggttcttaattttgatattagagtatattttgttttatgtcaggggctctccacatgaaaaaagtttacctatccttgactcagagagtagcagcagattttcactggtgctaaagaagcaaataaatacaggatactaacctctagactagtgccacccctccattaggagtgcgcagagctgatctttccgtcttaggatttgctgacatatatttttgtcactgtccccttctgttaccatcagcctctatcctaacaccaggaactgtgaagtggctcattctctcaagggtgaaagcctttggagcccacatctacataaataattaggtatatgactcttactttggaaaaatagaattacttgcttttaaccttgattttttttgagcatatgtaatctttcataccttctgcttgacgaagaatggatagtttctttggtctctctggggcttttcagtctcctcttgacttatttatgtttagtttgtatgtgcatgttacaagttgttcagtctaatatctcagatgcaggcacatccctttggttaataaaagtagtttccggagttccataattctgagagcaagctaaatgatatttgggaaatgaaaagtactttgtactatatcttacatgcccaaggatgatgacagggaaataagtagaaataataatatgatggcgttatttacatactcttagagaaccaacgttacaaataagaaatgtctgttcatgttatggaaggagtaaaagaatccaaactattgttggtattaatggttttacaaccactttccaaattagctttaccttccaggagttttcatgtacaaagttgttacaggctgtgtataattaactaatacagccttctcttcagagtgtttaatttttctggagatcttggaaatggaaagatgaagatccgttagaagccaccttcaaaggtgtttgcctgtttaaaattgactttaaagcctaacaaacccatagtttctctaaataattaattctattttttaaagaggtagagttcctgttgaaagtagctgcatgtgattactatgtgaaaatattgttcattttctgtctcttgcctactctgcccttcagttctttagtttgattctttttaattaaaacagcttaaagggaccccttatccagaaccattaaactataatgttttggtctgtaatcattttgattttacaaatgacattatagtcttaagtgatttatttaagaagtgttactgtctccaatttctatcaactaaattctgatgttttcatgactc

SEQ ID NO: 108275 - DNA, 1121 bp, Homo sapiens
ttattcttaaatttaaacaaaaatgaaagtcaaacataaaactccagacttaatactgattcagataggtttgtattactggtaggtaacaaaagagaacagataacaaatcatactaaatgagcattacgttgactagcctgtcaagcaaaaacaatttggtttattacattttctctctcatttgctttagccagtcgtctgggattgtattccaaaacttcccagtcagtctcaggagaagaaatagatgcaatggatgttcagcagctttcacaaatagtaccaaaggtaggcctaaactaaagccttttggactgaaaggccttattctaagtgttaccatttctactactatcttaatgaaactgtttaattgtgaacatcagggatttaaataaccaccagatttgttggttcaaatcctgaaatgaagtcttatcattgaattagtcttatcattgattatttatgatatgatgtttatgaatatcagtgcaaaattattaattttagcaagaaccagatttcctctgagaaaagtactgtggaaattaatagtgcttgtatttatgaattagaggatggagagagatcattgatttatacttcttactcttttgttcaattttaattttagcatgagtatgtgattttttttaggtacaatttacatatagtaaaattcgcccattttagtgtatagttctgaacattgagtgatgcatgcagtcttgtgaccaccaccacaatcaagatatagaacagttccatcatccccccagattatcttaggcctttttgtggtaccttctccccctacttccaggacttggcagccactaattctttttttgtctctgccactttaccttttctagaatgcactaaaaattgaatcataccatatgaatgaggcttttgaatctgcttctttcacttagcataatgcatttgacatttatctatgttggttgtgtgtattagtagtttgttgttgttttttaaagtaatattctattataggtgtaccttacctattcaccagttaaaggacatttagattgtttccactttttgatgattatgaataaagatgctgtcaacatttgtgtacaggc

SEQ ID NO: 108276 - DNA, 1207 bp, Homo sapiens
agctctgctccaaaaatcctccccgttcctatatcaaaattttttccttgctgctgcactttaccatcagtatacaaacatgtttcctcttccatttaaaaaaaataaagaaaaaaaagggaaagggtggcagctgaaatgggaagggaagagaagtggtttttctttctttttttatatggaagggacaacatgtttttgtatactgacggtaaagatatagcagtgaggaaaacattttggcacaggagggaggagaatttctggagtaatggtcttaataggtaagaaggtagaatctttgacctgcagtagatgcatattgagttcatctgtagtaaaaccagaggttagttcctggatacagatactgagttgggggaattgtggaaattctcttctgattctgatttctccaaagtaggaagcaaggtggtcggctgagaaggaggctagagaaaggggatagattgcaggtacgaggagagaaaactaatatgaactaatcctctaggagaataggaaagagaatggtgtattatgtatattgaaatcaccataacttgtaaatattgttggagagagtgacatggtagtgaggcagaagttaaaatcattgtgaaatgaggggctgtgaactccggagcagtgaatgcttacagttagtgagttacagtctcatctgacattcagaactgaggttttatgaagggagaatagcggataccgtgttccacctgtaggctcccccagtggtactatttgaggaggttatagggatggtagtgttttgtggaaacactaggttagagcaaagtactatttgaggaggttatagggatggtagtgttttgtggaaacactaggttagagcaaagtgaaaaagagtaaaaaatagaggagatttgttggaacacagtgaaacgattttagatcaggagatggggtcagaaaaaaggattaaatatttattttggagagataaaaatcatataagcaatttagaagtacagtggaagagaggctaatgagttaacctgagtaaaagggaatgagcagacacttgacactgtaaaaaatggctctacagacactgagaagcagctgttctttattgctcctgaagacagaacaaagggaaaaggctattttagttgtatgcgagtgtcataggaaacagacgcaagagaatttttcctttttttgt

SEQ ID NO: 108277 - DNA, 1036 bp, Homo sapiens
acacacaattaggtccattctccaagaaaggattttagattatctaccttagtgaatgtatagaaatgatttagcaaaatacaaataaagtttcttgatgtttgggatgttaaaaggtttcttttctttctatggtctaaattatatagtgtcactttttaagcaagccttttcttgataaataaaataaaagctactttaatatttacttttattccatctgaattattccaaaacagtagtaaaatttaagatatttcatagaattgacattgcacaattcagtgataaagtgacactgcttgttaaaaattagaagtgaatataataaagaagttatttctgtgaccaaggagtaataaatgaactctctgctctgccaacagaccaagtctgtgtttgagattggactctgcagtaatagaatgttttgctatgcagttcttggatccatcatgggacaattactagttatttactttcctccgcttcagaaggtttttcagactgagagcctaagcatactgggtaaagaaaacgttatctttatcatttatgtattttagataaatcatattttctaatgtgtttgttttaattttaaaattcttttaaaatagcaaaataagtaactcacttgatttgaaaaaggagtctattttttcacttggggaagctcaggggaattactctcctaactccagggttttggtttttgctcttttataggttatcaattgttataaaaatcataatacgtgattctcaaatatagcaaatcaaaacctgctctagagtatagtttataactttttatgtactatgccatcttgtatgaagagaaaactagacttaatctccctgaaaaccaagttgctctcttctttaaagttagaattttcagtaaactaataatttcattattctttcttgtttgtacattctaatttcacaaaatgtcagtctgaccaaatagcagaatgttttataaagactatttggaaattacacatttttcttacattaccatttatta

SEQ ID NO: 108278 - DNA, 1452 bp, Homo sapiens
taagtcacttaatatctttttttcttttcttatttttaactgagggtgattgtgcctgccttatggaatagttgtgaaacaatgtgtttgaaagctgtggtggccaggcgccatgcctcacgccagtaatcccaatacttcgggaggctgaggcaggcagatcacttgaggtcaggagttcaagaccagcctgtccaaaatggtgaaaccccctctctactaaaaatacgaacattagccaggtatgatggcacatgcctgtaatcccagccacttgggaggctgaggcaggcaaatggcttgaacccaggaggcggaggttgcagtgagctgagatcatgccactgcattccagcctgggtgacagagcaagacttcatctcagaaaaaaaaaaaaaaaaaaaaaaagttgtgttaaaatgctagaaaaatgtaagctattaagctttgcaactgtaagtttcaaagaaatgtaaaacccaacttattttctcttgcagatctgttgtttcttttgggtctcacctcatcagtgtgcatagtggcagaaattataaagaaggttgaaaggagcagggaaaagatccagaagcatgttagttcgacatcatcatcttttcttgaagtatgatgcatattgcattattttatttgcaaactaggaattgcagtctgaggatcatttagaagggcaagttcaagaggatatgaagatttgagaactttttaactattcattgactaaaaatgaacattaatgttaaagacttaagactttaacctgctggcagtcccaaatgaaattatgcaactttgatatcatattccttgatttaaattggcttttgtgattgagtgaaactttataaagcatatggtcagttatttaattaaaaaggcaaaacctgaaccaccttctgcacttaaagaagtctaacagtacaaatacactatctatcttagatagatatatttttttttatttttaaatattgtactatttatggtggtggggctttcttactaatacacaaataaatttaatcatttcaaaggcattctatttggtttagaagttgattcccaggagtgccatatttcagctactgtatttcctttttcttgtaatgtaagcagctcagataccatgtgctatcatttttgtatcaagttttttgcacaggatgtgaccactgtcagatcactgttcttttctttctttttgtgattgaaaagcctatactacaatttgaagtaaatttttgtttttcttagtaagtgtaaatggttgctttatttttattttaaaaaggtatgtctttggtttggcagaattcatgcagggctatcaagtggtgttctagggtaacagtgtccataattaacgcttagtcatagagtcaaaaacatttaagactgattgggttgaagtttataataaattatattaac

SEQ ID NO: 108279 - DNA, 1205 bp, Homo sapiens
aatccaaatacctcagctaagtaattctattttattatttttactgttatgtatgtttttaatcatatttcttaggaagtataggctactggacttagaataaaaagtccccaaacccaaacaaatggtttatgaaccagagtatatgtggaagattctttgctggtcttgctctgtgtgcatctgaagcttctttggcctagattttagcacaaacctgagtatatctcttctactttcatcatgtgttctgtaccttctttttgtttcattgggcatgctagggaaataggtggattttgtgtgtaatgccatcagtttttatgaaagcttgatgaggtataggtcatttgttttgagtatgtgggccagaaatttaaaattagaaatttgtttttctgttgagtatataaacaaaaattggtcccaattctaacaggtttaatccttcttgaagccaataagttttatcttttataatctgtcaggatgaaccactccttagcttttatccaatattaaactgcaagtgttagcactgaaatattgtcattgatagggaaaatatctattctttgagtcattgttactgaggcagttgagtgtaaggagctggctgcagtttattctacttaaccctttaaggctgaattgtcaaatgtacattgttccatgtcgttagatggaacatggaagccattgtctaatcaactctatcattagtgacttgatgtctcataccttaattttgtaatgatttttattctctgttacaaagacttgaaatacgtattaaatgcacgttaatgttttgctttgcattttaggttcagattatgacttgattgaaataaatgtgcctatacattcatttgctttgtactataaaaataaaaatgatttcttaagttaatgacatcccagtggggactattagcattaaaattatccatatggatgctgaagatacagaaattaaaattatccatatggatgctggagaatgcatagtacacagaatctatgatttaaaaagaagttgaatgtacagtacagatccagattgcaattttccataatatattaatccaagttgacatggatgagttaaatgggctagtatctaaattttaaatttttaccctatttcctaatcctaggacttgctagagtccctaacaatactaacttacttgatgtttttc

SEQ ID NO: 108280 - DNA, 1034 bp, Homo sapiens
gaatattgtacatcccatattccctttccaaaatctagtttcctatgtttgcaatcaagtgattaggtcctgctctttctaattcagttctaacaaatgaaatctcatcttaggctttggaaactgtcttcaattagcagttcaagtaacaaaaggaactctgggcagctaagatgaataaattttagagagaaagctgcagagacaggaaaacttttactataacctaatcatgttctgtatttagtggtgataaaattatactggaagtctattttttaaaagcactttttgagacacctggaccttgaaagtttaatatgcatcctgtaaatataatcacaggtctttcatgccatttgatcatggggaaagaattcaaattaaccttttgacatctgaatttgaatttcagaagataaagaccatagctaaaaagcccttagaattatctttttctcctttgtgcacaaaaggaaataaatcaatgactatgcctcagttgccctacttgcaaaataaggattataacagtccaaattattgtgtaaaagatacaataacaagtatatttaagttacttagcacagtgcctgatactaaaagtgtgttataagtgatagccattgttatatccgcacatgaaaagccagggcaaagcaaggaatgtgggaagaagtgagtgagtgttaagcagtacaaagattaagacaacgtgagaccagagttgccacaggtttaagagcagaattttgcagaggcaaaggagatcaacactatcaaatatggtgaagaagaaagatgggcaggaatgtgagaatattatagcaactccagccgtagccacactggaaagggtagaaaactaccaagacaatttcaatgggcagccaagctcaaacttagaaaataatgaaaaaagaccagaaggaattatccccatgtgagtacctgtcccccttgagccctttttcctatgttcagagagttttctgtagtgtttttaaagcccaatttgaaagagcccttggcat

SEQ ID NO: 108281 - DNA, 1362 bp, Homo sapiens
aaactgcctactccacggtcatgaaaatgtttttttgctgttcacatttagatctataatgtatctagaattggttttttgtgggtgcgtatggtgtgaaatagggatcaggataccttttccccccacatggaaatccaactgaatccatgagtatagcaggctgcttatattccttgctaagtagagatgacttaagtgttctcatcatttacctggattcaaaatagagtgaaattttagttcattctctgcgctctgctatcacccagctttctcttggcataaacttatcaattctgaatttagctcagtgctaatggttctaattagcccctgaaaattataaatgtaccaggtgctcatgtgattccaaacacaaatgcaagtacaagtatagaaaccttgtgatagtacctattcattttgttttttagatcttgtaatacattatctgctttggccagctgttgttaataaaaactttatagtctctcatttaattcccacaataaccacatgggatagggtttcattttggttatgttagttgcaatggacagagcaccattcaagttaaccaatgggaggttaatcataaggagacacaaaagtggatcattcttaaggagtaaggcagccaagaccagtctctctctgggcatctctgcctctcggggcagctgcttctgcaggcttgtgctttcgctccccctggggaagagggaaagtagttgtcacatgggataaaacctaactaacgttaagggctgtgagttgagtacttccccttttggaagggactgtggactggtgggtttgatgaaacatcttatacaagtcattataatgaccattttacagataagtcagacagactgtagaaaaggtcagaaacctttcgaccaaagccatagggttagtgcagagcggaacatctctgaagtcaaagcccagactgctttgtttatgaaaagttgtaacttggctctataattcagtaatttaaatatatatcagaaaagagttggtgtattttcttagctctacttagtgcattttaaaaaccagtttaagagtttagtttccactttacttaaaatttaagtagttaaaactacttccagtaggggtaattggttatactataaagttctttgcatatttctaattttaaaatttgtatcacaatattattaaaagcagtatttagaaataatcgtactatttaaagttttcatgcattaatgataaaactattttgtcatttatgatgtgttttgtttcaggttaatatctttagtctcagctgtcaaccactctttctactaactagatgttacatgctgagaaatgttatta

SEQ ID NO: 108282 - DNA, 1047 bp, Homo sapiens
ccaaccctaccgaagcactagataatgttctgaaatacctcccaaaaaaggatcgagaaaatgttaaggaacttctctgctgttccatggaagaataccaacagtcccaggtgaagctacaggacttcttccagtgtggtacttatgtctgtccagatgccttgaatcttggtttaccagaatgggtattagtggctttagctaaaggccagctatctcctttcatcagtgatgctttggtcctaagacggaccattcttcccacacaggtggaaaacatgcagcaaccaaatgcccacagaatatctcagcccatcaggcaaatcatctatgggcttcttttaaatgcctcaccacatctggacaagacatcctggaatgcattgcctcctcagcctctagctttcagtgaagtggaaaggattaataaaaatatcagaacctcaatcattgatgcagtagaactggccaaggatcattctgacttaagcagattgactgaggtaagtatttgtaatactaatgaaatttttgtaaagtactttacaggatacaaagtgctgtcttctatattagttcacttactataacaaactgatgaggttgagtgctatcttgccctcatgtcgtagctaagaaatctagaacttgagtgaactaggtaatgtcttagccagaaagtgtcagtgctaggactcaaacctagctcttttagctctaaatctaccatttccactgtacttcagtagtctgtgttatcgtcacagttattactactatattgttattactaccaggttaatactagctatcaatagaatgggttacgtggctgaaaaaaaaaggaaaaaaattcacaactgcaaaaaaagtgtatagacactaatcataggcacaacatctcagactacatcggatttcagataaggttagtactgatgctaaggtctaattttttaacttttattaatgaataccttttttaaaataggtttttgtgtcattatggttatttgcctagtttgatacagaaaacatgactcttag

SEQ ID NO: 108283 - DNA, 1036 bp, Homo sapiens
tacaaatctgcttttcaactttcctcaaggggtagaatataaggatgacctttacagctaatttccaaaggtaaatttgcagatgggacctgaccatgtttcaggacatatggagaaatgtgtatagaactatggcctgtttttctagtgtaaagagtattagaatacagtcaaacacacggaagctgagttcgtacttagggttcctcatatgcagaatgaattccgttagtctgtaggattacttgccttacatccagtagcttattttgttgtactaatcaaaaaacccctctttgagaaagagtgtgtcagagtgaagtctctcctgattccagcaaaattgaacctacgccctaaatcgttgcccaaagagagactgttggctgtgtcacagtgaaaacccatgatgggaggaaagagcagtgttcagattgctgactctgaacctgttatttggacctctgggatgaatacctttaaatgttggtgttattcctcatttttgtcagagtagaaacacagtgtgggcttcctgtggcactgagtcttgcaaacttgtcttctagcctggagtgtgatgtgcttctactagctacattatttttctatggctgattcttttcccttggtaggatgtgtgtgattctaaaaatgccttttactgcctgttttgcctgaaggtcaccacttgggaagttttccccacttttgcaggaactatggcaagaagaatgttatgtttctattatggtacttatcatgttactgcttatcatgcttttatgaacagttttataatggagcactttcgtgatgaggtagggcatgttgctgataacttactgaactgctgaaccaagagagtgaagacaggcagacagaagcaactcactatgctatgaggccaccttgggcaaacatcttcaatagctttataatcatgtgttacttcatggctacctgttttctctatgggaagaagttcttcacatgagagtttattttagtagtgatagataaagcttctactctc

SEQ ID NO: 108284 - DNA, 1038 bp, Homo sapiens
tttgtcaggtcattatatttgaaaatgaatccatataaatgaaattcaagtagtaattttagaatgtgatttcatcctgtgggcaatcctagagattcttacaagttaagatacaaagtaacaattggtgattttatccttatagcttcttgagtttctgttactggattagtcaaattttttagaattaaaggaaagcattgactgagttctttttactctatttatgtaacagttgtgttattcacattagaaaatgtagtagcgagtatttctttgattatgaataatagctgaaaagtctacctttaaagaacttaattggtttcactaagatttttgccttctctcaggtcaaagattctaaactgcctgcatataaggatctcggtaaaaatctaccattccctacatattttcctgatggagatgaagaggaactgccagaagatttgtatgatgaaaacgtgtgtcagcccggtgcgccttctattacatttgcctaacatctttggacgtggcagaaccttacatattctgtgagcttcgatgagccagagtgatatcataaccaccagaaatcatactctcctttcttagtcacaacaaaatcacacatgtcatctttgtcaagggcataaatatatcattcatacccccattaaattttgttagaaaaattaccacattaaatatatgagttaagtagattggatttgctgaaattggtgttgggcatattagcaaaatattcttaatttgtggactcgattcttttttactacatatttcccaagttatcttaagatgtctgtaaatttaacttttattaaagttttgtcaatctttgtgaaatagtggttgtggaacagtagaaaaccatatggggactatagtgcaacctatttgggtaaagaaaccatttgctaaaatggagaaagtaaatagatttttatttaaattacagaaacatgttaaaggccggacaaaggaaagacaataaaatcataaattatcggtcctgtttacatttttgtt

SEQ ID NO: 108285 - DNA, 1148 bp, Homo sapiens
agacaaaaatggttgagatgtcatttacgtttcagatccatgaattataatacttagattttacaaacagtgattccgtcgtctaaaatatttctcaggtataatagttctataaaagtgtgaaagcaactgagagttatctctttgggtcattgatgactaaatttttatttctcaaattagcacagaaagttttgttgtgattggttttattgttttttttgcttgggttttattttcaatcctaaatactgagcaagtttaaattggtaagaatatgactttttcccttcttaaagttcaacctaagattaatggattggggggacaaaactaaacaagtttactttcttctgggtaatttactgataatttcttgaaacaattttaataagagggattaaagtagatctgtttttctgtactaagctgttcctagcagctgtgtactttatttcaaccaaattattcatttcttattgctaaagtaattatgcctcattttactcgtgtatataattacatgtaatttttttaaaaactttacttatgaatgaaggctgtagaatgagtcagaagttctgaagaatccaataatgttttccaaaaataaaactcaacattttagatcacatcagtacctatattaaaattcttcagtctgtgaattcacagatataattagaatttttgagaatatatagagttaacagagctcttataaagacccataggtctgttattgtttttgctaaatattattctgtctttaacttatcaataagaatgtatgctctgacatacattgtgctgcatttgttgtatatgaagataggattggttcttgttgctcacacctataagcagaaaaatgcactaaggccatggaagtattcagtgctaaatcaagaatgatataaaatagtctcaacttaaaggcccttacccaaatttgaaaatgctgaagaattaactttaaattttccgtcaatacaggacttttttttttttttgaccatgtgacatagaaatacaatcttgtttgttttatttgttggagaaatgactcttttggtaggggaagaaaaatgtaagctgatttccttaataagaggtgatatttttgattatgtgctcttagagttaag

SEQ ID NO: 108286 - DNA, 1074 bp, Homo sapiens
ccaaatattttattttctcagtaccattttttgaccaatcattctctcccatttatgtacgttttttctccacatgaagattttttgaggaccatctactcagcccacttactttagaaattagaatcagtgaggttgtggcttctccagcctctagttacagcaagctagtattaactaaaaataaaataaaattgaatttccacttgttattgttaatggtgccaacagagtcctttgaaatatccaaatagtcttgatcattcagtcacatctctatttaaaatgagagttttctactacttccataagatatatttgctatggtcttctattacaagtcatccataggacttgaagtttttcagttcttattcaacattctgaagtactggtaataatcttttattactttacaagcaacttacatcctcagcttttagtaacattgttttaatacaagtatatcctaaaatttttggttttatttcatgctttaggtgtggagaataaacacaaagcacaacataatctatgtaaatggctctgtacctggacataaaaattgcttagtaaaggtaagtataagtgtcttctttttttttccttttttttttttgtttcttactcgcaagctaacaaattactatctttattttctattgtttatatatgtggatatttgccataaagtctcctttttctcatatatgtggcttataaataaatggctgtttttccacatgttctctcctgaatctttctgctttttagtagcacctgagtgaaaaaaatgcacaagataacctgtattctatttctttcaaaccaagaacctgtaaaaagggtaaggctgtgtattagtccatcctaatagaatggatggactcctataaagaaatacctaagattgggtaatttataaataaaagaggtttaattggctcgtggttccacaggctgttcaggaagcatggctagggaggcctcaggaaacttacaatcatggcaaaaggggaaggagagatggacatgtcttacatggctggagcaggaggaagagagggaaggggg

SEQ ID NO: 108287 - DNA, 1025 bp, Homo sapiens
aaggaaagtaacatctaaagcaaggagcagtaggaccattccagcaccagtggtatggatgaagtccattaagtcagttaatacagaagatgagttcaaaacaggcctggcagtccattttttttctttgaatgatggtgtcggtgtgtctgtatgcccttgtccttttttaattcttagccagtattaggtccgttgttgctgagtttttctcctaaatctgcttcttagtctgtatttattttatcattctagtctcattagaaaggaaatcctctaggagtaaatatgcctaaatccatatttagttccttacttgggacctagcagaataggggaaaaataaaacattttaataatttatatttttagtttacattgtggtttgatcagtgctgtttaaaattgatagtacttaaaagtgttaactttagttttctcatttaggatattggcagagtctggcctggaactaaaatgcctggaaaaatgggaaacatatacaggacagaatatggactgaaagtaagtgttacaagtggttctttttaggaacagctaaattgtctaaatgcaaaggcagcagaatatgtatttaatctgtgtctgtaccattgttctaagaggctttaaaattattgaggaaaagaggatacatgaattgtgtgtgtgtgtgtgtgtgtgtgtacactctagttgtagtaatggtggtagtaatgatagggtatatttcaggccatgaaaagtgcagtcattaaagagacaaaattagtagtccactcttggacctggaagatttttacaagatattgttgcatgaaaaaagtaagattcagagcattcagtataatactctttattgagtaaaagatttaacaaaagctctctacgtgtgtatgttgctgtgccatcatataatcacagaagagtggaagggtatataccaggttcttggattatatatcaaatgtgtgtgtgtgtgtgtgcgtgtgtgtgtgtaagtgtaaggaggagagtgggaggca

SEQ ID NO: 108288 - DNA, 1162 bp, Homo sapiens
agctggagacatccttgcagcatgtctctccataggacagtttacactagctgtggaagttggcttccttcagagcctggcaagcaagagagtaccaagatggaagctacagtctctttgtaaccaaatctcagaagtgacatctcatcactcttgccatattttatttattagaagcaagggactaggttcacccagactcaaggggagggaattaaacaggagcatgagtaccaggaggtggtgatctttgggttccatcttaatggctgcttgccatatctgctataagtactttgaaacttctagagcttttccatttttactgtgtcatcttcacagaattaggatgataaaactcctgttcagataaaattccctgtgcttagcttgctggtgtctcacaatcttgaattaatcattttatatagaattagactccaggaaggggtgcagaccaagacagagataaaggaatatttatttgcagttttagttgtatagccttttctagttatttaaataagaagctttgttaaaactctaacaagaatgtgtacagttggtactagaaagtgtacaattgggaatggtctatgctcttttcattatgtaaattctaacgtttgttttgttcagtattggtaaaggttttcaaggtgtcatgaaaagatggggatttaaaggccagcctgctacgcatggtcaaacgaaaacccacaggagacctggagctgttgcaactggtgtgagtataactagtgaagctctttttaatgctaaatattcaacttctgcacatgtagtcctcagtccgtccttgatatgaagtcacataattttagtctgacacaaggggactccatgtacttgtcacccttttatggatccttgcccctcactcatttcccagagccagactagaattagttatattccacaaggttagctgagcatctgtagtttggctgtatataccctgagtctaaatttaaaatgtactttgtgcaaatgttgaattcagtttgtcttttgaattagtatcagttaacaattctgaaataattttctgtgaattgtaggattgagtagataagtaaatgtattgataatggagctaggtttctcactgttggaaaagggcgttaaagtatgaaaatgg

SEQ ID NO: 108289 - DNA, 1058 bp, Homo sapiens
tttttaaattgccaagcactgtactttccaattaggttctaaaattcaatgttaagtggaaacatttgttaaatttctaaagcataaaatatttgattattctcttcttagatgttagtttacataattaatagtgggtttttatttaatatgtgttatgttttagctctttgatcaggtatacacattatcttgagttttcacatccaaaaaattatatacacactgttcacaggcttaatgtgaagaatgtgatgtaagctatgtttaaattattcttataaaagtgacttttgacctatgatttgatagtattcagctgttaagtcatacatgtaatgtatcatttttgtttttaagtttgaggtctcactatgttggccaggctggcctcccctgacctcaagcagccctcccacctcaacttcccaaagtgctgggattacaggcatgtgccaccagacccagccttatccttatttttagagtggatttttgatgtattgaaaacaaactgtattattcacataggctttcttcaatccattgctaattgtttgctgaatgcatagcaaagtccttgtggaaataagtttgtttttataatctttttctttttgtcctctttgtaaatggcctgaacagtacactatataataatagctaacgttggtggggttagggaacactctgttaaaaatatgttgatgtattatctagtaaaaggtgagaaaaatcttcattttaagagtaaaaatatgtcacatgcctggcatggtggctcacacctgtaatcccaacactttgggaggcccaggtgggaggatcactcaaggctagaagttcgagaccagcctaagcaacaaagcaagatccctctctctaccaaaaaaaattaaaaattagctgagtgtggtggcatgcacctgtagtctgtagtcctagctactcatgaggttgagacaggaggattgcttgagcccaggagtttaagactgcagtgagttatcactgtaccactgcactccagcgtggttggcagagtaagaccctgtctc

SEQ ID NO: 108290 - DNA, 1035 bp, Homo sapiens
ggttggtacatctgtagaatgggatcatggcaaaattcttgccagagtgcaagattatggaactccagcttattactaataacttcaggggtctaaaaactttttctcaaagaatgggaagtaaatatcttaggtttgcagacattatgttctctcttgcccatgagagaactaacttattctgccattacagctctaaattggagataggcaatatgtaaattagtgtgcatgactctatcccaataaaactttatttacaaaaacatacggccagcacaggccagtttgccaacccctcttttaaaccttagtgagaagagaatcagaggcagcaagaggaaagagatttctcaaagaacattagggaagcaggaaaatagggaggaaatgatgacaatggaaaggagcgggacgttaaggggtagaggaaaaccctgtggagagattctattttaaaagatcctatagaaatctaaacaccgatgttaagaaattactaaattttttaggttgtgataatggtattgtggttttgttcttcaaaagtattcttatcttttagagatctctactgaaatatttgtgaatgaaatgatagggtatctggagtttgcctcacaataatctattggagttgtcagaggagaggaacagatgaaaaaaataaataggccttgagttgattattgttcaacactggatgatggatacatagggatttattgagttaatctctctgctcctgaatattccgtaaaacttccataataaaaaactgttttagtaaaagacttggatttgggatttggggattaacctcagagtgaaatccaaagagtaattggagaggaagatggattgcagagagtggatggttgatgagagaaggagaagcagtttgtgttccagtgaaagacgaggagggatatgaagggaaaagaaggtaggagaatccagtggcttctcaagggagatactcaggggatgggaattttagaggaagttctcagaggacacagaatggatgggttt

SEQ ID NO: 108291 - DNA, 1610 bp, Homo sapiens
taggtcattgcaaaagctgctggctgctttaataaccttcatttcgctatttagaaatgaaatgtgggatagattggtaataagatgagtcttctttttaaagagattgtaaacctgtcccccttttttttttcctgcttcctgattatcgtgaacttgttcctagttacaagaacccctgaaatcactggttccttggtaactctgttttgcattcctttggcagaactcaaaatattggagcttaaaagctttgatttggttagttggggaaatatgtgtgttgtaaatcagattattttacttgttaatttttgaattattgcatataaaatgccacatagtaattttgttaatttacacacagttaatgttgtgtgaattccattatgtattttatacaatatgggatattctaagaaaccacgcaaagtcagaggcctttgttaacatttgccttgtggctggacttgtgactaacttggattagagtctagcttttcaaatgcctatcttcagtgaatgctttcatctcatatgcttctgtttggtttccttggcttctttaaagtgatttttaaaacttcagctgccttcttgtaagcataaagtaaaagaggaaaacttttgttttttggttttttgtaagatcattttcatagaaaacaagattatgtaaagccatgcaccagcttcaggattaaatagctggtaagagttgggggaacaaccagccctggaatttaaagtagtgatagtcaactctggagaagtgaggacctccatttgagaagatcaccactgttatatgggctacaatacaatattctgtttaacttttactgtattaacagtggggcagggttttcctcgcatgtgtgtgtgcatatcttcatgaggtatttattacttacatgagaatgaattggactttatttgaccttttgctaaatgttaccaataactatagctcttgtagctgacatcttattattgctgtaaggtgcttttaattttaaatgcttgtaaatttataggattcgttgtccttctcatctggaactgttttgaatttcctgagtgcagcattgtattcccagctgcatacagccctagttgccactgcctcttctctctgccactgacttcccacgtctgtacatgtacacatacatgtgcatacctttgtttaactttttttttcttttttaaactcctctctctactttccttaatgcattttggaacttttcggctctatcttctggatattaatcctgttggaagggtgaacactaggggaacaatatgtgcagtgccatggttaagggagtgatgaaaggacatggatttataggctggagcagtgggtctcatgcttgagtaggctttataatctcttggaggtttagttgagcacaaattgatggaccccacccacggaacttctgattctgtaggtctggggttaatacctgagaatttgcatttctaccaagtttccaggtgatatagatgctgctggtccggaaacacacattgagaaccactgggctggaaaatagaagctcatcagttaaaccacttttcctcctcactcctctacctag

SEQ ID NO: 108292 - DNA, 1003 bp, Homo sapiens
tactgttaatatattagtgctggtatagacaatttggtaaaagcatggagaagttctcttaattcttttatttgatcaactcaaagggaggaagaggaaacagtgctgaagattttagaaaaggatgtgacttagttttcttatagagtgtgaaaatgatttaaccagagatatgtaggtatctctagatataagcaggccacatttgagattctgaagtttgtggtcataacatttaaatgtaacataccgtgttttcttccagtttagaataagtgcagaataggcagagttgatttttcggggtttgggttcttaattcagacagtctccagtcagaatttaaatatgagcacaactctctattttcctgcagaacagaggtctttcccagtgtgctatatttgaacactatgtacatgattggaatctaaatagtaagattattcagagatgtaataaaatatagctataaatctcacctcccttaaataaggggaattgggtgccctttgttcattaaggaataaggtatgctttgatttattttctggggtgttaataacttggtttagatctccatgcatttaattccacttttaatattcaatgtattacttatatgtgctgcttttcctctagaaagctacatccatattggaattttaccgggaacttggattgccgccgaaacagacagttaaaatctttaatataacagataatgctgcaattaaaccaggtaatttgaggttggggagaggagggaggtaaaaatacccaaatatgcaatttgtttaatgtcagccctttcaataaagctacatctaaaatgcaaagtctcaaacacttacttttaaatacaaaactgtatctcattttgtttttttttttttttagtggaaaaacctgtagataactctttgctttctgtgagagagggaggaacacttttgtttttaatgtagagagagtttaatatttgaaaaagccacctcaaaga

SEQ ID NO: 108293 - DNA, 1072 bp, Homo sapiens
ggcatacatcatttctatgggtgtagtctattgataacacatgccaaccctgtttcagtgccaactctgctcctctgccagatgtgttgttttggaccagcacctaaattctgagtcagtttcctcatttataatagaaaaataaatacttcctttcaggaccgttttttatgattaacaaatataggattatgaagcgctgcttagcataatgcattgcctcacaacgggcactatttagaagtgtcttcattttccttagcgtcctcaggaagtctgtccttattcttctaaagtttaaactctgaacatcccttttattttacccctggagaggcgagtcagtcccttcccacccctacctactccaactcacatccaaagtaggacaacggtggaagcagaactatagtttccggggagcgactcgagtgcccggagttcattgtaaaacgcaccggaagtgggtccggcggctttctttccgtcgcagagagcatcggccggcgaccgttccggcggccattgcgaaaacttccccacggctactgcgtccacgtggcggtggcgtggggactccctgaaagcagagcggcagggcgcccggaagtcgtgagtcgagtcttcccgggctaatccatgccgggttggaggctgctgacgcaggtcggcgcccaggtgctgggtcgactcggggacggcctgggtgctgccctgggcccggggaacaggtaggaaggtgtgagggtgtcctacctgcacagttgcgtcctgaagcagtggaatggcctggtgcagttgggcctcccctgggtggaggaggaaggggctctgttgagacgtgggacacagaagaataagggccgttaacctaaggaagcacgttctaaggggattgaagtggtgatttttaaaaaacgcttatgagccagccactagcagcgaacgctattaacagcaatcatatcttacaattagtgagcgtttgccaggtactaagcgctctgctaagtgtattaggtgccttatgtagcctcacgggagcaaactgctatcataaggtttacagata

SEQ ID NO: 108294 - DNA, 1032 bp, Homo sapiens
cagctttgaggaaaatgggctttggatgattattttatgttttagggacccccaacctcaggcaattcctacctcttcacctgaccctgcccccacttgccataaaacttagctaagttttgttttgtttttcagcgttaatgtaaaggggcagcagtgccaaaatataatcagagataaagcttaggtcaaagttcatagagttcccatgaactatatgactggccacacaggatcttttgtatttaaggattctgagattttgcttgagcaggattagataaggctgttctttaaatgtctgaaatggaacagatttcaaaaaaaaaccccacaatctaggatgggaacaaggaaggaaagatgtgaataggctgatgggcaaaaaaccaatttacccatcagttccagccttctctcaaggagaggcaaagaaaggagatacagtggagacatctggaaagttttctccactggaaaactgctactatctgtttttatatttctgttaaaatatatgaggctacagaactaaaaattaaaacctctttgtgtcccttggtcctggaacatttatgttccttttaaagaaacaaaaatcaaactttacagaaagatttgatgtatgtaatacatatagcagctcttgaagtatatatatcatagcaaataagtcatctgatgagaacaagctatttgggcacaacacatcaggaaagagagcaccacgtgatggagtttctctagaagctccagtgataagagatgttgactctaaagttgatttaaggccaggcatggtggtttacgcctataatcccagcattttgggagtccgaggtgggcagatcacttgagctcaggaggtcaagatcagcctgggcaacatggtgaaacctggtctctacataaaatacaaaaacttagatgggcatggtggtgtgtgcctatagtcccactacttgtggggctaaggcaggaggatcacttgagccccggaggtcgaggctacagtgagccaagagtgcacta

SEQ ID NO: 108295 - DNA, 1046 bp, Homo sapiens
agtgaaactctgagaggcagagggaggaggcggagggggcggggaggcagcgccgcggcggcaccaggaacccgcggcagcggagctgcagggccccggcgggggaaaggggaagtggtgagggtgaggaggccggagggcgcctcatcccactctggaagctgagccggcggcgggaggagctagggctggagcctctccagcctcccgcgaaggtaaagccgactccgggcactgggctctggggctctgccttactcccttcccacgccgtggggactttgtggggctcagggcagggaaaacggggtggtcttggctgctgcagcctgcagctgctaaggaagcagattacccttcccccaggctgctggtctggttcctttcgttggacgcccccccggctttgagtgacattagctcagggcgctgccctgtccagccccaccccttttttttgcttgttttatacctagtacgctcctccactcgccttaacatatccttaccccacaggctcttcattcccttgtgggttccgccctcgggattcccttccagtctcctagtctgagcacccttcctgctggatgccggcaactcttgtttccttgggtcagcgaccctccttccgaacaagtcctgcagactgactttctttgctttgtttcgttttgttaggaaatgagcatccgcgtcgtctgttctccagtactttttctaaaatcattttctcccctaaggcttttccttcctgcaaggcagcttattcacgtggcctttcctccgctgctgtgattttatctttgaatgtggcctttggagtgggtaaagtaggacttagacgctcagtgaagtggctgttaatcacttgatacttaactatgtttaagagtgccttcccttaaattttctccttttgtagcgtgttccgttaaccacgtttgtcttaagattgtttcctgtgtccgttgcttagaggggggaaaaaagtaaagatttcaccctaatgtggcggtggtctcccaaagtaattatttctcatt

SEQ ID NO: 108296 - DNA, 1446 bp, Homo sapiens
ttgctttatcacagatctgtccatctttccatcaatccatcttattttttatgcatttcaaaacaaattcacatttttagttattgagggcagagctaatgaaagtaagttccgttcttgcattttacagactcaaaatgggaaaatcagtagcttacctgttctctgcaagttgtcatatttgtgtaaaaattacttccagttgatgatgctaaatacgtgctttaaacaggtgactagcctgattaatgccaatccttctttcactagtgtatttttttctaagtgtattcattcatccctagttaaatgagtgttctgcttgtgtttttgcttaacacaagccatgtgtatatacttaattttgctgtgtgtgtaaatttttttgcttatagcttgaccgtaattggcttgagtgtctgtggtgttgagtcccttcatcttgcttttgttcttagtgtcaacttgatgtaggcttcttctcactggactcccaaatcctgtggttttctgtcaaaattatgtgtcttctaaaagatcattctcattttaaccataaatgatcttaaatggtttgccagtattactgccagtaataaattagagaatgcaagaatattgtgttgttcgaaagcatgatgcagtagtattcattgagagaggtgaatctagccaaaatgcctgtgttgccctgaatttgactttttaacccataggacagttctataaaaagaacaaacagaagtttctttggtggtgtaatttaggatatagcatgaaaacaagtgaagctgactcgcaaaaattggagatgctttcaatgcaatttaattacaaaaggcatgtaaatttgatttttcctcatcagaaagaatcatgggtctttgagaatttgaaatatggaacacaattgcaggaatgaaggagatgaaatttaagtgacgttagtttgagcagataaattcctgctatttcgaatagcctctaaacaactggcagaatggcaaatgctagtgatacagctgctaccaagatctcattcaagatcccatttaactgtttacattttttagttggacagtttgtggttgttgatagcatgtgcttatatttgactgttactgatattacctgcttgatacttgagcttctgatactagaaattttacagatttttttcatcataaatagtggaaatcaatggttgcttaagagtttttgcctataagtgatgatttttttgaatcacttttagagcttattaatgtacagaggaaatattgactgcagattaaatttattttgtgaagttttttttttcttgaaagtttctcaagccatagttaatttgtagccatcaaacataaatttaaaaatattaggttggatacatgtaaggaaacagttctaacaactgaaatttcaaatacctaagtggggaatatt

SEQ ID NO: 108297 - DNA, 3036 bp, Homo sapiens
atcttgaataatactgcacaactcaggctatacagcccttctcttctgaaaaacgtgcatattataaatgtaaatgctacatgtatttttttttcttttgacatttccagttttcagtatctttcttgggaaggagtttggtaagaattaaaagtgacagttaaaaggaaagtaaaccagttaatccacgctcttgtatgctatcaattaatgatgaggttatatagtagtagcagagtgttaaccctacatctttgttacccagtgactaacctgtctgtagccaacattttcatatccgtttgactgtcggagaaaatatgccattctagtgaagtctaacctttttttaggcctgtaatgaaatttaaaaattgggtttaatatattttctttgggagggagtgatggcattttttagtagcttcctagtcagaccaaaatgtaagtgcttctgtttcctgtctgtaagatggttggtaattcctacccttcagatttttgtaaggattaaatgaagtgatatggcatgtatgaaagttttaaaattatgcctcaaatatattgagtattcagtgaatggcatctgttgaccattacaaaagtttagtctctggtccctttgatcagtaataagtaaaatgagtgtgtcacacttttacaaatcagtgaccacattattctgaatcgtgccacaaggtaaaatgtgacacatgcacaaagccagtaagtgtttcttctctcaacttttcattttttagtcactggagtggtaacttcttaggatgtggtatacatctgagctgtctagtatttctggtttgcattagcaaactgcctataattttggaagatttgaatatttgattttgttgtctaatagctcaattgtatgaactcctaaattagaatagttgttaccctttagaatacttgtctctcattttttttccccctagttagtttcaatgagtgaagttagggagaaaagtggcatatccagggtagtatgagtcattttagttctttgaatcaaccttagaaaagtatatctttaaataatccttattttttcctcaagtggtagattactttggtcatcataatatgacttccgtttttaatatgattataacatactgatacattctaaagaacaaacttactgcaatgcttttcgatttgtgagcttgtaagtaactgtgatcatcaaaatttttggtaatgttcttagagtagtgactaagacttaactatcctcttttttcctcgtaataattcagagtacaactgtttgtgtgctcttagcgtaattcttttaggccttgagacttggttttgtttttataacagctttaaggcataacttatataccataaaattcacccttctaaagtatacaattcagcggattttagtgtattcataaagttgtaaaccatcatcactgttttgagaacactttcatcacctcgccttccctgcaaaaaacttcctctaaacactgcgttacaaatcagcagttaactccctttttccccctcttttggcaggcgttaatctacttcctgtctctggatttgtctatttggaacatcttatataaatagaatgatacaaaatgctgtattttctgactgacttcttccattaagcataatgttttcaaggtcgtctatattatagcatgtcagtacttcatttcattaatgtcatataatctgttgtatggatatactacattttgtttatccattcatcaactgacagacatttgtgttgttcttactcttttactattatgaataatgccactgtgaatgtttccatatttccagttgttttgtgtatatacctaagagtggaattggtgggttatgtggtaactctgtttaactttttgatgaacagccaaactgttttccaaagtagctgcagcattttacatttccaccttcaatgtctgagtcccaaatgctccatatccttatcaacacttattgtcttttttattttagccatcctagtgtaggtacgaagtagcttctcattgtagttttgatttcatttccctagtgattcatgatgttgggtatcttttcttgtgtttgtaggtcatttgtgtatcttctttgatgaaataatctattgaaatcatttattcactgtaactaaaaaaattttttttattttacttttttttttttttctttttgagacagagtctcactctgttgcccaggctggagtgctgatctcggctcactgcaacctctgcctcatgggttcaagcaattctcctgcctcagtctcccgagtagctgggattacaggcacatgccaccatgcctagctaatttttgtatttttagtagagacagggtttcaccatgttggccaggctggtctcaaactcctgacctcaagtaatccgcccgcctcagcctcccaaagtacagggattgcaggtgtgagccactgcgctcagccaagtcatttattcacttttaaattaggttgtcttattactgaattgtgagagttctttatatattctgaataaaagttccgtgtatatgatttgcaaatattttctccaattcttcagatttttttactttcttgatggtattgtttggagcacaaagcttttaatttgatgaaatccaatttatcaattgtttcttttgccatttgtgcttttggtaatctaaaaagccattacctaacccaagctaacaaagatttacttctttgttttcttctaagagctgtatagctttaattgcgttaatttttgtatttggtgtgaagtagggttctaaattcattcctttgcatgtgaatatccagttgtgccagcatcatttgttgaaaaaactgttctttccacttgaattgtttcgacacccttgtcaaaaatcagtttaccatgactgtttagttttttcctggactcataattctgttctgttgatcctgtatgcctaaccttatgccagtaccatattgtcttgattattatagctttgtgc

SEQ ID NO: 108298 - DNA, 1027 bp, Homo sapiens
tgtcatctcaaagttcttttgacagtatgatctagatgacagaattatatgagaaagatattagaagaggcttaggtgtggtggtgaagattggtgtaggattgaaaaggatattttcttagccagtcttctaagactgtacatggcaccagcagttacatttggaacatttcaggcattctttcactttttgctcacagaataaaataaacaaattctgtagttttatttcaggattgtaaggagtttcatgtttgactttcagggtgattttgaaaaatagtttgtgaattcacatctcttatcacacatttgatttcactgtgcagcttttaagtcaaagactgagcaaaatcttatttctttgttttagttcctattaattgattaagcctttgaagttttgaaacttttaagctctttagatagcttgtttacttcaccagtcccctaaccctcactccactttaaaaagaagcaaatgactgcttttttgttagagggaagtgctataattctttagtttctcactccactttagacatgtagagttaggaaaaaaaacacaatgtagcaatacttttgtatatggatatgtggtaaagattaataaaatcttatcatttcctttttacctaaatggaaatactttctcatttttataatatactgattttaaaaaatagacaagagaaaaatgaaaatgtgaaagatctctcttgatcttaatgggaatacttttattgtattacctttgagtctgatcatggctgtttgtttaagttattaatgcctttttagcatactaatagttcaaaggaagaaaacatgattctctccgtagatgtcaaaaagacatttgatttaacttaagcatttttgataattaaaaaaatctcgtattaaaatacaactagatatttcaataaatataacaaattatgttaatagatttttctaatattgaagtgtttacctaattggtcacggtgtattactattttaaaatgcgacttgattgttactg

SEQ ID NO: 108299 - DNA, 1255 bp, Homo sapiens
aatttaagcacttgttttcctttgtaggtataagcgtgtcttttcagttggaactcatgcgattactacatataatcccaataccttagaagtaacaaatcaggtaatcctgttagaagctgttaggtgtttgtatgaactccctttgaattttaaaagccaggctgtgaccattaccctcccttaaatcagtacttgaagatagaaatgtcaaatcagaaagagattgatgtgcttacataatactctgatttggggaccaaaaataaataataaataaacaggagggggagaatatgcttatttctagggctctcaagggtataacttgatgttactattagttgtggccacctcctttatgtaaaattagtaatttagttctctataatttataaaggcttatactttttactgtaacaaaagcatatataagtcatgagtccagttagtgtaaaatactcgtcatgggagtaggattatgggtttataaaggcaagagtaacctgaacatttataagtaaacatattcaaagatattctggcctattttaattccaaattaggcatgtttcacaaactttttaacaaatttttaagtagtcataaaatttcacttcccagttcttatcactttttaattttaatttctttggattaatgtcatcattaaaataggaatacatattggatttttctgactaaaaacctttaaaagaattttttacagaattactgtaagacacaatttctagactctattttataaaattttgctgatttaatcagtgattatgaaattaaagtgacaaaaataagcattacattttactgtattatagtagcaccagtcaaaatttttttttttttaagtggccttatggagacatttgcagcatcagccctgttggaaaaggacaaggaacggagttcaacctcacatttcgtaaaggcagtggaaaaaagtcagaaactttaaaattttctacagagcacagaacagaacttcttacagaagcattggtaagaagattccatgttcataaataaaatttctttcttctctttttaaaatgaagtagttacatagaagtagagaaattaatgttctctgcccctgtacccactatgattatttttttcttactgacctttaacttgaccctgtgaaacgttcacttttctctaacaggctggaaaatcttttatatttgcaagtttattagttttttttaattgcatatgcaggagaaag

SEQ ID NO: 108300 - DNA, 1245 bp, Homo sapiens
cagttgtgtgattagaaaagcctaaggtcaaatacaggcctcagctttttttttttgtatgtggaaataaaatatacattaatatactgaggcggttcaggttgtttaaattgaatattacaacttccctgaaatgtgacttagctcttttcattattgaacttggattaaaagaatccatcaaagaaagtagatcttttttccagtaaaactctttcagaatacatttctatgtaggatttcctcttttttctttttataaatttacatagagtggcttaaaatagcttcataaaatattgtaacccaaaccctttgctaattaaaaaagaatgtactgtcttcagttagtgtgaacattcttaaacacctccaaatagttaaaattaatcatagttttaacaatttggatagtagctctaaatatttacgatgacagttagatttttggtcgtttcaatagtgactgtgatacattaaattttattttatatgattttattttatgaacctaaaagtaatactgattctgtctttagagatacaactgctataagcatcactggagtgactcaagaaaacctgtaattttggaagtaactccaggaggctttgaccaaattaatcctgcaaccaacagagtactctgttcctatgactatagaaatattgaaggatttgtagatctctcagattatcaaggaggattttgtatactttatggaggatttagtagattggtaagtactattttaaaaaaaaaaaacactttaaaagggtcatgaccatttgaaggaaagcaaagctttttatacttcattttgaaatttcacgtgagtcctctggaaggaagtataatagtccaggttttggtatcaaagatacctgagcttgaatcccagtttgctgctttccaaaatgaggagagtgaggatctggtgagataatttatgtaaaatgctttacacacaatggatggcttagtacggtaaacagtgactacagttgttattttcattggtattactgtcttaccaaaaagtttctaagctttctttgaaaaagtaatttaagcctggcatggcagctcacacctataatcccagcacttagggaggcagagttaggaggatagcttgagcccaggagtttgagacctgcctggcaacatagtgagaccttgttctgcacaaaaaggaaaaaaaaatgaaaaaagtaatttaaaatcacttactttttgagaat

SEQ ID NO: 108301 - DNA, 1315 bp, Homo sapiens
tggtttgtaacatcggtaggccaatgacttgtaaacatttaaacattcttcagcatcatcttgcaaagaagcctactgtgtaaaacagattaaatcagagctgcgttgtttgaaactgggaatcctgcccacacagtacccatcacccccagtggcttggctggggttccttggaggcccttcttggaagacccagcatgctgttttgcacaaggtgatgagaaccagaacctgagaaattttgagataattgccgttcagtgagttagttgcaaagctctgtatcccagactttattattttaatttagtaatagtcttttcattgaaacaactgcttatttgcctctaatacctacctcttttttctctagaattgctactttaatacctttcctatgagttgattagctacagacacatttcagttgtttcaactctgactttttaaatttctaaatttgtgcagcatttatttgcgtcagagcaaagagaagagattattaaaagtgcaatagaccatgctggtaactacataggtatttcattgcggatcaggaaagagcctttagaattcgagcaatatttgaatcttcgctttggaaaatacagcactgatgaatccatcacatctttagcagagtttgtagtccaaaaaatatcacctagacattcggtaagacccatatgttaaaaatgaaaatttgttcacctgattttgacgttttaaaaaataacttcttaatatgtctcaattttattttttgaaggagcctgttaaaagagttctagcacttacagaaacatgtttagtagaacgtgatccggcaacctataatattgcaacattgaagcctttaggagaagtaagtttcagcattgttagcttaaatgagatttctttctattgataaattaggataattttctttctattttaatgtttactcatggctaaagaatatggaatggacagaatctgtatttaactcttaacatatttatattaattgatcatagaacaatgattattacaaaagttattttccaagtatataaagaatggaacttattactcaactgaaaatttgagattttaaagttttaaactcttatattgtaaacaagtcacatcttaaaatactgacttttgtaagctaagtgatgcattttataatgaaatactataaaactataaacttttttttgttgaagctattttttgttttttcattaggtatttgcgttggtctgtgactcagaaaatccacaactttttaccattgaatttataaaagggcaagtacggaaatatt

SEQ ID NO: 108302 - DNA, 2296 bp, Homo sapiens
acacctcactggaaaaatatgaatgttaatacatgaaaagatcatgaatctttaggaaatgaaaatgcaaactactacatattcactaacatgactaacatcaaaaagactgccagtggcaggtgttggcgaggatatggagaaaagaactctcatacattgctggtaagaaggtaaaatgataaaaccagtttgaaaaacagtttgataatttcttaaaagattaaacacatacttatatggtctagcagttccacttttaggtatctatccaagagagatgaaaagatgcccacagagagacttgcacatgaatgttcgtaatatcattactcatagccaaaaacagaagcaatccatatctagatcagccagtgaataaacagacaaaatgttgcctgttcatacaatggaatactactcagcaataaaaaaggactgacctaatacatgcaacaacttggatgaatctcaaaagcctatgtatgataagtaaaataagcaagacacctaagactacatattctataattctgtttttatgaagtttctttaaaaagcaaaactatagagatagatcagtggtttcctggggctggggagtgttcttttgcaaatgggcacaaggaaattttttggagtgatgaaaatatatcagaactgatgatgattatacagttgtataaatttattaaaaattatcaaactgtacgttttaattggatgacttgtgatttgtcaattagaaccgagtaaagctgttaaaaataattttaaagggagagaaagagaaattaaaattagtgtttaagtaacttgtacaaggtcatgtagcagcacggtgaagagctagtattagagctcttcctaaagccccactgtttgtgtttcccattgtaactgtagtgtgtccctgagcagattacctgctaaagggcctatgcttcatgctagatcaaaattccccttaatcatcaatgctaaaacctttttttacttttaatcttacttagagattccttattagcaagtttgctggatggagtaagagcctctggtaatagagatgtttgtgtaaaaatgacaccaacccataaaggtcagcgatgggggttactcagcatgcctgttgatgaggaagtagagagccttcacctcaggttcttagctacgcctccaagtaagtattgatttaaatgtaattacatttccactcatctacttaatttaagaattaggaattcgtatcttctttttgaacctcttaatctctttacagatggcaactttgcagatgctgtattcaggttcaatgctaatatttcatacagtggagtcctacatgcagtaacacaagatgtaagctaagttttatcataattgttcattgttactaacttttggtatggaaacttttttgaaatactctttcttcacctagggtctcttctcagaaaacaaagaaaaactgatcaataatgccataacagcattactgtcccaagaaggggatgtcgttgcttcaaatgcggaacttgagagtcagttccaggctgtgaggaggcttgtggcatccaaagctggtttcctggctttcactcagcttccaaagtaagttgtcttctgaaacttaacttctcttagagaatttgaactactcaaaatggcaaataatgaacgattcacctccttttccttgactaaaccagataccttttatagggtgatatggtactttattcatgagaaatgaaaaaggaaggtgagggcagcagaagcggaatattggtcccatactcaccagtaatataactgactcttgaatttgaatgggaaattacatgccttttagttttagttaaccctaaaaaatattttccctctcaaagaaaaaactattatgaagactgataaatttcagaggtggaatttaaaatacgtcattgttccagtagtgcaatggaaagttaatatgatctatttcaataatataacaatttaaaatgttctggtattgctagtatatgcttgttttttgttccaaaaggtttcgcgagcgtctaggggtgaaggtagtaaaagcactcaaaagaagcaacaacggaataatccatgcagcagttgatatgctttgtgcccttatgtgtgtaagtagtagttttcttaaggaaactggtttttcttaagttgactggtggttttgatttccacagtcccagattttcattgtaccaataagttcttgtttctgtttcataaattgttctcatagttactcaaacctttgtttagcata

SEQ ID NO: 108303 - DNA, 2274 bp, Homo sapiens
tagtgaaagaagtcagtcacaaaaggataaatattgtatgattttaattatatgaggtcaaattcacagaaagtagaatggtggttgccaggggcttgggaggaaggcagaatggggaattattgtttaatgattacagagtttcagtttgggaaaatgaaaaaagttctagcgatgggtggtggtgatggttgcccaacaatgtgaatgcttaatgccactgaacagtgtaatttaaaatggttaagatggtaacttttgttatatgtagtttaccacaataaaaaaaagtaagaaacaatgctatgaaacaaacattgagccctcattacatattaggtgttggctttgtatcttacatgaattatctcatctaagcatcatagtaatgttacataaatactattactcctactttacagctgaggaaaatgaaacttagagacttatgtaaagtaacttaccttgcgtaacgtctcccagttattgtcagtagtaaaattaggattggagctctactcctaaccatcacgctggaatgttttatacactcaaaagaaaatcaccctgagacaagtatttgttgttaattttagtacatttaaatgctaagttttatttcaaattttagttataaaattctgggtgggcaaatgtttgccttttaataagatctgtgacttttgagagagtaccttttgtatatgttgagttaattgttgggcaaattatctgtgaagtctgatcaaaatcatggtaaatcgtcacttctgcctgcttatcacgagtttcctttttgccttacactttaaaggcaatggtttttaattctttcaatgtgtaatgaatactgtttataaatgacttttgcgtgatgctagcacatgggactgcttatgaattatcactgttttttttttttcatcaatagcccatgcatgatgactatgacttaagacaagaacagttgaacaaagcttctcttctctcgtcaaagaagtttctggaaaacttactggagaaatttaattcccatgtggtaagttataattaaatttgtcttcatggtagataccataccattattgaaagatattctagaagtgccacgtggatgattttttttttttttattgtagcccccagctttggtcagtattggtcacagttcagcttggtcactgataataaaatattttgtcttaggactatatccattcacctgggaaggatagatgtcaaagcctttagattttcacagggatactccaaatttttgttttttctttctttaaaaatatcattaggaaataaactgctctaaaaaaaattaagccaaatctttgttcctcagtccctgataacaattttggagatgggcattctatagcatcttgaaggaacataagcagattgccagagttttgcaaatattgtcaaatattattttttgcaaatattaacctttgttatacacatttgagaagtcttggttatactcttgaaatttgaattttaattgttccttttgaggtatgatggataatggattcactatatgagcaaaagcaagtactaaagagtcatccaactttgaacctcatgttgagaaattaaagtcaatgttgatgtctgacatatagaataacagaaaggaacacattattgttaaaatttaactgaaggtccccatctcttaagtctttaagagaatctgttgcattgtttcaggatcatgggactggtgccctagttattagttcgctcttggacttccttacctttgccctctgtgctccatatagtgagacaactgaagggcagcagtttgatatgctcttggagatggtagcatccaatggaagaaccctttttaaactttttcaggtgagagcttgtatttttcttgtcagataacagtgaatttaagggaaccgcttttaggatcactgtttctaagataacatttgcatacttctatagcagaggtgtccagtcgtttggctttcctgggccacactgaaagaagagttgtcttgggccacacataaaatacactaacactaacaatatctgatgacctaaaagaaaaaaaaattgcaaaaatgtttttaagaaagtttaagatttgtgttgggctacactcaaagccatcctgggttagctttgaataaatataagcatccatgtaggctgcgggttggacaagcttgatctataatattgacgaataaatgcacctagtacattatcatattggtacattttgagtgt

SEQ ID NO: 108304 - DNA, 1867 bp, Homo sapiens
ataaatctgttactgcattatttgtttattttacttacttaaaagttagcattctatctgttgctcttttttggaaggataatgttgacagtgttgaagtcttgagatactgagcttgtatagaaatctattgatggagttagttcataccaaaatgataccaagtaagaaaggcaacaaaaagttcttgataaagcatatttgtaattgagctctagagattggagcatgatcttgtcgaagatactgcttctttaagatagttgctttatgcttctatattttttaaaaggttgtagctatgaatgtctgttgcatactatgatgattacaatgacatcagtctaaatggcttttgaattcttgtattttgttgtcatagaagcaatttgaatacaattgaagaaagtctccttttaccaaaaaattcatttattgtgcataagtatagcacacaattaatcacagaattagtatgcccttaagtagctgtaaatatatataggcattgaactgaatggaacatcaaagtttatttgcatttttagtgtgcatatacagccaaaggctaattttctccctttagctaatgggttctttgctcaatgttagcttccaaagtgcccatcttttacagagcttgcgatagccaagcctctcctttttgttggcagctatacacagagggagtgaacctagttttaatattaagtttagcaaagcatagtttatgaggtaaatttgtctggaaacatctcaaccttattccaaaggtttaaaaattacctgtgctactactcacctatttttttttgggtgattagaagatgcattttaaaaacttctattacatactgaatgtttttttcatttaaatatgtaaaattagttttttaaagtttggatagcttgtcctggattgccaccttagggatcatcttaccctttttccaaaggaaggtgataaagaaattgctacaaaaatgcaggagcttgccctaagtgaaggtgccttacctcgacacttgcatactgcgatgtttacaataagctcagatcaaaggatgcttacaaataggtaggtgatttaattcaatttgctgcaatttaacttcctgtctagagaattgattcagatgttacataaaactaaatgtgtttgtattacacaaataatacattttcttttgatccacctagttcttttcctttccttacagaaggattttgcccaagtgatcactgtccctgcctatggaaaacctggagggaaacactgtttactttttttccccgacctattatcaggccctgacaccatagtcatgggaccaatatggaaaagggtacttaaaagcttatggaactagaaccacatgctcaggtcttttctccttatatccctgtgaccatcttgcatgcacatgaccccatgggaaaacctcacatagttgatttttaaatatctttggtcaaatactctactttaaaaaccacagaaaaccttacatatccagcctaagctagacttaacctaaatctcttgtaattaaatgattccctttttcctgatagtcattcaaatataaacacataaatttattcacttattccacactacatgaattccagccctttttaaccctctttgtggtttctaacatgtgaccctttcagctatcttaagcatactatattatgactcatattagtaaaaacagtatcataaatagttttaattttattttttgactttttaaataatagcataagttgctgagttaaacgtttagtttgttacaatactgtacattttctttgtcatctatgtgcagttattatacatcatggtatgctgccttgccag

SEQ ID NO: 108305 - DNA, 1064 bp, Homo sapiens
ttaattgaacaagttatctgtactgttaaaaggggatggtttgttttttattgaaaagttatttatcataggagttaccgtaaagttttaccctcaatagctaagccacagtattaatttatttgggtttttaaggctaaattttctttttcacattgttttgaaaatggattttgtgtttttagccgccaggcttgctggcatacttggaaagctcagatctcgtacctgagaaggatgctgatcggatgcatgttagagacaatgtgaaaatagcaatggtaaatatgactgtcccaagtgtgccttttttaggagtaagggtactgttatatatatgtctttttttgaaacacgttaaaaattttagaaacaaagaattcattgcattgaatagtatacttaactattgatatctttattgaggtaaaatttacatcccataatattcatctttttaaggtatacaattaaataatttgtggtatatttacagagttgtgcagctatcaccacaaattaatgttatgaatagtggtcattttattctgtgttttgtttctctaattcaacttattggtacgttctggagtaccagtaagtgtgtaaatatggtattttgcacatatgagattgataaatgttgttggtaaaaacggccaaccatgaaaaaagttataggtagggtttttttccttacaagatctatgttaattataaggttgggccatccatggaaaaattaaacatctttatgatacactactataataatttcttacgtgtattctttttctgtcatcactccttctctgtctgcacccagctcccacttgcatcttgccacccctcataaaagaatcatcttgaaacctaagtagaaaagttagtttcttggataaaaagtataattgtagaagttttcagtttgtttcttcactgaaccataacatccagcattaaccttataaaatagatagaatgactcagctttacatagagttttaaaataaatttgcaaacaggcatgtaatggattccaacattattttacaggatcagta

SEQ ID NO: 108306 - DNA, 1160 bp, Homo sapiens
agtaagggatatttatagattttttaaaatgcttagtgcatcctgctatttcctcattatatgtatgtctaggtttggtcaagaccatgccaggtcaaaccttatttggaatttcaaaacacgagaagaactgaaagatactcttgaatctgaaatgagagcatttaatattgacagagaacttggaagtgcaaatgtgatctcctggaaccaccatgagtttgaggtaaagtttgatttttccagtatattaatcttaaaaaataaagcatgtactatttggggagtgattttttttaaaaaaatttgtaattacatatctggtctttacctttccccctttaatgttatgtaggaaatactggaaaactttaatctgtgtgtcagacaaaaataaaaaaattttgtttagtaacttagctttgtacctgagaatcatgtaagaattttaataaatttgattctgtgcattccaaatctattctttccttttttctttttttttccatttctgggacctttgagttcttttttcattgaaacataccctgtttgccttgttccttgtaacttgtttgatttttttttgtgttaattgattctgaatgtgaccatattttgctgttctattaaaatattgatgtgaagagcaggagaaacaagaaagatggtggtagtaggtaattttatacgtgtgggtgtatatatagttgaagtatattataaacatatacaatttaaactattatagctttaaatttgaacatgtgagtgatcctgcgggctttgatctttaacccagttgcatttccatattccatttggatatgctcattcttttcttagcaaaatgaaaaacttgtctttactttgttttgggagtccgtattctgctagattttctcctttttcactgtctaccacttctcaagtcatctttactcattttgcttcatctcgctgaccactaaatgttggctggctccaaagtttcagttctttgacctcgttcatttttattcattgcctcaatgaaatcattaagtttcatggctttaaatatttttattttattttattttttatttttctgagacacgaccttgctttattgcataggctagactgcagtggtgccatctttgctcactgcagcctct

SEQ ID NO: 108307 - DNA, 2186 bp, Homo sapiens
gatgacagagcaagaccttgtctcaaaaaaaatttttttattttaagaatttgtcatttaacatttgaacatggtggaggggacaaattaatcaattcatcatgcagctcatttgattgctgcctgtttgttgcagtgtatatgttttatactttcttttgtgtttacatccttttacttcaagtatcatttggaccaattatttcacttacattatttcacttacttcaatttttacttatctccttaaagctatatattaatctgatgactttaaaatgtctgcctttctagggagattagacaagttatataaagaatgtaattttcaggattcattaaggaattgcaataattgacagatttctatgatttttctccttaatgtttataaaatggcattacttcttatgggctgttggtttattttgtctagtaatagtaataccttaatttttatttctattcacttctgaccagattctcatttatttcaatagtgcacagataaacttgaacgagataggttgattctcttccttaacaagttgatccttaataaggtacagtagtttcgcatacatacattgttatttccaagtcatataagtatgtaagataaactcacagtttgagttgattatccagggagtgttcttttctgtcttctcctttttagacagaaagttctgtgtgctctaatctcctggagggagaggtttttgtcagtattccctgtatagtctgtcttaatattgtgggtgcagaatgaattaatgataataaaattctgaatgacgaataatggatgacttttaatacattaaaatgatttttaataataaaaattagcttatttttctttagggactctttagggttaaattttaagtaaaatatatgcttgacataaaatggaaagtctttatcagtgtacattttgttgataaaaagtaattggaagttataagattagtcattttactctgtattttctttttaaagacattttaataggttcatgctcatttcaaacaagaggaattcacagttgtaatatataacattaattcacaatttatgttgaagtgtaagcggattttcatttcttaaaactttgatactaataccaatttgcatagttttattcttaagtaatgcaaatgttttaaactgaagtgtaattataagtacaaagaaattttaattgaaattatagtctcttaacttctaagaaattaccagttaagtttatgaaaacaaactggaacattaaaagattttttaatatagcagactttatttctgatatagaataatctgtttattaaaaagaccttgacagaataattgtaaaaccagaggttgttttttcctcagaatatatttaagtaaaaattcttaagtgatctctttgtaatatagttttgcccttttaatcaattggaattcaggttccttgaacacaaaatgctgaaaagaccaagtaataccagtcgtatcacttatttccaaggactccaaacattcttttcttcgaggaccttgtaggtggtagtacctattgggaaaggtactattgggataggttttaggttatgaaaaatgtttagattacgaaaaaaatgttttcctcttccagaaaaatgttaaggatctcatggattcaaatggaataagaatccttgtggacttgcttacccttgcacatctccatgtaagccgagctacagtaccactgcaagtacgtatccttgtttacgttttacaaatttaacgttctttgagtataattttagaggcaaaagaatcatagaaatctgaaaagatgtggtcacacacttatttttccagtaattacagtagtactagttctgagatttcacacagaagatgtgaaaccactgtaagaacgatccaaaatggacagtaacgattgagttttattttgtcaattaaagtaactgtatctctaatatggcttatcttgaggcaatgtgacttttaggatataaattgaattcattagatatgtaaatagtacttttaacattggcaagcagtaagaatatgctttgccttaaaggagtctggacaccttcttgataccagccaagaggactgatacttaacttatagaagaatctatccttagctcatttgatgtttttggtgttttaatttcc

SEQ ID NO: 108308 - DNA, 1524 bp, Homo sapiens
agctccaagggccctgcaactcagtttccacatgaaaaatggagaaccaaacatacatataaaattatgccttcaaaccttgtttaaaagctgttgttatggagatagcactcaggtttttagtgatttttatgtaataatttctggctgggtgtagtggcttacacctgtaattccggcactgtgggaggatcgcttgaagccaggagttcaagaccagcctgggcaacatagcaagagactatctttgttaaaataaaaaataattagctaagcatggtggtgcatgcctatagtgtcagctacttgagaggctgaggtgggaggatcgcttgagtccaggaggttgagactgcagtaagccatgatcacaccactgcaatccagcctgggcaatgaatagcgagaccctatctccaaaaaagaaaaaaaaaaagctatcttagtacttacgtcaaactataatgtttctatatggtatgaataagtaagttttaatatgcagtctaaaattcattgaaaattattcagtccaagagctaaggacagttttcctctttatcttgatacttgatcctgcctctgatcttcagcctcccaggctcatttcgaattgggcaaagatagttttatggaggaccaaccattctgctctagtataatttgattatttagcaccccacctgtcatttttactctttccagtattctttatgctctgcaggctggccaggtggtgggttttttggtttttttttgtattaaccaaatttgggttcctaaaggcctgtcaacaaaacttattttttctgaaatagtgtacttacatgtttgtttcataatttagtatgtatttactataaagtagaaaacactagtgaggtttttcattttattttgtctgtttgtaataatgccttccatccattagatgcaagaattgtggaccaaaggaatgttaaatgcaaaaaccagatgctgggctcaaggcatggatggatggcgaccacttcagtccataccccagcttaagtggtgtctcttagccagtggacaggctgtcctgaatgaaactgaccttgctacccttatattgaacatgttgatcacaatgtgtggatattttccaagcaggtaaaatgtaattgaatgtttccatggttaattgatatgcttccttagtaacagcatagaatcggtctggtgttttaaaacaaagatgtcctatttatggccttggaggaatgctgttttgacctttggaattttttgaaacagatataaagaatttgcaaattatattaataaagttgctaaaaaagcaactttttctgggagatttcaaataatgttacaaaactgagacttacaatagtaacaattttataatttatgtgaattggtgttaatgttttgaattacatactgcagtccatagacagtggtgaatgccagctgttgatctgacacgctagctatttctgctatagaaggcaagtgtaggcccacgtcttgccccacttg

SEQ ID NO: 108309 - DNA, 2841 bp, Homo sapiens
agattttgactattcttagttatgttttcattgataccaatgattcaaagcattgagttggtattaatctaggatacaccaaaatatctttttcttttgcattattctgcttttttggaattaagctatttaaacttcagattaacattaaacccaaataagtcaggtcctagacatttcaggcaaatgtttctattaagttgtatgccagtgacttgtgccatttgtacctttcagttgtacattggtctgcagtgggaaagaagagttaactcagtttatatatttttacattcacttatttactacctaaatgcttatgtaagtcattgatgctgaaaaagacttctaaatacagtaatgccctatcctttttttttttttttttttttttttttgccaatttctgttatttaagcatactcacattttaacatttctttgcttttcttttgtggacatttccattcgtatccttcagtgaaaaagcactgcaattattgagggctctaaactattaccacatcccctttcctgtggggccatgtggctgcatatgtgaggtgatgcaaagagaggaattttttctccctgatagaccctctcaacatgtggataaaacaccacacccaaaagatcaaccgctcccatttttctaagtcttacgaaactgaaaggaaaaagtaaatacaaatggcattaaatttcagtctaggaagggatgattaaaaaacttttaagaaatgtgctcagcataacatgaagcttgggggagggaggctttcttttaattaaccaaaaattttcagtaatatctgaacaaagtgattaaagatacttatattgataaatctagcttcgaacagtgtgtgactcctatttttttatattgagttcaaaaattatttttaagaagttatttttgtttttcttttaattttttctattctgggagacctgaatcatgccaaagcacagttaggtggctatagtagtttctgggaatgttatcttcatcggttggaaagggatatctgtacttcatttgactttaagagcagtcatcatttttaccatctgatagagcttcagaatttttagagtaatccaaaatacagtgagtaaacgttctaggttttctagtatagtgatagtttgaaatactctaggtgtgtgtctgtgtgtgtgctgaataaatgttataggttttctagtatagtgacaaattgaaatacggtgggtagttgggtgtgtgtgcgtgcttgtgtgggtgtttgccactaatttccgtaatgtcaagtcttgaactactgccattaacactagggaaaattctatatgactgtatgtttcctttttaaaatatgtaatagtatgaaacgcttaatctaaattccttgtggaatagataagacaccaaagcatagagaaatttaagttatttacttaaaagacccatagctgtttagtctcacatatgagtatagaactttggcctcctaatctgagctacttactctctttattgtaaattaattaattaattttatttatttattttttgagatggagttttactctgtcgcccaggttggagtgcagtggctcaatctctgctcactgcaacctccgcctcccgggtttaagcaattctcctgcctcagcctcccgagtagctgggattacaggcacctgccaccatgcccggctaattttttgtacttttagtagagacggggtttcaccatgttggccaggctggtcttgaactcctgaccttgtgatccgcccacctcaggcccccaaagtgctgggattacaggcgtgagccaccatgcctggctgtaattttttttttttttttttttactgggagcatttgaccccgaattgaggattcattggaagcaagtgttttatagaaaattggaacgacacctttattaagcttcgtagataaaacttattaaatgtttatcaaaagtttattcatagcaattctgtatggtttttaattagcccagatttattagagtaattccagaaattcccttcagtatttctagctcaaatttctagaggccacatcttttggtacttcctggtagcagatgtactacctgatacttgtttaccctcttgcctgttacctgcacttctggatctaccttttaggctgttttattgatcattattttctgctctgctccttgagttctcaagaagccttcaggggattcttgtgtcagctcagctgagttgaaacaaaccgagaagtctttttaggaagattcttgcacaagaagcaatgttacctgtaacattatgacaaaactagcttcaggcatgtttgggcttttctgaatacattttgatcaattctcaattgatgttctgcattaaatgttgtagaatgaatcatttttcaaatctgttgtgggtctggtagatgagcttactgactcccatgggtttttattttataatttacataaggagctataacctcagcatatgaaataaaaaacctaaagtgatgatgcaggttttttacaacccaataaaaacattttaattttttttcagctactgctgacctttgaccctatccttgttgagaaggttgctattttgttataccatatcatgcaagataacccacagttaccccgcctttatctgagtggagtatttttctttatcatgatgtacacaggttccaatgtgcttcctgttgctcggtaagaactttaagggtaatctatttaaaagtattatttgaattttatatggactgatttaattgaattatttgtgagtaccttattgcttttattaaaa

SEQ ID NO: 108310 - DNA, 1036 bp, Homo sapiens
cacaccacaatatactgcttgctttcttactacagtgtatcatctaattttgacgtttttcatggtttctggacactttaaaaattaaaacttttaggttttatctttcacccgtaaagataacatgtaaaaaaaaataaatcttaattcttcctgggtttaatttgaagcctaatacataacacagattggcagaggatttaaaaaattttttaaatagaggaatattgccttgtaacaaataccttgctctgcccaactatacagcagtgctcaggtgattttggttatttgtatttcagaaagctgttaattggacagctaaaagtatccatttaaataaatacagcacaataattctataacttaaaaattatactctgaaatagttttactttgatataaattttaatcttttgtctttaaggttaagcttctaaaagatacccttgatgcctggaagaaagaagtagaaaagaagccacctatgatgtcaatagatgatgcttatgaagtgcttaatctgcctcaaggacagggaccgtgagttgttttcagtacaatagcaaatgtctgtcccaccttaaagtaccagtatcaaagactaagttatatttaaatcaatcattttaaaatcttttgcctatactttgatatatacaccttgggaataaccatatggaactatatctgtgtgactttcatttattgcaaacttattagccaaattgtatcctcctcttcttgctggtacattcatttctctattaattggaaaaatgtatgcagagtatctggcaccatatctgacacatggtagccattcacatgttcatttttcctcttccttttgtaatttgtattatgcatgtggaagagatttgatagcaatatgcctaggacaccaaatgacagattatgaaagaatgcagatttatcttgtttatcagtgaagttttatagtagactatgttatggaaaaatggtttgaaaacttaagtatagactaaaactgtatattttggcaagactgata

SEQ ID NO: 108311 - DNA, 1040 bp, Homo sapiens
acgtgttaaatgagacagaatggaatctggaatttaaagatcatttcatgttttcttaaatggcatatgaaagcctatcataactttaaaagcctctgaaggttaaaaacaccaagagcattcagattttttaaaagcagtagaaacttttcaaatgatgatatacttctcatacgttctatttcctattgtagctctcaggaccctctagtcctgtgggacagtttgaagaacactggtatagatgaaataggtgtaatttcagattacaggattatccagtgtttgtggggccatttgcagtagccctaacagtagcagtcagaaagccaggagtatgttcaaaacatccccctttgttggggatgaggggttaggttcaatatggcagatgcccaatggcttgggaactgaacttgacttacagcacaaagtgggagagccatttgctatggtatgttgggagagaaggaagaggactttcaggatttgagataagcatggagagtgttgggtaactaaagacaagagatggtgttgcagtttaagtattggaggggacaacctgaggatctagcagttggattattaaagagagcagtgattagttgatttacttttacatgagtttaacagaatacgtttataatacattttagatatatggcttttactaatcagaatgagtttggaaacctttttcaaaacccttggttgtcttttaatgctgataactaaattattagccacaagatacagttatggcccatcctggtttctctgttatcaaggtcatctttaacttttcccaagaggggtttatacccaagaagctctgaggtggaggtcctgatctgacaggacttagttattcactgttctttcttattacgtatgtgtcactttttttttttttaaaggaaaattaggacctgttccagggggccttttttttaaaagccagtttagaaatgagttttaaggcagattattggtcagcctcaaaagtcaaaaagatttatgctgatttcaattggaat

SEQ ID NO: 108312 - DNA, 3045 bp, Homo sapiens
catatctgagaatcaactggagggctcattaaactgtaggttgctgagctccaccccaccccaagtttctgattcagtgagtctggggtggtggcctgagagtatgtttttataacaagtttccaagtgtcattgatgctgctggtctgtgtatcacactgtaagaaactgtactaaagcacttgtgatctgttggcttacgttttctttcttagagaatagtttattgaacccatatgtttccattacccagcttaatgccattcttgtttcacatatcttccatccctcactctcctatctctagtattttaattggcttaacatttaaggttgtaagataggaaattcatcaggagttcattaagagctttgtagagcgtgtctttctatttgaccttttgcttatgccagcaaaattcagaatataaaacgagtactggctgttgagttccatcctctattttgaagtccgttgtgtaaacagaattgtgatattctgctatgttaataaactatacaaaattaccttaatccagaggccagcaaacttctaaaataaaggtccagggagtaaatatatgagtctttcaggcttcatacagtctctgttacattttcttttgtgacttttttacagccctttaaaaatctaaaaaccattcttagctctttggcagtacaaagaccatggtcagtttggcccatgggttgtagtagctgtggtttgccaactaccccagcatttataggaaatcttaatgagaaagactagtgatctagtaaagacattctgtttaattttggaacattgtatataccattaagcattattcacaaatttctgctggtttgatttctatgtgttaaataaggaatgcctatgtgactctactggtttttttgctctgttgtgttgtctgcaggtgtgtggatacataagtaaatgctacagtgtggctgctcagtttgaggaatgccgagagaagatcacggaaatgcctagcatcatcaaggatctctgtcgggtactatattttggcaaggtagggttaatctttaatgctttctagatacagacagcaaagtgtctttttgtcaactagccagttcctaatgtataagcacattgttttcccaaagttatttgtaagtaaaattatttggatttctaaaagcatttttcacagaagccttgctgtaaatggaggctttgcttctaggctggcctacaaagaaaaagactaaagtgatacatctaaagggaagtgggttccatctgaacattagaatgagtggcagggagaaaagagaagcctgtaataaataagtcttttaaaagcaaaaggccagcccggtgtggtggctcacgtctgtaatcctagcactttggcaagccgaggttggcagatcacttgaggtcaggagttcaagaccagcctggccaacactgcagaaccctgtctacaaaaaaatacaaaaattagctgggtatgatggcatgcgcctgtaatcctaggtattcgggaggctgagtatttggctgaagaacaagcaactccagaaaattcaaccataaggaaaagtttagctggcatgctgacaccctatgtttctgtggctagtgtgactgagatatatgcttcagaggtagcctgtgccactacactccagactgggcaagagagtgagactctgtctcaaaaaaaaaaaagaaaaaaaaacagggccatgtaaaacctgaaaactagagagttcggcactgcttggtgggaaaggctttagagatctgagaacttactatttcctcccaatccagacctgctgaggaaggttgactgtgggtagatgagatagatgactgggagggagagagaaatgtcttaaataactgggcagagtgagaattgtcttgaataaaacaggatcgagatgctgatctagtactaaagtatcaagaagtgagggaattgatgaaaatatctcctctactatatctacttaatgtccttagaagtatttgattacagaataaaaaactgacataaataaatcttttaacaactgcacaaaatatgtcgttacatttaagatcactagcgtgtaagttgctattgatgccatgtcactatttttaaaaattaaaaatacaagaagtgaaacaggaaactattcccaagtcttctgacattagccttaaaggtagtaattctggtatctcgtcatgaggtcacttttaattttaggctttaaaggatgtaggattcagatttaaattggaattgaaaatgtaagaagaggtaaacattttacaaaataacgtggttggcttgacatacatgcacaaccagttcctcttgggagcttttttttttttttttaactctgtaacaactaatgctctcatttttattctctcagagtattccccgcgtagctgctcttggggtagaatgtgtcagttcttttgctgtggatttctggctacagacacacctatttcaggctggaattttgtggtatctccttggttttctgtttaattatgactacacactagaagagagtggcattcagaaaagtgaagaaacaaaccagcaggtaactttaacattgctttaatattgaatttgaacccaaaccttaggttggtgttaaactaatccaaaccaaagctgctatccagagtccccagagataaattgtttttcaggaaaattaggttttttgctttttaaacctaatcacttacttacaaaacttttagttgtaattgcttatgcttaaaggattccaggcaagggaatttgcaatagcatatactggacataatttaataatttcttaattactcagagtcaactttatgatggcaaaattatggttgtgtaacacaggacaatataatgttaccatcaggcagttgaggctagctcccctaaacacttgagtacttgtctgatttttatagatatttttctgtctcttctatgtgctctcatttattgctcatattgtaaatgtgtgcttctagcaggcagggct

SEQ ID NO: 108313 - DNA, 1017 bp, Homo sapiens
tcagaccaccagacacaaggcttcctctggccaatattaggagaaaatataggttgaaaataaagatttttttagaagatgactggagtcacatcagatcatcttttgtgatgattcctcatcacttccagaagcagctgaggagcttcttctgagtgcttggggatcatatagggagtttttgctttcattttttgttttttctatttaaagacgggtctcactgtcttgcccaggctggtctcaaactcctggcctcaagcagtcctcctgtctcagcctcccaagtaactgggattacaggttcaagccactgcccctggcttgtaggaggtggcaaagaggatttggtggttgatttgtttgtaaaaaggaaagaagtgaggctttgttttagagtttactcttagaggaaaaatgtactatgccataatgtatatcacgtatcacagagtaatatatatgtaaatagctattaagcagaatgagttaagtgacttgtgacgtccctttgaaaattgtcctttgaatttctaaattttatataacttaattataaaaatataaccaaattttagaagttctgtatcatactatctgttacttcgattgataaagggaggaggtattctaatctcagaattgttacactaagatactaatgggagtatatcagatctctggaagttgagaaatactttataatgtttcctgccctctacatcccccctatagtgcataggtgtattcatgtgtatgtataatttaatcatgttttattcactttcatagcttaaagttctttcttttgctatggagttatttcttagggcacccatgttgtttaaatacttgtctgcattgattaggttccaaaagcatttgctgcaagtctcttggattatataggctcgcaggcccaatacttgcacacattcatggccatcacacacgcggcaaaagtggagtcagagcaacatggagatcgcttaccgagagtagaaatggctttggagg

SEQ ID NO: 108314 - DNA, 1050 bp, Homo sapiens
cttattagctgtgagaccttgggccggttaaactgggcatcagcttcctcactcataacatggccatgaaaatacctgtctcactggttattatgaggattaaatatgacatcctgtgtagaacatctagttaagtgcctggcacagagctggtgccaagtaaatataagctaacctgatgatgcattccttgaaatgtcttttactctgcaggtcgtcagcttgttctggaaactctttatgctttgacatcgagtacaaaaataatcaaagaagcaatggcaaagggtaatgtatagagtgctttcttagctagtcatgtgcaatataatgaagcttattttgagctgcattttacagcctgataaactagaagaatgctttggaatgtttacagtttttaaaaactacattcagttgaaatatggttgaaaatgaattctgattagaaaagtcaaattctttataagcactaattatctttttccttcataggtgctttgatctatttactggatatgttctgcaattcaacacatccacaggttcgagcccaaacagcagaactttttgccaaaatgacagcagataaactgataggtccaaaggtaggcacaaaataagttcttgaaaggaaattaattattaaagcattgttactttgatactgatttcaagaagtttactgaaatctgagatggtgaggataaggaaatgaggtgatgtgaaagttggaaaattcacattccgggaattgttcctatgtattactgtttgagaaaactagagtcagggcaggctgtactggaattgaaaagtcttaagagaatgtttggattaagatacactgttcatctccctcgaagagggaacaaaaagtatatcaagactatgacagaagataggttagactttcacactacaaggattggcctgtggaaataactagtgaaggagatggtggtttgtgtattttacattccacacctgaattattaaggacatgccaccctcagcagtgaattcatataggggcatgagtgtaacaac

SEQ ID NO: 108315 - DNA, 2104 bp, Homo sapiens
aaggtggtatttcctaaatgttttgtcacacagaaatgtctttcatcttagtttagtgcatattcccacacatgtattatttatactcatatatgtgtatgtatttcaagtatatacaagtcctcattttacttctgatactctgatgctttctatattgaccaattttgttttttcaacaacactcctgattgtttcataaacctctttaggtcacagctcataatttgaaacactgctttaagttttagctcaatttggctgtaccttctccccaaactccttcctcaggaatagctcatcagcccatacactgtcagccatctgttactgtcacaagaaaatactctgcataggtatcttcctccttgaattacatataagtcggtaattgtaggttcaaataatagagtccagcttcagagggacgactgacttgaggacttctttgggtctgccttaatgagatgtgtctggcatagtgcctgctatggagtgtttgatgaatgctagttcttgctccatatttgggtctttcctcactggccttcttccttgttgctttggaagttggtttttctttttgtcttccaacatccagtccttgattttatgttcaaagggcttgttttactttcctaggtgaatgaaatcctgtgccgttcttcagtctggagtgccttcaaagatcagaaacatgatttgttcatttctgagtcacaaacagcaggatacctcacaggtaagccatacctaattggttattgtaagacacctggcagaagccacttggaccttccttttgccctaaatagacttaaaattgtgttcagagtgtttcttaggctaccagctgacctttcttggaggtgctatgagcatgtagtagacatatggtcttagctttatatagcatgcaaactgttgttgtgttgaatgggtactgactaaagcatgtattttgttcagttttgatccagttaattgggtcatagaatatatttggagcatgtctgtattaaagtatttatcttgtaaagagaaggaataaatatctgctgaggaatatcagtgtcagaaacatgattcatcattccatatctgtcagaataacagattaaaactccaaatatgtataattgtatgtaaaagatattcttggctgggcgcggtggctcacgcctataatcccagcactttgggaagctgaggcgggtgaatcacgaggtcaggagatcgagaccatcctgtctaacacagtgaaaccccatctctactaaaaatacaaaaaattagccaggcgtggtggcgggcacctgtagtcccatctactcgggaggctgaggcaggagaatggtgggaacccgggaggcagagcatgcagtgagccaagattgcgccactgcactccagcctgggcgacagagcaagactctgcctcaaaaaaaaaaaaaagatattctcctaagtttccagtgatttgtttatggttttgctaaatatttagggtgtgtcgttttatgggggtggaatacataggtatcatgaatgaaaggatgttttactgctttggtttcaaaagatactatgtttaaaactcagaacatttgacacactaattgcataattttagaatagtcattttcatataggcttcaacataagtcagactcttgctgaatgctaaagaggcaatatctagtctgctataaaagttcttaatttgaaattaaccttaggaatatgaggcggttcttgctgtctgcctgaaattgtagtatataaaaagatgtcagccctgcattctctcctaaccaaagatgataaactaagagaaaaaattatcacccagggtttctaagccattgtaattgttttaatcttgattgctagtatagaagtttataagatcatgaagactttatcttgaatattcaaaattagaggctttggaggaaattttacctggttttaattttaaacttggtgtgacacttttttttcttcaccataaccactttaatattgacactcctaaagttggagcagagtcctaaaatttataaacatgcagtgctttggctgcaggtcatgtcctgttcag

SEQ ID NO: 108316 - DNA, 2301 bp, Homo sapiens
cctttttcctgagcagactgtgaaaggcctggcatcctgattggctcaaggcaggagttgatagatgcaggctcccacagtaccttaaaaaggagaaatattttttgtaagttctacaagtacaaggtttttataagtacagcgttccaagtacctgggcactctggttggcttcagttacagctcacacaggctgagtcatctctgcctatgtatctatacaagccatttcacatccatagtaccaatacttttaaggtcaaaaacaagatgaatctgaatggtggcctttttgtcctccaccaatccctgtttctaccttcatcaaactactctgctgtttgcacttcctcacaacttcccttgctgcttatatttcttttttcccctcaggtgtctctccttcccttctaactggcagcagcccccttcacctcaggagcgggctttagatccgctctgccaggcagcttgctaacttctgtgtagctctctgaagcaggtagagaaatgttttgctaaatgcatgccgctcccactgcctttctagtcctaaccctcaatgttccttagttgtttgccttgtttcctacaatttcagctaaaactattgctcagtatgcagtattatgctacagtgtcccttgcaagtacttgttagtttgtgcagtgcttctgagatgtaattaaatgtttatgcaatgtttaaaataaactctagagggctaaagccattaatatgcccataggacacatctcgataaatgctggcatatatggcattttcatgcaatagaaactgttagaatcaagggagaaatataagactaaaatatcagtaccctttcacatagcattcttgttttaacctatgacagatggatgtccagagccttttctttttcagagtccttggtttagcaacccttgttcgtttggtgttacttgttataatagcatttctttgcaccaaatgaaaataggttagtttgagtgttgacagaagtgtttatgttgaattttgtcacatatgacttttggatgagctgagtgtagagtttcttttgtctgtctgtttccattttttccattcgacatagttcttttcagtgctcggaattttttgaaagattgaatttcccaaatgtaagaaagaaaattttatccatatttccacaccagtgttactgtccagcatacattttgaaatgatttctagtctatagtgtaggcaaacatgaaaatagtactatgtagctgtttattaaggtatagatgtaatttaggtaattgaaatagatgattagttttgtgtgatggagtgcctgagcaggttctgacatttttataaaggtcaatgttttcacttgactgctttctagaggtgtgtgtttacctttctctcttgcaggacctggagttgctggctaccttaccgcaggtacatctacatcagtcatgtctaacctgccacctcctgtagaccatgaggcaggcgaccttggctatcagacttgaaatattcacgagagacaataaacgctgaaaggccagtgccaagtccacattcctccagctgatacgttgaagcaaactcttactgcctttctcctggtttcatgacagtgttattcctttttctataaatatatttttaggaaaaaaagtcagtgatcctaattgtatcacattataagaaagcactctgtggatcaacataagtgggtacacaagaattttttttttcttggtgtatgtaagcacatttgttcctttatatctgtttacaaaactgtgaatcaaaaagacaaaactttcttcctagtttttgtaattttttttttgaactagcatgactgtagggttgagctacagtcaacaaaaattgggctaagtcacttttccccaggaaagaatatttccctctcctgcatcaagtctgcgtggccatcctccccccaccatccaagactattaggttttgtccctgcacccttcactggcatcctcaatcattaaccttctgaaagctcacagtacacattagtatgtataactggctttaccaaattgaatgaaaaggagcttgtgcaaaaaaatttaaaaatggatgtcaagatgttatgtaaaagatgagtgtaattgtgaaatgttctatacactatcaaatatataaagctttctatattgaatgtacattatacagatcattcatatgtgtacataaaattttaaaaataaagggaattgactgctttgttaatgagatatatttgttctagtttaatctttccgtttgaa

SEQ ID NO: 108317 - DNA, 1103 bp, Homo sapiens
gataagcttgcacagaattcgtaagttttggaatgtataaaataatgactttcagtgtttttattatagtgctgaattttgttttcctttttcttatcctttctattttccttgggttctttttgtcctctgaagtatctcaaatattcttatagaatcaataatgaaaatattatttttaaaacagtgtgccaacttatagtacattttcaaaagaaatgttcttatgtttgctaactttttttgaatgaatatagcaaagaaaagaaggctctgaagaaagacaccacatagaagaattgctttcattatgtaaaaaccgggtgccaacttttttaaatgactctttttatcattaaagttacttaaaaagttccaatctggaagactactctggtcttcatgttcttatgcattaattattaacacagtatgaaccttgttcttcctttctctttcatcagaaaatcttgaacctgatgataagaaataatatggccaaatattataatatattaaggaagggaatttttaagtaagaattaatcttactaaaaatgtgagtaaaaaagagtagaaatggaattatttgcagaaatgatccttccggcagatatatagacacgcttttaagtgtctttataattaccatgagaataaaaaaaaaatcagtacttgtaaaagaaagtgaaaaaaagtggtataataaaacctattttctccttaacaaagttttaccgacaagtaatggcatttaaaatcgtattttcttcttgctatattaagattttcatttaaggttaaactgtacagctattttcaagtaacccttttttttttttttacaagtaagcatttaaacttttatgcatcaagactccatctatataagtaaatatacaagatctttgggcttaaaaaaatattcaagtcagaataagaaaagaaataaagtaccaacctgttgtagtcggcagagaggagcagtcttgagtacagagtataaaatcaaatgacctaactccagctacttttgttttcactttacaccccgcctttatcttgtatccaagaaggctttcctgaaatttaaccttgtgagc

SEQ ID NO: 108318 - DNA, 1103 bp, Homo sapiens; identical to SEQ ID NO: 108317

SEQ ID NO: 108319 - DNA, 1051 bp, Homo sapiens
gcactttgggaggccgaggtgggtggatcacctgaggtcaggagttcgagaccagcctggccaacatggtgaaaccccgtatctactaaaaataaaaaattagccaggtgtggcggcatgtgggcctgtagtcccagctactcaggaggctgaggcaggagaattgcttgaacctgggaggtggaggttgcactgagctgagatcatgccactgcactccagcctgggcgacagagtgaggctccatctcaaaaaaataatgtacaacataaactatatatactgtacatgtagtagctttggagatggtcataaacattccaatctaattggaaatataaaattgaatatgatggaagaactattacagtgttttatttattacagtgttttattatataaggaattatataaagaagacacagtgatgtttgtttttagggaagaggaaggagtttattatgttgaaagtacagaaatggagaattatcaaagaaacactgattagcattcaactaacactgtttgaaagagacagttttacctgcattagggacccaaaaatgagataaaatgttcttagagatcgtctcattgtcttccttttgattttatagttttttaaatcttatttttgtttctttagattttcccccattatgaaggagggtagtgatctttagaggtgaaataacttgcagacttggtatctttggtaactgctgagatcatttgcaagtttgatttgattataaattagaattatgttaggatgagagtatgtgaactgtatgatatgagtatgactctttagaagggtgtaattacccctgcatgtacattaatatcgtcgatagtctgttttacgtcttcataccctgtgagtataatgtcacatataactgagaaactggaaagattgattggattgttgaaggacggttttcaatgaattttaattgttctatgtttatttatagggagtatatagcagatatcttctgggaaataattcatctgaggatagctttttatttgccaatattgtgca

SEQ ID NO: 108320 - DNA, 1023 bp, Homo sapiens
atcttggctgcaaatcagaatacatagcttttaaaaaccaatcttgtttcatatgctacacttgggagagtttttttaaacggtgcctgggtaatttagtttcatctggtaaaaaccagcctgtaagcatcctcctctttgaaacgattagtaatgattatattttggtgtttattttctgtgatgatgtatgtctatttgtattactaatacctaaaagactgtaagctttaaaacatatttttctttgttttaagccgcttgatggcattgaaacgaatgggaattgtaagcgactatgaggtatgataaaccctttccaagtttttgtaagattaattcagtaaattaaaataacttctggtgacatatttgatgaagagctattaaccaacatatactattttatatttcacagaaaatccgtacctttgccgtagcaatagtaggtgttggtggagtaggtagtgtgactgctgaaatgctgacaagatgtggcattggtaaggtaaaaacatttctctttgcctgtcatatagggaactactcactcctggagtaaatcaggtacaagttaggattttttttctttaccagtggcttattgacttgcagtgtattaatctagattgttctttctactcgggttgagacatatccccacccaaacaaaaggtgatattagacaaagattgtctaattgtgtttagaaacgtttttgtttgaagtaatatgcaaacaatttggacttaggtgttttagatatagaaacttaggaaacaaggctgttaatttgataaagtgtgtgaaacactgaaacatctaacaaatattttattaaacatataccaggcagaatagaaaacatgtacctttcctactcttgattttgaactagagaatgctctggatggatttttaaaaattggtactcttttacttttttctaaaattcatttagattatgggttagaaagaagtaactttcttgtaccagaattcagtctaccaatcttagattta

SEQ ID NO: 108321 - DNA, 1055 bp, Homo sapiens
tgctaatgcagctagaccacgccattttgagtagcaaagaggtagaacagtagttatatattgctgtagttagaatcacctgggaagttttaaaaaattctggtgtccagactgcaccccataataagtgtctctggggatgaggcacaaacatctgtatttttaaaaattctccaagtgattccagtgtgccctcaagtttgtaaactgagaatctacacaggtaagtttcaggaagtctttctttaatttgtaaaacagataaatacgaagtgaattaatgaggttaaataggaaagtagaagatgttaggaaacccagagtccatttcttatccctgaaagcctttggatctctttaaagtatctggggtgccttggatcaccagatctatattcgctgctttattttagagatgaagatacaggcctaaaaagtgaaagtgatttacccacaatcagagctaattagtggcagagttacagctcagaccttctgttcccaagtttaatgtttcccgcaacttatgtataaacaagctatgaggcagaaactcatttaatacttggcctgacctaataaatattgatgagcttaaagaaactatgttttggagactcttacgtaggattagaaaattttggagagtgtgagatcttttctagtattaagggctatctaggtgttatgggttaggttaattttttttctttttagttttttattgaaaagaaaatcccatttttgtttttattgtttagtgtgctgagaattgtattaaagagtcacagaatttcatatgaagaagggacaggaagtccttggctctagcctgttcttactgataagaaatgtgatctaatggccattttagtgtgtgtgtgtgtgtgtgtgtgtgtgtgtgtgtgtgtgacaaatgctttttgaaacaggcttaagtgtatagcaggaaacaacaattaactggtttgtaattctatttggaataatgttttagccatgtcactggtatatattttgtcatatacacaaaaggagtcaggttatactatatt

SEQ ID NO: 108322 - DNA, 1684 bp, Homo sapiens
gagtggcctttggacaagtgttgtagttgcctcattttaaaaataaggataatagtacctacatgcctcacatgagcattcaatgaattaatatatggcacctagtgttgtagagttagctaatattattatcaaactgctaaactaattaaatgtaaagctctctaatttattttttgatatgtttagttttttggtatgtttttcatcagaataccactattttcattttagttgctactctttgattatgacaaggtggaactagccaatatgaatagacttttcttccaacctcatcaagcaggattaagtaaagttcaagcagcagaacatactctgaggtaaatggaatagcaatcaagtaccatattcagtgaaatcttactttatgtatttgatatgagttaatataaatgaatcttaatttttctctataaaatgcagttttcacttgtacaaagaattctcttacctgttggacatgggttggcaaactttttatgtataggttagataataaatattttagtctttgagggccagatattctgttggaactgttagttgcagtttgatagcagctgtaggcaaaacaaacatgaatgagcatgtctgtgctccaagaaaattctatttttggactctgaaatttgaatttcatacaatttttaatttttttaattaaaaaataaaatttttttgagacagtctcactctgtcacccagattggagtgtagtgacacaatctcggctcactgcacctccgcctcccgggctcaagctatcttcgcatctcagcctcctgagtagctaggactacaggcacgtgccaccatgcctggctaatgttttgcatttttagcagagatggggttttgccacattgcccaggctggtctcaaactcttgggactcaagccatctgcccacctagccctcccaaagtgctagcattgcaggcatgagtcactgttcctggctgataaaatttttatagtcataaatgttcttttgatttcttttcccaaccacttaaaaatgaaaaaaaattcttagtctgaaggctgcacaaaaacaggtggtgggccagatttggcccatgggccacagttcaccaatccctgctttaggaatttcctttgtggccccaaatttgttaactgagtaaggaagtgaggctgagttgtaggtagttactggacatggttaagtcttaattcccaacacttagattgattggggtgggaacagttttgtaatctttatgacaaaaatgaacctagtccttgaagtgtgagataaaagagacagaaaaggactttgggttttctttgaatagcttgaattcgcttctctaaggtatgttaaatgccctttagctctttcatctcttttcctcacagttttttcttactacagctactagtagtagtctttttaaaaacatttttttagagacagggtctcactctgtcccccaggttggggtgcagtgggtgcgatgatagctcgctgtagccttgaactcctggactcaagtaatcctcccaccacagcctcttgaaatgctaggattacaggcttataatcattccctttttccttcttaggaacattaatcctgatgttctttttgaagtacacaactataatataaccacagtggaaaactttcaacat

SEQ ID NO: 108323 - DNA, 1083 bp, Homo sapiens
cagtggatggagacttaaacacacttgtttctactatcttgatttaagtcttaccaaaaataaaccaatgtgactaaacagtaattattgttaatgtaattaaacattagtgttactgtaaattttacatttacataaaatgttaacatttatattagtgttaatataaaacacattaacagtacttaaaaaagattcttgaaatctgcttttagatacctctgctatccaaaaacaaatatccagcaactgtactatctaaactgtagctaaaaagaaggaaaaagatttctttgctgctgaaatttatgtcacagtttatgaatcaactcatactttattaaaagcagagcccctttaggtgttctctaattcaggctatttattttccctcattttacaactttaataagcttagttgtattccctaagcctccaatataataagaacaaactgcaacaagacacaaggaggtaccaatcaataagaagtgtcagttgcgagcaaagaaattgaaaaaagcatacatataaactctcaaagtaatggtctagggctatttcatataagagcaaatagcctgtttagacagtagtaggccctgtctaaacaaaacattttatagtatgatacaaaaaaggagaaaagaatcatggctaacaaagtattcccttaaggatgtgtcctatttagctagcccctctattgatggtcatttaggctacttaattcttttcttttttattaacaatgctataggctacatcttgtatatatctttgaatactagattgatcactcttctttttgtttttttggagacaaggtctcactgtgttgcccaagctgaagttcagtggctcagtcatggctcactgcagcctcaacctcctgagctcaagtgatcctcccacctcagccttccaagtagttggaagtacgagtgtatgccacaatgcctggctaatttttgtattttttgtagagacaaggtttcaccatgttgctcaggctgttcttgaactcctgagctcaagtaatctgcccacctcagcctcccaaagtgttgggattacaggcgt

SEQ ID NO: 108324 - DNA, 1083 bp, Homo sapiens
ttttattgagctatacatttaagattgtgcattttatagtaagttacatacaaaatgttaaaattaagtagctttcttaattatctcagggatttaaaaaatacacttctcccacattttagcttctctgaaatcagcatgcttcttgaagttgttgacgtgtaattgtttagctgccagcattttatctttattagaggttcaaaaaaatagtgtgttctacagttgatgaaatggagtaatcttttctttccttcattcaataaacactgaagtatctactatgagccaggcactgtaaataagataaaatttctgttttctggatgcagatttctgttttctggttaaaaaaaatatataattacctatttcaacgttatttttaaaaaatttaggtgttctagtatttttcatgttttaaatttctttatttaagtctattttgatttttctaggtttctgttaaattttggtactgttagtttttaccttggatacaatgcaatgcaggatttttttcctactatgtccatgaagccaaatcctcagtgtgatgacagaaattgcaggaagcagcaggaggaatataaggtatatgacaatctgttagaatgcatgagggatcatattgaataggacaatacataaacagatttggaatacaagataaatggttaatttattcaccatacttcaaaaatgaatgttctttcttgcttttggtaagataaaaagcctgtctgaattcttgattaatgctttagagaactgagaatgagtaagaacactttgatgctgtttgatttctacagaaaaaggtagcagcactgcctaaacaagaggttatacaagaagaggaagagataatccatgaagataatgaatggggtaggtattcttttataaattgaaatggcagtataaaacaaaaccttttatggtagcaaatctaataagattatacaaattgaataattattgcttattaaattccttaaaaactgacataggatcaaatttacaggtattgagctggtatctgaggtttcagaagaggaactgaaaaatttttcaggtcca

SEQ ID NO: 108325 - DNA, 1007 bp, Homo sapiens
ctgggggatgctgcctgtcctctagctccactgcccccatagccagcagttccagccctttacactctgacttcaatttcctattcatttttggcagttggaggatttccctttatttatctaaaaactgtgcttttagaaatgtgtctgatattcatacgtgtttataataggagggctattttcttccactgtcttcctggaattggaattctgccattaattataataatacattttatgcagttttaattttcactgtacttttttctgtaagagtgttatctttggtgtgctagattttatatatacactatcttaatcttcattaatgtcttttggacagtgtgttttaataaatctgtttcttgatttattaaatcatttgaattataagttttggtaaaaagaaatagccttaaaagaattatggaacttttaatggccgttagttacttatacaggtgctttatgattactgttaatttgtttttctacctagatcctctgccttgtcaatgttagtcacaatggtgtgagtgaatcagaactgatggaactctatcctgagatgtcctggactttcttgacctcccttattcacagtttatacaaaatgtgtttgttgacttatggatgtggcttgcttaggtttcaacatctgcaggtaatgttattttaggcatctttttatttatttatttaagaaacagggtcttctctgtcacccaggctggagtgcagtggcaagattatttctgccaaaggaataaattctaaagatctgctatacaacattgtccctatagttaacaatactgtagtacacttaaaaatttattaagagggtagatctcacgttaagtggtcttaccacaatacaatttttaaaattaaaaaataagtcagacacaaaagatcaaaaaaagtttcttaaaggtagtttatttcttgaagagaaaaaaagtctttttcaattatgtttcattgaattgcggtattattat

SEQ ID NO: 108326 - DNA, 1044 bp, Homo sapiens
cattgtgaattctttttttattgacagtcaaggaactttatcggttttataaaagttctgtctttttctttcaggattcaattacaacagaagaattcccccaacacactgattctttcccattttgtgggaaggcccatgtcaaccagctcagagtcctccttgattattaaacgactaactctaaaggtatagtatcccatcttttggaattacagaattttatttagattcagaaattgttgggactaataagtacctactggtaaaccaattttcagtattatccacctgttttggttttatataaggttaaaaataatattcgatacaatcgggtcctcttggtgacttgattttggtttataaaaaagtaagaatagaaatatttcccccagctctgtaactacttcagtaactacgtgtaactacttcagtttgtgtgtgttcttatcttgtagttgatgcagcactcttggtcagtctctgctctgacactggatcctgctaagcttctggaagaatttccacgttggctggaaaaactctctgctcgtcatcaaggcagcatcatcatcgttattgattctatagatcaagttcaggtaccgttttccatttgttacctattgatatgctcagaaagagatgtaaattcagtaatagctagagcaggcatttatatgtttgtgagaagaaaatatgatgttattttttatatttctgctttatttctagggaggtaacatggattaaaaaaatatatcgtatgcccacagacactaatatcttattaagaaagaccaactgaatttacacaattaacaaagactattcgttctgacatatttttagggccttgacatttcctgacgtgtccagagttcagattggtgataataatgttttgctacttgttcttttaaaattctaaaataaatcaccccaaaataagatttttatccttaataagataaacttaatgagaatttcattttatttggggagctattattggattgttttgaaatattttgattaata

SEQ ID NO: 108327 - DNA, 1076 bp, Homo sapiens
tttttatatattaggaaagtctctctcaggttttccccccatgttatccctaacagaagagggggatgaaagcatgcctccaggggggtgagaacatggaccagggaggggccttgagctggaagtctctatgaagtttcatgtgctatcttgaaaatttatgtgagttatatattctgcctgatattatgtctatgtttgtgtttaatataaaaaaattttaaattatatattagaaaaaaatagtaatagtgattatttattattcccctctccctcaaacagaatgggcgcagtgggaagatgtaccatgtttagcctgtggttgcccacaccttctgacacctcccccagccaaccaaaaaccctatttgagaagtaggaagcttgaagatttattattagagaaaaagagtgagccccaaaatgatatgacctctggcaacacattttgtatggtgctctctagtataaagattgtctttatcaaatttgagcttcacaatcttgcaaattttaggaccaagataaattaattgagcagaatgaatggcagcaagtgaaagtgaatgtacttaccatcattagtgcttgaaggataacatattttcagtaacctaatataaaaactgaatatgaccacagagatacttgagatcaagaaatcacatcttagtaattcaattcttatagcatatttcctagccattagtactttataactattcaccagccagatacaaccaaaatgttgtgtaacatttttcagaaaacaaattccatgggattcaaatattcctttaattttatttttataaaaagaggtattcatttctattattttaatatttttatttctttgtttttaaattagtgatttttttgtagttatcagtttattcttgtaggtattatacaaaggctgtatgtttgaacttgccctcccaaaagtaggtgaagcccactttgggcctgggtgaccccgctgtaagatctttattttcttcattcatttttgtgtggttgttctttgtgtttaggacatactgggttttgagaacacagacttggagact

SEQ ID NO: 108328 - DNA, 1039 bp, Homo sapiens
tttaagtggcatggagtagaggggagaaaagaatgctgagggtgaggtaggtggcatagtatacacttttattttcagaggagagaaattaatctttgttccataaaccgcaaagggtatgcattgtttgtttggcctgcggaagggaggcagggattttgaaaaggttgggaaacactgattaggttatgcaagggacaacaaaaagattaacaagcttagtccatctagcaacgtacttcagtgacctataggacaaggttttattctctgattcaataaaagcccactagtgttgctttcaaagcagcaacaaaatcatttcctttctgtcgtttctgtcccctgggtcagggacggggaacatagagagtgaatgagagagattagagtccgacctgcatgcctaagcagtagtgtcctctgaggaggatctgtgtcacattgtgtaagtataagagccttcatattgagagggatctgagtaccttccttaggacacatgctgtaagatacagctggataacagagccacaggtgggggcactgggtgagatcatctgatagggaagcattggggaaagaggagagccaggaaatgtttaattcagtggggctctgctggctgcttttggatccttgaggaggcatttcaaggcagagctgcctcattggctagcctggctggctttatgtggcttccagaggacctgccattcacaagatgaaagctcctgtggtagttacacgtctcaggttgtaagcatcagttatgcttgtaatgtgcttgagaaaagaagggctcacagagacctaaatctaggctgccgttccttcacttggctcatgtcaccccccagggctcccagaaaacaagttgtaccctccttaccagtagatggcactgctgcccctgggaattcctggaggagctgaactatggagctggcaaaccagcagtgtgtagcctctagtcagaagattttgaaaggctatgtcagccctcaaacgaaatctcaaagaaaatagttctgaaagc

SEQ ID NO: 108329 - DNA, 1068 bp, Homo sapiens
gagctattatacatgtttgggtaagcacttagtctactctcatattcacttcagcagtgacttgggacttgaagttcctttggcctaatgcattttttcattttcatctttgccagttggtgatagattggtggtcatccaacatgcagaaatgaatgagcagtgaaaagcagcagagccgatgggtcatgaggatgtaagtgcgtttgaaggcttccacaccctctactccagggtaaggcaaaggcattctctgccattgtttttcttgcttttccaattcatagaggctattgtctcacctgtctcttggagtcagtgcaatatgatgccctgtctgtgaaaggctcctaaaagcctttattgattcaactcatagataccatgcaaatcagcagttatgaagagaaaaccatgaccgaggtgatgggatggaatctatgcatggaaatatttcaaaacaggagtttttagtgagttcgtttagggtgtgatttatatgggaggggctgttgagccctcttgaggtgcactgtaaagatgggaacagggcctgattatcatttccttatagccatgtcatatgttagctctggtagctcctgtttccctcacctaccaccttctttcttctttgattactctgcttaacttttgcttcattaatcacttttttagtgaaggaaataacttctcaaagtgttgaaaattccagatttggtgtataatagcactagcaaagtacatggttttgcctgttccattttattttatccagcatcactggaagtcacatgcccattcatgcctcatctatttgcagcccctagtacaatgcatgtgggcactggcaatgttataaccaaaactggttttgaattttcacttgtgctgcagatttttgagaccagaaggagaaattaactgtttggtgtggaaaggacatcacatcctttctgagctctccaatttctagagcttaaactaaaaccagcctccttgaagggaaaattatgattcatataaatataagaaaagctgaggatggttaagaatgagggataggag

SEQ ID NO: 108330 - DNA, 1109 bp, Homo sapiens
ttgagaaacactgctgaagggatatagtgattcaatcttgctctgaatttctctggtatcgtattttaatcatttaacttcattttgtttcactttccctatctgtaaaatatacacacataaatagctaaatagtctaatgaagtaatgtacatagtactgtgtgactccttgggggctctgtcatttctaagaagcgatattcgtcttcccaaatttctaggacccaagggtaattcttaattcttgtgatggcactaactgaggaacagtggagtttgaagaagggcgaaggtctgtggtatgggaaataatgaagaatgctggactcttgagtttattcaagggcttcatgttctggttcattgtgataatatattctggatgaaaactttcctttgcaaagttaaaaaaaagggaagagtggatgaggcagaaagaaggctgttcaaaagagcagtcaaggaaattgcatttgacaaggtgatctgctaatgttaaagtgactcatgtataattagaccaaaggacataaagaaatagcctccaaaggaaaactatcgtcccaaatgactgctagtccagatcagtttttgcagacaatacagtaaagaccagagaatgtttggagatcagtgtttattctagaaacttttacatttctatttcttctcttctttaggaatatggaaagggattatctttaatatatgccctttgaattataaatgtaaatgttttaatatgacatgttcttttgacagttttctagtactatgtgttggaatggtcaaagaggccataactctgacctagacctgaagtgtaacctgcattattttaattaaaaggctcagtttaactctaaaacaaggccagtgcagggattagatgtaaactgtcctggcaggtttgcattcccccttgctgtgtttctggtccctgtgattattagacttgcttacaaagtttccaacaaatgcactgtattttggatctactatgtagagaagccatcatgtatagccttgtttatttgcattcttcatacatttttagccctaggtgttaagcaaaacttataagaatgtttaagaaggattccatgt

SEQ ID NO: 108331 - DNA, 1029 bp, Homo sapiens
ctgcctttctttctttctctctttaaaaatagtttattcactcatttgtttatttgaacagttttaagttcaagcaaaattgagaggaagatacagatttcccatatacctcctactcctcctactccctatacatgcatggcctcccccaatgtcagcatcacccaccagaatggcacatttgttagaactgatgaacctacattgacacatcataatcacccaaagtttatagttcacattagggtatattcttggtgttgtacattctttggttttagaccaatgtataatcacatgtatccatcattatagtctataggtattttcactgccctaaaaatccttcatgctctgccttttcatatctcccacccctttgcccttcactaaaccccagaaaccactgatttttttttttttactatctccatagttttgccttctctagaatatcatgtaatatgtagccttttcagattggcttattttactcaataatcaacatgtaagtttcctctatgtctttcatggtttgatagctcatttccttttagcactgaataatattccattatctgggtataccacagtttgtccattcacctactgaaggacatcttggttgcttccatgttttggcaatcatgaataaagctgatataaaaatctgtgtgcgagttttttttttttttgtggacataaatttttaactcctttgggaacattccaaggaccatgattgctgcctcatatggtgagagtatgttttatttagtaagaaactgccaaactgtctttcaaaatgactaacattttgcattctcaccagcaatgaatgagagttcttgttgcaccacatccttgcaagcatttggtattgtcagcgtttcagattttggccattctaataaatgtgtaatgatagctcagtgttgtgttgttttaatttgcatttccctgataacaaatgatgtagaacatcttttgatatgcatacttgccatctgtatgtcttctttgatgaga

SEQ ID NO: 108332 - DNA, 1010 bp, Homo sapiens
tacaaatgttgacatttggtggattactacctcacatagtgtgttttgttcactttctccctgaacttggagcattagtttcatttgagccagtgattgagtgtgactttataagggaatgcattctaatactgcagaaggctctgtctttatttatgactctgtgtcagggtaagaatgatggtcctggctctatttggacctgcacagctgtgagtggagtgacccatggcagcacaaacagcccgtcatttcaatgaattatttaaggctcttacacttcccttcaagtagctggatcatggtggcaccacatacagagaacaagttagtgtttccttagagaaatgcagcttttgttgaaagagagtctgaagagaagagattcagcagggcttcttcaactgctggttgaggaaagaatgtagtttgttactgaagggtgatggagattgggatcaactttctcaacccagctgctgactgctgaggtgaaaacagcagagataaaacatttgctccagtttctcttcagactctgtgaagatccccatcccctgtattgaatttttaaaaataaaaagcaaaaaatatagaattgtatctaattggtcttaacatatatccatgtttcttctgaacaggaagatttgtatgtagataaccacacgttgccagaagattaaaatcttcaattttaactttaaagaagcattaatcttacagtataagtgaaagattaactcaaatttgtgcatatataatttttctacaaaaacaaaacaaaattatgtttgttctcatagaatcaggaattaatttgaagcccttgttgaagattctttagcaacaataaagacatctgctctctccagggtatagagagattctgaaagatggccaagagccagggatcctgaatcctttattcccatcctgccataggctactccccatgaggttcctgcaggataaatgtgcacggggggtggtggaggcaggactttgga

SEQ ID NO: 108333 - DNA, 1037 bp, Homo sapiens
aacagtatttaccaggcattaaatgttagacattatttagagactctcaacttagaaaatcatatttttactttgagagagcaaaatcccatattaatacagtcctggattttaacttttggtttcctctggtgtttctccacatacccctccattttttccttccattaaccctgttaccttaagttctttagtctctttgcctcaattcttatatctttattttatttccagagttctatggttcccacctggctgcaggacaaggtgctttataagttggcataaagacacaggctgattccaacttctctttctgaatttctttctactctttctatgcgcaaacatcttttacccaaactggtccttggtcccgttctctcctccctgtgtacagtgctcctgtttcttttcagtgaccgcttggtagcattgatagactttgagtcctgtggccagatagatctgcatttctatcctgtccctatcattttttagaaatgtgactttgggcagaatatttcatttcagcctcaatgtttttatttttagaatgggaatcataactaccttatgggatgcttatgggcatggtacttagggaactgtcctgcccaggttctattttctgccttttcatcccaacagtatgcatacgtgcttgctgatgaagttattgaacatcagaattccagagctggtctacatcacagttcgtggttagccattctctacctgccactttcacaccttccctaaccacatcttcctttgataggacctaatcctatcagtgagcatctaaagatacattttcctccttctacctatgatcgtgaaaactatgttcatggacattcagaatgtcctggtatatctgcccatatcagaaattgacagcaatttcatggccactgtctgcaaccttgagcactaattcattttctcagcatttgtttcctttcatgtaaagtgagatttatcgtgaacgtcgaatgctctgattgcaaagaatacctctttaaaacgaagtt

SEQ ID NO: 108334 - DNA, 2528 bp, Homo sapiens
gcctttgaaatctgaagtaaatctcatataaaatgtatttacacataattaaatttgttttagtctaaaatctggtgatgttacttaatgtcagttcatttccacaaagatttatcaagcttctgtggattcaagtgagaatggaaggagaaggtttggagacaacacttctgaggacttttgccaatcacctaagcaatgtgaggttccatattgtggctttcgagtgagatcattcaaaggtgttatgtgtttttctccctctgggccttcatgtgtatgagtggagtgttgaagtgaacgaggccatgtttttgccgagtgagcaggtccacactagagtggggatagagttcagcatgtatggaagggagtggttatgacaattgactgtggaatttaaattggctaaggaggtgaatttggacatgaggagggtgagggacagtgaaaagctgtagtatccaatgggttggaggtctccctggggtcagagacttgctgaagttgtggtatcagagatgggaaactgacaggagatgttggtggtgggagagcaacatggaggaatttcagctaagaagtggtgtgtgaccttggagttagggcagagaacagggactgaaaagccagggtattggaatgatcatctctgtggctactgaattcacttagagtcatggccacaggagtgatgaagagtgacagggaaccaggaacccagatcttcccagaatgagggagagtgggcaatatagtctgattttgtgtgaatcaaaggtcaggattttacagaagaaaggagggacagtggtatagatgtgataaagataacccactctacctctaagccttgaagttcagggaatgtggggagaaaatagtcaccacataggggggctagaggtggagtgagcagtgggatcttgctaatgactataagttccagacagcacagggaaagggtttcaagcattgggaatggtgggtgatagggtcaggaagaggaatggaaagagccatatggtggtaaaagtgtaaggttgagaaatgacttgtgagtccttgagggcttctccttgtattcttaacagggataaaagatatgattaagttagtcctgatattcccaaggctattgatttatagactggaatgggagaaaggacagcacccagggttttgggtctcccgctggactcctgcttgagggggtggtcttatacagagcacatagggcccccatttaaccccagccagaggaggggctgccttgagaccaagcattcattacccctgtccagggaagtataatgaacagtagaggtcatggaacattctcatgttttattcaactttgtggatcacttcacgtatttcaccacatagacagcattcccttgtgccatatttctgattactttgtgcccagtgaggatccttcattcatttattgcttctttccttcccagttacttgtgtttcttttgtctggacagaagaaagcggtaatgtctgccagtctgaggacagagcgtgtgtgatggtgccctgtaagactctattgaattgagatactgtctgcaggaaggccatttagtctaaaaccagttatcacttctcctgagctaaaaagcattcagttctatcttctggtcactccagaagagattccatagtacaagccaaaagaaattaaatacatgaagtgacctttaatctatattagggaaattaatatacgtttaactctttggaagcactagatttgaaattcaaaatgaactccttaataaatccttactgtctccttgtggacagatgcgtgggtctttaatatctttattctttatgtcacagtctgttgagccctaaacatatttgtataaataaagagattcaggaaagatttgccaaaaggacttaattttatttctaattcccctttctggaatcctgcttcctttacaaggatattgtacagaaatgtgattttatgaaatacttgaattgttttaatacttcacttttaaagttccactttgtatgtaagaggacttctcagatttgagtcacaattttcaaaacatagtgaaggaccaaatgggaatataaaggttggttagagaaataaaccttttttttttttttaatggacagttaagcacgtgatagaggttccaaaggtagattgaagtaggggaagataatgctgatgaaataatggtttcactggtgtcccttcattctttacaaataaatctatcctagagatcacttatgcagtatgtaaataataaacacagccaaagttggtttactggtcttttttccaaccagaactttacactgatacttcctctcctctgtgatagagtcatgatcatcagtcctttggaagatctggaaagtcctgagatagcagggtgaaatcagaccccttccagcctgtaaacttttacaaggcacaaccaggccttttatgtcttacatggtgaagttggggaaactatctcaccatttgggaa

SEQ ID NO: 108335 - DNA, 1009 bp, Homo sapiens
tagagcccaagaagcagatagatccaaggcaaagagacaaggacttgggagggcaaggctccagttgtttctcattctttgtctggctgagccagtcaaagactcagacaaagggcaagagaagtaagcaagtgggtacctggccgtttggggctgtgctggcggtgagcagaggaggcagccgatgttttataaattgttgcaaacaatactcctaaagtcttgggctttatttttgcagagaggaaaaagggcccatttaattgtgctttgttattctcctactcatatttttttctcttttattgtagtgatggcagtggtgttcagccaggagcaagttatatgaggtagggttctgcccaggggaggtgccaggggcaggcggtgagatagggcgtccaggctacctgggtgtctgcagagcaccctggaacacccatttcagtgagttgtctgacccaggaaggtcagcactctgctctccccactttgttcttggggtgaaggatggatcttgtgaaatcctgagcaagaacaaaggctgactttatccctaggagggatatttgggtcacttttcctctctgaagactacttccacagttctcaaagtgagaaggcagaaatgaaagcactttcccttttctgtttgtgcccctaaattcccctgcaccttcagtcttcctttggccaggtaacttccttttgagttggctagcttcctctgcctgctgcttagggatacaggagagatggtccattcgagaaaggactctaatctttgtcttttgtgtatagagtaaataggtacttggccaggattccctgagctcttgctcccaggctgactcgtttgcctgtgttctgaggaaacaggcagagtgtgtcttcccaggacagcccgggggcattcagagtgatcaccccagatgctgccaggtttttgtgtgtcttccaaactaagacttttatacaaactaaaattagcctttgaggatagagaact

SEQ ID NO: 108336 - DNA, 1050 bp, Homo sapiens
gagcaaaggtcctctctggagtccctcttacaagggcactcatcccattcttgagagttcatgatctaatcatgtctgaaaggccctatgtccaggtaccatcacattaggattaggttcagcatgtgaattttgggaggacacaaacattctgtttatggcagcaggtaaggaactgcaggtcagaagggccccagcaaagtatcattctgaaatgaatgacagatgggacaggcacgaagcttgaaagcgaggaataagggtgtgtcttgcttgactgtgaccgtcttgcttacctgctgaggcagaggtgctaggtatgccttctcttcaaggcagggcctcatcatgtaaaggagcttctgggtggaggctgagtgctttctctatatagccagaggcctcactccaatgcttggggtgtgagatctaagttttgcacagatgtcttcttgctacaggccaaggccacaattagggggaatggactctttccacatacttacttgtcatctcgtccaaggtagatgcttgataaaatagtgctgtatgctaaagtgagctgcctaagcttccctacacatgaaaaagaagcctagaggagagcacagatgggggaccgttcaactgcattcccaagagcattatccctaacagggataatggcaggatgtccactgtctgcggccccttcttttgccattcttttacattcattgctgtagagggtataaataggaataaggaactgatggctatgtgaaggtgaatttcaaactctttgagttgtgattaacttccagaggcctcaaaataactgatttacataaagtatgatgcagaaactaagccactcatttacatcttcaccatattttttgcatgtaaggacatatgttggttacctttggtcttgacaataacttcaaggaaggaatgctttgtctaatccttgttccttcttcaaggcccaactcaaacactttctcccctggaatccttcccagagctctttagtcagaattaatgatcctatatacctttccatag

SEQ ID NO: 108337 - DNA, 1052 bp, Homo sapiens
tatggtcacttgtttgccaagcgctattttaacctttttatttattattattattgttgttttgagacagggtctcaccctgtctgccaggctggagtacagtggtgtaatcatagctcactgcagcctcaacctcctggacttaagggatcctttggcctcagcttcccaagtagctaggactacaggcaggcaccactgtgcttggctaatttttaaaattgttttatagaaacaaggtctccctctatcgtccaggctggtcttgaactcctgggttcaagcaatcctcttacctcggcctccaaaagtgctgggattacaggcgtgagccaccatacttggcctgtaaactttttgtacaaaatactcatttaatgcccactatacgtctaaaacagtaactttttcaaaaagttgcaattttacagtacaagaagttaaacaacccactaaaagtcactgagccagtggtgctgggatttgagcccagcaagtctgttcctgagcctgtgctttcaactaccaagctgtttcgcctctcaagagacattacttggaaagcccccccccaccccccgccgccccactcctcagcctggcttgactgtttcccatgtgatccatctgtatcctgtacatgcctctgttacagcacattgtgatggcactggaaactgtccctcactcctcatccccctcccagcacctcacacatactgagtgctcagtcaatctgttgaataaatggattgagacagatgagagagttgcccatacatggcacatggactgttaagctggaacaggacgttgggtaagttgttttctcctttttagatgtttttgcccttgtccaaccttcagaagtttacttcctctctggtttaatactgttcttagacatactgaattataaggactgtggactgaaaaggggcagctttgaaagaagtgtatctcatatagttctttgttgtgtctaattcattttgtggtgtcacattcattgggcaatttatatttcttttcatgtccctgaagtaatgttt

SEQ ID NO: 108338 - DNA, 1361 bp, Homo sapiens
catctgtacaatgcataccccagtatcataaatgataagattttattttcaaccattctttttcttgaattaaaaaaaaaaacagtgattaggaaattttcaactagaggaaaccaaagaacagcatcataaaccatgtgtattcagcttcaacatttacccacattcttttaatcctactaccagacttgcctatctgaatcatgaatgttaggccctctggtcaactagattttcttcaatgcttgatttttcccttcaaacagacttctgttactgtcactagaacaatcagtattagacttattccagccactcttcccttctctctcccactctagagaagaaatggcctcaaatttagtttggagtagggtgctgtgcacatatctcattaggaaatggtgtagatattcaggttctatctaaagatagttcataggagaaaaggggaggcaaagagaggtgattcatgtgctggaatgatgaaggtaccagcgctgctccttgaaggattattagcttttggatgggtgatggaattaaaaattattaattgtaatggcaacaatagctaatatttgacgtgtttactatggtccaggcactgttccaagcacttcacatatattacgtcattactatatgcaaaggtgaggaacaagaactattaacatcccatttgcaaatgagatggaacctgaggtacaaggaagttaattccttcaagggcacacagcacagggagatagaagttcaaatattcgtgagatcatagagtgggagtgaatgtcatcaagaccagctcttttattaaggaaaccatagtgcaaagggggaaggggtttctccaggacacgcagtgagtgggtggtgggtttgagactcttttccaggaacctagatttgagtgtggtgtgtttcagttataccagacagtcgtcttcactaacagaagcacctcgcgaggcctcatgatgtcagttccctacctttcagcttttgttaggattgactcttcttttactatttctttcttcgaggaatagttcttgctttttatatttttaaatctcatctctgcaaattattgaacttagctaacatttagagaatacagcctgttcaaagcatagtccaaagacaatgtaaagttaggggaagagtctcttgcctctttatctgaaattccaaatataaaatgaatgttttcatttttttaccccatttcctctgccttatagtctcaaaaaactgatggatgtctgaaggataatttctttctctgccaccaaaggccttgcccactatggtgcttattcactttattttacttttataatggaaaaagtttatataca

SEQ ID NO: 108339 - DNA, 1707 bp, Homo sapiens
caaaaattgagcactgaaacagatcactgattctcaatcagaggctacagcaagagatgggaaataattgtgtataaggatttcccctttcacttttaattttttaatgcacgttactgtgtactcaggggttttcatctattcagtatgttacaatcaattatagtcattattatttggaccaaatttggccaccagaagcctcttcagtctgattcctttgtccttttggcataaacccattaatctttgaatcctttcttgtattcagtgataataagatgtcccattaaggtgtcatgttgtactttcttgctagacttcttcttttttgtaataattacttttatttttttttctttcatagaagaatggtggtttagattgtatggattttagaaactcttgaaaaaaattgaaagccattagtaagatcaatgtaccatttgagatttttaaaaaagtatttcagccttcaagagcaatatttttagagtgagacttattttggaaatggaatctataaggtttctaaatcaggggtttctatttttcactaatttcatcttttctcttgttcaactcttctaatttctgtctttgactgctgagccacattaaaaaaagaaagcaccattattgcttactaaggagatatcatatggaaagaattctcagatcctgaccttgtccaaggagtggtgaaagggatggcatcccaaatgttagctgtcctttgtggccttttctgcttctggagtccagaggttctccctctgtaccttgtgacctatccatcattgaaatcagcttattcgtttcagtgccagatgtgtctggagtccaccttagttcccttcttacttaatctctcgagcatttgagcttttttttttcttttgccatctgtaaagtgaagcaaaacttgtaagtttgaggtaagcattaaatgaacaatgtttacactataaataagggacttgaggcatagtgagggttttgtacctgttgaattccttcttccttgtgttatatttacttacacatgcaggatatgtgtctgcttcatttctataaatatttttattgttaagtataagacaaatacaaaaacctcctaaaataattgtacagtttaatgaactattacgagatgagcattttttaaaacgttatccatgtgaaacaggccctctctttattagatgaggtacactctgtggtgaacaagatagggtcctgctttcacagagctgatgattctgtagcatctggtactgccagagatcatacataggaatgagagaagacatttaatttggctaaattaacattggctcaaatccagcaaaagaccttgttagcagaaggtagagctctttgtccactatggtgtagtttgggcattacatggatgtgtgcggttggccatacaaccatgagataacatgagattccatgtctcacttccatggttacagaaggatcagcatgctttatagttttacatcacaaaatgattcagaaaaatgcagatgtttacaaatcctatacttgtcccagaaaccttaaactcccacttgaaaaggaaattcaaaatgtcaggaatccctggggaggaacattcaactttaggatcttggctctgcttgactctcactcaggggtagccaccagcagttgggtgcagccctgatagagattaat

SEQ ID NO: 108340 - DNA, 1031 bp, Homo sapiens
aattaatatgacttactgggtggaagaaacttaattctgatggggacggagatggacagaaggctccaacatttaatgttgctttaaaacatttttatgcctttcttgatatttcatttttactgttaggtcagtatatctttctgaattagaaatctagctataagtagagatggttttcattcattgaaagcacaaatgatgtctttgtggatggctgcaacttttctgcttattcaacccccggccacctaggaacctgccacttgcatttataacatcagtcatgacagttaggtgtgttgacatgtgaagcagacacctgggtagattaacaaggcctgaggaacttgagttgttacagttaataggtcagctgttgtatagatagtaatattatagccaaagtttccggtttagtccttgtttccaaaggaaattcctctcatggtgtgaagatatgcaggtctgtttcttaaccctctcagtacctgtgtcccttctgatgaacctcaatgtgagtcattctttctttctccccttcccacctcccaccccaccccccaccccccccacacacacgagatgctgctgaccaggttgataacccttgatacaaatggaaggaatactagattcattcatttcagggctactcaactgtagtttcagatcaaccccttaccagccccgtggccttggataagttagcaaatccctctgttttctcttctaaaaaatgaggacttaggtcacagaatcttcaagaatcacaaaattatactttcagaagagtaagacctgacgcataaataaatacatgcctggccccaggcataccgataaaacaagacatgctgtttgtttgtggaactttcttgtctcttgtccctttctgcacacctcatcatttgttctcgctccctccatatcgccagcatatggcacccagtagacttcttctgctgccactgctggcctggccccttgcagggatagttagcagtttctcagccaccttttccacttgt

SEQ ID NO: 108341 - DNA, 2037 bp, Homo sapiens
tcaacatagtgagaccccgttctccacaaaaagaaaaaaaaaattgaggtactgtgtatctctggggagagttcagagtgataagctaactctgtttctaaagagaatagggcaaacgttacaaccagagatattccttggaaactttatgcactgttattagacacaaatacccattcattagttttccaaggtttttgtgtaagatgagtgttcctttgtaactgtaagaaatatttaatttctaagactcataaaggtatggaaaacatgagaaaggctgtcattgcatgcgttgacagtgagtaagtaagcaaatctgtgccatattgttcagtgtgttttatattgtttaatagctgcagttttagtcaattatgatttgtagcatattcttaacgttatgcagggggtgcagcctcctgcctaataatcagtgtgaccttagttttggtgcaacattagtatataatacggtacttaggaattgtgatttgtagctatgacagattttctttttaggattggtaagtacagacagggcccccttctggaacccttacaggataactgaaatccaccagttaatcagaaatcctctattttagcttccactgtaattgcatctcttcttcaccaagcctgttttgcctgtttttttctcttccctcagaggatcagtgaaaatgcaatcagatgaacaagcagacaagtaaaaaggaggaaaatcaaggagcctatatgttctctgagagagctacataaacttaaactctgttgcttctggagttgatttgagtgtgggggagggggaggaagagaaggtcaccaggtacagcagcttgtcttgtttgagcattcagccacagcttccaacactgaacagacagaaataaaaagttggtgctggctatgtgcgtcaggtagctctacatcagtcctgccactgtggaccatgtttacaccagtaggttattttctacactcctttcattctaagaggattacatcctccattgctttctgtccaggaatccttcaattccatctgaaaggcatgttcgtgacatttctagttggatcaggaattgactttgacctgtagtggtctgaggaagtgtcgagttgctgggtgacctgcatcttgttgtcacatagccagagagtattgtgaatccattgctgatctgtgttatatcacagggccagagggatactgagatttcttgaactaaatcagacattttctaaactctgatttgaaacagatacaaactcctgaacccactgaagcgagactgtctcctaaggctgtggttctcaaaattatgtgagcatcagaatctcctataggctttgttaaagtccatttgttgtgtcctcactcccagaatttctgattcagtaagtgtgcagtaggggcaaatattttgcatttctaccaagttcccaggtgatgctaatgctgctggtccagggaccacttttgacagccattgtcctaaggggcttctcaacatggaaagatttgaagtcaggccatagtccttttgaggtttctcaatcctttcactctgttgacccagcttgtctctgacctactgccccttgggtatgggggccatagatgtgtgctcatatcctgtctttcagttccatagtgcccagacaaccaagattgtgtctgaactatggtagccatctagtctgaatttttgaatgtagtgtaaaagccagagatttagggcagaatttatgtctcctattgccttaggaacattaatcttgaaaaaacagtcttaggtggggaggattctcatttttatctatgaggaattgaaactcagagtttaaattatttgcccaggaagtaaatggcagagttgatatttgaacccaggactctggcttcagtgatgattttccttcacctaagcttctctttctcttgggttccttttgaactgaagattttcttcaccctttcttctcatcatgagtctctttaattagagtgtgaattttgactttaatata

SEQ ID NO: 108342 - DNA, 1896 bp, Homo sapiens
ctgggcaacagagcgagactccatctcaaaaaaaaaaaaaaaaaaattggtcaacattttaagatgctataaggtggaaataaaagttttccttcctattgtctcaatcctaaatatcattccttaaaggtaaccactgttaagtctctgcaaattctaccagaaatgacctaatgttctatttgtatacaagcacacatacacgtatacataaatacctatatacatgtaacacacatctatgcttacatgtgtatgtacggatacatatatggattccattgtggatatgttagcatataccttagacatctgttcacatcagtatgtataaatccatttcatttttaatggctatattgtattccattgcattggtttgccataatttagcttaccttctgtttatcaacatttacgtttttccagttttatcttgttgcaaacaatactgcaataaatatttttgtatatatctttttgcatttttgtaagtatatttgtaggatacattcaaggcaagggaattactggtaaaagagggtgtccgtttttagcatcactaaatattggcaaattgtcctccaaaatggctgccctaatttatacttccatcaacagtgtagaagaatgtcgtgtttctccacacccttgtcaacactaaatatgacaaaaatttcagtttgtaaatacaataagtgaaaatagtatcttattttgacattctgttgctgctgtatttgaggttcatttaagcaaatgcttactgagcactcactgtgtgtcatcactgaaataggaaatggcaataaaaaaatgtccttgttcttgaggagccatggaagtgaataagaagcctctttttagaagaaattcaaaggttgcaaaactagaaaagtgggtcttttgcaccctaccagcaggaaatgttgtctataaaagatagtgtccacccatgtcaactttcagttctgttgtcggcctaaattggcaactctctgcttctgcaatagtggccttgctttcattttggaagaaagttggctgcaggtaggagtagaaatgcctatctagtagctttggtttttctccaggacctgacttgattatctcactggttgcttttaggagaaagcacccactgttggcttctgttctgaaagggcaccaggcaagcatggaatcctatcagcagagcaagccaagagctcaataaactgtttattcattgttcaagcttctccacctatatggattattagaagaagtatttcatcttagggtacccagattagattatagatacttcaagtattctttagaattcactgaggggaaaaaaatatggaaagcagcatcagtcatttgggaccgtgttgtttcctgataccaaaataaccgaaatgaagaaactacaatctgtaagttaaaacagctggtttccagcctgttaaataaaaaccaaaaggtgtgacgtacatggcaaaatgggataaacctggttttctgagtggaggcagctattgataattttacttttcttatagctgaagatgaaggagatttgaggttctctgagaattaaaattcggctggagttagcctagggtgagaccctcagagctgtctgttcatgccattgcctcaagcctgtggacgttttttcaccctggggcaagaagaggctccagtttgcccaactgctgtgtgtgttccaggccagtgtccagtgaggctgacttggcagctgccctttccacagccagccagccagcccctgagtgtgttttaaaagataagcgacaaaaagccaaccccttttagaggggctggaacaggctagtagttgctaggcaagttaaagtaattcagcgtccttgccaaacgtctgccagg

SEQ ID NO: 108343 - DNA, 1036 bp, Homo sapiens
tgtttagaacaaatgttttcttttagatcacaatcttaaggaaacctttctttaacggataaagttttacttgtgcatatgaagtgtatatataaatttatcatttgccatatatttgattcatgttcagagggtatttaaaatagtatcttcttcagaatgtatatgttgggattatatattgctgtttccttcttatgtggtttctttttgtggtcatgtaaaagaagactaaagggatgtgatatttagtctcaaatatttgaattatagtcactgttttatttcagggctgtttccttctatcagttcctttgatctggaacaccaatgtcatttttactttacagttgaccgtatgctggctgactgacatcaattaactaatctgaggcaaatttgtaagccaaatgccaaattgtaatttactgggagagtataatctaataagaaagactatccttgggcttttcacatggtgaaccctagtgtgattttgacaaagaagcccaagtatatactactataatcttttttttaaaaaagtgatgttctgaccaggtgcggtggctcacgcctgtaatcccagcactttgggaggctaaagtgggtggaccatgaggtcaggagttcgagaccagcctgaccaatatggttaaaccccatctctactaaaaaaatacaaaaattagccaggcatggtggcgagcacctgtagtaccagctactcgggaggctgaggcaggagaatcatttgaacttgggaggcagaggttgcagtaagccgagatagcgccactgcactccagcctgggcaacagagtgagactttgtccccgccccccccagaaaaaaaaaaaaagaaagtggtggtcttatctagaccctccagagtctagactagcattgtccaataaaaatgtaatataaacctcaagtatgagctttatatataattttaaattttctagtggccacattaaaaaataaaaggaaacatgaaattaattttaacagtatattttatgttgcttaa

SEQ ID NO: 108344 - DNA, 1050 bp, Homo sapiens
tgttaatatctttgctaccgtttttaacttcagttttccaaaaaagatgttggcctcaacccagtcatgtctttttctcttcttttctgttaagtatttaaggtatctacagaccaggactagaactgggcttttctgtctacttctatttttcaaaagtttaattggagggaaaagttactggtcaagacaaagtttctatgtagatcataacaatatttggaagagtggttgaatataattaaagacaagctacctttatgtgtgtacacatacacacacatatatatttaacaagtctgtagttattaccacaaaattaaacctgagtcttataagtttgggaaaagtaaactcttgctcagattttaagttctcactctccttgacacccttttctcacttagagaaaattggacccattttagaacatgtggccataaactggtgcttgagacccatggaaggaatggtattctgcttaagagtacttttaacaagttaaggatagcaagttctcttggagggtgcctaaaacagagctactttatattaaactcttatctgcattaaagaatatagtaagcattcagtgtaatagtcactctgatgatccaagccatcagttataatgaggatttacgtgtatcctgttgaatatagctctctcagggtgtgtgtaagccaggggaatgagctcccccggttctggataacaattagctgagtgtgactctgttgaaaggctggttagtgctagcactgcagactacaacatggccttttgagtgcttagtctctttagactgaacagattaacccttctttttggagtaaagcctgcattgccatatgccaggtactagacaagtgggttatctcctttaagcctcttaacaatcctgtgagtccttttaactcctttttatataacagattcagacaacaacaaacaaaaaaacagagttgggttctgccctccatatttatctctgtggtgtctcatgtatcttagaaactggttagatgggctaggtgtggtggctcaca

SEQ ID NO: 108345 - DNA, 1057 bp, Homo sapiens
tgtatctccaatgcctagaatagtgcctggaacatagtagataggtgttcaattaatagctattgaatgaataaatgatatatggtaagtgctcaataaatgttaactattattattttgttagataaaaacaaaaatgtgaaaatataactggggttccattgagtcctgattctttccagtgatatgttcaaagaaacaactgtgtggcagaaaaatatgattaaaaataacttttactcattccctcaaaaaaaaaaaaagcccaaagtgagagggtgtatttttcacctataacagaacttgttgaaatcttgtctcgccatttctgatactcacagcattcaacacacatggcagctctgccaactgtgtctttctgtctgtttgccaacccccaaccaaagagctcctcgaaaacctggctaagtgtcttcaggtgctgttgttacctcgtttttggccccagtttctaaatcagcattcagaaaaggtcaggagccacacaggcacattgaaacctagagtgaagttgggggtggtggaaatgaggttgggaatactcaagttgatagttttttaacctgctagacatatagcaaaaatagggaactgattaaagatatgagtgtattctaaactgaagagtacttaagactatcctaaatagctgtacttgtggagcattgaatcctagacttttttttttttcatatatacaaaaggttgatctctttaatcttggtatcccactacaaagctttgaacccagaatagaaggagatctctactatcacaaagcttgtgcattaaaaccatttgtttactctataggtcctcctttggaaccttattgacttgctttattattttgtttgcaactactttaggttagaaactggacctaaaagggaaggggaactattagagacaaggaaaagaacatgatactagtcagcctgagtgagcagaccaagatgaaaaatgctctcattacacagtggtaacagtgaccctgattcctaaagtgggagtcagattaaagacaggagtgtgt

SEQ ID NO: 108346 - DNA, 1051 bp, Homo sapiens
ttcctacattccttcagggagtctgatttccttaatctgggatgtagcatggcataagcattgctgtgttcctccattgttctagtgttcagtcattgttctagtgttcactcagcattaagaactgctagattaggtttttggattccaagacttgctgatcataatagccatattgggagccttttaaaatttctccatcccataacctgggagtcagaatttctaagggaaagacctagggatatatgtttgaagtagattctggccatcagctagtttgggaaattaccaatcttggtactttcagatatttcttctagccttccagtcatcaaagcaaggtagaattatcaacataatgatataaagctattgtattattttatgcatgcttcctggagcaagacataaagataaaactcattcaaaatgttcggaatatcatgaacttcactgtgggactaagcattcctgcacaagtccaaacagtgaacttaattcatactcttcagatgatagctgtgtctgtttaatattggcccaacctactcttgctcacgtattttccatttcactgtaatttttattccagctgtatattcaacagactgcctgccaaccctgtggaaccacttgacataaatgatgtattttgaaagattaaaccagaaacacgtattaaaaccatctttatactagcttaagacttaaagaagtttttatgtggattcaagtggaatgagaggaactaagaacggggaatgaggccccagaaaagcaaatttgaggttaaaggtaaaaattaaaattaactaatttttaatcaacatgccacttggtagcaaaaaattaaaatttattaatgactataatattatgaataatttcacatgctgaagtgtattgcctcttcaaagcatgcctcttgggtttaaatgttcttttcacatgtaaaacgttctggtaagaactgtgcctactttctatgaccttacctccctttctactgtaaaaacatcagcacatctttcaggaaaattgactgctg

SEQ ID NO: 108347 - DNA, 1062 bp, Homo sapiens
caatacttctacctcagcctctcaagaagctgggaccataggcacacatcaccatgcccagctaatttttaaattttttttgtagaaatggggtcttgccttgttgcccaggctggttatacaattatttgaattctttgttaggcagtttataagtctctgtttctttagggttggtcactggtgcataattttattctttggtggtgtcatgtttctttgattgttcctcatccttgttgccatgtgttggtgtctgtgcgtttgaagaaatagggacttattccagtatttgcagacttgctttgtttgggaaagccctttttcagtcaacctgtccagagattctgagcaggtcgtctgatgttgtccattagcaggcatgctgttggagtcttcgggcagcctggcttcatatctcggtcagcaggtggtcagcctggtacccgagtgtatggaattgaacctggagcttaaaactactgtagtagacctgttattgggtctataggcatgggcctggagcatgggttgcaagggtgggttgtttttcctttatgcagtgcttttggatgtaactctgtactttcttaggatttcatcccccaaattgttatcctcgtaaattattctctgagggaccagactgatgtgattaatattttctattatatggttgaaagaggcttctgatggaatctaactgtggcttgccatctatccaaagcagcgcaattgacccaagagattcagctgagaaaccatcattagaatagtaagttagttcagtaaggtcacaaaattaatgtcagtcatttttatatagaggcaattaggaaatataatggaaacagaaattctatcactgtgaaaaaataaatataaaatgtctaaaagctataaaacttgacaggactgtagaacttaaagaaaaacactgaagctctacaagaagacctaattaagattaatttttaataaatagccaaatggtgcttctagttgggatagccctgtgtaacccagttgatcccaaatctcctagatttataggctcagttg

SEQ ID NO: 108348 - DNA, 1029 bp, Homo sapiens
gagcatatagtccaaaatgcagtgcacaggtgcagacatctctggaagcacagctcagggcttaaaaaacacagaaacaatcacataaagcagaggacctgactccacaacaaccctgcccaggtggccacagctgagtaagccacatctcatgcactcactccactgaggcaccgagagtttatctgtataggaaggtttgttgtctcagatcctctgcaaggccctgaactgaggagcagcatacttcacaagagtgttttgaggtcctcaccccttacagagacctctgcatgccatctcatcttagatattatgttagcagattctaccagcaactccaaaggaaattgtttcatggtgtgtgcatcccttgggagaagaacaagggttgttatattctgaaacatcagatgtcacaggcttctgtcatggctctaacttaattaccaagtgacagttcctctctgctatggacattagcagaccaactctaattaagatgtccagggctcagatgcccagatagccagggtgcctaacaagtaaacagaagctgaagtttctcctggggaaaactgtctcaaataaaaccttcaatcacaataatttgcaggtagtgctattttccaaatgaacaaactgtcaagaatgggatccttagaagacagccctcctttaaatccctctctgcttagttcatcgttattttttactttataacatggttgaagaaaagtttatatcaagaataatagaagtgtcagcctgccttttgcttgttgttcacttgtgcttccattattagcattgccttcaatccagtgtttatttcagatgtctttttaagctacctgcccatgttttaggagctaacatttcaaagtagataacagaataggcaaatcccctcacttggatacaagtaaactgcaaggcttcctagtgtcctgagtgttaaggaaatagggtaggccccacttctgagccttcccagatggggagcttcccctctttcattaagatgcc

SEQ ID NO: 108349 - DNA, 1025 bp, Homo sapiens
aggcttagactaggtgatctccattcttgcatacagtgttcaaagaaacataaaacaccatatgtattttccatctgcagttgattgaatgtgcagatgtggaatctgtggatatggagggctgactgtactacccaattttatataaaagacttgagcattcataaattttgatatccaaggggaatcctggaaccaatcccttctaggtacagaaggccaactgtattatgtgttataagtaatcaagaaactatttgaagtatacaagaggatgtgtgtaggttacatgcaaatacaatggcattttattgcaaggaacttgagcatctgtggattttgttttcttcaggggtcctgggaccagtccctcaagtataccaagggttgactgtacagagaaacctattacagttgttgttttactcaagaaataccatataagacaagaagagtggtttggtggcagaaacatttgtctgagattcagaaaagatagattctaatactggctctcctaccaacttgttgatcatttcacctttctggacctcagtttacccatttataagaagtctcagtttactcacctatataaagtgcatcaagtgatctgtaaggttgtttcaactcttcctagtctctgattctagaattcttaaatggatgtatgtttttgccctaaaaaaacaacaaaaattagcccagaatgtcatcagatctgcacactggaatcatataacatgggaaaagcccaccaaaggccaaagaagaaacataaattatgacagtatgtggtctcttcaagttagtccatcccagttgttactgcttactaaatttatcaaattctttaactctttaggtattattagatttgtacagaaaacagaaacacataccaccctttctgatagggtttttgaattctaaatccataggaagatttcgtgttgccagtggttaatttaattttacctgctttcattgtttaccaggtttcccttggttggctgacagccatc

SEQ ID NO: 108350 - DNA, 1112 bp, Homo sapiens
ctgcttctctaaccctattttcttagatttgcaactagtttatacccacatttgagtattctctatttttccgcttccaacagttgaatcccgtgctcttctttgctgtaaaaacaggcagggagcttggacaagtaggaggctcaggtccctcaaagacctgccttggtgctactagaattgaggctgtggctggctggcaagatggtttttggtattcttaataactcacctgctccagacatttttatatagtgaggtttagggctaatgagcagatcacttataaagaatatggattaaaattcttcccaaaccttacttataaaaccttttaaaaaaaggatcaaggttgagtatatctatgggtatgagtgacctcagttaatgattctattaacccagtaaaaactgggtttaaacaaagcaccatggattagtcaagtatctaatgcagtatatcatgcgtatctactccctgaacaagctactgacaaatgtgattttattgaatcccaaccctctcttctgtaggttgtcctggaggttaatagagttacttctagccagttcattctgtttgccaaaaaatgtttttgcttgctcctttgtatgggattgtcagttgtctctgggaggtgctagatagaaattacaatataatgatggtagatgataaaatgaacactgagagaagatatgttgataagatttcaaaacatcttctaagatatacttatcacctaaaacaaatagatgtttgctatagatggtttaattttaaaatttgctcttaaactaaataaaaccaaaaaagtttttagttagggcctcttttagattggttaccaaacactctcaaaataaaaatatatagatcaataatttgtttaactttgttgaacacagataatcacttaggttcaagagcaagcaaattcagaagcactgaatggagaattttgctgctgtagcataaaaatcaaagatatactttatgttcccaacgtcatcccttgctcactgggagccttaggctgggttcagcatgatggacctggagatcccaaaagagggacaatttcagttgcattttaatcaagccccaggat

SEQ ID NO: 108351 - DNA, 1059 bp, Homo sapiens
tgttcccaagcctaacacagagcctggcacatagtaagcccttgacaagtgttggcttactatgtgccaggttctatgttaggcttgggaattaaattgttggctattaaatgaatgaggtttggacactgtccagtattgaattagatgcactcaagaccaaagattaataataaaatacacattcctggattcgagtggatcttaaggattcatctcaccaacttcctgccttatgccagtgccaactttcaagcataactaggaccctttatttttagttccttcctaagacggatgttgagtggttttgctggctaactcgtcaagcatgagcattctttgtgcagcttaagtccattttctttttctccacttacatgaaattgaagtagaacatgcctacatcttgtgtgtgagggtttttttttaacatattgaagattcctcttatctcacagtgtcttgtctagttcagattggaagcagagaccatcacctcaattagagtataacagaagagttaagaggttgtcaacttgaattttaaaattgcatccagtggcagctggcaacatagaaatcagcttccgtacaccaaggggagatgttgcaaactggaacactgccatcctttgccaaagatagaccaggctactgtgcagaaagtctcagatttgttatgactgaatattaatgtaccactctctgtaagtgtttggtcctctttgccttatttgatgtgatttgaatgaatttaatttactagaagtgcttttctgggtaataagcatttatatttttcatccttataaaaaatgcacggcatcttcaggcagaaaataagtgatagtgttaaatataaggaagaaagctttattgtacagtagaaatcttccaaccttagggttattttgagctgatagcaacatggcactaaaattctcagaacttctcagaagaattaggtaataaaaagtgaagccaccatttttgtgttatttactttttaaaaaatgcaatttagggttgagaagctaaagaaaactatgagaatac

SEQ ID NO: 108352 - DNA, 1046 bp, Homo sapiens
gctcccccggttacttgcaaaatgaatttaatttactgggttgttaaaagaacaccaaatatgtcatacagagccctggaatagagatagaaaaaaaacaagacagaagaaaagtcaagagaccaacaatagagaatcagttctccaaagatgtgaatcattgcttttgaatggcagagccccctggggagatgggtagagcagaacaataaatgaaagtagtcgagagcatagactctgcagccaagctgcctaggaacaaattgcagcttgccattccccagctatatgaccatgggcaagttcctgtacctctctgtgcttcttttcctcaattgcaacagggagctaataatactacctgcttcatgaggttgctgtgagaattaaatatgtcagtacaggcttagccctttgagcagtgtatagtacatattagccatttctcttttcatcaattcccttgttgcctttgccagatgcaaatgtcatgcccaatatggactgcaggcagccaaccaaataaacagaaggaggaggacctttccttcccttgggtcctgagctcatgtatgcattggaattttcagtaggaggagaccttcttgtgatgtctggacacccatcaatatgtagattccaccccacaacaattgtccatattcagacacgttttaaaaatcggttccacatttcaagcatgtgaagctaggttttagctttagtctctactacatatttggaattaaagcctctagagtccattatgcaaatccatgcaaataatatgcaaagaggcagtagcctcagattgtggggagggggagtgtgtagtccagcacaaagggccttgaatgaaaatttgcatgtgttagggaagccctgggttgaaggcctcagatgtttattgtgacagtgtgcatagcattcagttgttaaccttttgtgccaaagaagagaggtaaatgcttgtctgatttccatattgaaggtgacagtagaggttggaggtggtatttggctagcacaacattgtagggattttt

SEQ ID NO: 108353 - DNA, 1010 bp, Homo sapiens
actagaaccagcagggaacagaggcagcctgttctgggctatgggcatagacagaatggcactactctgaagttttctggttgagagtgtaaattatttttccatttttttccccaatggttaggaccctgggtttaagtgaggtgaccaggtggctggtgatgccaacttggagttactgtactagtagctattatagcaattttatatgataattaataatagatggcatttattgactgctcactaactgccaggcactgtgctaagggcttgacatacattatcaaattaatcatctcaatgacgttatgaggtaaattctattacgatcctaaagtggctcacacttgcattggcagctacaacaattatctccactccacaatcgctttctcaatgtgaccttgccattgtctcatcaagaagttgaatttatttctctccctgttgaatctaggatagtcttgtgactgctttgaccactagaatgtggtataagtgatgtccagagactttcgagcccaggtgttaagaggcctggtagcttctgtgctcactcaggtgctatatcagaagtttgactatgtcaggctgtcatgatatgaggaggtctaagctagctacacggagtggtcacagggagagagaaaaagagatgcacaattgagtcaccagagaagctaaatgaagaagccatttttgggtgttccagccccagcagaggccacatgatacagagaagagttatccctgctgaattctgcctaaatcacagaatgagagaacaagtgattcactgttgtcttaagctactaagacagtaactagatatgatagccaaaatagatcctcactttacaagtgagaaaatgaaagctgttcattcacatagctagtgagtgaggagagcacccaccacgaagtctacctcctgactcccacagcaggggtgctctctcccatctgcccctccctcacatttgtatcagctcctccaccgaagccac

SEQ ID NO: 108354 - DNA, 1094 bp, Homo sapiens
gcaggcagagcaaaatacgcaggcgcaggcgcttcctctctcttctagcggcccgccctccctcctccctctccctcccctccccactcccttcccctcctctccaggcctgcgcgcgcgcctcttcctccggcacgcgccgctgctagccgagcactctcgccagaacctctggctcgcgcgtgccttttcccctcaggttgtggggagagcggaatcctgctccgccgtcgcagcagcagcggcagccccggcagcctcgggcgacagcggcggcgcgcgagcccccgggcggaccgtaccaccgctcgccagcacgcagggggagccgcccgtctcgccgcgcacgcctcggcgaccccgcggggctgaggcgtcgccgcgcccggcagcgtgagcgcagagccggcctcgaccccgagctcggagccccgcgggccgcgcccgccgccggccccacccatccgggtcgaggaggccgaggccatggctgagacggaggagcggagcctggacaacttctttgccaagagggacaagaagaagaagaaggagcggagcaaccgggcggcgagtgccgcgggcgcagcgggcagcgccggcggaagcagtggagccgcgggtgcggcgggcggcggggcgggcgcggggacccggccgggtgacggcgggaccgccagcgcgggggctgcgggcccaggggccgccaccaaggctgtgacgaaggtgaggggccgggaggccggcactcggggcccgggccgcgcgccggcgccccatgtgcccgcccccgcctgccggggaagcgtccgggaggggccgcggaggccgggcggacgggcgcgggccgccacgtgacgcaggctctccacctcgggctgggctcgccagggccgggaccccttccgatatccgcggtggagccgcccttcccaccccgcgtcgctcggcgttagccaaggcccgggcggcgccaccctccgggggcactaggtctggggccgcagtgcccagcacagagcagcgtttatcgggtgacgtctaggctgagtaattccgtgtgctgacctcagcccagtagtttgagctgaatt

SEQ ID NO: 108355 - DNA, 1458 bp, Homo sapiens
agcaccaggtcaagaaactgagtattactgatacagaacaaggttcccctcctaacacatactcactgcattcaccttcaacataaccactattctaacaccataattttttctaaaacttcataggaatggaattatatttgtaaacatgttattttttaaagttcaaaaaaatagtaatttttaaaaattgggtagtttagaagatttgaaattaacattttgtcaagtccagtctatggcagtcaactttaaggttgatgttaagtaagtgctatattttggagggttcataaagtaggaaaaaacaaatgaagatatggttctgctgtaagatgaaaaaatcctttgctcccggtttaaagaaataaaggatcttgataaactgtctccagtttgaaggttgcattttataggcaatgccagtgagtgcgaggcacagtggaggaaatactttccttaactgaaaactgtcttttgacttctctggatgttagtatctatagctttagataacttactcaaaaagcagggttaatattattgacatttgttgaacacctaccacagctaggcattaatgtcctactgtgaaaacatcattttgtgagcttaaccaaagtgaaacccccagattgataatgggaaactttcaggaacgatggcttctccactcttgagatttctttgtagtggtgttgagtagaagtgattagacttgagtttgattcccaaccacttgttggcttccttaatgtgtctttctcttttctgtctcctggggcttgacctgtaaataatggggaggagggaatgtgaggttcttaccatttggtgttgtggaactgcctgtgtgtgtggctccggttctgttgtaaagtttggctcttcttaagtcttttctttcctaagtgactgcaggttcttgaaaacgtgagtgactggaagaatagtgtttggccatgttgaacttggcaaaatagcacttttctgaagataaaattttggtttcaagttcactgaggattagaaattgattttgttaaactatggagattatttaaacagaacctgtgtttttctgttactgactataaattacatgttcatcttcagggttattttgatcttgatctattttggttacttttgagatagtgaaaagtgtcttaaataacttacatacttcacccttgccagggatataagtaagtatcagctagtacaagcatttaagttctgttcaacctgaaggtagactagctttttttttttttttttttttttgagacgaagtttccctcttgttgcccaggctggagtgcagtggcaaaatctcggctcactgcaacctccgccttctggtttcaagcgattcttctgcctcagcctcccgagtagctgggattacaggcgcccgccaccacacctggctaattcttgtatttttagtagaga

SEQ ID NO: 108356 - DNA, 4493 bp, Homo sapiens
caatgttttcacttttcttttttcttttttgagagccggagtctccttctgttgcccaggctggagtgcagtggctcaatatcggctcactgcaacctctgcctcctaggttcaagccattctcctgcctcagccccctgagtagctgggattacaggtgcctgccatcatgcccagctaagttttgtatttttagtagagacagggtttcatcatgttggcccagctggtcttgaactcctgaccccaggtgatccacccacctcggcctcccaaagtgctgggattacaggcgtgagccaccacgcccagcctgttttcactttcagacattttctgaaatgaattcccttctgtggtctgacccagagaccctggtattgttttttctataattgttaaatgattgggaatgcaagaatagcttattaaaatgctgagcatttaaatagtttatctaaaaattgttataaaatattagttacagaaaccccagaaccagcgatgactagtggtgtgtataggcctcctggggccaggttaaccacaacaaggaaaacaccacaaggaccaccagaaatctacagtgatacacagttcccatccctgcagtcaactgccaagcatgtagaaagccggaagtaagtactataattaattgcattttgtttgggacttctgttcctaggccagggagtgggatataggggatgtgcatacccacccaagggagagactactccttaactaataaagcctgagcttcagctgacaggcaggtgagaatcagggtgggacttcatatgtccagaagggaggaaagggggagggcaaagagcattggagacactttgtcttctgtctgcaaaagtttatcttagccctggtttatgttgttttatagcaatgacaagttttaatgtagttaaaattcttttataattaagtggcttttgctccttataatatggaaactagaaatataaaagcgctgtttaattgtattcccagttaatgtgactatagacagaagatgttggcatttataaatctaatattaaaataatcttatttcagcaggtacttaaaatgaatgctacctggaattaaatgactacatatggcacatctacatcttactttagggacatgaattttttaaaataaataaaatgggaagaaatgtaaatgacatcagatggaaatgtgttttttggggtggcttttagaataaatcccagccttttcaccactttgagagcacagctggcttgaatttaaacctccacgtggacttgctcctctgctctgtcttaaaaaatgtgtaagggaccttgggagggcagtgattcaccacactcgagtttctttacctgatctaatcagatccactcccacaaaatcgatgtgaggagaaatcattgactaatgagtagaatttacttgaatgagaaaattgttacccttgtgcataaagagagagatgtattatctattacttgctaaaagtaagagtcttaggaggaatgtcattacacagcttttaacagttttcttcaagtttgtcctgaaatagggtcacagttaatactgttcagtagaagataggaccctagagcttcaatacagcgttctgtgttttctgtttgaattgaagccttaaaatggtttgataaggattttctatatgcctccactcctacccctccccaggattcttctaaggggtggcttttttttaaattcaaggacgaatattttcaaaaaccctagtgaagaagaaatatttactgattacatttcttttcccttagggataaagaaatggagaagagctttgaagtagtaagacacaaaaatagaggtagggatgaggtttcaaaaaaccaggcccttaaacttcagctagacaaccaatatgctgtgcttgaaaatcagaaaagcagccactcacaatacaattaaggaatgggctttgctaacccttctgaggtaactagactgcagctaaccaccaccaacagccattcatcatctgatctctgctggatctacagacaccgatgcagaccactcgatttcatgaccggccctattgcactatggaagttaaagtgtcacgactgctctatgcatattggatttaggggaattttcattgttacataaatgtgtgaactagtttcaacagtgttctttcatatttactctgcaaatacaaaaaaccaaaacctgcagccagtggtcatttcaaaatctttttatgttcagatactgagccttcataagggttgactacctcagatttgctgcactcattgtggacttcatgtggatcacaacttctggataagaagattacaactattaagtgtcgatgtgaaccttgcaaccagctctactggattcttatcagaaatcctgcataaaaagtcagccatctgggttctgatctgctgtaaaagatgaagatttaagtgaccttaattaacctgtcctgtgccctacccttaaggaatactctctgtagtaggctgttgttatattagacttcctggaacacactgctgaaaagaactgatgtgttcagatcatctgtgtagggctgtgatttgtaatttaaactaattgtattctgaggtaaccacaaaataaattcaaccaaactggggtccaccaagtgggggaaggggaagggagagaataatcttgggggttttttttttttggtaatttttttatttggatagtgcttttttgttttgtttttgttctgcattaaggccttttttgctttgacttgaaataagttctttgacagagcatattgcttggttaattaagtaacctaaagtatgcattaggattgtgaaatgtctcgtgagtatgccaatcctgagggtggaaccaaatagcctttgatgaaaagggcagtggattctggaggctctacttcaggtgctgctataatgcctcatctaatcaggactaaattgtgtaggaaactgcagtgggaagaatatgctttctgctcaggctaagagggtcactgatctgtccttagaaattcagagtaacatgagcaaaacctcagctaaaacccatttaagtggcatggattgtgcatgatctttgataagaattcctcatgtacttgtgcctagtttttcaaggtattggctgttctatagatgcagtgattgtcccagctagctctgttaccagccttttggtgtgtctttatgttcatttggagagtcagggcgaaagacaggtgatgtagcacttctgtttttaataattattgcttaaaatacctattaatagttttgggtcatttaaagggacttgaggaagctacccaggattacagaagagtgtccacctaacaagatggtctggcagtttcctagttttgtatctggttcaatagaaatatgtgaaagtggtaatgtcatcatttgatgcagagtccgggtttctctataataaatccctttgccaaatgcatgagttgcagacttgctactggcaagagtgaagcaagtgggtgagtaaaactattttgacgtgggagcgttttcagataggagtttagtcttgacgaaagtgtccgtgcaggaattggactccgaggagggttacagtatctcctgacgggacctgccactcgcatctgggcaatgttgacatttgaggtggcaggcaggatgcctgccttctaatatatttgggtgagtaactgagccagccaagggaaggttgaatgattaaatcagaaatgggattcttggtaaactgaagacttttatttgggaatgaaaaaccttaaaaaaatctcttcatcgttgaactgtgcattttccctgcattttttcccaacaaaattttgttgggggttatgttactgaagaatgaacagatgagtaagtggaggtgttatgtaaaggcatattgtactcgaaatctgaagacctgcagcagatttaaattacaactcttgttataactttttaaaagattgtgaaaatatcaaaatataaatgaatcaagttttaatatactgtatgatgggtggatgaggctgtccattgtaccatttgtttgaattctcaggcatggtttggcagtgcaagaattctgtaacattaacaaattcaataaaaagtaaatatatggattttggactgtaatggttattttaaagccttattctgtctttgaaaatggtgagttgaggtcacacctctcttgctgtgggaaggtgaagatgctctaaactcaggggtgtacttttttttttttttgagacagttgctctgtcgcccaggctggagtgcagtgatgtgatcttggctcactgcaacctccgcctccctggttcaagcgattctcctgcctcagcctcctgaatagctgggattacaggcgtgcaccaccacacccagctaacttttgtatttttagtagagacggggtttcaccatgttggc

SEQ ID NO: 108357 - DNA, 1031 bp, Homo sapiens
tacatcacctgtctttcgccctgactctccaaatgaacataaagacacaccaaaaggctggtaacagagctagctgggacaatcactgcatctatagaacagccaataccttgaaaaactaggcacaagtacatgaggaattcttatcaaagatcatgcacaatccatgccacttaaatgggttttagctgaggttttgctcatgttactctgaatttctaaggacagatcagtgaccctcttagcctgagcagaaagcatattcttcccactgcagtttcctacacaatttagtcctgattagatgaggcattatagcagcacctgaagtagagcctccagaatccactgcccttttcatcaaaggctatttggttccaccctcaggattggcatactcacgagacatttcacaatcctaatgcatactttaggttacttaattaaccaagcaatatgctctgtcaaagaacttatttcaagtcaaagcaaaaaaggccttaatgcagaacaaaaacaaaacaaaaaagcactatccaaataaaaaaattaccaaaaaaaaaaaacccccaagattattctctcccttccccttcccccacttggtggaccccagtttggttgaatttattttgtggttacctcagaatacaattagtttaaattacaaatcacagccctacacagatgatctgaacacatcagttcttttcagcagtgtgttccaggaagtctaatataacaacagcctactacagagagtattccttaagggtagggcacaggacaggttaattaaggtcacttaaatcttcatcttttacagcagatcagaacccagatggctgactttttatgcaggatttctgataagaatccagtagagctggttgcaaggttcacatcgacacttaatagttgtaatcttcttatccagaagttgtgatccacatgaagtccacaatgagtgcagcaaatctgaggtagtcaacccttatgaaggctcagtatctgaacataaaaagattttg

SEQ ID NO: 108358 - DNA, 1371 bp, Homo sapiens
gactttgtcccacagggtccattttgtttaatttgctggaacctaggaatgaatatgcgttttcctttaagtttgtcagattcatccctgagaggtctgagatttaaagaaaaaatctattaccagatcacgtaaatgtttgaaatcattttaaaaaatcacttatttttccttttataggaatcacctcctcatgtagaaaattactgtctaccagaagctatttcatttattcagaataataaggaacttgggactggattatcacaaaagaggaaagctcctacagaaaaaaataaaatcaaacgacctagagtacactaatcgcatctaccctttagttaccaaacattaaatgtttttaaaaattgaaagcctgaatgtgactgtgatagatttgggtagtaatttaaagatgagtacctgaagaattctgcttcagagtataatgatgacccttcttgagttttgaacacctgaaattgtaatcactgaaatattaactgtttcttaataaaaagttacctgaaataacaacaaaatacaactcctcagctagcttgctgttaaaccacattgaagtctgttaaaagatatttatttttcttgtaaatatctgaagctgtagcttagtggaaattttagcaaggtaatggattttgctttaaaatgtctgccttacaaattcataacaacaagatttgtcagtcagcatttattcatgttttccctgatttttatcttctcaccattttacctcttttaacaggagcctgagcacaaggtttaatgaggaagctggggctataaatatgtgtgtatatatgtatatgtatgtttgtacaaatctccatgatgtttgccaagtttgaatgcgcaaaacttggaaaatgtgacaataaagaataaaagtagtaactcaaattagtattaagatgtgtttacatagataaattttttaaaagagcaccctggcatctgttcttctgttgaagcaacaaaacatttatgtaacgtaaaaaatgaattgcaggggcctgggtgcggtggctcgtgcctgtaatcccagcactttgggaggctgaggcaggcggatcgtctgaggtcgggagtttgagaccagcctgaccaacatggagaaacctcatctgtactaaaaatacaaaaaattagcccagtgtggtggcacatgcctgtaatcccagctactcaggaggctgaggcaggagaatcgcttgaacccgggaggcggaggttgcggtgagctgagatcgcgccattgcactccagcctgggcaacaagagcgaaactccatctcaaaaaaaaaaaaaaaaagaattgcaggccaggcacggtggctcatgcttgta

SEQ ID NO: 108359 - DNA, 1065 bp, Homo sapiens
tggcctactatgtgccagataccatggattcacgtttcagtgttctggccagagataattatactgtggcaaaagtaaagtttataagatttattgacaaaactaagtctacagataaaatcatgcattatctgtattattttgttattttccaaatgatttcaccactgattgttttttatttgtagggagcatttagtgggtggaaggttattttacatgtggatcagtctcgagaagcaggcttcaaacgccttcttcagtcaggaggagcaaaggtttgtatcaaattaatttactgacctttttacatgaataatcatctaaccaagattgctatgatgagttcttcattttctctactttttgaaatggtaatccttaagtacacattatacagctgaactactttggaatactggtagattgtgatactaccttgttttttcattaggtgctacctggtcattctgtacctttatttaaagaggccacacatcttttttctgacttgaataaactgaaaccagatgactcaggagttaatatagcagaagctgctgcccagaacgtgtactgcttgagaacagaatacattgctgattatctcatgcaggtttgtgagattctatccttgacctcctcattaccagagatacgtttatgtgcatagataagtaactgcacaacaaaaccttcagctcatgattagtagaagattagtctcctgttattctcttctattccagccctttcagttttattctatttgtgttttttattataatgaacatattatgtaaacatttagcttggaagttaaatatgagaagagtataaaaatctaggtacctctaaaggctttaaaaataccctttaaaatgttggaatataaagcagaaatcgattccaggagtccaaggagaaacatttatccaaaggtcctttagttttcttgactgtttgctttcatgtacattaaatacctatgttagacactgtggtaaatttaagcatttgctatatggtgggcttactactctcatattcagaattggcctgtgt

SEQ ID NO: 108360 - DNA, 1085 bp, Homo sapiens
ctgtctctaaaggaagaaacagacaaatttatttatttacttaaaaaagtaaatctcagatttcatcacatttgctgactgctcataaaattgaaataaccaaatatggccagttagagtataccagctttttcaataacaaagccaaacaacgaaacttcgcagagccaggttcacctttaatcactttttaaatgatttaatttgaatgttagtgttgtttttaattgaaataacattttcttagaaagtttcaagattatctcattgtaagctttcatctttactacatagacagataatcaagttatcagtacatacctcctctgagactgtgtcctttcatgaagttagtcttacagcaggtgaaatttgtccatctgaatattaccagttgccaagatatagctatcattttgtttcttaaaaatgtatgtggtatttttctgatttctaattaaaagccaaatatacttgactcttatatgaaactaatctacatttcctccatgctcataaaacaatatttacttagtactgtctgtatttgtaacaattaaatgtatagctttaacagttattagactttgggctccttgaggagccctgtatgttgcacagtggctccccagactgtaacaactcaggtttgttggacaaattctctaggaagaagactatgaatggggaagtagttccatacttgatgttctgactggaatcaatgtacagcaacgaagactagcacttgcagcaatgagatggagaaaaaaaatccagcaaagacaagaatctggcattgttgaggtattaaaacacaattatataggtaatacaaatagcattcaatattgtgactctttcacattttttttaaaagagaatgtgcttcaggaaataatgattctacttgtcttttttccccaaatttttgatggctcttttaaaaataatttatatatgtaaaatgtggcccatattgcatttcttccaaagaatcttttcagcatctaatgtcaggggttcttgacctgagtccacagaccttctcaaaggaatttgtagatcaaatctgggaaggccat

SEQ ID NO: 108361 - DNA, 1081 bp, Homo sapiens
atggtgaaaccctgtgtttactaaaaatacaaaaattagccaggccatagtggtgtgtgcctgtaatcccagctacttgcgaggctgagggaggagaatcgcttgagctggaggttgtggtgagccaagatcatgccactgcactccagtctgggtgacagagtgagaacctgtctcaaaaaaattaaaattaaaacagaataaaattaagtagttaagcaaaaaaaggtggcagaatttggataattttagaatataggtagctagtatatgtgtgggggttcattttactattttatttacttttgtatttaaaatgttcataataaacattttaatacatatatatatgtatataaagtaaaataattctaagtaagtcaagtttttttggtttaaatggtttggggcattttatttataaataatttctatgcgtagttgagattacatttttcctagaaagaagttgggaatcaataaagtacaatccatttttctctgcttaaggtggattggtgatagaaaagcagtgctttgatcccacctgtacacacattgttgtgggacatccacttcgaaacgagaagtatttagcctcagtggcagctgggaagtgggtgcttcatcgctcctaccttgaagcctgcaggactgctggacacttcgtgcaggtgtgtattcagatttgtggaagtttatttttctttaaaagcaagtgtccaccgggtgcagtggctcacacctgttatcctagcactttgggaggccgaggtgggtggatcacctgagatcaggagttcgagacatgcctggccaacatggtgaaaccctctctactaaaactacaaagattagccaggcatggtggtgagtgcctgtaatcccagttactcaggaggctgaggcaggagaatcacttgaacccagaaggcagaggttgcagtgagccgagatcatgccattgtactccagcctgggccacaagagtgagaccctatctaaaaaaaaaaaaaaagtaagtgttggctggcagtggctggctcatgccactttcagcactttgggaggccaaggcagg

SEQ ID NO: 108362 - DNA, 1342 bp, Homo sapiens
tctccaagtgtagaattgctctcatgttacaaatttgggttacacttaacaatgaaaacttggtatttaaggaaaatgttgggagaagcccacagataacacacttgctctgtttaatgctaataaattgcattttttctttattgttattattgtcacatgcagatgggatgcatttatttataagttctggggataggatacttttttgcctgtactttttacattccagagtttgtgcttgacttcatcttgactaagacagatgagaatatttcctagaatttgtttttagtcttatttggatcctgtcacactgcagcattttattgtcctcagctgtctgtgatcctggaaacatacgtgtgactgaagctcccaaacacccaatctctgaagaactggaaactcccataaaagacagccacctgatccctacgcctcaagcccccagtattgcctttccactcgccaacccccctgtggctccgcaccctagagaaaaggtttgttgatccttaatatggtgatacagcttttgcatactgctgttaggctgtattagaaatttgttgatgtcaatatcaaggcttcatcaaatgttgaaaactattttttgcattgtatcattatttgtatatttcataacttagaagactgagtaaaataccactataaaagaactgtgtatctgatcatttttaatgttaattttttctaaagtaaaactttcattccagattataacgatagaggagactcatgaagaattaaaaaaacagtacatatttcagttatcatctctgaatcctcaagaacgtattgactattgtcatctgattgagaaactaggtaccagtattttacttaaatccaaaatgtcccatataataaccatatttggaagtcaaatgtagtcaatattaatatcatttgtaaagtctagaagtagaggaaaagaacatgggtaacttgtctaaggctatacattgagtcagcattggaactttgattttaaaaagctctaaagtcagtagatcatgggatttaaaattcaaatggaatctagcagttgaggtttaagaatcttctgtgctgtttgactattcattcactaatgaagctttaaagacttactatataaataaaaccacattttaatgaacttgaaaggttaataatatctagagaggagctccctcttgtttttttgtttgtttgtttccagttagaaacagtgtggaggccaggcacggtggctcgtgcctgtaatctcagcactttgggaggctgaggtgggcggatcacctggggtcaggagtttaagactaggctggccaac

SEQ ID NO: 108363 - DNA, 1090 bp, Homo sapiens
aattaaggaaaatcacatttttaaatgtaccaattactttagtatttttaaaaaatttcttgacactgttgaatttctcctttgaagttttagttctgtagacatgtagtcaaaatatgtgttcctagctaaaacagataacttttctggaagaaaccttaaacctttttaaaaaaaaaaaatgtccctaggttcatttatttaatatttttaatgcatactgtgtgctagatggtgggcatataaaggtgagccacaacttttatggtctaacttatggatttaatgagtttggatttgttattgctgtttatttaaactgtcacttctattccttaggcagtctcgtcagacagtacctgatgtcaacacagagccttcccaaaatgaacagatcatttgggatgaccctacagcaagggaggagagagcaaggcttgccagcaatttgcagtggcctagttgtcccacacaatactctgagcttcaggttgacattcaaaacttggaggattctccttttcaaaagcctttacatgattcagaaattgctaaacagggtaacaagaaagaaatctttgcatttgtttgtattaagtacatgttgacctcttaaaaataaacagatgagcatgttgtagttctctgatctgaatgtgcaaacaaaaaaaacttcgtagatatttctggttttggtttaaacttgagccagaaaaataatttgtaaattgaggtacttcatcagtaaattgaaaaacattttcataaatttggaaatttagaattgggcgtttttttctagacatggtgtctaccattgttcttttattctagctaaccctttttgtgtttgtggagttaatgcttggtttttcttcctatcatcttattttcatttaagtcttttgaattctgcctagcacatacctacatttgttctttggattgtatgagtttctttctgaattctcctattttttttcttccttgagctttaccttaaaaacaaaattttcctatctctcatcttttttcttccttttcttctttttcacattgcatgatgacctcccattagatatatagattt

SEQ ID NO: 108364 - DNA, 2667 bp, Homo sapiens
taaatgttttgtaaatagttatattttattttttttactggtacttttaattgtgatatttttcatttttatgtctttaaaatatttctgatccatacttggttgaatccatgcatgcagaaccggtggatgtggagggctggatgtatgttgtggtctgtgttttcaagagcctttggggagtctgggcacggtggctcacacctgtaatctcagagctttgggaggcaaaggcaagaggattgcttgatgctaggggttccagatcagcctgggcaacatagtgagaccttgtctctacaaaaaatttaaaaaattagctgggcgtggtaatgtacacctgtagtgccagctactcaggttgctgaggctggaggatcacttgagcccaggagttagaggttataatgagctatgaccataccactgcagtccagcctgggccacagagcaagactctgtctctaaaaaattaaaagaatctttgggaaaaatcagacacatacacaaatgactataagacatctcagagtgtagtacataccatgagagtcagaagcaggcagggagctttacagagggataatcactacaggtcttgatgaaatgtctttgaagggggccaggcacggtggctcatgcctgtaatcctagcactttgggaggctgaggtgggcagatcacctgaggtcaggagttcaagaccagcctagccaacgtggcgaaaccgcgtctctactaaaaaatacaaaaattagcccggcatggtgatgggcacctgtaatcccagctacttgagaggctgaggcagggagaattgcttgaacctgggaggtggaggttgcagtgagccgaggtcgcaccactgtccagcctgggcgacagtgctagactatcaccaaaaaaaaaaaaaaaaaagtatttgaagggcttcctagttatttcatatacagtgcttgtggtaagggctgctttttatgttctgcagtattcatagttttagtacattactatagcctgtagttaatattcagtaaatgtcaagtcaataagtttgtgttcaaccaggtctaaacaaaatagttaatgtaagatatggtaaaaaagaggaacttaccttgaatggtgtatttgtgtttgtttcaagttctgacacagaccttagagatgagagagaactttcagaagcagttacaggagataatgtctgcaacatcaatagtgaaaccccaagggcagaggacttccctttcaagaagtggttgtaacagcgcatcttcaacccctgacagcactcgctctgctcgcagtggacgaagtagagtcctagaggcactgaggtgtgtacctgtcactgatggcagaaagactagatgacttgagagaaaggatttacgtacctgctgctgactcaattccatgagcttggcctaatttagcttttttttctttttttccccaatatgcagtaaaagctgaaatttaaatatcaagactagtgaaggggttatatgcctaggccttatttagcccaaacagtaaatattatattccagtattatctattgcttttggctctctgctgactagatttttcgttctagcttgtccttccatttcttgctcccagcagttctagatttcttactcggaggtggagcagacatggagatttgtcttacagcagcacctgcttcacagtgaggcatgattgatactttttattacctccgttgagaaagaaatgattttaagatctaatttgcctcatttgaaatggattcagtaggcagttctctctgctctttagtattagtattcaatagtatttgtattaaacaataagtacatatatattttttcagagtctttttctaatgcaatatgtaaaatcttaaagttatttttgttgggattttgcatgcattttgtattctccttgtaaaatttatcttctagaaaaggtgattacagtttctagtgtgatgtgacttaagctcagttgcataacttcatctttttcgtgatagaagaaaaaaatctataattgtgtgataagaattatgggacttgtattttcagttgactaattgaattaagtataagataaactagcatttatcttacgctaactgtattacatgaggcagttcattatctcagtactgagtaaagtagctttttaatatgcttcagatcatgttttatcattatagagaacctaaatcctgtaccaaatcagagtaaataaatatagtgtgagaataaaaggctatattctttatttttgaagcaaaggaactatttgggggttcctttggtaaattgttttatgggttttggtgttttgttttgttttttgttttttgttttttttttttttgcttctccacagtgtaagttttatggtaaattatttttactaagaatgaatgaatgagtgaatataaagaaaattataggacttctatttactgtcacgtggaatcattacaatcgcaccataaaatgcacttccctgtaattcagcatattgctgttccaccgtagactctggaaagtggttaccaatagccaaaaggcccttctgataaggcagcctttacagcaagcctcccatgtaatcatagtgcttataatttcaagtaattaaaaaatataactact

SEQ ID NO: 108365 - DNA, 1084 bp, Homo sapiens
agattttatacttcagtggatatgacatttaaaacatgaggacaatctgtcatttgtatgatgcaaatttttcagtgtaaactacttttcaaaccagttttgtgaactttttgccatattacagtataatgtattgcttgtccttatcctacttaacatcatctattcattaagattttgtcagtcctgtcttaaagcacaccattgtattgcagtgtgcccaagagtgtaaacatcttcctgaatctctttatccacatacttataatcccaaaatgagcttggatatcagcgcagtgcaagatggccggctctgtaatagtcgactactctcagctgtgtcttcaacaaaggatgatgaggtaggagatatggatgatacatttaccccctcttaagctaaaggtataatcatatattgctatgaaaccttatacagtggcttggtttgagaatttataatttttctttttcaatagccagatcctttgattttagaagaaaatgatgtagacaatatggccaccaataataaagagtcagcaccatcaaatggaagtggaaagaatgactctaaaggaggtaaaatattttattttttaattaaaaaaattttttttgagacaaggtctcaattttttgtggagatggggtcttgtcatcttgcccacactggtctgaaactcctgggctgaaaggatcctcctgccttgtgagccactgcacccagctgtaaaatatgtttaaattactaaatacaagcaaagcatatattagaggattgatttgtggtcccatgctgatcattaagtgataatttgcaaagttttatgtagtttaagtgtaaagcttatgaaatttatgaaactaggtttttatggagttagtgtgatacagccctattccattaaaggtaggtgaagttggtgattttttaaaaatctagtctttggtccagttcttttgagtgattttcaaaaagttttcttatatgtacaatatattttaacatatccacatggttttaaagatacaaaaagacatatgaagagtttcttccacccttattctccagccccccagt

SEQ ID NO: 108366 - DNA, 1235 bp, Homo sapiens
tttagaacaggaatatattttgaacttttgaagatttttttttttttaattctcagctcattttgactttctaaccttccttataatccatttcttgattatatccgtcgttgcttatttgtttccttctgggtttttttggtttgttttgttttcaaattcaactctaagattcaggtaagagacaagcactgctgaaaatgtaagctagttagtctctttgaaccaatttgctggacagtatggaatttttgttcacagtatatggatttgattatagtttattctttttcttgttatttggaggaaaactagaggaagttaaactgtaatccattaattttgaggattctcccccttctctctctttacccctctctcctcctctttctttttcctgtcctattaacccatcttgcttctctctctctctcttcttttctccatctctctctctccttcatatgtataggatgcacttgcagccttggaaactccaggacgtcccagccaacagaaaaggaaaccgagtacgccactctcagaagttattgtcaaaaacttgcaacttgctttggcaaatagctctcgaaatgctgtcgctctttctgccagccctcaactgaaagaggcccagtcagagaaggtaggattagttctcttattaaaaggaagttttagataacatttcaaacaataatgactgatctgtttcttttattttccatggacaggaagaagccccaaagccacttcacaaagtagtggtatgtgttagtaaaaaactcagtaagaagcagagtgaactaaatgggatcgcagcctctctaggagcagattacaggtagttggcacatctttctgtttcatggtgatatgactgaaatttataaggaaacctaaagctattgtgagcatctacaagaatacatttattttgtttcatgcatctttatctacaaaatctctccagttgatttttaatttaccacatctgttgaaaatagcctctcacatatcaattcactcttatatgtatataatgtatattttttagggtatgcacaacaaatattggagagcctattttatgccactaactattctagaaacctgggatccatgaaggatcagtatagtctaaaagaatccctgtgttcaaggagtttagagtctattaatagtaatacatctggatctgagattaagtttatttttactagtgatttttcaga

SEQ ID NO: 108367 - DNA, 2361 bp, Homo sapiens
aattcccatctatgagtgagaacatgcggtgtttggttttctgtccttgtgatagtttcctcagaatgatggtttccagcttcatccatgtcccgacaaaggacatgaattcatccttttttctggctgcatagtattccatggtgtatatgtgccacattttcttaatccagtctatcattgatagacatttgggttggttccaagtctttgctattgtgaatagtgctgcaataaacatatgtgtacatgtgtctttatagtagcatgatttgtaatcctttgggtatatacccagtaatgggatcgctgggtcaaatggtatttctagttctagatctttgaggaatcgccacactgtcttgggaagcattcttgactcaccaaggatggcctttgtcttggtataatgttttttgtttcaccatgacactctgtatcatcccttttatctcttacctcagtgttataatggttgtttattttgtgtcttcctgctaaatttaaagttccagaaaggcagtgaacatgcatgtcttgtgaattctgtatttcccatgtctaacactaggcctggcatggagtagctatctaataaggttttttgttaaatgttgaaaaaaggtggaaggcataggtggaagaatacagtaccctctcttgtaagataatagcatccatgggcaaacttcagggacatatcagcagcttgggaatacctctcagagtcattacttattttgccagacagactggtaattttatgactgaggctaagtgatgttcaggtcatattaaaatttgattaaggactttccaaaactagactgtagttaactctgagtacctgtaattgagatttttctttttactctgtcattgactagaaagacattcactgataacaatttttggcaaataggcttattgagacatagcaagatgaaacaggaaatctattattattttttcagttaatgtgcttgtctaactcaacatatatttaatgcataatctggtttgtttcttggaaagtaggtatataattttgtgatttaaagtgtacctgagaattgacatgaaaactaacagattaggatgccgaggtagatggatctcttgagcccaggagttatgcaagaaagaaaggaaagaaaacagtataaaatattacttcttgtgtaccgggaaaaagtgggcattagtggctcatatttgtttcttttcattttaaatctctagaacgaagtttggaaacagaaataacaaatggaatcaatctaaattcagatactgcagagcatcctggcacacgcctgcaaactcacagaaaaaccgtcgttacacctttagatatgaaccgctttcagagtaaagctttccgtgctgtggtctcacaacatgccagacaggtcgcagcctccccagcagtaggacaaccacttcagaaggagccctcgttacacctggatacaccatcaaaattcctgtccaaggacaaactcttcaagccttcctttgatgtgaaggtaaggtttataggcagtggtcccagagttaacagttttaccgtttataaagttaaagcaccaaatttggcatcacctctgaagtgtagtaataaattttccagagacattggcaagtagatttatgttactgagtttgaacgttttgagtcccagcatacatttagggttaaggtaacagctatagataaatatggtgtgaaattaggacatctgggttcaagtactggatcgatcttgaactgtatgactaggccaatcatttaacatatctgagcttcagtttgttttttcatacaaagaagataatatttgctctgaaaattcatagattataaagatcaaatgatgaaatcactttataaactataaaatgtaaacacactgatactttatatattggttctcagagtacacccgggatttgccttctgaaaatgtgtgtatatcaccttacttgaattgtttcctgtaaagacatgagttaagtctgtgttttagtttgatctcgtgagcattgtagtatggctccctttctgaaaaatgcatttgtaaatcaggggctaatgtaatcttccaaataattttctttgattttccaaaactgattttcatcattatttctttagtagcttttgacctcttaagtggctgttcaaacccactgtctatgatttctttatccacgaacctttgaagaattattttactcattcacgtgttgatatttttgcttgtagggtatttagaagcaatattttaataatttttattgtgttttggagtggacttactaaaaagtttatagattattcatattcagaaaataaat

SEQ ID NO: 108368 - DNA, 1155 bp, Homo sapiens
attttatggtgaatcatctaaaccagttttggaactaagtcctgttggagctatataattttaaactaattcaagtttccattatactaggaatacctagaactaacatgattgctcttgtccttcccaatggatgatggtaatactgataaggactcttggtaaccccgaagacggggtgaatccatatccctttattatacacgtaagctttagttttgtaagtatggtcaaaattatcagattccatgttacgttaatatccttgctaggaagtaaactgtataaggtaaattgttggttagaaaacatttacttttctctttcagttgaggctaagacgtctgaagccaggccctttaatgattctactcatgctgagcccttgaatgattctactcacatttctttgcaagaagaaaaccagtcttctgtcagtcattgtgtccctgatgtttctacaattactgaagaaggcttatttagccaaaagagtttccttgttttgggttttagtaatgaaaatgaatctaacatcgcaaacatcataaaagaaaatgctgggaaaatcatgtcccttctgagcagaactgttgcggattatgctgtggttcctctgctggggtgtgaagtggaagccactgtgggagaagttgttacaaatacatggctggtaagacaacactagtggttgaaataaagtatcgaaggatatctgaatgccaagaaggttaatgtttatttcttagacagttcagttacagtaaatcaatgcttggacttgaacactcttgattttgcttttagcaagggaaattcaaaattaaatgtgcaagcttcttggcctaatcccgatacagtagagattactgtttcccagggccacagcagcaacattccttcttaggaggtcactctagggtcatctcatactatttgtcttgttttctcataaccaaagcatcactggtaatttcactgttgatttttttttttttaacattccaagaattatgagaaaaatagtataaactaatacattagaaggaatgaaatttaaagcaacattcagtaactctaataatagatcttaccgattttaatagcctaatgtaattagtcgatgtatgtatatgtgtgtatgtatatatatac

SEQ ID NO: 108369 - DNA, 2680 bp, Homo sapiens
ggcaaattaccttttttttttttaaacttgccaacttacaaaaggtgggttttttgtttttgttttgagacggagacttgctctgtcgcccaggctggagtgcagtggcgtgatctcagctcactgcaacatcttcctcttaggttcaagcgattctcctgcctcagcctcctaagtagttgggattacaggtgcatgctaatttttctatttttagtagaggtgagggtttcaccatattggccaggctggtcttgaacttctgacctcaagcagtctgcccaccttggcctcccagagtgttgggattacaggcatgagccaccacacctggctcagaggtgttttgtatgatgttttatcctagactactaattctagatatagcttttaattatttcttacatatagaaagtatatgattccaaatatttgttaaaatatattctagtaatgggggtgatttaatttggggtataaatgcagtttggagtagatttgtcatacttaaatttttttaagggcaccttatgtaaaatagaggtaaaatgattttatattgattaaattggtttaaatatatatatactgatagctaaaaataaattactgcatacatgttatcctcaaagcattgtgttcagttctttgacttatatatattttttgttcagtcaactctgtgagtaaggtaacatcaatttataggtaagaaaattgatttaaagagcgtaagcaacttgcctattgtcgttaatcataggcagctggaaaaaacaacccctccccccgccccccacacacacacaatttaagcccaggtgttcagaattcagacagttaactacagtttacttttataattactttaaaatttacaagtaagcttcacagttaaagaagttacctgcattttaggaattggtatgcactaatatttagaagatgttggactctggcttctattttctttatagccacaaaatacttatcaagtatctactgtgaaagataatgctgtatgagattgtaaagagtgattaaaaactcaaagttgcagaactgttaaaaaatcaaaagtttcagaatgtatttattcatatatcttaaatgtacacaagttgtcttatttatacacagtggatttagatatatatttttagtttttttctattgagagaaagcatgttatgtatattaaatattttctttcttgcagatatatctttgcggttttagtggcagaaagctagataaactgagaagacttattaacagtggaggtggagttcgttttaaccagctaaatgaagatgtaactcatgttattgtgggagattatgatgatgaattgaagcagttttggaataaatcagcccacaggtttttttcgtttttaattcaaagcaatttctactacataatttttcttaaaattgcatatccacgcagttctggaaactgcatgacaagtgggatgatggtctttatagcttgcactaatacataactatgtgctatttttgtaggcctcatgtagtgggagcaaagtggttgctagagtgtttcagtaaaggttatatgctttctgaagaaccatatatccatgctaattaccagccagtggaaattccagtttcacataagcctgaaagtaaagcagctcttttaaaaaagaagaacagcagcttctctaagaaagactttgctcctagtgaaaagcatgagcaagctgatgaagatctgctctctcaatatgaaaatggtagctccacagtaggtaagaaatgcttgattagtatttgtagttagtaagaaatattttagtagcctaatacgtacatatgtgatttctgccaagttttctagattttaagttaaattaacctttttctttccttaaaattttcctcataactttttttctgagcaggcaagacaagagggtcctgaaccctttaaccctctctcctgtctccagctaactagctctattttgatttgttatatatacaggcattgcttggtttgtgtgtgagtttgtaatatcatgagccttttattaaaaccttgtaacaaatacctcttactggattattgtggtctttaatgcatgaaactgtactgtggactaccacctcagtatgtactcttatcatgtagtaaggtaaattgccagtgaagcattataaacatcattacttcttttttattaaaaaaaagcctttataaaatacctaatatagccaaaaatatatacatttaagtaaatttaatgtgtatcataacttaaaatctgaagttaatcagaattttaatctacctcgaataaaacaagaaccttagaaaactttttttttttttgaagcaggatttcgctcttgttgcgcaggctggagtgtagtggcatgatctcagctcactgcaacctctgcctcccaggttcaagtgattctttctgcctcagcctcccaagtagctgggattacaggcatgcgccaccacccctggctaattttgtatttttagtagagatggggtttctcagtgttggccaggctggtcttgaactcccgacctcaggtgatccacccgccttggcctcccaaagtgctgggattacgggcgtgagccactgagcccagcctaaaatactttaatgatcacaactagccctgct

SEQ ID NO: 108370 - DNA, 1029 bp, Homo sapiens
ggtaactttaattttgttgataggtttttgaaataacctgttatagccgggcgcggttgctcacgcttgtaatcccagcattttgggaggccaaggcaggcgaatcacctgaggtcaggagtttgagaccagcctagccaacatggtgaaaccccgtgtctactaaaaatacaaaaaaattagccagacatggtggcacacgtctgtaatcctagctattcaggaggctgaggcaggagaatcgcttgatcaggagggaggtggaggttgcagtgagccaagatctcaccactgtactccagcctgggcaacagagtgagactccatctcaaaaaaaaaaaaaaaatattaacctgttataatttgaatatttctgcaaagatagattgtaatggttttcatttcttggtttctcctattttctctatttctttcttaatgaacgccacaggtcagaagtatgagtgtgccaagagatggaatgtacactgtgtgaccacacagtggttttttgacagtattgagaaaggtttttgtcaggatgaatccatatacaagacagaacctagaccagaagcaaagactatgcccaattcttcaactcctaccagccagatcaacacaattgatagtgagtctcattgagattaaaataattattctgaagacagtcatatttctatgtaataatcagtatgttaataggatcactgagatagggaatttctttttcttgtttgctgtgcttctaggcataattgtataatagtcaaattgtataaaaagttagcactgaactgttcgtaattttcttttagaatgaatgaatgctgtcttttatactctgttgtaatgcaaaagatgatcaaagaaattaagaacaatggtagctgggggcttaagataaaagtattaatcttttaaacattacatgcatatattaatctttccttaatttacagttttgctgcagttatagatcatctgtatttgtataaaaattaaaaccatttctattttgtaggtgtc

SEQ ID NO: 108371 - DNA, 2148 bp, Homo sapiens
atgtgatcatttaataaatgctaattgagcccattttacgtatctgacttgaggtaggcattaggtatatgtagtaagcaaaacaagatagtcacttccctcatggagcttagagcctatttcaaggggcacacttcagtttcccctgcaactagataaacaaccacaagaccaaacaccacagaattgtattggcatacgaattatatcggcacttttctgggcttgttttcaacaccatccagcatatcccaaatatgtctccatgtcagcaactctcattcccaatgtgattacttcatcagcacacctccctagcatggcaacagaataatgatatttttgttggtattttgccaaaaatcattgcttttacttgtatagaataatggaaagattaaaaagttcatttatctaataggcaaccaaattacctttgggtttttaagtagagattcagacttatcattttggaaaatatactatgaccagcaagggctagagttaaggaaatatatatttttcccttaaaatggttttgagagactgtatctgaaacaattactttgttttagagacatgttattgaactaggtgaacaattagtgtaattctgttttggtggttctcctttgtaaaaaaaagattataaatcctaaaaaatgagggaagcaatagtgatatttgtgttgtttttcattattcttctggtaaatttaatatgttcttttttaaccatttgattcccacagaaaaataactagatatactgatataaacatggaagatttcaagtgtcctatttttcttggttgcataatctgtgtgactggcttatgtggcttagacaggaaagaagttcagcaactcacagttaagcatggaggtcaatacatgggacaattgaaaatgaatgaatgtacacacctcattgtgcaagaaccaaaaggtaaaactgtgtttcacaaagggacaaatgaaacattttctctagtatttaatattttatttttatttatttatttatttattttgagacagagtcttgctctattgcccaggctggagggcagtggcacaatctcagctcactgcaacctctgcctcccttgatcaagcgattctcccaactcagcttcccgagtagcgggattacaggcacctgccaccacgcctgaataactttttatttttagtagagacgggctttcaccatgttggccagactggtctctaactgacctcaattgatcttcccacctcaacctcccaaagtcctgggattacaggcatgagccaccgtgcccagccactaatatttaatattttaaaatctttacagaacagcttttacttctgacatgtcattaatctagtttgatactgttttctctaacatcttgcaaagatgttttctctaacatcttgcaaagttttaactggaagacacaccttgcggcacatgaggcagtaaaaaatgaaaaagacattacgaacaagaaaaattctttaaaattgctattaagtttggtgttacataacattattctggataattttttatcagcactcttaaaatatacacaaattgataaaagatgagttttgttaatgtttttattattgccctttatatgtatactgtgttttactaagctatctagattgagaagaaattacgattaaatggtaattgtccttaagtcagaactttgagtatggctgattgtgataggatcactgtgagtagagttgatactgctgttctttttctgaatctgaagacagttcattgttgattctctcaagaatgccaaaaaacctttcatgtgacatattgacctcaattcctctgtgatactgcttcaaaatacattgtgttgaagatttttaaggtaataaaagatacatattttcaatataatttatcttttggcttatctatcctggactttaagtagaagcctgttgacattggaatagtctgttcaaagttgggatttattatatagcacaaatttacaattttcacattgtacaagctggtttaaagaaattaagtgatggagcctatatgcaaacccaagtccaatattaattaagttaccccacagttgcttctgtcttcctgcagtttgtataaaagat

SEQ ID NO: 108372 - DNA, 1049 bp, Homo sapiens
catatgtttatattcaaccttacatatgccatcttttggaaggaatgcaactgccaaaatgactaatttattatctatcttaacatatgggaatggtgttgaaggataatgcaacataaaagctacagaattgccaaactcgttttctcaattatttcagaaatatttacagctgagaactttatcaccaaagcatttcctactctgtagctaatgctaaacccttggcccattctatgcctgtcaacttatatcttggtaataagagcttgtagattctgctcttccgttttcgctggagaaaagagtaatgacactatttttttccctgaatagtaagtccaaagagtatatcacatgccaaaaatgattgaatgcatcattttttcaaatctagaaaatataaaaatgtctttcttacttctcttgtgacttctcccaaagtgtttttatccaagagggaagcaaaataggtttcttcaggtttgcagcaactaaatattttttgctaccaacttctcctgcaataaggtgagttactgatacattaaggtctctgtatactcgtccgcccatcatttgtacatatttatgaacttcttcctgcagccccaaaagagaacacattaatgctgaagcaaacaatattgcttccacttttatacactatctcataaatacattttgctgttgacagtttgaatacataagtgttacataacattataaagttaaataattaaccaaattattttttgggagataagtatgaattatatttttaaaatattattttcctatatttatccctttcaactccatgaatgtattaaactattatacaaaggatgtataaatcttaatctttgcttctatataaatatacatgtgtatttttaacaacataaattatatctatataatatataaatatttatttttagccaggcttggtggtgcatgcctgtaattccagctactcgggaggctgaggcatgaagattacttgagcccaggaaatcaaggttgcagtgagttgtgattgtgcc

SEQ ID NO: 108373 - DNA, 2301 bp, Homo sapiens
ggtcttgaactcctgcactcaagtgatcctcccacctcagcctcccaaaatattgggcttatagatgtaagcagtaaggcagttttcagtgaaaggggcttttgaagtttatttcttttcttttctttttttttttcttttgttatagggtctcactctgtcgcccaggctggagtgcagtgacgtgatctcagctcactgcaacctccgcctcctgggttcaagcaattctcttgcctcagcctccctagagactgggactgcaggtgcccgccactgcacccgactaatttttgtatttttagtagagacggggtttcaccatgttggccaggctggtctcgaactcctgacctcaggtgatccacccccgctcggcctcctctgaagtgctggcattacaggcgtgagccactgtgcctggcctgaagtttatttcttttgatagcttgcattgtttgatttgcttttgtgtgtgagtgtttaatgtatagtatctctgagaaattatatagtcatctttatttttttcttgtaatgatttgctgatttctctacagtggtcatcaactttggtaaagaattggtgaatgttacaaaatgtaattttgtaagactggtggtcttttccttcttaactcatttaaacttttctcttttttgtagcttggctgcagaattgttggtcctcaagtagtcatattttgtatgcaccaccagcgatgtgtcccaagagccgaacatccagtttataatatggttatgtctgatgtaaccatatcttgtacaagtctggaaaaagaaaaaagggtagatattgatctcatgatgattgatcaatttatatatctatctcttattcttaatttttcactgcatagaagatagcttaaaagactttccgcttattgttcgtgacttttaacaaagttcagtatacaaccacagtgtgtatatatgtatacatgtacattttttaagtaaattgaatatagtagaatttgttttgttgaaaactggctaattgaaattttttgttttaatttaaaaggacactcattttttaatcacttacatttttccactataggtggacagtctttaaaaaaaaggattctaaatcgtttgaatcagggaggtggaggttgcagtgagccaacatcacgccactgcactgcagcctgggtgacagagcaagatttcgttttggaaaaaaaaaaaaaaaagcattctaagagagagctatagaaatacatatatatatttgggacagggtcttactgtcacccacgctggagtgcagtggcacaatcacaactcactgcaaccttgatttcctgggctcaagtaatcttcatgcctcagcctcccgagtagctggaattacaggcatgcaccaccaagcctggctaaaaataaatatttatatattatatagatataatttatgttgttaaaaatacacatgtatatttatatagaagcaaagattaagatttatacatcctttgtataatagtttaatacattcatggagttgaaagggataaatataggaaaataatattttaaaaatataattcatacttatctcccaaaaaataatttggttaattatttaactttataatgttatgtaacacttatgtattcaaactgtcaacagcaaaatgtatttatgagatagtgtataaaagtggaagcaatattgtttgcttcagcattaatgtgttctcttttggggctgcaggaagaagttcataaatatgtacaaatgatgggcggacgagtatacagagaccttaatgtatcagtaactcaccttattgcaggagaagttggtagcaaaaaatatttagttgctgcaaacctgaagaaacctattttgcttccctcttggataaaaacactttgggagaagtcacaagagaagtaagaaagacatttttatattttctagatttgaaaaaatgatgcattcaatcatttttggcatgtgatatactctttggacttactattcagggaaaaaaatagtgtcattactcttttctccagcgaaaacggaagagcagaatctacaagctcttattaccaagatataagttgacaggcatagaatgggccaagggtttagcattagctacagagtaggaaatgctttggtgataaagttctcagctgtaaatatttctgaaataattgagaaaacgagtttggcaattctgtagcttttatgttgcattatccttcaacaccattcccatatgttaagatagataataaattagtcattttggc

SEQ ID NO: 108374 - DNA, 1043 bp, Homo sapiens
ggaaagtgcctgtagtctctatccaagtttagtgtactgttgtgtagtgagtgagggatgggggaagagtactaaggaatgcgttagagaataatggtaaagaggtcatgtagggccttgtgggccatttttctctcagtggagagccattggagggttgataatcagaagagtaaacatgatctgacttacagttttaaagggattactgtatttaacataaggacctcaaaattggttcagaacatttctgagtgcttactgggtgtcaggatatagtagcaaacaagatacatagaaacttccaggggagagagacaaaaactatatatatatatataaatacgtatttttaaatagaatagactagaagggtagaggaagggtatttgagaaagcctgattaggatgggcatctctggggaggtgacatttaagcagacctgattgaagtgggggattaagtcaggtgaaaacctggaaaaaaagtattctgtgctgcaagatcaagagcagagcctctaaatgaggttatggttggcttgttccagggttggcaagaaagcgggagtggctggaatagaataagcaagagagatgagaagtaggaggtaaaggtggaaagataggcaggaaaccagactgtgttgtcttgaaggctgtagtaagaaatgtggattttattctgggtgtggtgtgaagacattaggttttgagcagatagtgacatgatctgacttgtgtttttgaaaagattattagctgctgtgtagagaacagatttagggcaaggaagggaaaaagagaccacttgggagccttctgcagaggtctaagtgagatgtgatggtggctttcaatagggaaaaggctggatttgagatggaatttgaataggacctaaatacaggagagtaatttcaggtacattcttattttattttttctttcagtccataaaagaattccaatcagaagaatatcttcagattattacagaagaagaggcattgaagataaaggagaatgatagatcactttat

SEQ ID NO: 108375 - DNA, 1020 bp, Homo sapiens
ctggccctggagccggcgggtgggcctttgacgccgagaggacgtggcttccgtgatcccagagccaggccttttcctggagatgggaaccggagcatctagccttatgcagggccaagaccatgctaactggcttccatgtttatatttaaaatctgtttactgagggatgaacgtacctcgcaggccgtgggtatccgcagggacagatacactctgtgtatccttaaaacaagtgcaattgaatgtccattggcctaaagggcttagagccttcatagcagggccttcctcagtgtattcaattcgggttaattttgctgtctgatttgcaaggattggtgttgtcatcttttaccttggctttgtccaagttccaggatttcttagaaatgccgttgacgaattcacgggcagagccagaatgtctgtctttaggcattcttgtctgcacagaaaaataggtaggttaaacatgcaactttttatctaatgtggttttgttcttgttaatggttcctttattttgacagttcagaaatgtccagaaatgacaaagaaccgttttttgtgaagtttttaaagtcttcagacaattccaaatgtttttttaaagctctcgaggtaagagttgaaaacatcttaataccgtgaattcattttcttgtttttaagtgtttttgatttgttgggctttatgtcttagaagtagatatttcactttcataataattttatagtctacattaatacagatatatcattatcacatatttttgaattgatctaagtacatcattatgtatttcggggggctggaagtctattatcacattgctgtttaatatggctgacctacagttcttggaaattaagttgctttcatttgtctcctagccagagtggtcctttgcgtgctgtagaaatttgagtcagttgtgtactggtcatacttgaaaattttttggttaattgttaaaaattatgttttattatgtacagtataataattggatgata

SEQ ID NO: 108376 - DNA, 1038 bp, Homo sapiens
tggctaggctggtctcgaactcctaacctcaggtgatccacttgcctaggcttcccaaagtgctggaagtacaaggtatgagccactatacctggcctgctttgtaatttgatcaataagaaatcttcatagagaactggcaagggcttctggaaaaatcattttgattaaagacatttaaaacaaaaaaggagtaaaactatgtgtttaagtgtctaaataaaagatggttgggctcactttaaggatttacataaaaagaaaataaattatagatctagtaagaaggcagctataatatttcaagggacctgttgatgtaaagatgagggcttacagaagcacaaagtcaaaaaggaacataacctgaagtaacagtgtaatgataagaaataaacccggaatgtctgcactgaaatcccagctccatgacttactggctatgtggcccagggaagtgacttaacctttctgtgcctcatatttctcacttgtaaaatggagctgagagagaaagagagatgagctgcccatgtgttggagtagacaattataccagagatgagcaaaaatggaaataataatcaagcttttgatcattcagtacatagtatcaccaagaagctaaacccagagaaagtgcccaatccctcagcaaaagggtcatgcagttttatggacccaggacaggaaggaagagcattgagtactgagtcagagtgaagacgaatgttttcaaggttcccatcttcccccagaaaaaaaatctccacagaagcacctgaggaagacctcaaaggaagtctcaaaataaagagggctctgagcaaaggtcatgggctaggaatgaaaacaggtgtaagaagagcgtggccagcccaagagagctgtgtccttgacagcagagtcccctccagagactgcattgcactggctgtgctctgagtctggggtggcgagggcggctttctcccacggagcctgccaggttaagccttcgtaattgcctacggtaaagtcacgtaggatttttggcca

SEQ ID NO: 108377 - DNA, 1075 bp, Homo sapiens
acccacccagtctacaccccaccctctctcctgaagcagcggcagcagctgggcgttaagggggatgccgggcaacccccggagttaacgtcctggtccttggggcgcagattgctcttcgtcatctgccctgttacgcttgagcgcgctgttcctcgccttccgctgttctcactgcaaagactcagggtcttgacaccaactttcagcctcccgtgtttgcgtgcgggcgctgggataccaaggtagtgagatagcacctgagtcccagtcagagtaaggactgcaaagaaaagttgacagttgacagtgcctggctctcagtggatccctaacaacagcaatagtaaccattatgataaaagtcagttccaggtgaatgaggtgtttcgtcacagacttctgtgaatttccccaccccagccatgcacatatactgattcccaaggcgtaatttttgttgtttttctctgtctattccacagtcttctggaagttaatccggagcagaaggagcagtcagagagctgttcttcttgttggcctttgtgattccgggaaaacgttgctctttgtcagggtaaatgatttcattgacacccctgttaagcttaatagaaaattttatagatcccagtattcctgtcatctcacggtttattttgtaaaagaagctgatgctgttaaatttggaagttaattcttgacttacttgggagaacaaaaagactcgtagaaacccataattgagaaatattggtcatttctccttttttttttctgtttgcccttgccagatgctgatatttagtctttatcacattcaaggattttatttaattagtttcattccagaatagcagaaggcatagaagctagtgtcctacagtttataattccttcgttaacaaattcttaggacagtttatcgaagacactttttcacagggtgatccttctttgacatagtgggctagttaggcttctttttactaatatttatttttaatacatttagtatttttaacagtgtattttaatgtggtgaataggagaggttttctgctttttaact

SEQ ID NO: 108378 - DNA, 1080 bp, Homo sapiens
cctgtaccctcaaaacatttatcagtgttctcattttatatttatgtgtaattttacattatgttcacctttctcataaattttgccagatcaggaaccgtgtctttggccactgttacatccccagaacgttgactagtgttttatgagtagaagatgctttgtgaacatttgtttggttaattaggtaccagtttggtagccaatatatgatactaaaggtttatattgtgaacgtggaactgtattgaaacgttaatgttattgctgccatccccagggcaatagtctgaccttgattgaccttcccggccatgagagtttgaggcttcagttcttagagcggtttaagtcttcagccaggtaagaaggaaagaagtgaagtgggcttgtctaggtctgtatctgtatatcaaagccactcatgtgatttgctctggtggtgtttgggaggcagcatggtatcctgtggtagaccttgaggtgaccttggggtcagccagttctgggttgcaagtccaccttcacctggatgatgaggattttatgggattaaaatgcttaaaaagtgttttttagtgtttaggaaatgttaacccttcttgtcattgttactaaatgtttgcatttattctgaaggtgaatttaataatgtatatgactattaaaatctgaaaaaagaattttaaagctgggatgaatcctagcagtttttaaatgccaacatcatttatatatatagtgtttttttgttttttttttttgagatggagtctcactctgttgtcctggctggagtgcagtggtgtgatctcggctcactgcaacctccacctcctgggttcaagtgattctcctgcctcagcctcctgagtagctgggattacaggcacgcaccaccacaccctgctaatttttcataattttagtagagatggggtttcaccatgttggccaggcttgtctcgaactcctgacctcatgatccgctggcctcagcctcccaaagtgctggaattacaggcgtgagccactgcacctggcccatatatattctcaaattacgtaaaattgatgttt

SEQ ID NO: 108379 - DNA, 1064 bp, Homo sapiens
tctttctctttattcctgttacacatgtgcatagttttgtcttggcatttatcatatggttctctatatgatgatttgtcttggaggacaggcatcatttcttactgtcttttttcagcttcagtcattgatacacagtagcactcaatagttccttgttaaatgaggatttatgttatatgataacatatgcacagacctgcatgtgtgtctgctgagtgttaatcaccaagattgactttgaagaagttcaggatagtttttcaagataatgatgtcctgttacacgttcacatgccagtttttcttgttttctccctccagggctattgtgtttgttgtggatagtgcagcattccagcgagaggtgaaagatgtggctgagtttctgtatcaagtcctcattgacagtatgggtctgaagaatacaccatcattcttaatagcctgcaataagcaaggtgccatcatgttttcttgcaataataattgagttttttggggattgctgctactaagaattatttccattatttacagttgttattattgaggatgagatacaattgctgtaaagaactataaattgaaggatttttaatcttaaaatttatttctactcctaccttttcaccagtcttctaaccagaagaccaaggaatgataaccaagtgactgctaactgatttttctttgatacagtgttttttctgattataaattattttactttaccaagttaagttcatcagattgacaatatgtgatatcagatgcacagttttgcagggtggagtttctgctttcaaacaagtttactgtacagcacattttatcaagggaagtttgctgaagttgttttcttttaacctgataaccattgaaaacttttctagtaatccccaataaaactgggcttcagttccgttacctgtacaataagacagactagtggatctcttcaggtctcttccagatctgaaattctgattctatgaagagttcaaggcatttctcagaagtgaccagataatattgataatgccttattgggaatgcaatta

SEQ ID NO: 108380 - DNA, 1905 bp, Homo sapiens
gaaaggcaaagagtttgaattctcacagttgcccctcaaagtggagttcctggagtgcagtgccaagggtggaagaggggacgtgggctctgctgacatccaggacttggagaaatggctggctaaaattgcctgagaggcagctctaaagcacaagacctggatgtgtgacacacagttttggaaaaaggtctgtggtagtctggagttgatgaggaaggggtacaagatgtggttagaaacatttctttgttctggaaacaaagtactgttgaaaccagcttggaattttttttttttttttttttaagttcagttctcccttatggctgcctttcaaacaagtaccttttatctgatgcctgtatcttccctttgttaaggtgtaacttgatgtagggtcaaggtttttgtgacaacaggcagactccacacagagaggatatgatgagaatatggccatcacctgaaaagttttcttatcttctgtgcttttggtccctggaaacaaatccgcctatgtatgaagctagttgatttccagttgcactatttccagttgcctctgaagttcacaggcaatacattgtctagtcctttgcgaatttctctgatttgtgggcacagttatgaagtttccccacatgtgaagacaggtacaaaatagcagagccaagcagacagtgggtctattcttcattagctcagtgacttgtccacactcgtcttagcacttacgtttcaaaagcttgtcacaaacccttggagtcattcccagataatagaactggaaatgataaatcccctaatgccaagggtctagtgtgttcttagtggttatactgggaagtgtgtggagatttaggtgctgctctgctgctctggatggctgaaggctcctgggccatcttcatgtgctgcttgaagagctcctattttgtactcctggctagaatgctgtggaacaaatacaaagtgaaaaaagttctctgtagatttctgaagtgcatattcattgatgccaagaaaaaaaaaaagttgcctttttgaagtgatgttttttgctgtcttcttaaacacaaggcttttttgaatgattagtatatttcatggtaaagaaaacagcctgtctggctcaaagcaattaaatagaatgtaatggtgagtacaaatgagtgcacatgtcaggactcaggtctaactccttgtctcctgagcctaaagattgcaacatacacaagaacacactcctattcctaccccacacactcagggacaagcccaactaaagcttacaaggagaccagggtggctctgtccaggggagaagccagttatggaacagtgcattgagagccatggtaggagaggcccacagttctctggagcatgcagcaggggcaccccacctggccttgaggatcagggggagtcaaaggataaagcatggggctgatgacgtctgagggagtgtgatcctccatgtatggcctctgcctgctgtctcacatgtcccttctggtggtcacttgggctctaggagtatacgtcacctcagaccatctggcagaaatactccaggctcctaccccaaagcacatgtcagccttgctgctggagcacgaagacaatgtaaatgaaacatgaaatggaggagttgtgagaccctgaccctgagtccttacttgaaagctgctgctggtgttctgagtgtcttttggactcttatttcttgcccttttccttattaggcaagcagtaacttaggaagtaggtaagagcaataaatgtgacatgttatgtcatcatagtaggagctcatgggaataaaagtcagtggcttgatgcttctgttagaggcatgtgtccctctcagcctcttttatttttttctggttaatatct

SEQ ID NO: 108381 - DNA, 1040 bp, Homo sapiens
gccccatcatggagccctctctgctaagtagctttgtggccctgggggagacacttttagcattagtgttctcacagggaaaatgcgactgataataccacccagagtggcactgcctggcttgaatctcttcataagcacaggctctgcagtagtgactactgggaaaggcaggtatggggcagccctaccccagggcctgctttgaagctgagaagacacaaaggaaggagtgggggaagcggatagtgtcctactgttccctggtgcctgctttgtgctagcgagactgtggttggtgcccgggagggacccttgggatcagagcctgtcttcaggactgaccaagggcccagtgggctccctctgccctgctgggtgggtccctcctcatatctgccagggtctgcttctctgctgagctgatttccccccttcccctcatctctaggcagataaccatcgaggagggggagcagcgcgccaaagaactgagcgtcatgttcattgagaccagtgcgaagactggctacaacgtgaagcaggtgaggacacacctggcacggggcccggcacggggcccggcacggtgtagccctgtggtcagctgcaggctcagagctgccttgccctgaagggctggtgatgggattggggcagccaaccagaacacccatagatgcgcccagggaggggagagctaatttccggagctggtaaagcccaaaagagggagggaccactccgggcatggcatctggagaacataagtcaccagccaccgtagtagttgccagtcacggcccacgtagcaggccctaagagtgtccagccaccagcttccaggaggctgagggaagcagtggttccctagcccctcaccccactttggatgacaggtgcaggaaaattcaatctgatcagcatttggggttcatgccttgcgcttagcaagtgctcagggctgtggagggcaactcaggcctgggggaaagagcctaccatgatgtggttggaactcacaggagggcgaggcagtg

SEQ ID NO: 108382 - DNA, 1041 bp, Homo sapiens
catggaccctggccactgaattgattgatccaggctttctgtctcctggcctgtggttagaagggcgcagagcagttctccagtgcccagctaagtcttggtccttcatgaagcctgagttgatgccaagtacagttatactctagttccttaggaaaatttcatgctgaccagaatgtttaattagtcagaacaagccattttctgaatgtgctaggaatctaagaaacatggatgtgtgcgtgtaattaaaataattttttctgtaactttttattttgacacagttttaggattatacaaagactttacatatgcctttcacccagattccctgaattttaacttgttactgctttcatagaattcataacaattctgtgagataggcatttttgtccttattggatgtatgaagaaagctgagcctcagagagaataggaactaacccaagatcacacaagaaatgagtggcagagccaggattaaaacccaggtcggtcagactttagtgcacatgctgaccccatgtgatgtaagtgtgaatgtgtgggtatcctgctccttctgcccacagagctttctttcttgtattgttgatctgctagcagtgaattgtctcaacatatgcctttatttcaccttcatttttgaaagatttttgctaggtatagaattctgtgttgacaatatttttcttatagtattgcaaaggtggcacttcattttcttccggtttgcatagcgtctgacagggtagcagatatttctctatgttttcttaggtctgtgatctaatatattgttgctaattttgtttaaatagtcaattatcttttaaagagactcaaataatagaaagatcttacatacacatgtagtgaccatttcctgtgttcatcattccattgtataaatccgcatttccatctggtttcatttcacttcttcctgaaggactttctttaacatttcttgatgtgagagtgtgctggtgatgaattctgtcagcttttgtatgtttgaaaaagtctttatct

SEQ ID NO: 108383 - DNA, 1115 bp, Homo sapiens
gtgagcccctcatcctctggttactgggatatgtggggccccctgtcctttgggcactgggtatgtgagtcctccattctctgtcattaggtgtgtttgtgtcctgtcctctgggcactgggtgtgtgagcacccccgtcctctggtcattagttatatgaggccccctagccctgttatgcagcttcctgtccctccctgtctcactggacttctcttccagtggacacttgatcacttcctttgctttcttggatattttcccctatgcctgtctgctgggttccatcaccccagcaagctccggagtccccaaggacttgagagagagcagcattgtagaagggagtgcccctttccatgccttggagaacagagacccatcttaagctggctgcacaaaaagctaaggctgaaagccaaggggccagagtagaggcagacactgccgttttgaaccctcccctaacccagagaaggcagcctgttcaggtcaattggtgcacccccctgctcacgggtcagctcatgatctgctttaagttttgaaaccccaccctctaaaggcctgatgacttttgctccctgcccttcctgttcttctgcataggcagtgcccactggacgttactgagcaccaccttggtattcctttgccagtgtagctggtgcatggagtaatcctaattttgcagcatcaatgattacagcatttttcagtcaccacccttggcctctttgagcagtgccaggttgtgagttcagggtgggtaaggagagctgccccctcatcttggtgctcagcagaggtggctcttctgcctgaagcagctggcccagagaaaaactggtttggaaggctgggccacaaacaacacagcccagctttgacctcttccagcctcctctggtccctctgtttcccccaaccctggggcaggcaggaggaggaccattttggctcaggattggagagctgcaactttggcctgtgcaccagggacaagtccctagagataaggaaaacctttctctctgggagtggctgtgctaattctgagaaaggaagagaaaatgttcttttctgaccctgtctgtgagtggggggaataaac

SEQ ID NO: 108384 - DNA, 1079 bp, Homo sapiens
caaagctgctgcggtgaggatgtgggagactgcagagactgcatcaaggccccttctggtcagggtgggatcatggtgtagagaggttgtttcccacaaacatacagtcagatgggactgagtaaagcctccggtggtgcaattaaggggaagccagattacacaaagggatgatgggggtgtccgtggactggttatatgtgtccaacagaaagggatctggaggtcagagtggatctcacctgcatacttactcagctgggatctccactcctgcttctgctctttccgcaccgcaataaatacaggctgaattgattttgtagttgtatatggataagcaacagaaattttgagatagcttaaaataatctccaaatctcctcatttttggccagacctggatggaaatgttgtgcgcagttttggttccaccattttggagaaatttcatcaggaattttggaacctttggtatttataaattaggaattgagatgaaagggtagggactaggattagatggtgtaaagaaaggggcctctgcaggaaccagggtggggcaacctcacttcattttcaccaagaagggcaggagggacgggtgtccagaacagattcctgacagtgagggtacagctgaatgagactgatccgtttagacccaccctggttccctaaaataaatgtttatggcagcaatttatttggagatctatataaataagatgatttctcatgtgttgatgatttaaccacacgtacctgagggctgggctcaggccaattggcctcctaaaggagttaagtactcatactggctaagagtttttcttgactctaaaaatgagattctgttagtcatcacctcctttgatccatactaattgcaagaccagagtttggaggacttccatttaactccacttatcagcctgaaaccaggtacgaggttggatagcttaaggtaaatcttgaatctcaaattccatcagttaaagtcacttgcacctttccctcctggggcaataactgggagctctgctatttgaagggatatttcctcccaatgagagtgc

SEQ ID NO: 108385 - DNA, 1008 bp, Homo sapiens
aggacctctgagaaaggagtctagctggcatccaggttcccaactaaaactattactatggaagacgaagataatggatttgaggggccagctaattgtctgctacaaaagagaaggctggctgtggggttaatgcaggattggagtttttctggacaggtgtgaggatagtggggcaagagagttttagggtgttggtgagatgtagttcaggtggatagccatgagctccggctgggcgtggtagttaggtcaggagattgaggacctggaaccctgcagagtagatgtgggactaagggagaaagtggttggaatgggattagtcatttgtggctagagtaggatctgggttgaagtccagaggtggcagagttctgagagatgaaacacctggagtgaagccatggtttgggaaaccaaccatggtgagctggaggtttccagagttgaagcaggcacagagcatgtttggtgttcctgcacagcagtcacactgcctacacacatactctattctcatcatatacttgtaccacactccacttcgtgtccatctgggtatctcctcctcacctacaaaacccacctcccacaaagctgttcttgatccctaggctcttaaagtctccactctgtttctctggctatcagctggcatctttctctgcttctttgtagtttgtaacttaagcttacatatggccagttgtattagggttctctagagggacagaactaataggagatatatatatatccttttatatacatatatatatacatatatatatgtatataaaaaggggagtttgttaagtattaactcacatgatcacaaggtcccagtaggccgtctgcaagctgagaagcaaggaaagccagtccgagtcccaaaactgaagaacttggagtccagtgttcgagggcaggaagcatccagcaggggaggaagatgtaggatgggaggctaggcccatctagtctagtcttttcacgttttttttt

SEQ ID NO: 108386 - DNA, 2826 bp, Homo sapiens
gtgtcatccattgccagtctcctcctgttttgctgctctgccgtctttagcatgctgtggttcttagggaccccaagggcctagagcttgttccagataggaagatgagcaagggcaaaaagcaagaggcatgagttactgagtcctttttgtgaggaaactactaacttcctgtagtatgcttccaccaacaacttaatatcctgaacgcacatgagcactccatgcgctacaggtgggtaatgccaggaaattagattttgttattttttgaaaacagctttattgagatataattctagtatcacccatttaaagcgtgtaattctcagtgatttttagtgtagtcacagagttgtataatcatcgccacaatctaattcatttttattaccctaaaaagaaaccccatacccattagcagtcactcccaattccaccctcaccctcagctctaggcaaccacgaatctactttttgtctgtatagatttgcctgttctggaccattcatataaacggaatcacacaacatgtggtcttttgtgtttggcttcttacatttaacataggattttcaaaattccttcatgtatcatgtatcagtacttcattcttttttattactgacagatattccattgtatggatataaaccattcatcagttaatgcatattggaggaaattgagttttgagttgatcacgttcttgttgtatacaaaattgggcttctattggtaaggaaggcgatggctcttgaggaacggctagcagtgtctgccgctttgcagaaatgtgctggtatttggcttcctttagcaatatatttaatgcttcaaaagttctgtcaaagtacagtgattgtgaagagtcttagtgactgtagggagtgtccagtcagcttggtgtttaagttggtgagtcctgccattatttgagatgaaagcctggtaggaattactacctcacctttagcttctaagtctttgaccagaaaactctactgctgtattccattgtgaatgctgttactttggcctctggcccactgttttccacctgttcataattctgccaccaccttatagatttgagcttgcaaagttatattttcttcaatatttggcgtacagtatctaccaccaggtacctttttgctagcttcatgatctgactatttagggcctttagacgtaagccagagactggctgtgtgtgtccattgaaagtcttattaaaagagcttaaaaaatatttaatgatctattacatagatttattgtactatatttcatatgcctttatttagacaatacttgcattcctactaggttttttgactttttaattgatactatttggtcatagcattacttaataggcatctgaagaacactttagacattgcctaatttagagaacaggataccgtcctggagactctatgacgaattggttgtgggccctcattctagaaaaacactggaattaatatcctgaaaaaagttcctctagcccaatgtggttcaagccagaataggtttgacttacccataatctctttatcaggaagtgcagtgcttgataaatctgtgttcaagttttgtgttgggatctctaagcagtgtccctctggcctttgctcttccccctgtcccagtcctcagaacggcccacagataactaagcttaaaggataggggcagctttatgtgacctgacaagcattcttggccagctgagcagacttgtcttgtggtaagtactcccttagggtccttctcacctcttctgggaaggcaggaagaggaagagacaggagcttggcactgccgggcttcatggaaacctggactggctcccactgaggggcttccccttctccattttcctctgtgtccactctggaccttttattctttagtgtccctctgttgccagcctcaccttctggctcttgtccttatgtccctcttaaaggaacttcattccctttccacagggtgtagtacttcaagtgcatttaaacaatgtattaagacttaaagtagatatgaagattagttttttccacagccaccttagcagggcatcacatttttgagatgaaaggaggattacctgttttattttacaaataaggaaactgaattctgtatcacttcctagatacgagattgaaaataggccttttttcatgttggcatgtttttaggaggtagttggaattccccaggaagggaaattaatttgttgagtacttaccagcactccaatagtgggcattttaatatatgtctgtcaaataagtggaagttgataatagatttgtggagagtttggtagtattggagcatagtgtttaaagcagagggtggcagaagattcgaagagtaaatggcagatgctgtgagagcctaacacgttaagactttgttctggaggctttgtagattcagtaaaaggctttcatcaggtagtgatgcagtcacatttgtgttagcaatgatagtagcaggtggtcattgcctactatacagccttgtactgattgctgtacatgcatgatctcatttaatcttgacaacaattgttactaatttccattttacagttgaggaaatggaggttgagatagattgcacaggtcatagtggagctgtgattctcatctagggagtctgaccagagcacgcacaggacacctgtacagttgggatgagaggaaagaattgaaggatgtgttaggagagcctacttggtggtctcaacatttaatgacataagagacggtattgttggttcagagtgagaggtgttggat

SEQ ID NO: 108387 - DNA, 2081 bp, Homo sapiens
ggcagcttttgtactgattttactctagatccagggttcatagaacttagataaaactttctcttcctccaagttcttttcttaatttaactacaggaaaacacacattctttttttactgtgttttaggtttttacatgaaatctctgtatttgctgaaatattttgatatgttgtcatgaagaattgaaattcacacataatccaaataatttcttttagcttctttctagagctgccaacagatagtaaaatggatccgtttttaatatatcatcctctccatacccacctttagacaggcaacataactggcatcaaactgagcaaaagttatgaatactgtatccttactagcccaaattttcatttttgtcactctgcagatttgctgtgatggcctgttgctgggccttagatccagaggagaggcccaagtttcagcagctggtacagtgcctaacagagtttcatgcagccctgggggcctacgtctgactcctctccaatcccacaccatcaggaagaaggtgcctgtcggggctcacttgaagcctgtcagggatgctttgtatctaacacaacgccaacagaagcacatttgtcttccagaacaccgtgccttagaaatgctttagaatctgaactttttaagacagacttaataatgtggcatattttctagatatcacttttattaggttgaactgaaagggtttttgtaaattttttggccaaaattttttaaaacatacttactttggactaggggtacattcttacaaaataaataaacagtttttaaaattgtttagacacagatatttggaattagctatcttagtgccaactgctttttatttttttacttcatcaaggtgatgtaagtgactcacctttaaagtttttttagtgttattttttatcactactctgggaaatggtttgtcttcaagatgcaatacttttcttagtaaaggaaaaacagcataaaaagatacctggtctgccttgtacaagaaaaggcaatattagaggaagaaaatttaaagaaaagctagaggaaaaaaaaatttttttaaaaatacttattagaagcaaactgcccttgcatggaaaactgtttatttttttcagtgaaaaggaattctgctttcgtgtttttgggaaagcaggaactgagttcattacatctttaatttggcagaaattagcctttctgtgaaccagatgtggtttggggcagatctgtagtaaacaatggtgattttatttatttttactctctggaaaaggagataatacaattccagaaagtgaactcatatttctaaggttaagattcccttttattgcacctagaatagtgctatgcacagagcgggtgcttgagttgttgtcgttttttgtttgttttttaaatgtaaactggtaaattttgtgcttatcttcaaggctggcttaagtataaaattgttttttaaacacttgaaaaattaaaggatttgttttatattatgacagtattgaaattatttttcataatgaatgattggttattgtgtctggtaagtctttgaacattcaacagccagacatttgtgttttatttcatgatgttccagtcaagttccaaagccctaacacagttaagctggctcagactccaggttctagtaaaaagttggaattaatgttataaggaagtattaaaacactgaaacatttctccagaaccagcaagtaagggatatgtatgtatttatgctcagttttagttggcctaaagcagagttgaatgggctttctaaatagctaggcctgcaggtacctgccactactcccatcttcagaggtatataagggagaatgtgtagcagttggaggcttttgctgtttttaaaaaagccttatgaatcagcagcacatcgggaaaaatagctcacatagtacctggttttccacaagtaagccaagggcatgattttctgtgtacatttattaacagttctttggttttatgaaatactcatatgaagccagtccctggagtactgttttttaaaaggtccctttgaacc

SEQ ID NO: 108388 - DNA, 1066 bp, Homo sapiens
tgcttactcaagcaaggttggaagtttttttaatcctttaatttaaaactttaaatacagtaaaaatccatgacttcttatatttcccctcatttgcgtatttcacttaggatgctcttccctttaattaaactaaaattctgttcattttccacttctcaattatgcagactagctataatatttaaagttacaaattctcatattagaagaatcttggacataattcataatacgtagcttgtaatcaacagtaaactattacttccaatggatctaattacttagaatttataatactaatattggatgcactcttttttatcttagcaagggaaactaactgtgtatgatagacatttttttgtaaataacatttcgcttttccaaagcatgagttgagctgttattttttgtcctgtagctggctgtgggcgctagccccctgactgttgttttaaatgtcccctcattgtgcttctgctcctttactagtgggcctttggagtgacgctgtgggaactcatgactctgggccagactccctacgtggacattgaccccttcgagatggccgcatacctgaaagatggttaccgaatagcccagccaatcaactgtcctgatgaattgtgagtttttttgagcttgaaggcatgagttttattccatttactatattggaataaaggaaaaagagcaggtttccatattcacacagagccttcccttttgagaataatgactctttggatttaaattagactcttataaaaaaccacaaagtcagggagattcgttcactctttcatgcatttgatattagaacgtcttgcattttattttatagtgcataatctaagcactataaattagtctgagaggacgtactaagaaaattgaatgctacgtcagttattctatataaagtgagtatctgacttttatagttataaagtagttataaaggacatagtagttataaaaaacctctctcgttgtcattttgccttgccagttagtatcagctaatacagggaagatgatctggactagtaagccaaat

SEQ ID NO: 108389 - DNA, 1034 bp, Homo sapiens
taccattttttctttatgggtgaagttgggggcttaaaagttacatttaatattctatttttggacacttccaccagagtctatacacatgtgaaatacatatttttagatgtaaatgtagcacccaacaaatgatactgctgccttggagggaacattttctcggtcctttaagacatccttaacatttttgcatttcttcataattaaaaattctacacgatttatttagaaatacattgatgttttccatcatgaaaataatacattgcatctctgggctgtgttttcagaatttttactgaaaggattcaatatttcagtatgtccagattcttctgttaacgtcaacttttaactgttgagcttaagaactatgcacatcaagatttgactagttataaatgtctaatattattccaagatatgacatcattgtaggcattcttaagaatttctggatattgtttttattgtgttttcatcagatgtggataccaccataaatttttttatgtgactttcttttcctttatttgaaaatagagttcttgatttacatcttctttgaattacttagctaattatagtagctaacgtaattctgctcttaagaactactttctattaggagattactaaatgtaatcaggagtatgcagttaggaatttctttcttattggttttcttgtctttatagtattacattgtgtttaagaagcattttcttaagaaaaacaagtcaaggaaataacttccatgccaaatattatcagcatggtttatggcagtgaagagatccttttaaaagtatttgaacagtttttaggggataggacaaatcaaaatgtgttgcttgtgcctttacattatttattttgtgactatcaatgatcacctagaaaataaaaggaagtctggagttatccagagactgcatctgcagcacattgctacgtatgactcttttaactccctgtttgcccagtgctgtggagggagcccagtgcttgttgtatcctgagcgacctga

SEQ ID NO: 108390 - DNA, 1041 bp, Homo sapiens
tgtaggtttaaagcagtatttttggatggagtaggattgtggaataaaaaaagtaagaaagtgccatcatatttgtgtgctatttgcaaaccatgttattttttgttaccacaggcaatttctcagcaagacctggtacacatggctattcagattgcctgtggaatgagctacctggccagaagggaagtcatccacaaagacctggctgccaggaactgtgtgtaggtgccatgagcttgacgctgtcacttgatgtagagtgcttcctggatttggggttctctgcgagtcacagtgggacttgtgttgtatttaagggtggtgatgatccctactttttaatactctgattgcatttgatgttcatatctttacttttcagcattgatgacacacttcaagttaagatcacagacaatgccctctccagagacttgttccccatggactatcactgtctgggggacaatgaaaacaggccagttcgttggatggctcttgaaagtctggttaataacgagttctctagcgctagtgatgtggtaagtgccgggacccccagatagcaaaagaatagagaaacagctttctgtttttaaatgttctactatttttatcttttgggtttttaaaaaatctgctagctgttcccggaaatttttatccagaaagcaagtgtaattagctgccagtcaaccagtttatggagaggagctgtgacccagaccataggccagcactgtttgtaatctcatttcatcctcacagtactgctctgacagaagcactttttttttttttttttttaagacagagttccactcttgtagcccaggctggagtgcaatggcgcaatcctggctcactgcaacctctgcctaccaggttcaagcgattctcaggcctcagcctcccaggtagctgggattacaggcgtgtgccaccatgggcacatgcccagctaattttgtatttttagtagagacggggtttcaccatgttggccaggctggtcttgaactcctgacctcagttgat

SEQ ID NO: 108391 - DNA, 1133 bp, Homo sapiens
ataatgttaacctattacttagatacctagccaatgttcttaccccagtgaaaggtttgcatcacttcagcacagaagtgagtagcagggataaatgtagacaaagccaggattttcccaagaaacggttttatattcactgtagccttaaagatgtcttggctgaaaaatgctcagagcaagcatttgcagtgttgtgtctcatgcagttttagattgtaaggttttgcagcatcccatcaggatgaattagcagtctcaggaggtccttagggaattgaatgacattacatactaaattggggttatttgatactgagcattcagtccttgaggaaagtcttgtaaaggtaggttatagcttgattatgcttaattgttcttccttctatgaggtgatagcaggagtcctagttacaatgaataaaacacattgtcagcatgtagaaagtatattattctttccattcattgtagcagttcatttcatttttaaggtgaccagggcctatcacacattttgttttgatccttaatatgtatagactgttcatagctatacttatgtatttgtttgttcattcttttattctaattcattcagtacccattttgcacttggaactgtgttaggcagaatgaaaatgaaatgatcttcagagatcgtattatagaatttatcaagcaacagaatatagaatttattcagcaagaaaagacacctgtttttagattttaccttgtggtatgtaatacagcatgtttgcttcatgttttaacatccatggttacggattgtacgcgtattgaagtgttttaaagcattttgaaatcctttcttttcacacatttttccactggaatttatgaaaataattttattaaaagttaaaatagctgtatacataaaagatattaacctattttaatttcattagaagtgcttcacatcaaagtactcttgcgctatttctgcttgtagtttggccccttcattggcccaaagatgcctgatggtgaacacttcttatgccaaatggctcacagctctccctctgcaaacgccctcaacaagactgagaattagaggcagttcttgtgccaagccccacagaacctacccttcctgtacc

SEQ ID NO: 108392 - DNA, 1210 bp, Homo sapiens
tagtcccagctactcaggaggatgaggcaggaggattgcttgagcccaggaattcaaggctgcagtgacccctgatcatgccactgtactccagcctaggtgacagagcaagatcctgttttaatttttaaaaatgatgataataattctgaggtaagtcttatttgcttatctagagagaaagaaaaatgtgataatttatagggtgcttaatgtctatcaggtctgatgtaaattgagaagacatgctaataatatctaaaaacaaatttagcactttcccttcagaaactgaagggaagattaaattcagttttatgagtagaaagtgataaaattttatacagtttatgaagttaatttataagaactgtttctaaatttacttaaaggaatacatggaaagtatgaagggtttatgtttattggttgtaaaaagttgggttataccaatctaacaaaaaatctttggaattgcttttaattgaacaaaattgtttgtttaaggctgctacaaatacatccatacacacacacctctttaatattttctaaacaagtggtttaatttactatatcattcaatatttattttattcattcaccccttcccagcaccaaaaacacttttaaagggtaatatttatgtgttaggtccatcctttcggctaagaccaagtgtaagttaggtcccagtaggttttctgactaggagagtttacatattactttttgtaaatgtaaaatttgaactataaggttattaaacaacagccttttgttactcttttctcattttttttttaaggaaactccttaattcaaatatttcttccggggtttgtaagtattctatagactgtgtagaactgggctattattgacttgttctgaattaaggaaggaggtttttatacaaaattgggttgatttagggttggaaggggagataaaaggaaataatagtgataagaaaacacaatgagtatacttggactgtttcacaagataagacttctctttccgtatatgcttgacttgtagtcactggttgtttctgtgctttaccactgtaattataatgttctctgtgagctgtgcggaaataagagaaagcacagtgagtccttatgggggacagaggggaagtgcattgcctcaaatttgttagagagatagcgccacatgactgtctctgagattgattatt

SEQ ID NO: 108393 - DNA, 1074 bp, Homo sapiens
cttttcgtcatttctctgaggctaagcctagaaactcataaatgccattgtggatacctcattactgagctccaatgctcctggctatatcattagtttatttagtataattcaggaaaattttcatatacttagtttagatatggtgtttctgaaagcaagttaagatgtgtaatagtcacaaaaaacttttaacagtcgttaaaaccaaagatttgggtctttttactctagggctacagtaatgttgatcacatatgaccttgttatttttgttttatgttatattgtgccagaaagttttgtactataattttatgaatgttgtatgatctcattaattattacttttccttttaggtacttttgggcgtattttccatgggattttaatagatgaaaaagatccaaataaagaaaaacaagcatttgtcaaaacagttaaaggtaggatcttttttccatagtatttccatgatgctcttctgtctcaggtggctcctgccagcaaaattctgtctcagtttcccaatgtgtgccagaccttttaaatcagtcagtgttaatttagctgaaaacaaaaattgtcttatatgagcctaattgttttggaaatttgggttgttctcattaagtatagaaaaacagaagtctgttaaattaagacataagacatttcttagatattactcagttaattgcaagtcaaactgcatccacttgatttcattgttactatgtttagtgttggtatacttttgcaggtatagccatagttggaattgctggcctaagggtgtgtacatttaaaattttaatagagcccaggtgcagtggctcatgcctgtaatcccggcactttgggaggccgaggtggccagatcacctgaggtcaggagttcgagaccagcctggccagcatggtgaaacccctgtctctgctaaaaatacaaaaattagccaggcgtggtggctcacgcctgtaatcccagctactcagaaggctgaggtgtgagaattgcttgaacccgagaggcggaggatgcagtgagccgagatcatgccactgcactc

SEQ ID NO: 108394 - DNA, 1060 bp, Homo sapiens
gctcttcatgttgttaaatagagaattacttttttacctccactgtaattcagtttggaatgctttggatacttatgagtcctccttatgtattcctttgctggttgggacacatttaggtcaatcacagctaagtcaggtacttaaactgtccccagtagcaaatggtaattaatggaagcagattttctggtatgtcttaaaatgcatgattgccacttgttaatagttgactgttttctaagcataactagtttgcagatctttttgcaatctgaagagagtaagtagaccaggtagcatttcctaaagaataaaaaaaaatgagagatcaattaatgttatatttgcagtttcttttggtctctgaatgggatagaataggcaatctgttgtagtggtatgatttgagaagaaggaattctgaaccaggtagagtttttctttattggtcttttcaggcccataatagtttattttaaaattcttttgatttcagaaaagaaaatatggtggctgattaacatttaaaaaggtggtcaggttcactggaaatctgataaatgcaaagaaaacaatagttacatgcgattttttttttttacgttagtttgtgaaaaagtaaaaagataatttctaggttgacgggtatggaggaacacatgctcttttacattgctggtaggaatgtgaattgctgtaacattgtggtaaagtaatatgtacatatatatttttgtgtatgttccttacttccattgtttttaagtatatgtaaatctgtgtttgagagtaatatttaaaaatgggactaggtactgggaagaggagacaggaggttttgcagtgcttcagtgcaagagagttaagaagctcagtcaagcaaggtgaacttggctggagagagaagggaaaacctttgtgaggaagacaggtcagggtgtgtagctctatgtattgactagagtgtttgaagatatttactcagcttcaagcaaaatgtcttaaatgaagattatccaaagtcttttctgccttgagcatacaagttactctgtct

SEQ ID NO: 108395 - DNA, 3123 bp, Homo sapiens
tattgagtgttttctgtttaccagtactgtaccccaggtactttatatgtattatcttaacacagccacctagaaataggcttgaagagattaaataactttttcaggattgctcttctaggagcagggcagagcaggcgggactcagtgttgtaatagctatgtgttaataatccactattgtcattgtataaaacacttgctgtgtgccaggcactgttccctgtgctttacattcatgaactccgttaatcctcacacagtctggtgaggttagatggagcccatggctccgtggaattcattagaaagggatggtagtgttcttccattccaggcacttaggagccactgcttgttataaacagatctcattagaggcagagaattaacactgcctgagatatgcccatgccagggcagttggagctcatgtgtgtggctttccctctctcaacactgcaaattgatcttttcagtctctttgttacgcctgatgagtctgtcctggataggcagagcttctctttacattcaccctgaagtcctgcagaggggttggtctgcagcgtgtctctactgtagtctttccctgttagtttgtgactgtgggaaagtttattactcctttgtgggatgcttgaacttgtcatctggcagcatcttaatttttctcttccagtttccattatccccaccaccgcccccatgccattactggtgacagagtttccctttaaaatctttgattttatatttaatgcctaactgtctgacacatagtaaaatactcagtaactatttggttgaataaccaatgaatagagggaggaaaaaaaccattttgttttaccaatcattctttgcttttttcacaatagtttgtgccagaaatgaccattctgtctggtttatgttttctgtcccagggaagcgtggttttctctgttcattgattgactcagtgttagttgagctgtcactggggctcactctggcccacttgcggcttattgtgccaggtactggcataagtgctggggaaggagaggtgaataaacaggcacttgtcctgcctttgtggagtttatagtctggttggatgagacagatattaaacaaaaaaaatccttactggaatgtaggggtcacagtctttgtctgttgcattcattgctgtatctctagcacccagtacagtacctgacatgtagtagatacttaataaatatttgtggaatgaatggatgaagtggagttacagagaaaaatagaaaagtacaaattgttgtcagtgttttgaaggaaaattatgatctttcccaaagttctgacttcattctaagacagggttagtatctccatacataattttacttgcttttgaaaatcaaatgagataatctatttagattgataatttatttagactggctataaactattaagtgctagcaaatatacattttaatctcattttccacctcttgtgatatagctatgtaggtgttgactttaatggatgtcaggggtaggtccctaattgcttcttgcttctatcataacagtaagtcttggattcaaaaaaaaatttcgttctgaccacttagcatagtgctttgcttattttagggacccacttaatatctgttgagggaatgaaaaattgacatagatgtccctgtaacgcctttgtgtgcctacagtcttttcaaaaattctgaggtagcacaagagtgccacctactgttaagttaatggagagactgtgtctgtgcacttagtcatcagtgatgttggttgcagataatacttaagaagtactttcacatatctcatacaatttgagcctcacaaaaatcctgtgaggtagattatcttaatcccatttatttcctccccttttgaggatggtaatgctcctcttccctccccattattgaagtctggacttctaacagctttgatatctggtttgatttttgagtggtactcaactgtaaaacagagtcctgtaatccctttttgctctaacgactggagatgcataatattcacataattaatataactatagtagtatactataaattagtaacaataatttataaagatatgtttgagggctaggcaataaatgctttacttatttatttttcatgtaatcgttttagcaatcttatcagaggatagtgttatgcacactctgtccacgggaatttgaggttccagaggattaaatagtttgtcctaggccgtacagctagtaatcgatgatactggcagttctgacttcacggtttatgctcttcatctcttttctatattgacctatacccactgcattataaactcatatagatcaattctgtaataacgttgagccaaagaagctcttccagcactctgaccagatgatagcctaatgaatctttattatagtctctttgagttgcaaagtatcttcgcagagttgctggagaaacagggctaactgcagcatcacaagaagaagtatcaggttggtgcagtaattgcagtttttgtcattaaaagcaatagcattaaaagcaatgacaaaaactgcaatttgcaattacttttgcaccaatctaatagataacctaaaatgatggacatcttcagggaaggcatgctgggggggcatttcattaggcaaacatgtatcttgagatctatggttgtgctgagcagaatggtttgcatattataagtgctctccaaatgtttattgcaggacatttctatcttaatttttgctatgactttctacagatgtttggttacaatagcagatagtagtatattgtattattagccatagaaaggctacataaagacttacagtcctcattgcctggatgttatatatttacatttttcagatttgtgtatgggctcttgaaattgataaacattcatatataaatgttatagattacatagcagccgtgtgtgtgtgtgtgtgtgtgtgtgtgtgtgtgtgtgtgtgtgtgttttgtttcagagacagggtctcactatgttgcccaggctggcgtcaaactcctggactaaagtgatctgcctaacagccttccaaatagctgcagctacaggctt

SEQ ID NO: 108396 - DNA, 1077 bp, Homo sapiens
ccctgtttcttccttctagatcttgccttcatcattctccctttctctcttcctccctccatccatccagtaaacatgtattgagcacctgctctgatttaaaccattggttctcaacctggttacacattagagtcaaggagaagctttgaaaacatactggtatttgggtccaccttccagagattttgatgcagttggtttgtggtagtatttggggatcagtatttttcataaagcttcctggatgattctaatgtacagccagtttgagatatactgggttagatactatgctaagtgctgggaacagaaagaaagaatgatatactttatagtttcaagattttaatcttttacattaacctgtaattataaaagtatgtaatttgatgactgtgatatgtatagtaaagtgtgtgaatacaaaaggtgcttgtccagcctcagtgagtcagagatgacaaggaggacattatagtcaagttagggtgagaggtacagatggaatgataggtttattttcataacaaacacttcttacttccctcctctgtgatttccagttgctgcctgaagacatgccccagctttgtgacttctttgaaagccctcctttatgtggagacgtatcatccatactctttgaaccttttctcctcttattgctgtatccttacttgcgctccagtcaaatgatcacttattcctcactttcgccccacactttgcccttcaggacttttgttcatgctttcttcttcccacaagcctccatgcattttccaccagtccaaacttggtccgttcttcaaattccagctccattgctgtctctttcatgaagtcttttctaagcctcccaaacacccctttctctttgtctctgtctctgtctctctctctctcgtagcagttattgcactttttcttctataattttttgtgtaattgtcttacctttagaatgtaagctttttccagttagggagcagtgtgtcttactcattgttgagtcaccagtcctaattagtcttaacatgcagctgggaagcatatttgtggcgtaagaatatg

SEQ ID NO: 108397 - DNA, 1164 bp, Homo sapiens
ggcagatagattttgcacttgattagatttagaaccaactcttttggtaagaatagtccatagatggtaggtactctgtgctgcctattttgtcttttcatcaccttgggaggcacagagtatctggatgtcccaaaggggaatttttttgcctgtaaaataatgtgacatatcgtctacttgctggaatatttctgaaaagaaagaaaaaacattaaaaaaaatgtcactgttgccaaagtttacttttaaaattctggtgactttgcccatttcttttatgctagtaggatattacttctcacaaagagcagtactgcatattcttggcctctgtctgtgtcttccttgctgcctctcatcttcccgccctttctatttattcatccacccagtacctatggagagtctgtggtgtgttaggcggtatgactgaagcagaggactaaactgtgagcaaagagatcctttcctcgggggtttataatgtagtgggagaaatagacgaggcaatataggcaatgataccaacatagcatggcaagctatgataaggcaagcacaggggatttgggaacccaaggatagcttcctgagaacagtgacagctcttctgagagctgaagggtgaccagatggtggcaaatgaaggatgaatgagggaatgggaaaaatgcataggaaagcctggaatttggaggtaattgagcagggcgcatctagggggatctgcccagcagagccgtatccttggctctgctctggaaagtgcttggacagtactgctaacatatgcctccagaattcagaatttttttctgtccctcccaagattgaatagctttcctgtggcataaggtaattcttgatgaaagtcatgccttcattcaggctacagccaagtctagctgccctagaagtcatttggtctctacgttaatctgttctgatttattgtttgttgataggaaggttaaattttagaaaagttttatttttcttatttccatgtgtttttgaaagctgtaagttttatcttttatcctgacctatccccagaactccaaacttgtatatctgtcagtttaacgtctgtgcatggagatatgaggtacctagttagtagactaggtactccaaatttaacttgggcaaaactcttga

SEQ ID NO: 108398 - DNA, 1097 bp, Homo sapiens
tgtatttgttggtcatggttttggccaccctagtcatccagttcaggctcatgactcttactttattatgtgatcctaatgtatttatttatctggttttccagcctactatatttcaaaaactgtctgcaacagaaaacatctgtactatatggaatgttagtaggtgttactagcaagaaaagtttcttttatcatatgaggatgggaattatgggttagacaagttttgtgaccccataactcctttcagtctttatattctaatgttcactgtgaagctccaaagagacactatagtatgtggcttttcccaaacttcttgatcataggaacattttcactgagcatctagaagtaacaccctttggctaacagtggtatagactattgattggtgactgtagtggtgattatcagaatagtaacatagctttcattatctcgcaacacatacctgttgctgagttccagcaatgttctgataattatagtaattaaggattttcatggaaaagagaatttctaaagcatcatttttctcctttaaattcagaacttgaagaagtaaaaacttcagccttggacaaaaacactagcagaactatttgtaagtgttactgtattatctttatccattattagaaatgaaaaatggttgactgcatataaacatgattgcatgaagcttggaggcctcatggtatcaaatgataatgacaccatgctgttattttgctggtgctttgtagactggtggataggtcatgaaactgttagaatattgaatattttgagaactaaaatttatacgtattttgtaacgagtaagctaaaaagttttacaagcaagaatatcatatatttttgagtagtcataattaaagtatgaccatgaaatatgtgtaagatgtttattagcagagggttagaaaatctggcttgcagtctggacctaatcttaagctaatttcatccaggtgaaggtgtaagcttaaagatattatgttacttaaacctacagagcaggtatgcaaagtagatttttattttttggtatcggttgtgtttagatattattacaaacttcttttttt

SEQ ID NO: 108399 - DNA, 1027 bp, Homo sapiens
gtaatttctgttgttactattgctgatgtgtctgttaaggtttgccttatgatccttcagttttagtgtactggaatagcaggacttatgagacaaagtggtgtattaaaaacaatgagcagaagttgaaaacaattatctcttcattgatgtcttggtttgttctttaatactaacttttatatccataatgaattaaatgcttaatgtctagaggtgtggtagtctgaagatctctaaaaacttttgtttagttactttatttaaatgtattacttttagttttcttgcagcaaaaataagtaattctaaaatgtttaaaagaatcattttggggcattaatgttgatttttagaaaatgtaaaatatttttcttatcttttttaaacagtgtttcgggtagagctttcctgtactggcaaagtagattctgaagttatgatactaatgcagctcaacttgacagtaaattcttcaaaaaattttaccgtcttaaattttaaacgaaggaaaatgtgctacaaaagtaaggaatttatttaccaaaatatgttttacatgtatgtgagaaggtgaaaaatagagtttgttgttttttcacagatttaagtatgtccaactcatgattatagttgcaagtgagaaaagagcactggcaggtgaagttttgagataatcccagatggttggtagccaagaatctcactcaggcctcattcagtccatgctttctcaaatcttttgtcagaattgctaagatgttttccattaggaatagtgctaaaatggttgaagaggtaaagaaataagaaaaatctgttgggacttctgagtaactatgttaactgtgtttcccttatcaagttacttttatgcagaagcattgctctcgggtgagatagacctgggttggaatggcagctctgctcttttcaggatattgatacaagttacttaacctctctgaggcttagttttttcatctgtaaaatgggcataatacctgtttcagaggtttgttgtttt

SEQ ID NO: 108400 - DNA, 1039 bp, Homo sapiens
cccagtagactgtacatttaacttttgagcagatctgtttctttaaaggatgattggcaagtgagagtccttacagatcgatacatgccaaactagagaaaattggacttcaataattggcaatttcttctctaatcccagaaactgcagttttaaaatttatatcttaaagactgcagagggaaaagagaactaccttgtgaatgcctcccatttttagacagttcctcaaaaaaggagccagcaaggaggcttccacagtttcatgcttcatattcctctaagctgctgataggaccaaaggggctgccttctcaaatctcctcctcagccctttgcacctctccctgtgccctcattggccagctacactcacagcctcatttccttcccttctctcctccttttcaccttgccacactgagatgctcaggcgccagtcttagctgcttttttaactgcagttatggccctggacccctttgccaggccctctctgcttactttggggttctggtctctggtctgctccttctctccttgtgataactgagacctagaataaaggagacagcaagtttctggggaaatagtaagtgtggctttgaatttgttaagttggaaggctgtaggataattagatagaattgcctagtaggtaattggacacttgagagggattgaaggtaaaagagagtgagagaaattgacgattaagatatcccatcagtggtgaaatgggctagaaccctagtgtactaggattgaaggatttacatttggagaggaaaatggacctttccttgggactagaatgaaaagaatagatgctctaatagatctgccggggtgttgaaaagaaaggcagaaatggggttcctctgtactagtggaaagggacaaaaacattgagtgtgaggaggtggggaaggcctgtaaggttggaataagacgagggaaaagagggtcagtgaggaagggattgctgagtagaactaagggcctcccctgagactggaggtcattgttgtgtaagagc

SEQ ID NO: 108401 - DNA, 1279 bp, Homo sapiens
cttgcctgagtcagccactgttgcctgattattgtctttcctttggaaatagttcgtgtgtatataagcttccatgcatatatgtatatatacatctttcaacagctaacataccacctacttttctgcagtttgcagagcactgaacaatatcctggtcaaggatctctgtcacttgatacagagttgtactttttcccccttcaaatggctgtattacttattattatatagttgtactttggttattgatcagttcctgtgaggaaattaagacccagatttggaaagggatttgcttaaggtaggagaagtagggttagaggaagcagaaggtagagatgacctgaaatgggaaagtcacacgtgagggcaggggaggcttgatgaagggtttgtcacctgatcatttaaccctgaggtgtaatcatgaactttcagaaggagggccgtggctctcaagctctaatactttatcagaaaccctcggttcttgctttttaaggtttgccagaagatgaaatatttgcttccagagatctgcaggctccctgatatgtgtcggttcaacatcgtagatactttaacattagtttcacatatcacagcttctggtaatactgtttctcagtgttttcgccattttgtcttgccacacagattgtggtctcttcagaggcttgaagctgtcttactcttagcgcataggtcacacatgccttagtgagtggtcaggaaagaccattgtgttaattgcattttgagttgggagtagaactctggtattgcttctttttcacaagaccacacacttaaaagcaggctactgagaggctttaacagatagtttcttctgtattccagaacattccccaatatccaggagaaacatgtaactgtgtctgttaagtgtcagtagctttttttttttttttttttttttttttttgagacagagtctcactctgtcgcccaggctggagtgcagtggcgctttctctgctcactgcaacctccacctcctgggttcacaccattctcctgcctcagcctcctgaatagctgggtcaacaggcgcccgctaccatgcccagctaagttttttgtatttttagtagagacagggtttcactgtgttagccaggatggtctcaatttcctcacatcgtgatccacccgcctcagcctcccaaagtgctggcattacaggcatgagccaccgcgcctggccgtcagtagctattttagatatctgaaaagcgaaaatttgccagaatgt

SEQ ID NO: 108402 - DNA, 1043 bp, Homo sapiens
cagccattcatgcatctaatatttaagtagttacaagtaaactaagaccccagccttgtttgtgagatgtgcaaggtaataggaagatggacatttgaaacaactccctgaaatatgttttgttaagtgctataaaggtggcttttaaaataaagagagatggtttgctgatttagcacgaatgaaccatatgtacagctttgagaaaccaatagtcaacttttaaaatcatttggaaaaaatttttgaactgttgaattattagaacttgagttaggccagttcatgtggatcacagaccttgaaataaatttgaacttaaaatcgtctagggaaaaatgaattttttttgataagccttaagagttttgcaagaataactttggttttttagctttgaatttgagttgtttaaaaataaaattttgaaaaaatgccatgctttctaacaagagagcaacatttttcctttgctggaattggcaatgggaaatttaagtctggttaatgtaactgaacagctgaagtattttcatcctaaatcagaatttaaaaattctgtgcattctaatgacaaaatgctacctctttagttcgtggctgtccattcttgttcttgtctgctttccagcacagcccccttgtctcttggcatccttgtcaaaaattaatcagcccaaaatatgtaactttctttctggactctcagttctcttctgttggtctacatgtctgtcatgccagtactacactgttttgattaaagtagcttcgtggtgatctttgaaaccaggaagtgtgagtcctccaactatgttctttttaaaaattgttttggctattttggcctgctcacaatttcatattaatttgaggatctgcttttactcttgtgcaaaaatgggagtcagaagtttgatagggattttagtgaatctgtagctcacttgggtagtattgttatattaacagtgttaagtcttccagtccatgaacatgggtgtttttccatttatttaggtctttaattctttcagcaatgt

SEQ ID NO: 108403 - DNA, 1367 bp, Homo sapiens
tgtgggtttgagggttgttttttttcctcatgctacacatgtgagagaactctatccaattatggctaaacctgtcccctgtgagtcacatcctgagttgactggtcaattccaaaggtgctgcctaaaatgctgtttggattttaagaatcacttttgggacaaatcaaacatgtgagtatttattcaggcacctgagttgagaagttccatagcattacttttggtgttttgatgcagttacgccaatgttctgaaaaatcttgccagctacacatcctaaagcaaaacaaaaacttgtacatgaaacagaaccattagctactctaaaattatgtcacacttaaaggtatacatttttgtgcgttgttgatgtaaatcaagtgcaatattttctaataaaaattttattaaacagcattcatttgtgaaggtcctcttaaaatgtgccaaaataaacgtgtgtgtattgctcagttacataataaacagttgttgaatgattctttttgtgtgttcagcagtgataatgctgagtggatttcataggtctcattcttatcttttttttttttttgagacggagttttgctcttgtcacccaggctggagtgtaatggcatgatctcggctcactgcaacctctgcctcctgggttcaagcaattctcctgcctcagcctcctgagtagctgggatcacaggcgtccaccaccattcccagctaatttttgtatttttggtagagatgggatttcagcatgttggccagtccaatcttgaactcctgacctcaggtgatccacccaccttggcctcctttcaaagtgctgggattacaggcgtgagccaccttgcccggcctcattctcattcttatataaattttaagctggaatagacagcacacaagtctctagttagggatcacctgtaatttagggaggaggaggaagagcgtatcttgctgtatgccaggtactttacatatgttctcttttatcaaccataggaagtcggtggcattgactgttttttgtttgtttgtttttaaacagataaagctgagatgctgaggttgtgggcaattaacagaatttgctgtaggtcacagagatgtgtggggctatgtgactccaaagtgcgtgctttctctactgtgctgcctttgaaggttgacagttgacttagtctttaaccaaaatcatctgagaagctttaacaaactacagattccttgacctaccctgagcaatttgttgaattgatctgagatggggctcaggtaaattaacgttttgaatgccatgtttaattaattacaggaggtacaggttttccacatttgaacgtctctgaaatcagaac

SEQ ID NO: 108404 - DNA, 1035 bp, Homo sapiens
gttttggaggctgggaagtccaggatcaaggctttggtagatttgatatctgctgagagccctcttcctggtttatggatactgctttctccctgtgttctcacatggtggaaggggcaaacgagctcccctgggtctttttataagggctctaatcccattcatgaggactgctcttatgagctaatcacctcccaaagggccctacctgctaataccatcccttagtggttaggatttcaacatagaaattttggggtgacacagagaaatgagaaaacaataatcttagagtaggtatgtattaatgactagcctggttttttggtagtagtagggcacacggtcctgatggaagtgtataagttctgaaacaccgaaagcttcagaagcttttaaactctggttggccttcctgtgttcctgggccctggttcatcgcttgcatttacaagcctgttacttgcataacaggctgcaatgtaggcattcatttctgcattttactgatgaggaccctgattcagggccttttggacagtgagtagaaggccaggtcttgactcagtcctgcctgagacctgaattcatactgtctctttatcagctctggaggagtgcaattaaccaaaaactcaaagagtagaaccgcaagcctcctgccacaggtgcttgtttgtggtctttattattatgctaattattcttgcatcctcccatgttctttaattgataattttcattgtactgagctctgtggaattccggagcctgtgaaggtggcatatggctgggcagtgccagaagcttgggaagaacatgctggtgggtgggtggggaatggtataaactggttatgccaacagtggtggtggtgataggggtcagggggacttttgggaagaggccccatctcccaccagttagaaattaactttggataacttgcttctcctcttaaaataaatatcttctggaaaagtcaagaatgttcacattttatttaaaatcaagtcaatactagttgaaatcact

SEQ ID NO: 108405 - DNA, 1612 bp, Homo sapiens
ctactatgtatgtatcctcagtagcttcttaggaaggaatgatgggagataaattacttgaggccttgaatgtctgaatgtatctatcctgtcctcatactttatagatggtttggctgaatttaaaatattaagtagaaatacattttttcataattttgatggcatattcacagttttctgtcttaagggtttttgatgaaaagtccaaagccattctgatgcctctttttttctgtttttttgaagctcaggttctttttctctggcattctgaagttttataagtttttgtgtggttggttggttggttctttccttcctttcttccttttctttcttgtattaccttagtgggtcctttcaatctagagactctttttagttttcagaaatgctttttttttttttaataattcccaccctttattttctctctctctgtgtgtgtgtgtgtgtgtgtgtgtgtgtgtgtgtgtgtgtatttctttctgagatgtctgttggtttggttgttgaacccactacaaatgatctttaaattttcttaactaatctcatgtcttacgtatttctttgtactggaaggagtgggagggggggaatggttctcaattttaatgatcatgtttttaaattttagaatctttttctgtttccatttcattgcatcttattttatggatgtattatctttacttatctctgatgtgtgtatttttattttttctttgtgtttaatatatttttaatatttcttctgtttcctccagtgtggttattcatttcagggatcttttctttgtttgtttaagtcataaatatctggtgatccttgactgtctataatgaagaaaaagatcctgaggagctgattgcagaggagagaacatgtgtgtattggtggtctagtgacttgtgagttcaggtggacttttcattgggagtctgccccgaatatcaacacctttacatctcgtttggggccagtgttcacaatgaagaaatcatcatctcctgcctctggtatgcttggtgatatgccagctgccagggtttgggttacctggctgagggagggatggaggctgtagccttcgacttctggctacagttctcctgtcactgtgattcagtttcttcagaaaaaactttgggtttcctgctggaactggggatccaaaagctttgaacacctctttcggtggctccccccttgtctaggctaagcctcacatcagcctttggcatctccttggtgcctcaagacctgagcctcttggaggtcctgaggggcagtgaccattccttcaagtactttgccatcttgcaaaagtttgtttaaaaaagcatgttgtctttccttttctgtttgtccttatggtttgatgtctttgtgattttttttttttaaactatcattttagaggaattttggaaggaaatggaggtaagggattatggtcattccacaatgtgtaaatggcagttagggtttgggtttaactattgaagatgacgtgtggcagtctttttatatgaacaatattacgagtagttaatggtggttgtagtagtagttgacacttttaaaagtgctgtcttttgtctg

SEQ ID NO: 108406 - DNA, 1048 bp, Homo sapiens
gataaatgcctcttgcaagtccaaaggctcctacctgggggcacattccaggtgtgttgggcaataatttggttatttccctgcacaggtttgcctcttcttgcatcaagttggccttcttttgaagcttcaggagccttgaaaagagccctgcccagtctctcttctgaagcctttcttgctcaacacagtgtactatggaaatcttcacagcatattgcattatggcaaaaataccaaaatctcaaccatagagtgactacaaaaaccacggctaggtttgccttgaaaacacaataaccttttttaacttaaaaagaaaaacaggcccctctctcttcctttctccaccattgtagtgtgtgtttggctccgcctctctccatgtcttctcacaagactttcaagattaagcaattcctggccaagaaacaaaagcaaaatcgtcccattccccagtggattcggatgaaaactggtaataaaatcaggtacaactccaagaggagacattggaaaagaaccaagctaggtctgtaaggaattgaacatgagatggcacacatatttatgctgtctaaaggtcacaatcatgttaccatatcaagctgaaaatgtcaccactatctggacagttggacatgtttttttgggaatatactttttctctctgaatctgttaggaactttctggttggctgggttccgtaataaatacatgagacctttcatttcaaaaaaaagaaaaataggcctccttcccaggggctccggatttcatcagccttctgtgcatgcccagccatacaaaccacgcagggatggctccaagtgcactgtggcctctttgaactgcaggcctttgcacatcccaatccttttcctcgcaatgcctttctcatctcttttctcctccagcttgaacatcgcttcctcctggcagcctcccctctccagcttcctttctgctcccacaggaccatgatggggaggacagctgggatgtgcagaatgaaggaactcttgctagcagacattagtctgtagc

SEQ ID NO: 108407 - DNA, 1691 bp, Homo sapiens
gagctcaggaggaggaccccaggggagaggagagctgtgagagcaccggcacccccagaagactctgcttcttagcccacattcctccgggccttatggagaatgaggattcagccttgacttcttgcccaaggcctgctactggggtagcaactgacagctcagaaaggagctgagctccctctgccctgccagttgtcagtcaggcagggagggagtggctgtgttggtttggggaactaatttccacggacggctgcccgtggacaccaggtggactggttcactaatcaagtcagccatattgttctctggctaagtttggttccagccaacgtcatctgctcttcagttcctcactgccttcttgggatactaagacttgaattttttggggactattaagggtgttagtcttggagaagacacagcctcaccttctcacttgctgtgggtgaggggccatttaagtggactgggagacagtgcgcagtttgtatataattccctttcttgtggaacagaagactgaggcctgcaggttccgatgtgtctccatgggctgtgctcccctcttcctactgtcagtttctgaaacttctgactggcctcccagttatgcctcctcctcaagttcctggcccgtggatgttaaagctgctcgattcccaggatctcggctgccttttcctctatcttgagccctataaatgcccacgggacccccaccaccagcctcttgaagtggctccacagctcctgtccctggaacatcctgtcagtttggtcataaaccctgagccagatgaaatgagccaccgtgaacagacatctgccatgcccccaggtgggcttcggtggccctacccggtaccagttctttctgagaaactggagatgtcttgttagcataagtgtcttcattcccacctggagggtttgggagaggagcaaagcagttgaaaactagttaatgagctacaagagtcaaatagtcctctgaatggagcccccatcacaaaacagtgcccaggaggctggctcctcaagctacccatgcccagcgccctaaagcagcaccagatgctttggaattggggtgaaacacccacatggcagcctgctagcagcagtgactttgacttctggtcttaaagagtccctcacttcagccccaggagctattggtgggttttagcagttttgtctttaccgtttttagttctccttgattctttgttttcttcctttatcgtttttaggtttggtatgtgttgttttatttccatggttcctcaagtttcctttttaaacatttgcatttgctggacaattgcaattttttttaaaaaattcccctacccctgtttaaagctgaaaaatacatttggttcatgtgcattgtttacaaagcaaaaagaaaaaagaggaaaaaaaggcaaaaaatattgtgaaagaaaaaaaacaacttaatatattttggattaatatttggtatttcttttaaagtattttttgtgctgtgaacattttctgccaaagaccatgatgtgtgtctgtatgtttaagttatcgtaaatatttaaaatgtaaacatggctgttttgttatgccaccctgtaccaggattgctgccgcattccactgggtataacagtattttaattaaaaaaaaataattaaaagtgatg

SEQ ID NO: 108408 - DNA, 1050 bp, Homo sapiens
tcacttcggacttctgtgtaaacaactcttggtgtttacaaaccaaatagagttatttctccactcccaaacctacccttgccacagaggtagtgtgactgaaccccctggtttgcccagttctgttctaatgtacaccagttttcccagtataattattgatagcaccccctttgccagtttggaggattatctgtctggtctctatgcccttgccctaggattcagggcaggggtatggggacctgtgctgtatccccatttcggtagaggaaggatggggaaatgtatgctgtgtatggctgaacacgtacatgtacaagtgacagtcgtgtggaggcgaagaccagtggctgccacaccccaacctgcacccttgaccacggtctctactccttgctctgcagagacaggcaggtgccccaggtggtagcagtggcagtggtgggtctccagagctcagcgccctgcgactgtcagaacaactgcgagagaaggaggagcagatcctggcgctggaggccgacatgaccaagtgggagcagaagtatttggaggaacgtgccatgaggcagtttgccatggatgcggctgccacggctgctgctcagcgtgacaccactctcatccgacattccccccagccctcacccagcagcagcttcaatgagggtctgctcactggtggccacaggcatcaggagatggaaagcaggttcggcattgcaggccaggcacctgaggttgggggggtgggtggcaatgtccagtcactgccctgcccttgatccctgataaacaggcccctttccccatagagctcagcagtccctcctgcttctgagctgaacctgcatgattggcacaccaggcactgtaaacatgcatttgcccagaaataccgagtccttggtctgcccaggagactcttactgtggaggtgttgggtgccatccagtgcttgggccctgcctcccctctccggagtgccgccctccaggatgagggctgtgccgccactatcatctgatgaatctggaacccatcctt

SEQ ID NO: 108409 - DNA, 1069 bp, Homo sapiens
agcttgctagtgggtgagaagaggggggccggccgggaggcgtttccgctccccggggagcgagtgagcgccgagctgttcttggctcctcgctggagccattaatcttgcagccgcgggtgacctggatgcctggcattccagagccgcgagctgttccgctcccggcccgccccccgccgctccctcccgtgcgcgctgcctggcgcccttcgcccggctttgggaggagggagggtgagcacaaagggagcctggaacgtggaggtgggggctcgctcgctgcccaaggcgcatcccgggtcccgtcggcgcctcgcctgccttcctgccctcctccgctggccttcgggcgtcctcttcccacccgcacccagaccacttatttcttactaaggagctctccttcccgagatcccgcaggcccaaggttttatcagggtcctgttggtaggggatggccagagctcaaagcctcccagcccccaccagggccttagaggttggacaaggctgcaggaagcttctggaagcagagggctgggtcctccggccccttcctcccccagggctgaggaaacccaagcagctcttccttgctccctagtagctattgcaaagggaggtgtctgattgacctcccttttatctggggtcagtcaacactaggaaagtgtggccattatcaccaatgccatctgcttttcctcctaggcaagccacgcagccccccagcactgcccttctggcccttctaggccagcagtgccccctggggatctggccttgaggcctgaggctggcctgttagctccacccccttgggaatatttcttctctccctgcgccccagattctccagctataagatgagacagagtccttccccacagagtcatgctaaggctgaaatgagatgcaggccctgggcaaactgaacgcacaggtggactaggggagggtcctccctgcctgagtcccaacctggctgcccctcctcaatggatgttaacaccccactcaatggatgttaagccagcgaagtatgaacacatccgtttcaatatta

SEQ ID NO: 108410 - DNA, 1373 bp, Homo sapiens
gttttccgctgaggctcagttttagcagatggcctcaggcctcccttgactgtcctgtggtgtccaagttaggtcaaaccaccccatcatggctggagtctttcggtgcccacttctggccaactgtactcagtttcttggtggaagccagccaagagtagaatgtttccttctggacactgggcacagggaagctgtgtttagtcaccccgcaggcagctacttccaaagtacctggccctgggttcactcagcatctggtccttggggcagccgatgggaccgttgcttgctggtcccagcagtctattctacttccggaggctacaagcttctgaccatcccaccatagtcacctggaggttttgctcctgtttggtggcctctcatctgtcaccttttctgatggagagtagtgggtcagcctcgaatcactccctgggagctctcgccttcattcagctctgctgtctgactcttgcagctggaaagcgaaatccagcggctctctgaggcccatgagagcctgaccagagcctcctccaagcgtgaggccctggagaagaccatgcggaacaagatggacagtgaaatgaggaggctgcaagacttcaaccgggatcttagaggtgagagccagtcacacaggtggaggttggagaacctctgcagaggacttacttcttttgttctagagaaaaattgggaatctctattctctgtcaaaagtgcagatgaactcagagagccaggctgagacccctttggagctgccctgatagagagatgcttgtctctatgtactgggcctaggatcccctcagggatgatggctcttgacagaggaggctcccacccatggggccctgagctgagctggggtttccttatgaacccatccccaatatggaggatacagccccatcctgataggacgtcaggaaaaatcccaagctggcagcttcacctgacactaaaacatctttccttcccttgaaacagagagattggaatctgcaaatcgccgcctggcaagcaagacacaggaggcccaggccggcagtcaggacatggtggccaagctgcttgctcagagtgagtaggggccccactaagaagcctggcctgtgtgcaggcaatgggactgctgcacaccctctggactaggaagattggccttcccccttgcaaagtagtactttgggagcaggtttactgcccactgtatgcccaacactagactggatctggggatagtggggataagtggcttccaaagaagaataggatctagttctgtatcttttaagaagatcagctgacacaagagggaaagccagggagcagtgatttgctgagcttcggtgctgacc

SEQ ID NO: 108411 - DNA, 1050 bp, Homo sapiens
ggccccagccactgtgaggcgggtatgaaacaagcatcctgacattaatcccctctagccctgctgtctgactcttgagagcctcaggcagaaacatttggaaaaggccttccctactggtccctgcctaacactagagggttgaataattatctgcagtaattttaataatatattaattattgataataattaaccatcttcccagtatgcctaggagtggggtgaccccgggctgctctggtgggagccatgagggtctgtgctgtctctgagcaccgtctcttctgttccccaggatcctgcaggcccaggtgcctcctgtgttcctccaacagcagcagcagtaccagtacctgcagcaatctcaggagcacccccctcccccacatccagctgctctcggccatggccccctgagctccctcagtccacctgctgtggaggggccagtgagtgcccaggcctcctcagccacctcgggcagtgcccacctggcccagatggaggccgtgctgagggagaatgccaggctgcagagagacaatgagcggctgcagagggagctggagagctctgcggagaaggctggccgcattgagaaggtaggccctgctggggcttcagaagggcagaccagaaagagaccccgaggggctacctggggagtgggtagtccaaggagaggcagaggagcctgaaaactgtttggctggatttctccctatccctctgtcttccacctccctcactcctcatgcaccctcctgagctgactccagacagctggggaacagccgagaggccggcagagcaggcctggagcatgaacagttgctggccagtggtgattagaaagagcccattcaccagctccttgcacactcgcacccttgccctgcacacaccccctcccatggacacctcccacagagagccctttgtgtcccccacacaacagcaagtctgttccaggccagccctggccaaaaagaaaacttctcctcttggaaaaaaaatgggcgacttgttggaatcacaggccagcta

SEQ ID NO: 108412 - DNA, 1844 bp, Homo sapiens
tgtcactgacccacggtaccgtgcccgcggcagcccgcacttccagcatgctgaagtcaggtaactctccccaccttgggctttccaactcctggctttcttccagcacaggtctctcagggaggagagcctcaagatcacagcttgtgtcagagctagcaagatccaccccacctccaacctgagaagggagagctaatgcctggcagagaagagggacttagctgaggtcccctaagaagttagtggtgtcccttgccttaattcagagataggcaccattgtctgcttagctgtagcattcaagtaactagagtccccagagtacacaaattgcagcagggggttaaaggttagatttcagaaagaacttcctaaaggcaaggttgggaatgattgccaaactgtttccaagttaagcaggaagaaggtgggacttccttctctggagattttttaagaaaatatgagcagcttgctttctgtgattattgggaggcattcctaactagaggctggaaaggcccagtggtctgattagagacctctcagcatcttacaccagggcaggagcttacttgtctctcctcttcatttcctgccatatgctccctgcgtctgcagcctgcagtgggaaaggattctgggtccaagtgggcccttttctggtgaggctcaggagaggctgctgggccatggtagggacttagagtttgattctgagtgtgctgggaggccctcaggggatgtgatttggtttaccttttctaaatgctctctctggctacatgcagagcatggtttgtaaggggccagaatggaagcaggaagacccggggaggcaagaagtctagagagtttggagaaataagtgttcctagaaacaaggccctgcctcacgcttctcatcttgcccagcatcttttccagagaagcagacacagccatcactgctgcatctccccctatgggagtccaagaaaccccaccaagggaccccaaggatttcagactcttcctctggtggcccaaggtcaaagtctggttctcttcatgcctgctgtgttcctttagtaaacacccactttcccaccgtccggctttccttgctctcgagaaatgagtgacatgatggggttggtatggcggaaccagaggttggagcctcatagtttttctccagcctccacccctccagactcgcactttatcgcccctctcagggctcggtcaggaagagtttcggaagctgagtggtggtttcttcttttggaccagccttattgaaccctgtcaggaaaagatagtaatcacggcaaggaagtagactgtttgcaggagaacaaaaagcaggggagggagaggacgaggagaaaggaaagcaagtgtgaagggaaaggagttgctattctttctcagagctaagtcatccccaaagaatgccagttgtgtctgcctggcccagtgcaggggggagcaagttcttgaagcaaccttgagaatggccattttagcagtggaatggagagtttgagcactccagtggggaccctcttcccagctcttactggaagccccaccttaggtagtaggagaaatacatctgcccaatatctcctttcagatgatccagtgaagattatttgttaggaaacgggctagactcctagcctagggtcctgagaagagcaggggggccataggctgcatggcagcaagagtcaggggcaggctgggtgtgcattagtgctgagatgatgcacccagaaggggaattcggtttttgcggggcttctgggacttggaagattctttgtgaaactgaggcagttgtgacactggga

SEQ ID NO: 108413 - DNA, 1149 bp, Homo sapiens
tgcgggctgatttggttaggtgggggttacaggtgcctttgcccccaactagtccaagaattcctctttgtcttccttggaaaatcctctctggagccacgaattggccctcacttagaaagaatgcagcctgctgtccagcccggtgacgtcagcgttagagtatttggaaaacaaagagggctcgagagggagggaggcggacccgcgatgcttaaagacctctccgggcctcgggctaccctcaccggctcgccccaggcgtaccagcggccaccggtgctccaggtccgcccgggctcgtggtggggcgggagccctggctggggtgccagaacctcctagcttggagactgtctttggttccttaggcgagcaggagcccaggccaaggctggagacgcgcgctggcttagaaaggcggccttcagagagcgcagcgggcgagtgcagcagaggttcgcggccgggggcgcggaagcaggtttttgtaaaggcccaggcgtttgatgtctgaaaggacgtgaatctgaggggcttggccgggacaaattcgcgatgagaggccttggagatgttccttgctcccagtccgggcacactatggagcgcctggaatctgtcaggaaggctccgcattccttcctgccgctcccctgccttctctgtgggagtcggcccagagagtgattatcataggaaatgcccgcagataaaactccagggcgaactgaatcccatacgaattgaatcccatttgcttgctttgcctcgggtagctctggagtcttgcacatctacccctcgttgtgtgtggggggcgcatgactgggtgccaggaaggatgggtacagaggtgccctccagactcatcccccactccccagctctgggcagctggagtactggggtggggagagggaaaagatcgggaatggctgctctgccaacatgccatagcccaaactgaagcaggacactagggctagtttagtggcagaggaggggccacattcctcccacccacccccccaacccctgcccatacacacaggacctgtggcagtgtggattctgtttagttttccctggatcccagtttggagatttgtgttggaagaggctgtggaaaggaagctgggtgagaga

SEQ ID NO: 108414 - DNA, 1043 bp, Homo sapiens
atggttctccaggctgagcacggtggctcatgcctgtaatcccagcactttgggagatcgaggcaggtgggtcacttgagcccaggagtttgagaccagcctgggcaacatagggaaactcttcctttactaaaaatacaaaaaaaggttagtccggcttggtggcttttgcctgtagtcccagctacttggaaggctgaggtgggaggatcgcttgaacccgggtagtcaagggtgcagtgagctgtgattgcaccactgcactccagcctgggtgacagagcaagaccctgtctcaaaaaaaaaaaaaaaaaaaaggctttctgagacagcccatttcccatttccccacatcctcaccaatgttgaattttgtcagtctttttaagtgttgactttgtaatgaatgagaaataatatagcattgctggtttagtttgaatttctttgattattagtgaggtgtcagagttcagctagaaatgacagaagccactcccttagtttatgtagaaagtgatttaatatagggaattgagtgtttaacattttgtcagataaggtagaatagcaagttcaggatgagcttcgaggactgattcccagaactccagctcagaacggacccaccaagggagctttcccttccctcatgacctggaagctggggatttgggaagctgggcccccaactgctggctcggcaatcagaaaccaggaagcctcagccatatctggtctccagaaccatactgcctcagctgtgtggtagatgctctacgtcctggccacaacgcccacgaagctggagactggatctagacactgaggtctttgctgttgttaatgcagggaagaaaccaaaaacaaacaaaaaaaaaaccaaaataaccccaatcaaaacacaaaaaacaaggaccttctcaactctgtctgccagtggagttagtaggtctcttgagggtacaaccaatcaagagaaaccaggtcacagagaaaccagctcagctcttagggagccaggaagctgcaggctgtggctt

SEQ ID NO: 108415 - DNA, 1049 bp, Homo sapiens
ctggattacaggcgcgagccaccgcgcccggccctgtgagccatttttacaaaaacttccacctgccttggcccaaacctcagcgttcttaggcacaggagctcatgaacatactgagataacactaaactggactatgcgaagggaccaactacagacctgacacaaatcctcaaggcaagacgatgtctgaagttgagcttgtaaaggaaatggcttccttccttaaaatatcacccaggctgagctctgaaaaaagcacctccagatggtgggttccaccccgctccaccaccccaaaattgcttattgtgtgagtctccatagtctcagaaactgagagtacctttgatgccagtggcttccgggctttttggattgtcacttggtagcagggagcacccataggatgatgcctatgatgagtcagggcccaaccttggaaacagggaaatccagaagtatcctacaagctagccagccttttggattagattatagcagtttcagagaaaaatggggaatcagccatggtcaaggagctaaataagcatcgtgaccatttgggccagaaattgaagggagtgtagcgttaagaattagaggaaggaacctccgaggaaggagctaccccaaagggaagcagaaactggagaaactttagcagtatgaggttctaccactggtgttcacctagaagtgctttattcagatctcagcctgggtactattttagggaaggaagccgtttcctttacagtatgttcgtgtgactcctgtgcctaagaatgctgaggtttgagccaggggctagaaaggaaacttagctggccattatgaatcagggactcatcaaaggcatcacaaacaggaaaaggtgaatgttcaagttagaagagaagagctacattgagatgcaacatattaatatttgagggcctcgtttaacgtgttgctctcctgtcacactctatgacactggtctgtcagctgggctatgcctgtccagtatacactataaaatatgtatcagttggggttggagagag

SEQ ID NO: 108416 - DNA, 1036 bp, Homo sapiens
gggctgccgtgtcctggtctggaggcggcccaggctgccttggtgattctggcttcgcggcctcatggcttgcggccggtttgcgcaacggcctgcgaaccaccaggcgcgtccccgccggcttgggtccgccccgaagcccagtccctcggcctggcccgctatgccctgcacactggcggagtctggcgtggcgcagcccggcgtggggttcggccccgccaggtggtcagcccttcctcggagtccaggtggctgggggcgcttcggagagtggccaggtgggcgagcgagctgcgcccagtactcaccttccccggcggacccaccttccttttcagcggagagaccccagtgcggcctccctgccagggctgctgtctagctagcgctgttgggactacttcattcacggcacaaggggacccgctcatttagtgtggcatgttaaggttggcagcttttaaaatagtgagttggtttaaacggttatgttagtacaagaggtacggaaatgtggcataaatcgtggactgaaattggagaaccctgaactaacggctccatgcacacaaatgagggatagaaagaaataaggacggtttcttaggaacactttaatcatggagatacttgaagacagtacatttaggcttataatgtggtttttcttacgtcccttacgacatcaggagagtaaagatgagtatgatgtcagagacaggtcgtcttttacagtttcagcaccgtacgctgatatgcacagagtagttttccctgagccttatgtctggttaaacttattaaaagaatttattattttaataaagcagtattgtagggtagatgccctgtatttatacagttcctcaagtgcttgcatttattttttagatacgaggaaatcataaggatcgttgattagatttctgttagctgtagcttaatgataaagtgtatatattttcttatttggcatgcagtaccatttttagattgatttttattttgagtttgctttttgactgtggcatta

SEQ ID NO: 108417 - DNA, 2046 bp, Homo sapiens
tcttaatatgagcattaaaagtaaaagctcaggccgggcacggtggctcacacctgtaatcccagcactttgggaggctgaggctggccagatcacctgaggtcaggagttcaaaaccagcctggcctacatggcaaaaccccatctctactaaaaataaaaattagccgggcatggtggcgcatgcctgtaatcccagctactcgggaggctgaggcaggagaattgcttgaacccgagacgtggaggttgcagtgagccatgatcatgccactgcactccagcctgggcaacaagaatgaaactccatctcaaaaaaaaaaaaaaaaaaaaaaaaagctcagcaatcctattctttgcttctggtaatttattaatttacattaatgtcatttaattatttacttcaggtagatttacatctgctatatttttacatgaaaaagatgaaaagccacttgaacatatcttctgtttttttaatgatctgttcttctttataggggatttttgacatcttgtgaagcagaactacaggagctcatgaaacagattgacataatggtggctcataaaaaatctgaatgggaaggacgtacacatgctctagaaacttgcttgaaaatccgtgaacaggaacttaagagtcttaggagtcagttggatgtgacacataaggaggtaaagcaatttatttgttcttctttttgacatttttatcttgtcttttatattaaatgtgtttcttaagtatttgttgaagaaagaatttgtataccaagttagtttattgttttttattataattctgctgttttattttagaagaaaaattcattgtgaaaatgtataagaatgttatcatttatttcaaggatcattttaccttggttacatataatatatacataacttctttaagaaaatgtaaaagggtaccacacattgtttgtttaaccttcatcatattacatgtttatattaacattcactgagtttcatggaaattgcttttggcttcactgtatggctggtattacaaaagaagttccagattaaagaatttgcctcttttggttagatttaaaacaaagttaagagaatctttaaaaaaaaacaaaacaaaacacgtttaccatgttgaaaattagaggagaagaaagaaaagaagaaaataaaaattacttgcagtcccaccactcattgatattggtaatttgggggaaaagtttaataatatttgctggttgccttctcataaatttagctggtaaattaggaggaagtacacagaatattggaagggaagtagaaagcatttatgtgtgagagttgcctgttaatttttggtatggatgtcaatctcagaaggattggaagagttagagttataggggagcactggtcccatttctcactctgaagaccttttctaccagtagggtcaccattcattaaggctgtcatcagcttattcaggtacacttctgtgagtggtacacactgagattgtgattttgttgagaaaacttattaagaatagtttagaaatgtttctcgtaacaaagagtttgacttgttaaaaatgttattatgcttacccagaaaatttctccttggttggccatttgcaacttgggtcaaagtagtgcgtggcaacactggctgtatcaaagttttctgctaatgctgtttgctaaattgcaattaatttaaaatttgactaaaactttgagaatatattttaaaattacacaccatgcgaaaatacagaaggtgatgcaaaagtacagtgaatggtgatcttgtttgattttttaaaaatcataatttaggcagggtcaatgttccttttatggtaggctacttagctagcactttgtttctcctagggcaaaacaaaattctgtttagcaagttgaaatgaaagtggttttctggttgataaatagattgtttattttgttagaaactcattaaagaattatgtgtgattatgataatatttagtcactgtaatgctaaatttgaacttattcctgtggc

SEQ ID NO: 108418 - DNA, 1044 bp, Homo sapiens
gtgtgaccaaaatagtaaatcagtgaaagaaggttatgttctccattcttcaaaactgagaagtttattagtatttagcaaatctagactcactggttaaagtatgccttggtttaactattagtttattatatcaatactgagtttaagatcacagatttgagttgatagtgttaggtagctattacagtattaaaaagatagtgttttgcaattatgtattatctgagtgcccattttggcagtgggtttctagttgtgttttgctgagacccagggctgctgtacagattaagggtaggactaagggacatttcagcaagctgggctctaacccttttctccttctcaccctcacccaatatctgcatttatttattctgcacaggaaacctttcctctttgaaagaaaagtttatattatatttaaaagtttggagacagttccatgcttagcagttgttctagtgaatctaaacctaaatgttgatgttcttcctttataccattgtagggatctggttaaaaaaaaaaaaaggctctttgcactgaaatcttgatcggtaatttatacaaacagtatttgtctatctcttcacctctctcctaccctctctctggcttatgggaagtttttagcatctactttatttgactacagtatatagtacaggatttggacctgtactgtaaataataaaatctttaaatctgcaatagatagatttcccagagatatttctacttgtatttctaaagtaaaattgtgtgattttacctttagaaatatttcgagtaagggaagtttacctctacagattatttatattcatcttcaatgtgtagatgaagtaccagccaggatgctggattaaaacttgtaaaaactaaaaagtttggagctaaaacccaatactgctgggatgcatagcctaaaacatagtagtcagtaaacgtatcattcagagaaaccagtttgagatgcattatatttgtttacctcttttaactcaggaagtgtccaaaaactgatgacagaaccaa

SEQ ID NO: 108419 - DNA, 1714 bp, Homo sapiens
ccgcaccctgccctaagttcttatttcattgagaagacagaagcaattaaaggagaacctcttaatctttctgtcatcaaatctaccagtctgcccatacctgtgcctttctgcacttctaagaccaaccactccacttgtgtcctttttctgtagttatatcctttctcttctgcatcatcaagttctttctgtctgctgaatctatccactggtataaaatacgctgtaacatcacccatctgggggaaaaaccatcccttaatcctatgtctccgtcaagttatttccacatttctgtacttctctttaagaccaaattcttcaaaagagttgtctatactgactctacttctttacctttcacctgtttagcagcccttcacttaggttttcctccttgccacctcagaagcagggtaggaaggggtaacagttgacacatggtgatcctttttgttctgctgtggtgttgttacttccttgggtgttaattgaatcctgactaatgctataccatacccacctaaacacttgtcattgtcgtacttatagaattttttttggtttttcataacctctcaactttttgattgggaagagtgtgatatcttgttttaaacacatgaatcatgatcatttgtacactgacattttctgtatgtaaaagataaaattgcttttaacatgaactgttaacctttaggcaaacaacaagagaaatatcattttacactttttaggttatctttaagtaatacattttttgtttttacatttatttctggttttggaaaccagtaagtattttcttacttttatctacatgttaaatacacaaacatgcatacacacacatattttctgctttattccttttggaatacttggagtacttgagatagtctttgttattattgaagtatatgtgtactcttccgtttgactaaaattaagtttattatttttgacgttgggacaacagtttacatttttatcacagtttttttattgattggctttttagtaatattttaaatgactgaggtgatgtttaagatattggctggatattttttggatatcaagaatgtaaattagatagtccaatttataggtttcaggattttggttttaagtatgggatcttatttttgtcatacagtttggaatctgtgagtgcaacgtgtaaacagctgagccaagaactaatggaaaaatatgaagaactgaagaggatggaagcacataacaatgaatacaaagcagagattaagaaggtaaaaatctgcatacctaggattgcaaaattgtatgtgtttatggacaaagctgtggattgggagattataggggttatttttaatgagaaaaaaatgtagttcaagggaccacttgatatttaggagtggaagagtttgtggaatgtgcatagggaaagtgccttctttctttggcatcgcccctgatgcccaataaatatttttaagataattgaaggctgtcccctttgaactcaaaaactttattttaaacatgttttgatgaaaagttttctaaaagacatacactctgttgcttgcaaaaaaatatgaactgtcacttaatattttcttattgcctaaagatagtatttatgtattgtctcctgtgctatgatgtagttagtatccttgtcagctattgaggtatgcagagctgtttgtgtctatat

SEQ ID NO: 108420 - DNA, 1033 bp, Homo sapiens
ttctgcagatttaatttaagagaaatttaatgtcttgagataaggtgaacttttattttattagctagtaacatattattctatctaaatgctttctcttaacttttggtgctttcttttctgcttctttatagttgaaagaacagattttacagggtgaacaaagttacagttctgcactagaaggaatgaagatggaaatctcccatctaactcaggagttacatcagcgagatatcactattgcttccaccaaaggttcttcctcagacatggaaaagcgactcagagcagagatgcaaaaggcagaagacaaagcagtagagcataaggtgaagcctgaacaaaaccttttttaaatttgaaatttgttttaaagatggagttgattaaagacataattttcataatatttaattcagtgaatttttattagatacctgctttgagctgagagtatgctggctagcaaagagtttagtgagcatggtggggaggtgagagtagacacagacaagtaaagtgactgtatcagtggtgtatggtgagagtcactagagatcacaagcagcctgaatctagaccactcgctgcaaaggccttccagaaggtgtgatagcaaagctaagttaggagcaagctgggtgatggggaggaaaagtgtttcaggcacaggaaaatacagaggtctctaagagagagtagaaacacgcttgctgtggttgaaactagagtacaagtgggatgagtggaaggtatgagactggaaagcagggactggctgctgaagggctacgttagccacgtaaaggagttatactgtgaccttgaggtcagtagggaatggctgcaagcaggagtaaaattcagtggtccttaaatggagaataagcagggagacagagcacccagatgctgttacagtggtaagatggtggcctgagcagtgggcaagggaggcagagggaaatggatgaattctggagatactgggctggtaaaaatgactgggcattgtatttgattggcaggg

SEQ ID NO: 108421 - DNA, 1264 bp, Homo sapiens
gcctcagaatcatggtgggaggtgaaaagcatttcttatatggcagtggtaagagaaaaataaggaagaagcaaagtggaaacccctgataaacctatcagatctcatgagacttattcattatcaccagaatagcacggggaaagaccggccaccatgattcaattcccttggcgttggtccctcccacaacacatgggaaatctgggagctacaactcaagttaagatttgggtggggacacagctaatccatatcaatgtccatctagatattgtctttgataagctgtgttgcttagatggttgcagttggcatctgtgcctggatcttggtgggtgtgtgtgggggggaggaatcagggcacagcgcaggtcttctggtactcccttcataggctcaccttccagaggaagggccagctgctgctttttgtctttgggcacttctacaacttcttctctgtggactgtgtcctgcttacccttggcctggggccatgttgtttcttgagctctggctgcttttatccatctggccaggtgcagacttacgacatcagaggaggacactaggatttggcatcaactttgagcgtggaagaacatgtggggggatgttgaggagagaaatccctcagcatcctagtcccattggacagtggccagtcacccttggagccgtggcagtggaaagggctgagcaggaggatgaggaataattgcaggtggcttcattgacggtggcagcagagagaataccttatctgtgaaaggcagctgggccttgcagttaattgttctgttgttttcctcttggtatttttccagcacatcaacataggacctttgcccttggctttctcattgacgctgaggctgaagccgggaggtgagctggggatgggggattgggaaggggcctcattccaggtggtttcacgtgaattcttggtgctgaactatctgtgcaggttcctccagggctgtctgctcctgggggccgttgtcacaggaccagaaagcccatccggggatgctctcagctcctttgacaatgcctccaaatggtttgggatggtggaatgcaggctgtaaactagatggcaaggaacaaggtgtcagtatcagaaaatccaccgcattttggacaggtgctcagaggccgggggcaggcactggtcagaacacactttgggtgtcgaaccataatgtagtatttggtttaatcctggtcacaccacaggtgtgaatccgttgctggc

SEQ ID NO: 108422 - DNA, 1048 bp, Homo sapiens
ttggtttctgggtctgtcacacacatgcccacatggatctgaatgtggaggcccttgtgacttcaggctttgctttgcttttctcactggctctgtttgtcttttccctctgcatctttggtcaaatttgtctactctattttctcttcttttcctccatttattccgttctcttgtctgtcttctctctagacttgtttcgaaaagagggaaaagaaacatacatttcattgatagaattttaatgagtgaatggctatttccattcattgtttttattttgtctctaggagtctgtcttgatgcgaattgcaattttaaaaatgaactcttttaatagtaaaatacaggaaatcaatgattatcattgaatcaatagcaaatattacaagtgattttgtcatcaaaatgattaataatcacacattttgataaaagatcattaattaaaaagaacagtagcttttaaaaattttaaactgtctttgtaggatgccttccttcttcagtctcattatttttctggagcattctttgcttccttcaccttcttcagccccattcttgattactcttggcttatgagaattatttcaagcctcccttttcttctaacatattttgaatctttcattccagatactcattaagaaccagtagccaaagctgttcattgttgaattttacatacctgatgagagtgactgcttccaccttgcaggatgacatgttccttcccctgctctacctaccctgcctatctctgcctacctaccctgcccacttctctaagagtttcctctagggccaggcgaggtggctcatgcctgtagtcccagcactttgagaggccatggtaggaggactgcttcagccccggagttcgaggctgaagtgagctatgatagtgccactgtactcctcccgcctgggtgacagagtgagaccctgtctctaaaaagaaagagaatttcctctaataaaaacaattattttggagagtgttttatctgtggagattgattttttcagtcattttctctctgac

SEQ ID NO: 108423 - DNA, 1056 bp, Homo sapiens
acttgacagatttataaaatgtatacatgcacagggaccaagaggcaggctggttggacaatgggacacaatttgaagttgtggatggacttctcatttcagtcctgtgagtgtatttcactcagtgtgaatttgaggcctttcttgaatgggagcaggccaaatggccgtcctgccttgctgtgacaaccctatttggacctagagtctgggtgggtgggcagctctgacagagttatgtcccttgtgttcctgcacatcccaggttgggcctcagctgcccatctctggcccaggggggttggtctggcttcccttcttgctccctccacagcctggataggtgttccagcaataaggcattggagtctgattcagatcatagataaatctggcacagttacttacctttcttgggtgtggggaatgtgtcctcctgcaggagctccagctgtggcacaccctgtagtctcaggtgtgcagccctttccaagggcagacacacaacaacaggattgctttctctggctgtgttcactggctcccttgccttcttcagggatggggacagtgagaacctgatagtgaagggcagggttgaccaacaaggtccacagcaagtttctggctcagcctggaagagatgcccctgcttctttaaccaatggtaggtctggcagtgggagaggaaccgagcagaagcactccttgtctgtcttctagtctttttttttttttttttttttttgagatagagtctcactcccgttgctcaggctggagtgcagtggcatgatcttggctcactgcaacctccacctcctgggttcaagcgattctccttcctcagcctcctgagtagccgggattacaggcatgcaccaccatgcccagctaatttttgtatttttggtagagacagggtttcaccatgttggccaggctagtctcgaactcctgacctcaggtaatccacttgccttggcctcccaaagtgctaggattacaggcgtgagccactgcatctggcttgtcttctagtcttaaaaaataaat

SEQ ID NO: 108424 - DNA, 1040 bp, Homo sapiens
gttcttcaaagttatagccatatgtcatttgcctaatcacccagagtctcttccccatttaagtttttaaactcaactcatcaaagagagcatccagatggaaagaacacagccatctagtactttaaataacagcaggaaaagcattgcactgattcagcaacagtctgagatatgtggggagcttgtccttatacttagatagcagttgtcaacaagcatgcatttccatcccccacaattatttaccagtctgtggctccctcaggagtttggaggaatacacaaaataaaattattcaaataagacgagagccagaaagagttttaaagatccatgtggtccagcatttcccccaagaatgttctgagaagcaccagttgtgggaaatgttaataggttctccttggaaaaaaggtcccactgtcaaataaatttgggaaatattgtgtactttatcaccctcttggagattcactgctcatattagcattataaaggccatgagaaatcctgaaataaaggaacccatttaaaattattaaataccatagaaccatatttttgaggggcagggttttatagaactgtagtctgggaaatatttatctggttccaccccttccattcagcagattctgaaattacatgacattggtcctcacaggtggcaaagctgggacacaagcctgcttttctggctgccagttcaatattctgctacctgtccaccccagggcctcagtggttcccaggctttgctgcacactggaatcacctgagggcctttaaaaaatattgatgcctggttctcactcccataccttctgattagttgtggtaagatctgagcataagggttttttaaagctcctcaggtgattctaatgtgcagcaaagtttgggaaccactggattaaggttggtaagggtaaaatttcaccttctacactcacagaagctcagataatcctaccttggaaattaactctacccttcaaacacacacacatacacacacaccggggggacttcatgg

SEQ ID NO: 108425 - DNA, 1028 bp, Homo sapiens
tccctttatcattatataatgactttctttgtctctctttacagtctttaatttgtagtctattttatccaacataaatataactactgctactgttttccgatttccagtttcacagaatgacttttaccaccccttcactttcagtttgtatgcatctttataggtgaaatgggtttctcgtaggcagcatatagatgggtcttgtttctttatccattcagccactgtattccttttaattggaggactgagttcattcacatttagtgttattattcataagaaattacttaactactgccattttgttgcttattttcaggttttgtaactccccttttcctttcttgttcttattgtcctcctttgtggttaagtgattttctctggtagtatgttttaattcattgtgtctttttttcttgatagcattaccctttatttagcaataggaatatcctttatacagaactagtgatttcacatgctttattttcaaaatcaaaatgctcatccacatacttcagaggaccatgggttcacaattcattctaatgatggtgttttttcaactatagtccacaataaccacatatcccagtttttgtttctttgtctatgtttacacacacttttgggtagccaagagctccccaaccagttacacaatattatccaactctctacttcactcataggttgctctgtcatcaaatcagtggcaaagtttacattcacctctttctgacaacccacaaactgaatttttctggagtctttattatcatcaacctggctggcatgcatgaccttctctccagttggcaaggcccataccccaaaacacctggcacctgagggcaggctcaacaccactatgctgctccagcccacagctggtaaatcattgctgctgccatcttcaattgctatttttagtgactgtattacaggttttgcatatggtggttatcatgaggcttaaaaaaaatcttatagatataacaagttattttaaagagatg

SEQ ID NO: 108426 - DNA, 1050 bp, Homo sapiens
tacacagacaaacctagaatacttaaatactataattgtagtatgcaattcactcataactctagtatgaagccccaaagacaaatctattaaaaaagaataatagtaactaaccgcaggctgttaagagatacataatgtaaaactatgtaaattgagacaactaaaagtcaaaatgtgggagggatggagttaacatgtagagttattttttatttttccttaatgtctattcttttattttttatataagttgtcatctctttaaaataacttgttatatctataagattttttttaagcctcatgataaccaccatatgcaaaacctgtaatacagtcactaaaaatagcaattgaagatggcagcagcaatgatttaccagctgtgggctggagcagcatagtggtgttgagcctgccctcaggtgccaggtgttttggggtatgggccttgccaactggagagaaggtcatgcatgccagccaggttgatgataataaagactccagaaaaattcagtttgtgggttgtcagaaagaggtgaatgtaaactttgccactgatttgatgacagagcaacctatgagtgaagtagagagttggataatattgtgtaactggttggggagctcttggctacccaaaagtgtgtgtaaacatagacaaagaaacaaaaactgggatatgtggttattgtggactatagttgaaaaaacaccatcattagaatgaattgtgaacccatggtcctctgaagtatgtggatgagcattttgattttgaaaataaagcatgtgaaatcactagttctgtataaaggatattcctattgctaaataaagggtaatgctatcaagaaaaaaagacacaatgaattaaaacatactaccagagaaaatcacttaaccacaaaggaggacaataagaacaagaaaggaaaaggggagttacaaaacctgaaaataagcaacaaaatggcagtagttaagtaatttcttatgaataataacactaaatgtgaatgaactcagtcctccaattaaaag

SEQ ID NO: 108427 - DNA, 1035 bp, Homo sapiens
tgccccaggggcgcccgcggaggagggtaggcgggggcggcctgggccctcccacttttcagggctcctgggccagttcgcccgcacagccctcgggaacttgttaacaggaaagcctggcagagaaacaaatgccagcgttttggaagaactgagagtcacgtcgttaggcgctgaggctttcttttccttccccgccccctgcccaacctcggcccgacttggccaaagaaggatgtgtcaccagctccgggccgcggacgggattcccggcccgccaggagccggggtacctgaaacaaaggtaaacggaggccgggcggcccctggtcctgcaccgcggccgcgctggagcgcctcggtgggtctctcccgcgccgacctggccgccgccgccgcggaggggcgttctcctgggggacctctcgatggaaaccagctggccgggcttggagttgatgttgcatccgaactctgttgtgctcccgttattcccagtcctcccactctggtaaagcttaaggaaattttatccagtcttggtggtcagcaaatgtaggggaagacaaattattgtttgtaaattataaggtattttctaattaggaaatggcctgaaaacattaaattcttaacacgtaagcaaaaaaagagtaattccttccaacatctgaggaagtattcctcctcaaatcttcatttatgtacaaaacatcccccacacctttggtgccaggcatttttctttgttcttccttagtctcaggccttagtttcttgtaaacagaacccagcgcctagaccctaagaattgccatactaggtcagagcatgggcgtccagttcagtaggcagccggcttgtgttgtagtaaaactgttgtttttttttcttggtggtatgttaaaaattatctcagtttctttcagtagtccatgaaagccttttaaaaattttctaagccactgctaatttacacacacaatttatttacatttattgcatccaaatggcccttttatcacctctggcaga

SEQ ID NO: 108428 - DNA, 1514 bp, Homo sapiens
attctctgcatttccctctcaccttattggaggtttagtctttttgctagttcctcatgatcttcctgacgcctaaaagttggagcattacatggctcattaatactccattcttccttattgactcttatttccttggcatttcagtcagtctcatgactttaaataccatctatacaccaacaactacatgctgactaccaaatgtatatctccaagttaggaaggaaataactgcagtaacgtcttttccttgcttatgtccttctctgacggcctattcccaactcagcagccggaggaatcttgttaaaagtaagttatccactcagaggctttacactttcctacaaggcccctacataatctgaactcctctttgtctttctgacctcatctgttactgctcttccctgtgcttgctttgtcccagtcaaaaaggggacttttttcttcttccaacaagccaggtatgttccttccacaggacctttgtttctcctagtaaagcttcctccctcgttctctgtctcccttccctttcaaactctgcttctcagcactttggggtaaaagggaggggtatcctcccaccccaaccccctagactgagcactaaggctatccccttcctcttgtttgtttattcatcttacactttcatttgaacagagttcctccagttgaaaaagcagcttgaaaactgcttctctgtgagattagaaataaaaagcagagattagtggttgtgaatggaaatgtcattaagggcttaggaatcctagcaagggccacttatcccttccattttgtagatcgtaggcatatttcctattttacagccttggggattgggccccagaatactgctgttgtgagtactgatgtgctcctaccaatgccaagtcttccatcaagcactgtggcccagctgttagcattttgtcttctctcaacatgatacatcttggcagtcttggtattcttctagtagaaggttgagacccctttcccatggtgggccctcaatgagtggaggctcactgggtgctggcagcagtattgagatccaagtattaaaggcaattgagggttctgtgtaatgaagagtgtgttgattctactgagaaatgccccaggccttaaaagggcaaacaggccacatctagtgacagtctatctagatagcaagtttagacacttcatcaggggcagtgtttctcagcctttgtctgcaaacctacaggcctttatgtgggccctctggtgggttcatgttattaaaatctggaatggtgtctgttctgatttgttgttttagaagaaaaggtattatttctaagaattttagccaaacaagtattatataaatacagtctctttgctttccttttcctagatgagctgatttcctagataataaacaagtagataaattaatataatttcagatagtagtaatagtgctatgaagaaaataaagtggagggcttttcccctgatgctgaacactt

SEQ ID NO: 108429 - DNA, 2720 bp, Homo sapiens
gtaaatttatgagagcaaatttccatgttatagaactgttgaagaactaaaagaggatattctttcatcaaaataattctgcagtatcataatattactaaataaaattaaaaagcacaattattaaattattaaatttgccacacatgtgcagcagctactgtatcctgatagtgaccaaacctcaaatataaatggtttcccttcatgggaaaagccattatatttggaagaaaccactgaacattgttattaaatatattttcagctaactgtcatttaggagaattttcatgaaacaagttctagaaagttccaagtcccaccagtaagtggatttgatattatggcagcaacttacagacttgtggttagtactgtgaaccactacagcagcgtggtgatagaccggcgttttgaacaagctatacattattgcactggaacctgccacaccttcacacatggaattgactgcattgtggtacaccatagtgtttgtgcagacctcttgcacatccctgtgtctcagttcaaagatgcagatctgaactctatgtttctaccccatgaaaatgggctttcttcggctgaaggagactatccccaacaggccttcacaggcatacccagggtcaagagaggatctacatttcagaatacctacaacttaaaggatattgcaggagaagcaatcagttttgccagtgggaaaataaaagaattttcctttgaaaaactcaaaaactctaaccatgcagcttacagaaagggaaggaaagttaagtctgactcatttaataggaggtcagttgatttggacttgctttgtggccattataacaacgatgggaacgccccatcctttggtttactgcggagttcctcagttgaggaaaaacctttgtctcatagaaactcactggatacgaacctgacttccatgtttcttcaaaacttttctgaagaagacttggttactcagattttggaaaaacataaaatagataatttttcttctgggacagacataaagatgtgcttggacatcttattgaaatgctccgaggatttaaaaaaatgcacagacatcataaaacaatgcataaagaaaaaatcagggagtagcatcagtgaaggaagtggtaatgatacaatttctagctctgaaactgtctatatgaatgtaatgaccaggttagcatcctatctgaaaaagttaccatttgaattcatgcagtctgggaataatgaggctctagatttaacagaactgatcagtaatatgcctagcttacaactgactcccttctccccagtgtttggcactgaacaaccccctaaatatgaagatgttgtccagctctcagcttctgactctggacgatttcaaactattgaattgcaaaatgacaagcctaattctaggaagatggacactgtacaatccattccaaacaactccacaaattccttatataacttagaggtaaatgatcctagaactctaaaagctgtccaggtccaatcacagtcattaaccatgaatcctttagaaaatgtttcttctgacgacttaatggaaactctttatattgaagaagagtcagatggaaagaaagcattagataaaggacaaaagacagagaatggacctagtcatgagttattaaaggtaaatgaacatagagcagaatttccagaacatgctactcatcttaaaaaatgccccaccccaatgcaaaatgaaattggtaagatatttgagaaatcatttgttaatctacctaaggaagactgtaaatcaaaagtttctaaatttgaagagggagaccagagagattttacaaattccagtagccaggaagagatagataaattgttaatggatttggaatctttttcacagaagatggagacctctctaagagagccacttgcgaagggtaaaaactctaattttttaaatagtcacagtcagttgaccggtcagacccttgtagatcttgagcctaaatctaaagtctcttcacccatagaaaaagtctcaccttcctgtctaacaaggattattgaaaccaatggacacaaaatagaggaagaggatcgagccctcttactgcgaatcctggaaagcattgaagactttgctcaagaactagttgaatgcaaatcaagcagagggagcctatcacaagaaaaggaaatgatgcaaattctacaggaaaccttgacaacttcctcccaggccaatttatcagtctgtagaagtcctgttggtgataaagccaaagatactacttcagcagttttgattcagcagactccagaggtgatcaaggtaagacccaacaattttgagtcctaggaactctttaaaaaatgtttagtgtttgaaaattttataaagaaaaacttttttgttagccattttttgttctactaaagctctgccctacactaggaatgatctcactcagctcagagtcagtaaaaagcaaagattatacaagatgatagaggaaaaaaaaaaagcaaagactttagactcagactggttcctactgccctccccatacccttcatcttcttcccagctctgtgaccaaagaaaaattacttacctttaatatcctcatctttatggtggaaataataaggatcaaaataacttgtgtgaaacataagcaaggttccttacacaaagtaggcatttaata

SEQ ID NO: 108430 - DNA, 1048 bp, Homo sapiens
gtgaactaactcacaagtaattttacagctcccttgtatcttgatattagatcaaggaattaatgtgtgtcctctattcagctatttgcagaaagctatttgcagagggattccaacaggtttaaaaatagaccttctggacctggagtacagtactcacatttttctcttgtagagagggaatccagttttagagacaacaaatacaacttaatgaacattttacaatttaggtagaaaattaccagaatttttcatagaaatatccttgagaaactagaatttctgtattaaaagccttgtttgcactttgaatcaatagattatatattagcgtgcatacacatctgtaacaaatgtttgtttaaaaagtatgttaatcctggtaatctttttttaaagcaagacgtatttgtctatatagacaattgtgtatgtgtgtgtcgtaatgtatgtagataacaaagactggtggttacttctagatcattaaaaatgtcttccctaagcaagctgtgcaattgagtcatttctgcctatgatgagtactttgcagagtccctactttcttgcttaaaacctatggcagtgtttcaccaaacaagtgcctaacattgactacaatataaatcaaggactgtacaaatgctggccatccaaaatccagcaagaaaccatagttttatggttattctgacccagaataatctcaaattatttgggtaaatatgaaattgcttttttgtaggtcaaaaatgatcaaatattggaaatgctacagtgacataatagcacaaggatactattctgaatgaatatctaaatgatactgtgtttatagggaaagacaaatggagaattgaagtattttacccagctaattctattctaatgctgctcctagactggactgaaaccactgtatccaaagtgagcagatgctaaacttgctagtaaatctggcagaatttatgttactaggttttcttccataatgtttgtaaactaccagttttattcagctactttaaggtttaaattatatatc

SEQ ID NO: 108431 - DNA, 1046 bp, Homo sapiens
caaatagttgatggagaaacctatgtatttttttaaacgtaaatctatgtaaacttgagtactggcagataattaataaattaattaatttagtgcagataagcattccctagaaacatgcttaccacctttaagagtacagtgagcccttaatctctcctgtctctgattgtggtttcttatattgctggtgagaattttcagtaaatgaatactgtttaaattttttgtgtctcataatcttatttttcttttagattcaaaataaaccagaaaagaaacctggaacaccactcccacctccagccacctctccaagtagtccccgacctctctccccggttccccatgtgaataatgttgtgaatgcgccattgtccataaacattccacggttctactttcctgaaggactcccagatacctgtagtaatcatgaacaaactctaagcagaattgaaactgctttcatggatattgaagaacagaaagcagacatttatgaaatggggaaaattgcaaaggtaatgtaactactaaatgatttacaatctccccttctttagaaaccctgatcccctccccttctctagaaacccggatcccaccccccttcactgcctctttgctctgtttttaagcatgcatggaattgttgttgtttttcccatagtgatcttccatttcaacctcctatttaatataagaatcccttccaagacatcaccaactcataaattcattctctgcttgaatgctttcagagactagaagctctaccttgccaggcagcctggcctattgtcaaatacttgtttgttagaaaatttttccttgtgctgaataggaatctgatttttagtctcacccattgatcataactgccctaatgccagacaaggaagcattagaccatctcaatacagtcattttacccagaaataaatggatttgacaataggaagcaagtctttggaactttcaaatatatccaactgcttctgagttaaaatcttatccccctaatgtcaggactactctgactt

SEQ ID NO: 108432 - DNA, 1076 bp, Homo sapiens
gctctttttaccactgcttcctttgggagaagaaaaataatcagtgaaagggaaatgaagtgggtaggaatgactgcaggtaaaattgttaagaatgcactgtgacctcctacctccaggattgcagcttccatcttccttctctggtcttctcctacaccacagcacacacatcctcaatctagacacatttgcttcttatctcctcttctcccattctatccaaggttttctccagagttgcaattctgctaaacccattaaaacaccagctaataacaaagatgttcatgcccaaataaaagttaggatataaattatcccagatgtatttgaatttccatagagtctagaagaccgagagtcttcaagactcaagtgaataaggctataataaccagaataaggccctcttgaatcataccaccttgatagccacccttctgaccagttaatcaatcattaggccaacccaggagatacttcccacctcatatgccttcccaaaacattgagccccataagcattacttgaatcaggcatcactgtataaattagaggtaaacaaaagaagtgatgtgaaggcagttgggaagtgaagacttgtgagcagagaattttttttattcttcttggaagtacagaggcaaatccaaaatatatagatgtagatttaaaaatacagtgctgatttttactaggaattacacttaacataatcaaaaagctaaaagttaaattggtcccaagtatgttcataaaatggcctttgagaaagtagtggagatctttaatgtttttatttggttttattttccttttggaaccaggttattcagagaatattctacacagtcaacagatcttggagtggaaaaattacttcgacagagataagaaaaagcaactttttgcaagtatgcctttcattagaattcatgtgtaatgagcaatttagataattttcttactttatttaacaaatatttgagcgcttactctattcaaagcactgtcactactttcagtcattaagcatttatcaaatacctgtcgtgggatgctggaatgtttt

SEQ ID NO: 108433 - DNA, 1043 bp, Homo sapiens
tgctggatacagagtcattgctgaaaggatcaagtttaaaatcttccaaggcctttccaagacccttcccaacctagccccagcccacccctccaggcttatctattgtgaagccgcctctgtacgttttatccatgtctatggaatttatcaagtcaggtttagtgtctgtacacttcactcttttgctccagagtgcatgccttcaggcagagatcccttattattctcttcatttttaccccctcacccaaaacattccagcatcccacgacaggtatttgataaatgcttaatgactgaaagtagtgacagtgctttgaatagagtaagcgctcaaatatttgttaaataaagtaagaaaattatctaaattgctcattacacatgaattctaatgaaaggcatacttgcaaaaagttgctttttcttatctctgtcgaagtaatttttccactccaagatctgttgactgtgtagaatattctctgaataacctggttccaaaaggaaaataaaaccaaataaaaacattaaagatctccactactttctcaaaggccattttatgaacatacttgggaccaatttaacttttagctttttgattatgttaagtgtaattcctagtaaaaatcagcactgtatttttaaatctacatctatatattttggatttgcctctgtacttccaagaagaataaaaaaaattctctgctcacaagtcttcacttcccaactgccttcacatcacttcttttgtttacctctaatttatacagtgatgcctgattcaagtaatgcttatggggctcaatgttttgggaaggcatatgaggtgggaagtatctcctgggttggcctaatgattgattaactggtcagaagggtggctatcaaggtggtatgattcaagagggccttattctggttattatagccttattcacttgagtcttgaagactctcggtcttctagactctatggaaattcaaatacatctgggataatttatatcctaacttttatttgggcatgaaca

SEQ ID NO: 108434 - DNA, 1522 bp, Homo sapiens
cttgaggccaggagttcaaggctgcagtgagccatgttgtgcctctactccagcctgggcagcagagtgagaccccatctctaaagttaaaacaaaaaatctgaaggcaaaacaccacaaacctctaattctataactagccaaaataccaaccatattagagggtagaaaaaaggcattttcaaagacccaagatctcaaaaaatgtacctgccatgctctttcattcaagaagctactagagaatgcgcagagtaacaaaataatgaggaaacaaagaatgaggaaaatgcaagaaacaagaattaggagaaaggcgaaaggaatccctggatgaaactgagcgaggcctagagactaagcagcccagattagagtaggtcagaagcaaccaaggaagacttcatcaagaacatgcaattgacagagcacctcatggaactgagtgtggatttagacaactggcagaatttgggggttgaattagtagcaagtacacagaaaactaagcaaatagataaaagaaaaatataaaattataaattctgaatgttgagcaagttaactgtgttaagaggatgagaagggcgtgtaggtaaagtggtgacaaattacagaagaactaaagttcaactttcataatgtgaaatctactttttgtttggttggttggttgtttagttggtttttatcttgaggcgggagtctcgttctttcacccaggctggagtgcagcagcgcagtcttggctcactgcaccctccacctcccaggttcaaacaatcctcccacctcagccgcccaagtagctgagattacaggcatgcaccaccatgcgcagctagttttttgtatttttagtagagatagggtttcaccatgttggccaggctgatctcaaactcctgacctgaagtgatctgcccacctcagtctcccaaagtgctgggattacaggcatgagccaccgtgcccagcctctaataatagttctgaaaataaatacaagaaaggagcgatatagacgtgttatctgaaaataggaaggtaaaaagcaaaatggggttgaacacggttgattctgggtggaaaaataaagggaagaaggggtccgccattttctctaacaaactttgtaaaactatatctaagcctgaagtgtatgtaatatgtaacttttactttaaaagaaacatactaaatctggataaataaaaggtctttaccaggcccatgataatgattgtccttatcatctagcattgagtattggttccgctgcatggatgtggatggagacggtgtactctccatgtatgagctggagtacttctatgaggagcagtgtgaacggatggaagccatgggaattgagcccttgccattccatgatttactgtgccagatgcttgacctagtgaagccagctgttgatggtgagaccaagcaatgggacagatgcactgttcacctatgtatcagaggagggcaaagaatcctagattgtcctaaattatttaac

SEQ ID NO: 108435 - DNA, 1046 bp, Homo sapiens
ccatttgaggtgtagaaaattaccttaggagttttaccttagcacctcttttaaacctgttgaaatgaaacatttttcaggtaggattttttcagcagtatacatttgtgtgatgatctatctccaattctttgtctttgattttttttatttctcgtggctgtcttctttccaatcaggatgttgagaacgatgggcctgagccctcagactgggaccggtttgccgctgaggagtatgagacgcttgttgcagaggaatctgcccaagcacaattccaggaagggtgagtaagtttccctatgtcttatagaatttttaacaggaatgcgcatgtccagagtattaaaacccccttacaaaatccttttctgttttttccatttttgaatagcataaaaatgtgatttagccaactttagttaaatgattattttttccagcaatcttcactcatttcctgacagagtcttctcatgtccatttcctttaatgagtctcatctttcactggaaaccgagatcactgaacaatcaaactactgttttagtgatattgataaaccctgtacataaaggaggaggctaaaagaactaaagctctggccgggcacggtggctcacgcctgtaatctcagcactttgggaggccgaggcgggtggataaccagaggtcgggagtttgaaaccagcctgaccaacatggagaaaccctgtctccactaaaaatacaaaaaaattagccgggtatggtggtgcatgcctgtaatcccagctacttggaaggctgaggcaggagaatcggcttttacccgggaggcagaggttgcagtgagccgagatcatgccattgcactccagcttgggcaacaagagcaaaactccgtctccaaaaaaaaaaaaaaaaaaaaaaaaaaaactaaagctccttcaataataataaagatgatcatgtttagaacaaatctttattatacatggttttgtgcaggaagtaacttctacatgtatttctactagtcagggcataattccataaagggacca

SEQ ID NO: 108436 - DNA, 5140 bp, Homo sapiens
cctgaatagctgggattacaggcacacaccaccacacctggctatccaaagggttttaaccctagtttgtgcttctggtgtctgatcttcacctctttaactttatagcctttggaggaagaggataagaaggtggaccagaacgtattgcttggggagagagacacagaatcaaggatgattttggtttgagataactgaatggggaatatggcatgaaatcaagcgagctaattgaagattcttccgtttcttctaagatatattttctgttatctggtctagtgagtttaattcatctcaattttgatagactacttatgtcatctaaacttcagtttatgaaatggtaaatttattttactaaaatctttgctttcctccttctcccccttaggacatttgctacaagatcctattgcacccaccaactccacctgccaacattatgtctgcaaaacttgtaaaggcaagaaaatgatgatgaaaccttcctgtagctggtgcaaagactatgagcagtttgaggaaaacaagcagttaagcatcctagtgaactgctacaaaaaactatgcgagtatataacacagactacactggcacgggatataatagaagcagttgactgttcttctgatattttggctttgcttaatgatggatcattgttttgtgaggagacagaaaaaccctcagattcatcctttactttgtgtttgacacattcccctttaccttcaacctcagaacccacaactgatcctcaagctagtttatctccaatgtctgaaagcaccctcagcattgctattggcagttctgttatcaatggtttgcctacttataatgggctttcaatagatagatttggtataaatattccttcacctgaacattcaaatacgattgacgtatgtaatactgttgacataaaaactgaggatctgtctgacagcctgccacccgtttgtgacacagtagccactgacttatgttccacaggcattgatatctgcagtttcagtgaagatataaaacctggagactctctgttactgagtgttgaggaagtactccgcagcttagaaactgtttcaaatacagaggtctgttgccctaatttgcagccgaacttggaagccactgtatccaatggaccttttctgcagctttcttcccagtctcttagccataatgtttttatgtccaccagtcctgcacttcatgggttatcatgtacagcagcaactccgaagatagcaaaattgaatagaaaacgatccagatcagagagtgacagtgagaaagttcagccacttccaatttctaccattatccgaggcccaacactgggggcatctgctcctgtgacagtgaaacgggagagcaaaatttctcttcaacctatagcaactgttcccaatggaggcacaacacctaaaatcagcaaaactgtacttttatctactaaaagcatgaaaaagagtcatgaacatggatccaagaaatctcactctaaaaccaagccaggtattcttaaaaaagacaaagcagtaaaggaaaagattcctagtcatcattttatgccaggaagtcctaccaagactgtgtacaaaaaaccccaggaaaagaaagggtgtaaatgtgggcgtgctactcaaaatccaagtgttcttacatgccgaggccaacgctgcccttgctactctaaccgcaaagcctgcttagattgtatatgtcgtggctgccaaaactcctatatggccaatggggagaagaagctggaggcatttgccgtgccagaaaaggccttggagcagaccaggctcactttgggcattaacgtgactagcattgctgtgcgtaacgctagtaccagcaccagtgtaataaatgtcacagggtccccagtaacgacgtttttagctgccagtacacatgatgataaaagtttggatgaagctatagacatgagattcgactgttaaatcagtgggtcttttaaacctactcctggtagggaaatagctacagttttacggcagctatggttctgttggtttaacttgccggagctcctgcatatagatcacttgtatcaagtgttttcattgctaagttatatgtgttagtgtcggggaaatagtttgcagataatggaggagtaaccctacaactatatgtccttagttcttacagaacctcatagtttgagaacaaagctgatgcaactgatttatacaaaatgaactttggcaagaaaaataacattaacctcattgtttatggccatgctttgtgcataatcaaagtttatgattaaatgtaaggaagtggtatctagtcagtccataaagattgtgctaatttttttgtggaaaagtagccattagttcaggaaactcagtgctgccttcagatgtcattgatgtttctcctgttggaaagctgatgtgtccagctcaacctttgtgctgacatcataccatttctgatcatgaaatattggctactggtgtatgtagcagttcttaaatcagcagtattatgaaaaaaaattccccctcattagaatgtttaagaaatctttttaaaaagtaaaattctgtcagactacaaatgtttagctgttactcatttctagggaagaaattctaaatccctccttcactttgagcagtgttctaattggataaatgaaggagagtagttttattctgaaggtaattaaatttagactatgtagtatgtgacagaatttttttaaaattataaaaagattttatttagtaattgggatttacttaaaataattttggaataatgctcccagacttgcccagatttgtgtattgtacttattgccactggccgccactttgacttattttctctaatagtttatttgccacagtctttattttgaatatgctcctagtttttttttagggtgctgttcattatgaaggcttctttatagaggcctaataagaatgcctttttataaagcctgtgcatttaggtaggttgaagctaggaggattttctttagaatgctcttttgcatgtaaagcacaaagtatgtttcagtttaaatgcacttcttccggttaatttttatggggaagacaagtgagtcacaaacattctgttgaagggaaatctagtcagttgcttgaaagagcacagcccaaataaaacaaggactgactaggtgtaatgaaataacctgtgatttaaaagaagagctgcagctttgacagtgcttatttaaagaaaaatactgctggaaaatttccaatttctactacgttcaccatctctagtaagatctgacatatgctgaagttatgttttgatttggcacacagcatgttcaatgatggttactcgcctagtacaagacatggagaagaaacctttggacacagagcagatgacacctccttctgttttgtagtgtatcctggtgtcattttctgtgaatgtggtcaggtagagttgtttttgttgttgttgttgggcttttttttctttttttttttttggtctcttttggtggggtgggggtgggctaaagccataggaagaaaaatgtgatgtatgtgtccagtatgtactattttgtttttgttttgcaagaagagttgaactatttttgataacaagagtaaatggtggaaaatgcttcttagttgtcttgtctttatttgctttccaagatttggaattttatttaattcctttaagtgttagcagtgtcttatgaaacgtgtatttacctaacgtttgtaacagttttgtgttgaacccagatgccctgctatataaagttgtaaatctgttctttattcactaatgatcactgcaaaaatgattagaaatgagattgtacacatggatgaggatatattttgcaaatcgaccaaactttcctaatattatgatcttaaaattcatagagtactttattgcttcccaagtttgataatcttgtgggtttttttttttttttgatgcatgggaggttggcaatatagacaaagtggaaatcattagtatgtgagggccttgattgttatgtaatattgccaatgatgaattcaggttgtttttagcacaagtttctcttttttatgctggtattctcactgccacatttttggaaacctgtattacaccttaaatctatcaataaatgatagttttctaattctatgttgtagaatactgaagagtttgggatagcatgctctgaatggtctgtattatatacatctggggaagagtaatcacagtgccttgatttttatattatttttctttataccacgagttacttaggaatgctgacaaatggctaacgagggatgattgagagattattactgaagtaactggatttacttcatcaggatttgaaaccaccaaagaacagcagcatttaataagacacatcctgaattgttgagtccttgttattaatataaatgatcaaatgatcttttaccttaggtaatagttttagagctgacaattttatctttttggttagccttattaagtctgcatttccgggaggaggtgtagtatggtcctagggataaagaattccttttatttcattgtattcttagttaaaacaatttattggtgaccttgttgaagaagagtaaaagttttatgggaatcagatgaaaaataaattgtccataaccatatcatagataaaaaacagaaatgctttagaaaatactaagttcaaagtatggtattttatacttttctctttttaaaaaaattaaaagctaggcacagtggtgtgtgcctgtaatctcagctacttaggaggctgaggtgggaggatcacttaagctcaggagttcgaactcagcctgggcaacatagaccttgcctctgaaataaaatttaggtaccccaaaacatgccgttacacattcttttaaaataatgcattatagatgaggctaaagtctaccttgattcctgtgaactccgcctcattcacaaaccctggtcctcttccctatcccctgaagaaatcatttctcagtatattgtcattactacaaagacctttctttgtagttttcacatgggctcaaagagttattctct

SEQ ID NO: 108437 - DNA, 1052 bp, Homo sapiens
atcatgcccagctcatttttttttgtgtttttatagagacgggtttcaccatgttggccaggctggtcttgaactcctgacctcaggtgatctgcctgccttggcctcccaaagtgctgggattacagacatgagctactgtgcccagcccagaaccatagaattctttttttcagacggagtctcactctgtcgttcaggttaaagtgcagtggcaccatctgggttcactgcaccctccgcctcccgggttcgagcaattctcctgcctcagcctcccgagtagctgggactacaggcgcccaccgtcaacgcccggctaattttttgtatttttagtagagacggggtttcaccgtgttagccaggatggtctctatctcctgacttcgtgatccgcccgcctttgcctcccaaagtgctgcgattacaggcatgagccaccacgcctggccaggaccatagaattctaatgatgtgatcttcaattattttgtgaaatcttattacctggataagagtcaggattgctttatcttgtttggcagttagagaacagttgttgattcacaatatttctggtcagttaaaacattttcacaggttagtcgatagtattgttcattattttctctgttcttacagactcttagtagttttgtcagttattgagttgaaatctgaactatatgtgttttcagtttctcttcagagttttatcataagtttttgctgcatgtattttgaagctctgttggtaggtttatgaaaccttttggaacttatggaatatagttaaaataactaccattttaataactttgatttttctagcctgggcaacatggcaaaaccctgcctctacaacaaatacaaaaattagctggacatggttggtgcgtgcctgtagtcacagacccttgggaggctgaggtgggaggattgcttgagcccaggaggcagaggttgcagtgatcgaggtcgtgccactgcactccagcctgggtggcagagtgagaccttgtctcaaaaaaaaaccaaaaaacaaaact

SEQ ID NO: 108438 - DNA, 1286 bp, Homo sapiens
ccgcggcgtcttgcactagatccgggaagccgctgcccgaccgtcgtccttgccgtcgccgccgcctccgcgccctgtactgggatggagtaagaggccctgcagcccgggagaagcgtgccgcgcctcagacggggccggggcctgctcccgcgcctgccagctcgacttgaggaggcgcctccgtgtccggagatggagctcgagtgcaggccgcctgccgagccgcggggctagactgagctccgagtcccgccccgagcgcccaagccgccgcgttctgcgctctgtggtcgctccggacgaactcgaacgctggtttctctctcatatttttggtctggaagtctcagggacggaggggcgccaaggccccatgtgtgggaggattgtttcagctccacaaacttgcacggattttggttacttgtttggccaatggttcggctctgatttcttccgaattgttgcaaattcgccatcgttccctggctgcttactaagttggatccggaatttcttttcaaccgggagccattggtgtcgaagtgtctgcaatgaaccccgtgaatgctactgctctctacatttccgcgagccgcctagtgctcaactacgaccccggagaccccaaggcgtttactgagattaacaggctcttgccttacttccgacagtccctttcgtgctgtgtttgcggtgagacgctttttattgttcccttttcaatgcttgtttttaaaagccttctgggcagtggtaacgtgagcgggttgacggcctggtggttggtattaagcttttgttatttgtgcagcgctgtacggtcattagttttgaaacttgctgagggacttttgcccggcgtttcagaaaggcagagaaccctttcataccgctttgtgcagcggcgttaacgttcaaaatggtttaattcgcctcggttcatctggtggtggtggtttaagtgggggtaagatgcatgcacaaggctttttttttttttttcttaaacctttgccgcgggagctgattacgtacctacggcggttaaaagtggttaaacatgatcaaaacatgcacatgtgggcacatgtggcgtgtttgcatttccccaaactggtgttacgtgggagtggtgggctaagctgatgaacccacagctggagaacccggcgcggaactttgccccaggttcctccacaaatgctttgacggtttgacggttaacagcgagccggggaaggctgttggtactcgaagtgctttttagctggtgagacttt

SEQ ID NO: 108439 - DNA, 1040 bp, Homo sapiens
ctatattgctcaggctggtcttgggctcctgggctcacctacctcggcctcagtcttgcctcttgatcaaatcactcatctctctgtgcttgatttacctcatctgtgaaatccagatagtaagctagtgcatggtaagtgcaaaaagcaacacctggcacaatgcttaataaatgttggttaaatcttataatcattttctgtaggaagtgggacgacaaagttaagggtctaggtggtcagagaagagcaaggactatgtcccttttttgtgcagccaggcaggccctgtactttttctctgcgcgaccctcctcgggcagcaccgggtctcgaactctcacgccttactcccaagcaggttctgtagtccagcccccgcggctccctacagccagccgatgctgcgcaagcgccgtacccacgctttagcacatgcgtactcaggtgcgccggtaggggacgcgccggcacagcaaaaatggcggcggcattacgggtggcggcggtcggggcaaggctcagcgttctggcgagcggtctccgcgccgcggtccgcagcctttgcagccaggccacctctgttaacgaacgcatcgaaaacaagcgccggaccgcgctgctgggagggggccaacgccgtattgacgcgcagcacaagcgagtgagtcctgaggggcctaagtgagtcccgcccctggcgtccgcgacctatcactgcgtgcccggcttgcggcgtccgaggcctccctgccaatccgcacggtgcctggaggggccggagcaagggtgttcaccttgaaaacctgtagcgtttctcgtggaggcgggtataaccagcagaagcacctgtgtgctttttcatactgtttaacccttgggatttagacggatctggctcgtctctagccagctcaacacttaacataagcttttgggcaacttattaaatctctgtgggtcattttaataataattcttccttcacaagtgtatcgttagaccatagatagcaaaatgataggcgctcagtaaaaacc

SEQ ID NO: 108440 - DNA, 1026 bp, Homo sapiens
aggttttagggaactgctgcccaggaggggaggggagagaaaatacttgcctcagaaagtaatatgctgaccatcctaccagttacggggagaaaatgcacatataattcttaaagaacttcactgattaggtctgttgcctcctgtatagaatttctgtgggaaaaaagccaaatgttatcttattgttgtctttatctttccacagataatgcctcaaacatctctgtaaccagatgcttttgcttttctgttttggcagaggaatgttacggcatccggagtcatccctcagatttctctgatcatgggcccatgtgctggtggggccgtctactccccagccctaacagacttcacgttcatggtaaaggtaagaaagaagggcctgtttttggtgccgtttgagatttgtgcagttccttacctgcaataaaaataattcctgacccagatctaggttgttacctgcattctcattggctttcagcatagtgatgataaggtgttaatggagagagggttttggcatgaaatctgtagcttgtgggggttcagtggcaggggatgcttatgtacttcattggtgggtgattttacttgttgatctgaattgcaaatgattttcaggtaatcaaagaatcctgtcctttgaccagatagatgactgtttactgagtcctattcaagaagtttctcatggaaggcttttctgtaatctgtttattgggaagttgtttcttcctttatttcttcagctccttgccattttattacattgtgtccataatggtaaaggataaatctgatctcacacttcattttcagaggtacatatctttattacatgactttaatggacttatattttaaaaatatttttaaatgaagtctatttgaagttatacatgagtaattaccattcatctcaaaccttgctttaaaaaaatcagccttttcttcttaaaatattaataaaaatgaacattggatgccaagacagaatggttggggggaaaaagtagt

SEQ ID NO: 108441 - DNA, 1055 bp, Homo sapiens
tccatgagcctgcatgtgacaggttctgtggtgattttgcccagagggcctgcagttttgctttttgaaggagctttagcagattaacctaacagggaatgtgaacccacagtggtttatgcagagctctgcctttgcatttccaagtccttgttcttttaatgttccaggaagttgggctgggctctcccagggctgtgtcttgttcactataatgtccttcagtgccctacacggtacctagaatgtaggaggtattcagagaagataaatgaaagaataacgtttagaggaataaactcattttttcctctaaaagagaaccagaagatcttttggattgatacttgtcccaggttcagttaatatggtggttaaaaaggaatgactctttggtgactgctttgtaagcccagcagggacagaactggcccagtccctatgacgtgtcaccccatttcctttcccaccccattcccacaaaaggtaactggctcttcctatgttgactatacctgccttttttctgcctaaagtgaccgtctggttcctgagcttgacacaattgtccctttggaatcaaccaaagcctacaacatggtggacatcatacactctgtaagtgccacatctgtttgtcttgcctgtcctagtcagccacattcatgggcattgtgcttcggcttagtgaggaagcactggaccacttggcctccatgtcagacagcacaggtcgggaatagggtgggcacaggaccagtggccactgagtagtgtgttctggaaagacctagtggctatagataccctagtggcacagatggacttgagggctggagataggagtagtaagggccagcagagctcaggagtctttagaaggccctctgaggatcataaattaggggccatgtccacagagtctagagtgaggccagagtgatcattgttaagtatcattggggccctctgctcagagggggttttgtctttatagagaagagagtacacagggcatcctagaaggttggactgtgtgtgtggaggtccgtggg

SEQ ID NO: 108442 - DNA, 1031 bp, Homo sapiens
aactcagcaatcccattcctagcaatttaccctgaagatacacttcccaccatacaaaattatagatgtacgaggttacgaccattacgttgtcatttgtaattgcgagatactctaaataacctaaatgtaaattttaaaataatgtaagccacgtgtagattggttgaataaactttggtacatcacacagtacagtactatgcagaagtgaaaaagaatgatgatctctatgaactgataggaagtgattcccaggacatattaagtgaaaaaattcaaagtgcaagagtgtctgtactgttactttccatgtaagaagggtaaattaaaagatacaaatgcaaacacacacataatacatcagaaaataatgagattaataacagggtaggtgggactagggtggaagggatggggaaggaacactattaaactgtattagtattttacatattaaaaaataaaatcaagactggggaaaacctttaaaatgaaatacaaacatgaacctgttttaaatgagtgtcttttgaacctatattttgactatatacctttaatctaaagaccaaaatagctgtaaaaaaattctagctagtaggtctgttttttgtagctaagttagcagttctgaaaccattttctctgtatttgaggatcgaataaataagtacattttgagggtagtagcagccagattctgctatcggagaagggagttgtgaatatggcaagagaaaaaaatctagaatgaaccctatagttgcactggagtaggattagaattatcagcatgaactcatggtttttcatatagctggactttggacgttttagaaggagtcacacacacacacacatccctaaaaggaacccaggccttttggagaaatggctgattgtagggctggggcaggaaagaaaccaagatgaaccagaaagtaagatacttccaaaatataaggtagtgctcaaagaatgatggggacactttagaaggacacaggaaccagcatgaaggaactttg

SEQ ID NO: 108443 - DNA, 1050 bp, Homo sapiens
tttactccttggaactatgctaggaggcagtatcgtccctactttgcaggtaaggaaccttaggtcaaaaggcaaagtaatttctcaagggcacgttgccatcatcagtggagccagaatctgattggaagctctgaggactctctaagaccagcccttgaatgctgcctcccactgatggctccctgcggcaaggccggctgtgtctcagctggcggcagccctttggtctgtagtgagtctgtagtagtctagttctgggcctctttggccagtgacagacaggtggattcttcatcttccctgtttcctggagtttgaggggtccttgttaccattctgcaacaaagaagtgttggtgcctccacagaaaccagctttggatggctgctgaggacaaatccccattgtggatagaactgggaattgcctggatactcagtatggataatctctctctttctaggatgcttggatattaattcatctgtgaaaggggctcgttttgtcagattctgtgatgcattcaatattccactcatcacttttgttgatgtccctggctttctacctggtaagtttttgacagagtgggggctaggagagttgcctttcccagtaaggtgcccactttatttggagatcttcttgcagaactccccgaggacttgtgacttctccatgtattctgggtgtccagaagatagggctgtgtaaggaatggccctctccagaggtgggaaagacctcacagctgagagtggcaggataaccatgtgaggacttgtgggtatctagtaactcttcctcatgtctaggcacagcacaggaatacgggggcatcatccggcatggtgccaagcttctctacgcatttgctgaggcaactgtacccaaagtcacagtcatcaccaggaaggtgaggacctcatgttggaggccatgaccctgctcactttcctacagcatagccgtggtgggaggtctggcagagttttaccagggctggaaggagtacaccttgctcatccttaaaaagatctcttgagg

SEQ ID NO: 108444 - DNA, 1042 bp, Homo sapiens
ccttttcttgccaagtgctcctaggccagaagttggggagctgtcagaacaggccagctcctgggatacaagggggaattcacagggcctaccatctctgtatcaggttgggcactgcttatactgctggccccagggatggtgcccaggctgagcagaaggttgaggggtggcatcatctcgggatgcagatgatccactcccttttctgtgcttcaccagggtttgtggatgacatcatccaaccttcttccacacgtgcccgaatctgctgtgacctggatgtcttggccagcaagaaggtacaacgtccttggagaaaacatgcaaatattccattgtaaacaaatcaaaggaaaagaaaccaagaactgaattactgtctgcccattcacatcccattcctgccttttgcaatcatgaaacctgggaatccaaatagttggataacttagaataactaagtttattaaattctagaaagatctcttttgtgccttactgtaaaattatttacttttttaaacattttaagttgtattttttgagcataaattcgatttttttaggtggaaatctgaaaaatcaatacaactagaaagaaaaatagtacacagtgttatcatctagagctgatttttatttcacacctctgggtattgttctttttcctctcgagttagtttttttatccataggtgagatatatagtaagtttttaaggcaaagtatttcttaggcttaagtttccttattttaaaaatagggtaatatgccctatctatctcctaattcctccatgaattgaggattaaatgtgatgtttgcaattgtggtatatgtgtttagcagtacagatgctcaataaggcatagcaccctatgttgactcaggttatttccagaaatgtgttcttaaaattaaaaaaaaactttttaattgcgaaaattttcaagccgatagaaatgttgcaagaagtgtattgtatccacttcacctagattctccagttggtaacattttctccatttgctttatttct

SEQ ID NO: 108445 - DNA, 1037 bp, Homo sapiens
taaagaaagagtgaggaggtctaatgccaagagaaactttttaagacagtctggctctgttacctagattggagtgcagtagtggtgcaatcttggctcactgcaacaacctccaccttgtgggctcaagccatcctcctaccttagcctcacgagtagctggtgtgcgccatcatacgcagctaatttttgtattttttgtagaggagttttaccatgctacccaggctggtctcgaactcttgagctcaagtgatccactcaccttggccttccaaagtgctgggattacaggcgtgagccaccatgcctggctgaaaacttcatttctgtagctgcattgactctatgtggtcttcaaaagggcactgccagggtgcaattatgcatgtaagcccagagtctcaagccgtgaggacccatgctacaggccagtggatgggtgttccctgaatgcctcatgcaaaactcagtttgcaagagactccctcttaaaccacagatgacttggcctacacacactccagagaaatctaaggaatgaaagaaagtgagctattcctaaattctgctttcttaaaaaaaattaaaaagccaaaacaacaaaaccaccaactcactaataaggttaacttgctgccatttaacagattatcagaaattgcaaactctctcaagagccacaggacagaaaatcatctctttaaagccatacctggtagaaacaataggatgactaccacaagcctgattttgaatagtttattaaaggaaaggtgaagcatcagtttcaaattgtacaaaaggaaaaaaaacctcatattgcaaatgtacaatttacagaattactagcaaaaccaatcaaggagacaccgaaaatacaaaaatttgattgacttcaaactgaactggaaacccattggagtagatatttagcctttttgtgtggcatggtagtctacaattctgtcagcatctgttttccatacaagactgtcacgcaaaggatcaatttgtgcatgtgccagggcacctca

SEQ ID NO: 108446 - DNA, 2483 bp, Homo sapiens
tatttcatataaaagccagattctcttcttcctttcaaaattgactcttagcagttccatatatttatgatactgtcagaaatattagctgattatcacaattcattgtcttaatgatctcagaaaaaaattaagaaaccgatttctctttccagcctccatcaagaaatcggcgagagagagctgagctaaggccagacttctttgactctgcagctatcatagaagatgattcagtaaatgtcaaattattactgctttttatttatggttcctgggtcctgtttatgcatgaaattaataattatgtttctcatcatttttctagggatttggaatgcctatgttctgaagtctgaagaaaatttacaaatctggaactctattatttagagctagaggcctatatactgtgatagcttgtatggggaaaaacacttttgatgtgatctgatttgttttttaatcaaatgattaaggtcaatccctttttgcagtgacagaagaggagcatgtaaattacccaagggaatgttggtgaatgtcaactcagaaagactgacctgaaaatcatttgtgtcctactattggacttatcccaatacagatgtgtgtgtttttctggagggaggaagaaattttaaatttttaaaacagctgtcaagataaacactgttatacacctgttttatgaaaactcaacattgagtaaaaaaaaacatatttttaactttattttcctgttgtacaatttaaaaaccgttttaacattttgcctttttatgttttaaaagctaaccatttttattaaacctatgagtaagcagctcatcctaattgcgaagagtgttttggagttcactggatttggttgacctttgtggaacacaaataatgaaggagcagaacattgacaagctaagatgaaattctgacatagtacatctctgccaaaaaccacacaccctctgtggatatggatatgaattcccagattttatatactcttgaataaaaggtttatttttatttataagtgggcataaaataagaaatgtccatgcagccatttttccaacagatgctgtacaccgttcattttatatagactagggagattcaaatacagtgcattttctattggtatttgttctgtgcatttttagcaacttctaccagcaaataaagtattctcagtaaaacgaaaatgattctcaagttatcagtttgctgtttttaccacttatttcatgccctgccaaattcaagttacacagacttccattttcttaagataatcaatcatgaagaaatcctttatcaatcattcaaaagtaattttaagtgtaacataactgtgtttacttcccatgcacttaatacccttatgcgctaattttgtgaattaagtttactgattatagaagtatgtgctgcatagaagtctgtgcttagagggtgaagttcctaagcttaccttgaattacagctacatttcagtgttaaatgtgcatattaagaataattcttttggggaaagaaattatgaatcttcaggacagtctacaatggtttagagttacattctgcctagacttttatgacttgctgctattgttttaaaaaccccacttagtctctctcttcctttctgatttctaaagtaagcctcagaatttccaaaccaattcatccacagctgtttctgggctggtttttaaagtagctgcaacagaatcatgaggctttccctttttatcaaatacgaaaaacattttttaaaattctgcacacccagtgatcatcttttgtgcgggaaagcaagatgatgatggatgattttattcatccttttagtaaagacacaaaacatttttctcaacatttgtacagttctgaaaaaaacctggtcaccaaaaatatcttctctgctaattcagcaattcttgggctccagttaggggagctggggcctcactttctcccagaattgtgggcttcactggaagtgaaggtgcaggaatgactggactgtccaccccagccctgcctgcctgtggttttggccagggagcaagccatgaggtgccctggcacatgcacaaattgatcctttgcgtgacagtcttgtatggaaaacagatgctgacagaattgtagactaccatgccacacaaaaaggctaaatatctactccaatgggtttccagttcagtttgaagtcaatcaaatttttgtattttcggtgtctccttgattggttttgctagtaattctgtaaattgtacatttgcaatatgaggttttttttccttttgtacaatttgaaactgatgcttcacctttcctttaataaactattcaaaatcaggcttgtggtagtcatcctattgtttctaccaggtatggctttaaagagatgattttctgtcctgtggctcttgagagagtttgcaatttctgataatctgttaaatggcagc

SEQ ID NO: 108447 - DNA, 1978 bp, Homo sapiens
atgattctgttgcagctactttaaaaaccagcccagaaacagctgtggatgaattggtttggaaattctgaggcttactttagaaatcagaaaggaagagagagactaagtggggtttttaaaacaatagcagcaagtcataaaagtctaggcagaatgtaactctaaaccattgtagactgtcctgaagattcataatttctttccccaaaagaattattcttaatatgcacatttaacactgaaatgtagctgtaattcaaggtaagcttaggaacttcaccctctaagcacagacttctatgcagcacatacttctataatcagtaaacttaattcacaaaattagcgcataagggtattaagtgcatgggaagtaaacacagttatgttacacttaaaattacttttgaatgattgataaaggatttcttcatgattgattatcttaagaaaatggaagtctgtgtaacttgaatttggcagggcatgaaataagtggtaaaaacagcaaactgataacttgagaatcattttcgttttactgagaatactttatttgctggtagaagttgctaaaaatgcacagaacaaataccaatagaaaatgcactgtatttgaatctccctagtctatataaaatgaacggtgtacagcatctgttggaaaaatggctgcatggacatttcttattttatgcccacttataaataaaaataaaccttttattcaagagtatataaaatctgggaattcatatccatatccacagagggtgtgtggtttttggcagagatgtactatgtcagaatttcatcttagcttgtcaatgttctgctccttcattatttgtgttccacaaaggtcaaccaaatccagtgaactccaaaacactcttcgcaattaggatgagctgcttactcataggtttaataaaaatggttagcttttaaaacataaaaaggcaaaatgttaaaacggtttttaaattgtacaacaggaaaataaagttaaaaatatgtttttttttactcaatgttgagttttcataaaacaggtgtataacagtgtttatcttgacagctgttttaaaaatttaaaatttcttcctccctccagaaaaacacacacatctgtattgggataagtccaatagtaggacacaaatgattttcaggtcagtctttctgagttgacattcaccaacattcccttgggtaatttacatgctcctcttctgtcactgcaaaaagggattgaccttaatcatttgattaaaaaacaaatcagatcacatcaaaagtgtttttccccatacaagctatcacagtatataggcctctagctctaaataatagagttccagatttgtaaattttcttcagacttcagaacataggcattccaaatccctagaaaaatgatgagaaacataattattaatttcatgcataaacaggacccaggaaccataaataaaaagcagtaataatttgacatttactgaatcatcttctatgatagctgcagagtcaaagaagtctggccttagctcagctctctctcgccgatttcttgatggaggctggaaagagaaatcggtttcttaatttttttctgagatcattaagacaatgaattgtgataatcagctaatatttctgacagtatcataaatatatggaactgctaagagtcaattttgaaaggaagaagagaatctggcttttatatgaaatagattttttaaaaacaaacagtacttttggcttttaattatgttggcaaaaacaaggcacaaaactttcaaactatcatgaataaacaacatgttaatacatataaataactttgggcctacatgcccaggccatatcttccctttaaagtcacagaaaaattacagaattcattaactactaggtgataaacctctgtgaattccccaaagcaggtagatggaaagttattggaagg

SEQ ID NO: 108448 - DNA, 1083 bp, Homo sapiens
actccatctcaaaaaaaaaaaaaaattccttagaggcatgtttacacacacttccatgtgccaataagtttagagtacaagtgcagatttgactccataaagactgaggaaaagatgctatattcttccttgttgaattctggagaactttcagctgccaagccaacataatttctgttagttggggatctgctgtccagctaggtacacctgtgagtgcggcaccagcccaaaacagaggtctgagaacccttgtttggcagagatttggttgatagtttaagcatctaacaattagcctcagccagcttctcttggagacttacagatatctttgggcaacttattgccttttttataaaaaggcaccagaataaatccagctaattcctccaacatgggattaagtaaacctaccttggctttcttagcttggggctcattagctaaattcatcatctgctgctacaaaattaataatagtaccctctcttagtcctcagatgcagatctcttggttaggccagccgaagttagaagacttaaatcggaaggacagaacaggaatgaactacatgaaagtgagaactggagtgaggcatgctgtgtaagtgttacatggagtatcacaagaacataacaactatgtgatgcccatcattttgtgaaatgacttgggtttctttgatgtttggtcttaggagttaaaattataattcgtgatatgctatgcagcataggaaaggagggtgtgagttcttaacactttcagcatttaaatcctagctctgccacttggcagctgcatggccttggacaagctctaaaacatctgtgctggctaggcgcggtggctccgcctgtaatcccagcactttgggaggccgaggcgggcggatcacttgaggtcaggagttcaagaccagcctggccaacatcgtgaaaccccgtctctactaaaaatacaaaaaattagccgggcatggtggtgggcgcctataatcccagctactcaggagggtgaggcaggagaatcgcttaaatccaggaggcggaggttgtagtgagtcaagatcacgccac

SEQ ID NO: 108449 - DNA, 1071 bp, Homo sapiens
gcctcaccctcctgagtagctgggattataggcgcccaccaccatgcccggctaattttttgtatttttagtagagacggggtttcacgatgttggccaggctggtcttgaactcctgacctcaagtgatccgcccgcctcggcctcccaaagtgctgggattacaggcggagccaccgcgcctagccagcacagatgttttagagcttgtccaaggccatgcagctgccaagtggcagagctaggatttaaatgctgaaagtgttaagaactcacaccctcctttcctatgctgcatagcatatcacgaattataattttaactcctaagaccaaacatcaaagaaacccaagtcatttcacaaaatgatgggcatcacatagttgttatgttcttgtgatactccatgtaacacttacacagcatgcctcactccagttctcactttcatgtagttcattcctgttctgtccttccgatttaagtcttctaacttcggctggcctaaccaagagatctgcatctgaggactaagagagggtactattattaattttgtagcagcagatgatgaatttagctaatgagccccaagctaagaaagccaaggtaggtttacttaatcccatgttggaggaattagctggatttattctggtgcctttttataaaaaaggcaataagttgcccaaagatatctgtaagtctccaagagaagctggctgaggctaattgttagatgcttaaactatcaaccaaatctctgccaaacaagggttctcagacctctgttttgggctggtgccgcactcacaggtgtacctagctggacagcagatccccaactaacagaaattatgttggcttggcagctgaaagttctccagaattcaacaaggaagaatatagcatcttttcctcagtctttatggagtcaaatctgcacttgtactctaaacttattggcacatggaagtgtgtgtaaacatgcctctaaggaatttttttttttttttgagatggagtcttgctctgtcatccaggctggagtgcagtggcacaatcttggc

SEQ ID NO: 108450 - DNA, 1375 bp, Homo sapiens
actcctgacctcaagtgagcagcccacctcagcctcccagaatgctgggattacaggtgtaagccaccagctaagatggtttataaagatttgagcagattaaagcattatttacaaactgtcctgataaaatattacctagttgtttttttttttttttttttttttgagatggggttttgctatgttgcctaggctgatctcaaactcctgagctcaagcgatccacccatctcccaaagtgcagaaattaaaggcataagctactatgcccggccaagtttctacctataaaaattctaaattattctaatatgataaggcttcttaaaaagtattactgctttggttttccttctgaagaattttaatcccaatacatagtatgaatcctgttgcttttcctctcaagtctcagagatgtgtgtgttaggttcctcttttgccatcgagcatcctgtttctcctcgtatttctcaggtttctgatatttttttagacctgtacattctagatgggcttttctgtgcctggaaatacctacccattgtctggttaaagtaattcctctgatctgaagctcactactcaatctcttcttagttaacaaagacacatttcatcatcttctattcataacacatttcattcaacatttaattcaaaacttttattctctaccacacttaaaattttatgataaaaagattattatcacttaagttctgaacctggtaaactcgtctgtcagctgtctactacatgtcatcttttccagaaaatcttcctgtattcattaaaagtttggtcactgtctatatgttcccacaacctcctgtgtttggcacatcagagcattgaccatggtgaaatcaaacagcctgtttctgttctctatctgcactcacagcatattaatacttaatctgtagtacttagcacagttcttaggaaggcgcttggtagaaactcactgaatgaatggataactccagggagaactctcatcttaaatagaaatagatacttctaatcctttaaagattcctcaatgaaaatatttcttttaatactttctcattttcatctctgaaggatgaaactctgcagcctaagggttctgtgcatgcaacccatcttagtcattttgtaaatctcaaattgacaaaaaagttttctttttttaatttaaacaaattaggttatctggttccacacaagcttctcttaatcttgaaaataatattgactgtaccactaatgaacattatggatagttaaaatctctaagctttagtttcttttgtgaaaaatttagataacagtgttgacttataagacatttatacacttatacgtcattcgctatgtgcca

SEQ ID NO: 108451 - DNA, 1304 bp, Homo sapiens
ttgcttgagccagggaggttgaggctggacaagaccccagcctgggcgacagagtgagaccctgtctcattaaaaaaaaaaaaaaagaaaagaaaaacaaaaggccaggtgcagtggctcatgtctataatcccagcactttgagaagccaaggtgggtggacctacttgaggtcaggagttcgagaccagcctggccaacatggtgaacccctatctctactaaaaatacaaaaattagctgggcgtggcggtgggcacctgtaatcccagctacttgggaggctgaggcaggagaattgcttgaacctgggaggttgaggttgcagtgaaccaagatcacaccactgcactccagcctgggtgacagagggagatcctgtctcaaaaaaaaaaaaaaaaaaaaaaaggaaatgcctgtagtcattctttagagaaaagtccaggatcctacagtacaaagacaagattttatattttctttctctggacttttaaaaaagactttaagtcccaaagctgtaatttgaaaggaaatcttaaactttgtggagattttgttaaacttgaacagtaacatttatattaattcttttattccttttgaaatatagatgctttgagctggagctgcaaggttaaaaaaagaaaaggaatacagatgctgcctaatttactgactgatgctagatagatatgaggcattactatacaatgataacgttcagataatttattgaatgctacctatgtgccaagcactgtgctcagtactgtgtgtatactaagtagtttatttgtagtatctaatattcacgggaactgacaggataaatactctgctaatccttcatttgatgaatgatttaaacttagagaggttaagtaatatgctcaaaggttgcatagctgataatgagaaggccaggtctgaattctggaactctcatgttagaatttgtactcctcatcaacagtcaatactgtttccccaataatgaaaagaatcattagatttaaattctaattaattttgccacagattttagcaaaacctttattagtcatttttttaggcagcacaggtaagatgctgaaagataagaagttataaaaagaacaagagagaaggctcagatcacagacctcctcttggtttggagaaaatttattagaagcatgaagaaggatgaagattatttgagaaaataagcatttttactttgaggcttctcttagtaattttaacaggaatgctttgttttaatagagcaatttttaggtttttttttttttttaacatat

SEQ ID NO: 108452 - DNA, 1453 bp, Homo sapiens
tgtgaacagtggaagtagcagcagcaaaacctcatcagtaaggaataagaaaggacgacctccacttcataaaaaacgagtagaaggtaagtctgcctttacactataagaaacaatttgcctggttttaaagagataaagtagtaaataatcttttgaagcaagataatagtatcaggcacatgattttcttgtatattttattcacaatgagatgttaaggcaaaaaggttgaaacagatgaagtaagacagaaaagcatcaaggaaaaagaagttgaggaagcatggagcacaaaggaagacagcccaaaagaggaaaaaattagctaggtctataaaatcaatccccatactatatgcctctaatacattaaaatataaagtaagatagtcacaatgctattctattaaaattcttcctaatatagatgagatacaggtaatttgagggtagatttctgcagcaaattgaatataccagaatagttgttttccagttctaccacttggttggaacagtaagacagtgatggcctccaggtgtggtggctcacatctgtaatcccagttactcaggagaccaaggaaggaggatcaggaaattaaggccagaaatttgagaccagcctgggaaacatagcaagactcccatctctaagaaaaaaaaaattttaaatgggtggcatgcacctgtagtcccagctacttgggaagccgaggtgggagaatcacttgagcccagaagtttgaggttgcagtgagctatgatcatgccactgcactccagcctgggcgacagaggaagactcccatcatttaattttttaaaaaggcagtaatggctaaatctggttttataaccctcttggactatggggaatgggaagttaaattgtcatgaaaatctgatcaacagtaggtattcctatatgttaaaaaaaaaaaaaaacctaaaaattgctctattaaaacaaagcattcctgttaaaattactaagagaagcctcaaagtaaaaatgcttattttctcaaataatcttcatccttcttcatgcttctaataaattttctccaaaccaagaggaggtctgtgatctgagccttctctcttgttctttttataacttcttatctttcagcatcttacctgtgctgcctaaaaaaatgactaataaaggttttgctaaaatctgtggcaaaattaattagaatttaaatctaatgattcttttcattattggggaaacagtattgactgttgatgaggagtacaaattctaacatgagagttccagaattcagacctggccttctcattatcagctatgcaacctttgagcatattacttaacctctctaagtttaaatcattcatcaaatgaaggattagcagagtatttatcctgtcagttcccgtgaatattagatactacaaataaactacttagtat

SEQ ID NO: 108453 - DNA, 1026 bp, Homo sapiens
tgtattagaggcatatagtatggggattgattttatagacctagctaattttttcctcttttgggctgtcttcctttgtgctccatgcttcctcaacttctttttccttgatgcttttctgtcttacttcatctgtttcaacctttttgccttaacatctcattgtgaataaaatatacaagaaaatcatgtgcctgatactattatcttgcttcaaaagattatttactactttatctctttaaaaccaggcaaattgtttcttatagtgtaaaggcagacttaccttctactcgttttttatgaagtggaggtcgtcctttcttattccttactgatgaggttttgctgctgctacttccactgttcacagacattctatcatcttcacccccagtgactaatgaatttctataggagatgagtggaagccatacatcctccctcctttccatcatctgctcggtaaggaatttctctaggtatgaatgactagaaacacaatagaaacagcagtgattttcagagaagcagttcatacatcacttactttttcttaatctgaggctctctttctgcaggttctgaagaatacctaaggacacacattaaactattaacagtggtcacctttggaaagagagggactgaggagttaaggttttgtttcacttattcttgggatactttaaagcaagtgagtgtattacctaagggtgtgtatgtatgtacggtctttcctatatttcttcctttgcttttaaacaccaatgttaaaaaaaaatcagaagtttagctcaaaaagattattgagttttcttataaagtgttcaagccaaagcaggatttctaagatggtggagtaaggaggctggcatgccctctttccagcaaaacaacattttaactagtaaaaattataaaataccgtaatttaaagtatttgccaattctcttaagggcatacagcaaatggagaaaaatttattcaagaaaatctggccaggcaccgtggctcacgcctgt

SEQ ID NO: 108454 - DNA, 1364 bp, Homo sapiens
gagcccagggcaggcggatcacttgaggacaggagtttgagaccagcttggccaagatctctgctaaaaattagatgggcatggtggtacacgcctattatctcagctactcaggaggctgacgcgtgagaattcctttaacccgggaggtggaggttgcagtgagctgagatcccaccactgcactccagcctgggtgacagagcgagactctcaataaaagaatgtgtttttttattattattagaaacaaatttctgtctgcatttaatcacaccactagcatgaaaattaactcaagctattaataatagacaatttgtagaaagggaacagagtagctaaaattcaatgcaagaagagaaacatttcaccttataccttttacatattttttaattacctattctgaaaataactgtttaaaattctgagctataggttttttcttctttttttctttctatcagttatttaatgaacttgttcaagagcaaggtcccaacctagataggacatctgcccatgtcagtggcattaaagaactggcacgtcgctttgcccttacatttggattggaccagattaagacacgagaagcagttgccacacttcacaagtgagtgagataaacactttgttatgcagaatctgatttacttgaattttaatgaaataactcttatatgacccatttttaaagtgacgatagaattttaagttataagaactttggagattagtttagagattctaaactgggaggatgtttttaatttgaaaaaacttaaaccacccatttgttcatcttacaaagtatggaaagcaaaatttaataacatattattgtctggtctgtcagtaagaaaacagtgggtttgagagactatacaggctgggtgtggtggttcacgcctgtaatcccagtgctttgggagcccaaagcaggaggatcatttggggccaggagttcgagactagcctgggcaatgcagtaagaccctgtctcctgcaaaaaataaaaatgagccaggcatagtggcatgtgcctgcagtcctagctacttgggaagctgagccaggaggatcacttaagactgggagtttgaggttatagtgagctatgattgtaccactgccctccagcctggaaaacagagtgagaacctgactctgaaaaaataattattatagaattttttgttaagactatacaaaactgatttgggtttcattattgtgaaaacagaagtaacagaaaatctttagtaaactcacacagcttggtaccattaccagctctaagaagcaaatattctggcaatgtattaataattctctgtccagggtatcttcttacctct

SEQ ID NO: 108455 - DNA, 1099 bp, Homo sapiens
aacatgaaaaacattttcttatctcctggtgcccttcctcatgaaatactttttatatttttcttcttaaattactactttttaaatttccagtttgacatttcatctagtccaagaataaatcaccttaggattgcatctatttgaaatatgaactctaggattttcttccaaaagaaaagacacctaacctatgtctttgtaccagaaaatatccacagtaatgcactgacaaaatgatataaaatgacctagtttaaatgagatgagatacctagcaaatattaagcacagagaagtgcaataatgttatttccattctttgtctccctctctccaaatttcttacctgttgcaaactgagaatgagagtcttggcacactgaattttatcaatctgcctggttttactcagtgtttccttaataatatcaccatagtcattgtaatactgtgagggaaagaaagaaaacatggctttaaaattactgacatttcatgagataaagaataggttggtgtcacctcctttgaaaatgaaaaaaaaaaaaaaagaacaggttggttggtaaaagaaaggaaaggtaaataaaaaagtgttttatttcttcatcttaaacataacaggagttaaataactaaagttacaggaatgcacatttgatgtttaagattatgaactaatactagtaaaaccaaaaaagctgggaattccaggaagagaggtggtgagaaaaattccccattcttgttttttcttgtttgatacagggtctcactcaagctggagtgcagtggtgtgatcgtagctcactgcagccttcaactctgggctctggtgatcctcccacctcagcctcctaaatagctgggactacaggcatgtgccaccacgcctggctaatttttttaaaaaatattttgtagagatggggtttttgccatgttgcccaggctggtcttgaactcctgacctcaagtgagctacccacctcagcctcccaaaatgctgggattacaggcgtgagccactgcacctggccttctccattcttgttttttgtttttgcttttatttgtttttgagatgaagtctcac

SEQ ID NO: 108456 - DNA, 1051 bp, Homo sapiens
caggcgtgtgccaccacatctggttaatttttgtatttttagtagagatggggttttaccatgttggccaggctggtctcaaactcctgacctcaggtgatccacccatcttggcctcccaaagttctgggattacaggtgtgagccaccgcacctggccttatgctatttttttttcttttttttttttgagatggagtctcactttgtcacccaggccggagtgcagtggcatgatcttggctcattgcaacctctgcctcccgggttccagcgattcttctgcctcagcctcccgagtagctgggactacaggtgcccgccaccacgcccaactaattttttctatttttggtagagatggggtttcaccatatgggccaggctgctcttgaactcctgaccttgtgatctgcccaccttggccacccaaattgctgggattagaggtgtgagtcaccacgcccggccccttatgctatttttaaagaggggattccctaccagcaagcaagcctctatatctagggactcaggaacagggctgcaaacacaacatggtactcttaatggaatgctgaaaccatgacttgtaagtcattttctaaatcgaagatatttatttctggttttcagagaattttaaaatattgggttgaatataattttggagaagttctgaatttggtatgaatagacacctacttttacattccagattcttttaaatgaatattctgagagctgaacatgaaatggatattaaacaagacctgtatctttcttctctaacttttctagaccagccaatcaggcacttgtgattggacataatattaacaggaacacatgtattaaagaacaactctggagtcatggaacgaccgaaaggaaaggcttagaactaactaatggaacagaatttccaataaataaaaggtgggggcaaagattctctaagaaaagaagtgaaataaaatgcttacatgcgactaaaaatttgttcctacaaggatcactattatttctcacgcctggccccactcccttc

SEQ ID NO: 108457 - DNA, 1027 bp, Homo sapiens
ctttgctccagtgccccctagtgctggtcctgtggaagtaaccttcattttttctttgtagcagaaaacatccttcttccttcagctccttctggacatacacaaagacatttaaagagccaggcaaataagagttagggctaaaatgggccgggcatggtggcttacgcctgtaatcccagcactttgggaggccgaggcgggcagatcacaaggtcaagagatcaagaccatcctggccaacatggtgaaaccctgtctctactaaaaatacaaaagttagctgggcatggtggcgtgcgcctgtagtcccagctacttgggaggctgaggcaggagaatcgctttaacccaggaggcggaggttgcagtgagccaagattatgccactgcactccagcttggcgacagagtgagactctgtctcaaaaaaagaaaaaaaaaaaaaaaaaaagagggctaaagtaatgccctattactttctttggcctgcggatctagaatttatccttattttttttctctcctgggaggagctgtcctgctttctgtagtcttatatttgtgctactctctctgccttaccctgcatgtttctattctagactgcaatagggagggcctgggccaaacatccctacctctggaccctcaccctatttcaaatcctttatgtcaaagaaagtcaatataccctaggtagctacaagtccaattattattgaggtatttagctgtaaaatttgtccttccatcactgtcttgactaaaggttctcctctgaaaattccaacttgttgacctgcaaacagactggagaaaagagcagtaagggtgaaggtgggactgatagtggccaagccccatgagaagacatgtttaaccttgctgtccttcccacaaacatgcattcctacaaatgtgttagaaataggctcagatgtgtaaaaatctacaggctgctttctgtagctctttcttttctcttccctacccactccttcagaatagcagtgagcaagagata

SEQ ID NO: 108458 - DNA, 1890 bp, Homo sapiens
ccagcctgggtgatagaacaagattcggtctcaaaaaaaaaaaaaagaaaaaattgtcacaaccaccccaacctttaacaattttttttcagcctaggaccaatgcagaataatgcattgcatttagttgttacatttgtttttgtctcctttaacctggaattgtttctgagcctttttgtttcatgacattttgaagagtatagactagttattttacagaatgttcttacttgagttttgtctgatctgcatgtttaaattttagtttcacattcttggcaggactactacataaatgatattttgtcctcaatgcatcacatcaggaggcacgtgatgtcagtttgttcattattcatattattaactctgatcactgactaaagtgaggtctgcaaagtttctcctgtgtagttagcagtgtcctttttaattactgaagtgagctgtagacgtattctttaaaactatgtaataatcctgtttcttatcagactctgacataatagttttagtaccgatttatgatctttgcctgactcagttattactgtgagggtcacagagtagtgactaaaatgatgattttctaactctgtcgtttattttgtatttcttagttggcactctactgtaaggaagaactttcctttctccatttattcattcattcactcactttttacagttctgaattccttttaaaaaaaattggtatcactgtagactcatggatacctattttatttctgttttatttgacaagttgtaaatcagtactctttttttattttggttctcaaattgtagcagatttggccagtgggagttcctttcaatccagttcctatgtacgttagattttgtttgtttgtttgtttgttttttagacgaagtctcgttctgtcacccaggccaatatggcaaaatgctctctctactaaaaatacacaattagccgggcgtggtggtccatgcctgtaatcccaactactcaggaggcttttgtgatcttggctcactgcaacctccgcctcccgggttcaagcaattctctgcctcagcctcccaagtagctgggattacaggcacccaccaccacgcccggctaatttttgtattggtagatatgggatttcaccatcttggacagactggtcttgaactcctgaccttgtgatccacctgccttggcctcccaaagtgctgggattacagatgtgagccaccacacctgacctttattattattattttttaagcatctccatcctttctgacacacgaatatgtttcagggtctgcttatgcccttttctgtgctaatgaattatttttaatctatgaaaagtactaaaagtgattgcagttgtgtaacaacaataatcattagcttgtgaaaagcacacatttcagaatttattgtaatatctcttatacccacttttgtagaataaagtcaaggtatatttaaattctattctgttttgtgactttgttcctattttctgttggtatagttttaaatttaaatatcatcccagataacctctaagaaaaataattttttattttattttttatttttttcatgaaaccatttgaaagatgaaatattttctggaaaaataaaatattaatttcctgctttatagtttgtacaaccctcagtagattctaaaaatggaaaaccaatcgatcatttacaggtgtttttgtaaatagtatttgccatagaacaaaattgtgcgactacacccataaaaatgaagtataatcatgtatcactaactttgggcctctcaagtcatcaggatagaaaacttttattttgctcttacatacaaggtactattttaagctccccgcttgtctgcccaagctgga

SEQ ID NO: 108459 - DNA, 1779 bp, Homo sapiens
atttaatgagtatttcctttatggatctttttcaattctgcaaggaaatgaaaaaaaccttttttttttttttttttttttttttttttttttttttttggagacagagtcttgctcagttacccaggctggagtgcagtggcgcaatcttggctcactgcaacctccgtgtcctgggttcaagtgattctcctgcctcagcctcccgagtagctgggactacagtcatgcgccaccatgcccagctaatttttttgtgtgtatttttaatagagacagggtttcaccatgttggccaggctggtctcgaactcctgacctcaagtgatttgccagccgcggccttccagagtgctgggattacaggcgtgagccagtgtgcccagccgaaatgaaattattttattcttccactcacctgaactgagctcaaatttaaatttccttccattctagaataaaacagatgcatttttgtttatttcagtgcacatgatctcacaaaatgggatctctttggtaattgctacagattattgaagactggaattgaacatggagccatgccagaacaggtaggagtttattggtattccttctgtatgactctagaaagttgtttttctgaagtcatatgattatcagaagccttttatagaaagtaattgacgattcattagggcagctgcctcttttgagagaattattgctgtagtaattaaatgttattgataggtgtattatactggcttatgtgttaagagtagaaaaaacttttgctataacatatcttaaaaattttactgttaaggtagacttttctctattaggagaaataccattaatatctatggcagcaattttaaaactttggataatgaaaattgatgatgggtatattccagccgtgttctaggtattaatcatattaagtatggcttagtttttatattagaaccatagttaaattaacatggcagcctttaatagactttagaactttgtacactcatatatacaagttagagtagaaggggcagaaattcaacaaactttgcctaatctgaaagagacttcagtagaataattactctacttgattcagtatgagaaaggaaggagttattttgtacactgcagatattcatgtagaccaaaatatcatctccatcattaagtgtaggtaatatttaggggttatctcattcatttccatttggtagtatagaatgcttagatgataccttattactctaaagcagtaagaatttcaacagatacaataataatcttatattaaaaattaatcatgggctgggcacagtggttcacgcctataattccagccttttgggaagccaaggcagggtggatcacctgaggtcagaagttcgagaccagcctggccaacatggtgaaaccccatctctactaaaaataaaaaaattagccagatgcagtggcatgcgcctgtagtccccagctacttgggaggctgaggctggagaatcgcttgaacctgggagacggaggttggagtgagccaagatggtgccactgcacttcagccttggtgacagagtgagactctgtctcaaaaaaaaaaaaaaaaaaagttaattatgaaaacagtactttattattgctgtgattaattcatttaaattgcctaacattagtcattttcttggtccctacaaatgtccctgattatattaggtgtttttattgtagtttgtgaaaagacactaaatattttaccctctcttttttaaaatg

SEQ ID NO: 108460 - DNA, 1032 bp, Homo sapiens
caggattgcgccactgcccttcagcctgggtgacagtgtgagactccatctcaaaaaaaagaaaaaaataaatatataaattaagacaagacaagatggtctgctttgatattgttaactttctctcatgttaataagatgtgtaagtcagtaaataataattactaagtgtttcagtaatgaaggtggtctaggtgcattttacttgttaaaatatatactattaggtgtttcattgtggtttaaattctgtttacattggattttttaaacttccggtcagaaggttggtttggcttggcttgggtttggttggttggtttaagctagaaaagtaacttaccagatgggaacatttttggaagtcaaccacagtttcactgatcgaatctaggtaggcagagtctgagaaattaggcataacagttgcagaactgtatctacataatgacttaatttttcaaatacattttatctctatgcatgttgtaccacatgcaaaccacatataagctctggcatggagtggcatctaaattaattttctgtgctagtattttgctgtattttatgacaacaaaatgctaccagtaacttttttttaaagtaattttttagataggtggaatgtggtagaattccagtggagaaggctgtggttagcagttggagatgtaggactaaattttgggaaagcagacacactgtgacagactaccaacatcagtttaaatcacagtggccttaagactgtcttacagtgtttgtgtgtgtgtgtgtgtgtgtgtgtgtgtgtgtgtgtgtgtgtgtgtgtgtgtcggggggtgttttacagcaaaatcaagttgctgaataaatttttagtataatgtttggatctggttcttgtcaacagctctgccaccaggtaacaagaccataaccaaatcaagtaacttctggatatcagcttcttaaactgtaaaatgagaaactttatttttttttttatgggtttttttttttttttttttgagtctgggtcttgctctg

SEQ ID NO: 108461 - DNA, 1062 bp, Homo sapiens
tatggatggtctaaggatagtttctcagaatatgcgaattaggaaagtttgaagatatctccctcaaacctttgcctatattatttacaagcaaagatgctaatcagtattatttactctggctttgatggaattcaccaggacatgttgtgtgcatttgaaatgcagtcgaaatgaagtactgaattagtgtcagaagaggcagagcattacataagtcattaaaattcacactgaaaccagcctagtaacatggtaaccccgtctctacaaaaaaaaaaaaaaaagccaggcggggtagcacactcctatagtcccagctactccaggggctaagttcggaggatcacttgagcccaggaagtcaaggctgcagtgagccgtgattgtgccagtgcactccaggctgcgcaacactgtgagaccctgtctccaaaggagaaaaaaaaatcacactgaagttaagagtgattatagagttaggaatgaggaggaaatccaactcaagtgctgaatgtgccaagataacagtagataaccaatagtagatctagaagggtgactttcatacttttgggccactacttatgatgagaaaaatattttctctgacaagtacaagcacatataacagattacagttaatgaaatagtatttaccctttctatgtgctatgcactctttctactgtgcatcattttttgaatcttagttctcaatgcattgaattggtttaataacccaagaatggattgcagtctgtagtttgactaacactgattaccaggactgtttaactgaatgtaatgagcctcaaaagtggaagatcttttatattagggtggagaagttacttgtaagtagcagaaaccagaacaatgccaacaccttctgtacttgccttccctgaaaagcttcattagagtaatattctcagggcccagcatggtggcacacacctgtaatcctagtactttggcaggccgaggcaggcagatctcttgaggtcaggagttgaaggccagtctggccaacgtggtgaaaccccatctctaccaaaa

SEQ ID NO: 108462 - DNA, 1043 bp, Homo sapiens
ctgtctcaaaaaaaaaaaatatgaaagagaaattaaggtacagtatagattaagaaattttattatattgtgtagtaggagctgtgtaggagaacagaaacaagggaggccaggcactgtgactcatgcctgtaatcccaacactttgggaggatgaggcgggtggatcacttgaggtcaggagttcaggaccagcctggccaacatggtgaaagcctctctctactaaaaatgtaaaaattagtcaggcatggtggcaggtgcctgtcatctcagctactcgggatgctgagacaggaggatcgcttgaacctgggaggcggaggttgcagtgagccgagatcatgccgtagcattccaggctgggcgacagagtgagactctgtctaaaaataaaataatttaaaaaaaaacaatgaagggaaagaaccaaatcaaaggacatgcagtcagattactgcctaatagactctatatgcagattattacttgaacatgttttctagggaagtgaaaaatcaatacaataaaaggaaaagaggagtataagaaacattggtgagcaaataaattaaaaaacaaaaaacaaaaacctgagcgctaaacctaaaaactatgacattgatgtttaaggcaaatatctattaattagtttttaaatgtaggagtatagtgttcaaattaaatgaagagaagtgaaaaataggctaaggattttgataacggataaatgctagaaaataaaaccctgaatgaaggacagataaagtaatcaagaaaacatcacaaatagagcacagaaaataaaatgccagcaatattttcagcatgagtaatcccagtaaatataaatcaattaacatattttattaaaatgcagattatcatttgggattgaagtaaatgaagaatagctttatgctatttacaaacacatcttaaaataacttataggaagtttataaataataggctggataaaggctggaaataactaataaatgattacacaaagatagcagagggggcaatatcagtacaag

SEQ ID NO: 108463 - DNA, 1041 bp, Homo sapiens
tttaccattaatgtcattttactaaaaactattgggttcatagataatgtttccagataataaggtgtgaattttttaaattattgatgaaacatttggttatatgttataattacatgactgtgaaatcagtgtttaggaaaatagaacttagggccaaggcaggggtatcacttgaggtcaggagttcgagaccagcctggccaacatggtgaaacctcatctctactaaaaatacaaaaattagcccagcatagtggcaggcacctgtaatttcagctacttggaaggctgaggcaggagaattgcttgaacccgagaggcagaggttgcagtgagccgagatcatgccactgcactccagcctgggtgacagagcgagactctgtctcaaaaaagaaaatagaactcagttaaaaattacatattctagtatcaatcatacaggataatagcagtccttatcattttcacacatatttgaacattgattgttcattgtaaaagtttccctttacattttatatctagtttaacctgtaggacattgttcagatgccaccattttccgacctataatgacatcagttacatatttctattgaaatagatgaataatctgatctctgattttttttttttttcggagtctctgtcacccaggctggagtgcagttgtgcaatctcagctgtctgcaagctccgcctcctgggttcatgccattctcctgcctcagcctcccaagtagctgggactacaggtgcccgccaccatgcccggctaattttttgtatttttagtagagacgggatttcaccgtgttagccaggatggtctcagtctcctgacctcatgatccacctgcctcggcctcccagagtgctgggattacaggcatgagcctctgcacctggcctgatctctgatgctcgttctccctgctccccctttttgttgttgttgttgttaaacactgaaatgatttgtgtgttgagggaagactaaagttcatattcatgtaactttgcaatgccctgttt

SEQ ID NO: 108464 - DNA, 2499 bp, Homo sapiens
acctataatcccagcattttgggaggatgtagcagctggattatctgagatcaggagttagagaacagtctgcctaacatgacgaaaccccgtttctactaaaaatacaaaaaattagctgagcgtggtgttgggcacctgtaatctcagctactcaggaggctgaggcaggagaatcagttgaacccgggaggcagaggttgcagtgagccaagatcatggtgttgtactccagcctagttgacagagcaagactctgtctcaaaaaaaaaaaaaaagctgtagaagaattgtgagcattttattttcttctcgttgaatctgtattttctgaattttacattattgtcttttatacttaaaggggaaacattactttcaaagtaagataaaagatgagacaacaattattaagtcttgagctttataatgaactttagcaagtttaaataaaagtagaaaggaaaataaacatttgctttagatcagatgttactttctgtatttttcagtggaagtgaagaagctctttccaatgaagactgtgaaaatgtttaccacttggtgtactcggcacatcgccctgttgctgtggcagctggagagttccttcacaaaaagtgagctaattatctttgaaaaccggttctacttttctatgttgttttcttgttgttttagagtttgtagaagagagtaatagtgactgaacacagtgctgaaaatgtccatctgatactccaggggctataacagcctcacagcctatgtatacatggtgaatcacagccttgaggatgctgtaccttgtgacatactccttttttctgaaatctgagaggatgattctcagctagatgtgagtggagattggaggaatgcatgaaatttataaaagctaacgtaattgataattcatcacactagttttttctttaaaattctgaggtctgatcttactttcttaacatttgtaatctaaatttgaagcagtatcacctttaaaatgccttccaaattttcattttttttcattctttccattatgatgatttttttgtttttttgtttttttttgagacggagtttcgctcttgttgcccagactacagtacaatggtgcagtctcgactcaccacaacttctgcctcccaggttcaagcgattatcctacctcagcttcccaagtagctgggattacaggcatgcgccaccctgcccggctaattttgtgtttttattagagacagggtttctccatgttggtcaggccggtgtcgaactcccgacctcaggtaatccgcccgcctcagcctcccaaactgctgggattacaggcatgagccaccacacctggccatgatcaggattattttaatcagtaattcatagtaattctgaaagttttatatatatatagttgcagtttaattttttttaaaccttatttttttgtaaagcataacgttaatgagagtgtatgcatgtaaacatttaggatgtacatgttttagcgtgatttactgtatatgttctataattgattagtagattaactcattctttaaatcattttaaaatatatattatatgtaagtatatatgtatatataagtatatatgtatgtatgtatatataaatatatatttatatatgtatgtatatatgtatatatgaatatatgtgtatatatgtatgtatatgtatatgtgtgtgtgtgtgtgtgtgtatacacacacacacacacacacacacacacacacatatacacatttttttttttttagagagatggggtcttgctgtcttgcccaggctggtcttgaactcctggcctgaagtgatcctcccacctcagcctcccatagtgttgggattacaggcatgagccactgtacccagttgattaattcatatttaaaatataaacatattcttggttataggtgtgtatctttttgctttgttttgtgttttggatttttgttcatggatttaaattactagctttgaataatattcacaagtgattttaaaagtttattatgtattctaacttcttcttatgctgaagtacaactataaatcatggactaggcaactgttgtgcatcattgactaactttgataatgagcaggcctggtcctctctccagtatctgcattcagtgctacaataacaaattgttctctactcacttgtacctctcaaagtgagaaaagttatttctatgtaagaaatctctgttaagaaagaaaccagctacttactgggcatgctggcaaaggaaatgaagaggaagaaagtcaaggttttcaggcatgacttaaaataatattgcatttcctagtgactctgacagctctggctagtagaataatgctgattttatatttatctttggatgttgtctgtcactgataccaagaatgtactgtagtctttcttttttcagcattattttattctaattagtctctattctctacttttcaaa

SEQ ID NO: 108465 - DNA, 1066 bp, Homo sapiens
tggctcacttgctcccacaccactaaccccttgctgtgtggcccagttcctaacaggttacagaccaggattggggacccctgcttttactacatgttctttaaataaacccatatgaaattgataagtgaatctctgctttacaaaagatattaccatgagttcttatttattacctttggaagaaggcttacctgcttaaaattttctttacagcttgttataaagatagtaattttgtatgttaaggcttccttgacacaaggtttagggaacagcaattgttgagaaagattttaaattacaaacatttatactaacatcccctttgtgtgagtaggactacaatactgcagtttcaagagtaaagctttttatttaacctatcattagtattgcatatatatcccagaatacattatattagatctgtcccagcttattttctgttcatagttggtttgttttacaacttttttttctcaggatcgcattgtatcaatgacacttgataaagaatatgatgttgctgtggaagctattcgattggttactctgatacttcagtaagtaatatccattactattttaactttattgatattttaataccttttccccaggatttttaatgtcctatctatatatagtccttatgtatatgtttatcattttaggttcaacttttacattttaacgttagatttaaaaagtgttttctgtttttttctatttttgttttttattttcactattgtttacttcttccacataaaaattattttatgcagcctagagaaaataccaatgatgtaacttacctttctgtttaaaacaaagcaggcccagtatgttggctcctgcctaaaatcccagcattttggaaggccaaggcgggaggatcacttgagcccaggggttcaagaccagcctgggcaaaaggggagaccctgtctctacaaatgattaaaaaaattaactggcatggtggcacatgcctgttgtcctagctacttaggaggctaaggtgggagggtcgcttgagcccagaaggtcaaagctgcag

SEQ ID NO: 108466 - DNA, 1010 bp, Homo sapiens
gccactgcactccagcatgagcgacagagcaagactccatttaataataattttttaaaaaaagattaacagttcttttgagaaacattattctgtacttggatgttgtgactctgattttcttagaaagtttaacatgtttcttggctctgtaatagttgtgaggctctcagaaagctccaaatgtcattgtctagcccagtgaaaatagagtaattgggtcaaaatagtttaatagaagctttttttttccagtttggtattattagtgtttattttatagaaaacatgaaaaacagaagatacttaagttggaggccattcagaatgcaaatatatacaaacagcattagaaatatttattgcttatggaaagcgagtatgaatgcattctagctttgtatattaatttgagattgtcttttttttctctctctagtgatgctattgctgagattagagccatttgtattgaagaaattggagtatggatgaaaatgtatagtgatgccttcctaaatgacagttacctaaaatatgttggctggactcttcatgacagggtaagttactctgttctaagctttgatggaagttatgtttgtctcagtactaaaatgctgggaatcaaaatgacagtagttgatttttcaggagttgtaatcatgtggaaattttaagatgatgcagctgaataactatttacttgatgattgtgatgaaactggaagcatttgcccaggggtgaagaccctatcttgtttagttacaatattgtcttgaaccaagtttgacaacctggtatatataaagttttcagagaaagaaaatcattatattctttttctaattcagaatcaaaggagatttcttttttcttaatatataaaaactaagcttttttttaaaaaaaattttctaggaccatatcatagtagagtgctttatcagacttgaatagatttgttggattttagaatatttgatctaaaaatctaattctgccttct

SEQ ID NO: 108467 - DNA, 1027 bp, Homo sapiens
gtaaagccttcatgtttagtttttaatttcaaggcctgaatgctaggatgttgtaaaaattagtctgtcttatgattgtctttattcctttcctcttgtcttactattttttgcaccccctgcattactctttgctttggatgctcccaaatgcctcagctagacatctttcttaaatggggtgaggctattggaaatagagattagttgtttaaaaataaatttaatatgaaaacataaaatttggaggactcttatgaggaaatatgtttatatcaaaagatatgttgtaatcaaatcagggatatttagacttacactgcatttttattttatactgtatctccttgaatatactattagttcctggagagcaagaaagcaaatatataataataataggaatcacagaagaactgagacttcactagagcttgaaagaataatcagtgtaggtaatcagagtagaattcagggtattataggcatagggataaccacaaacgtgtaggtgctgatgcacttgagctatttggactaaagaactaattgtgtaagatgattggttattattatatttctaagggtcttttataataaggaaactaataattttaattatcttttgccatgtaacaaattactcccaaacttggtggtgtcaaatatttatctcaggctgggggcagtggctcacgcctgtaaccccagccctttgggaggccaaggcgggtgcatcacctgaggtcaggagttcaagaccagcctggctaacatggcgaaaccctgtttctactaaaaatacaaaaattagccggatgcagtggcacgtgcctatagtcccagctactcgggaggctgaggcaggagaatcacttgaacccaggaggtggaggttgcagtgagccgagatcatgccactgcactccaacctgagtgacagaatgagactccgtctcaaaaagcaaacaaaaaaacatttgtctcataatttctatgggtcaggaatttgggagtagcccagcta

SEQ ID NO: 108468 - DNA, 1064 bp, Homo sapiens
aaattaattagtttttatatgataaatgcaataaaaataatttttaacacttggaggaagttgcagaaatttgaatgattttgcaataaaagtattcccaaacttattttagtaaagcctgaaacaaagcatacagcaaaagaataaatctgagggaattttattgtcaacattcatgtatgtagtaaaagcaaatatttcactgaatattactatacagtaaattacagaataaattagaatagtagataccaccttgaatgtaattcagtgctgttgttgtttttgagtaataataaacacaaactttaactctgatcagttttgttgcctgaaatttgtatctttgccatagatactatttattttgttactgtacttcaccataagtagccaggatcctttttatcttctgttatacctcttattgggaacttggcctgctgtctgttacaggctagtgagatgcagagtaatgtttggatacattagatggagtaggaagttacttttagaacagcaaatatgttaattagggatgttcctttaaccaagaaaggcaaaaccaaacccagggacctgatttagacagaagagttctgttcctaaggcagatgatattttggagataggaatctgaccacacttagctataccaccactccttgtttgtgattgtgaagtttgtgtctagagagagacagtgaaaagttctaaaaccaatatgatataaatgtaaaggaataatggaaatatactggtattttcacacatctgtactacaagtgagaaaaggattgaaaactacccagaatgaaaataaccaggaattaaaaacaattggagctgttccttccaaataaaatgatcaggatttcaacttatatatattttttcatttcagctgcaagaaaatcaggatgaaatcgaaaatatgatgaactctatttttaagggtatatttgttcatagataccggtaagagattttaaaaataattttgaaggcttttcacttaaacaattattgattttttttgtggcccaggctaactgtaaaactca

SEQ ID NO: 108469 - DNA, 1073 bp, Homo sapiens
cacaaattgattgtaaacatctaaaacatctaaggtacctttgacacatttaagtaaaggtactaaggatgcatttatatatactcatatttgatgatcagtagagaggtttaggcttgattagtgtgcccttacgtgtgtatttttaggagtaggagaaaggagttgttgaagatagaactgaaatcctttcttctgttagttaggatgaggctgtgtttaaatggaaagtgttaacaagccaagctgaggtagagaaaattatgttgcagatgagtttatttctataaattagttatcttttatttaaacttaaattatgcctgggttgtaaaacagaaattcactagtttcatttcttcatccattggctttataaatttgtaatcttatatggataaagttttgattcataggtattataatatttcttcatttcatagccatgaagctcatgactgctctggtgaatgttgccttaaacctcagtattcatcaggataatacccagagacaatatgaagccgagagaaataaaatgattgggaagagagccaatgaaaggttggagttactacttcagaaacgcaaagaggtaagtttcatgggaactgatgattttatgttctgtaaatgtgtggaatatatatgacattagtactttttaagttccctgtaaaaaggtttatgtgtatatttagttagattatttgatgtcagggtttccaaatgaagctggagtgttcattggtgatcatgtaagtgccgtctgatggcagaaaggaatcatagaacacctctgtttttgaaagaagttggtctgggagttaggcaactcaaaaaggttataaggctataggctcaaaaagtatgataaatactgaagtcagaaccgtgagccagcaaagctacatttccaggaaaaagctaaaggctacatactagctggtatataaggcactcctatgaataagattggtctcagttttacaatgacattttcatatatgtgttaaaaatgattttatactgttttttttttgggggatggagtttcgctcttgttgcccagg

SEQ ID NO: 108470 - DNA, 1051 bp, Homo sapiens
attaacaacatacgtttatacggaattttcaaaggataaaacttttcagttgttctctcaatttactttaacgtattactgtaattcccatgtgtctacactaattaatggttatatcttccaaggctcacttgtataaaatgtgagacatagcagtcacctacccttcaacaaagcacagagggcttgctgagaacttaattccaggctggacaacaattatccctcttttcaaggacattttgttctcatctttgccctcttcttatttttaatggtatatgtacgaggaatagattaaaagataatcatttttattcactttgcaggacaagtcttggggactagataaaatgggcaggaacatttaatcctctgcttcaaagactatgtgcatggacagttacaaggcagttatggccagatatgattatcggctttggaataaaatgctccttgacattgcttaaatcttagctgagaagagagacaatcaggttagttattttgtagggtacagatgtgatgagttccagagcttcataagtcatcagagtggtcttatcagtagtatttttaatctgttttccaaatatcccattttcctgttatgaattcaatatgtgtccctgttgtcagtgtttatgcattgcatttaattgtatacttttacatttttattaaaagttttttttatcattatatagttctttatgtctgtttattccacactcataagtatattcttatttttccattggaggtaaactctctttttagaatatattttaccattaaattgaaagagactgttaacaattaaattttatattttctttaatcccttcgttggaattttcaaacatactgtcctagttatttggcccattttaataagctttacattgtagttttcattaactattgatcttcagagctaagtgcccttatttttatttgaaatagctatctcagtgggacatagtagtacagtttgtggatttaatttatgtaagaaacattgtgtcataattattttggtggatttaca

SEQ ID NO: 108471 - DNA, 1043 bp, Homo sapiens
ctggcaatcatcctttctagtctaaactttaaaaaattttttttactgtttcagattacctcaactatgatccaaatacaacaaagtggaactattattttcaaccaaagacttagaacaataaagtagatgctggttctaaaatagtaattttgagtattttaagaattacttagttgtggcagatcaaaatcaaagagaaataaagcaatcaaatgtgctatgaaagtcacctatttctttctataactgctttgcaaaaaagggttcctatgtaggtaggaagaaaaaaaaagctttcatcaaactctgtaatgtgacatacttaatatgttctttttctgttttttaggacagtggtgattatcctcttaccatgcctggacctcagtggaaaaaatttcgttcaaacttttgtgaatttattggagtcctgattcgacagtgtcagtatagcataatttatgatgagtatatgatggacacagtaatctcccttttgacgggtttgtcagactcccaggtcagagcttttaggcatacaagtaccctggctggtaagtaattaacattttatttccttttcatttagttttgttgactatgttttattctgattacaaacttaatgagaagatttaattaaaaatttaattagaataaaacagtcatttgaatagtttttgttaaaatttatgcctgttttcataactggcatttgatagccttaagaatgaaaattgaaattttctggccagtgtcatcaaatgtctgtctgaatgtttagttactaatgtacatccttatttataactgaagaaattttaagagaccactaggccaaattctttggaaaacccaagtaataatagttgaaattccaaatttattgtattttttcatcgcataattacattgttttattgctcattattattatagataagtgggtaaatacttgtttatatacttgaaacaattctgtccattagggtaacaaacattcttcctattcctagtgctataataacttaaacatactc

SEQ ID NO: 108472 - DNA, 1048 bp, Homo sapiens
tctttgaaacctagtaagtcactttttattggcctttaaaaataagggagtctctacttttattaggctacagagaaataatttcaggtaagtaattttctcgttcagatagaaacacacacaaacacacaaacttttttgaaaatttatttgctataatatcaaatttttttgaagttttcatttttatattttttttccacagtccgtggtggatgactggattgaatcatataaacaagacagggacatcgcacttctggatttaatcaacttttttatccagtgttcaggatgtcgaggtacagaatgttgaaataaatgatgtacattgagcctgtcagtccagcagtgtgacttttacttcacctgccactagtcgtatataatttaccctaaaattaaagattatctgctaatctttttctgatagagaatattattggtaagttatataaggatattccatttttgttcttgttcagttttgctcctataaagtaatacatttatatagtttttgaaattttgggaggaaatctgaaattcgttcagtagtttcatgaattgattttttagatcataggcttttataatttttactcatattatttgtatgtatgctccatattgggaagtgtgctagttgctagcattcattcttttatatccctgccagtatttcgtactcattttatagttaagtttaaatacttttcttaaagtaacacaagtagcagaatcaggtgtcttaagtttacaactgtaagacagtttgttaaagtgtaattttatttttatcattttaggagataactgctagatctttttcttctctagataaatcttaacaggttaatttgtattacatggggggaagtgagttgttaaatcaccattctctgcttgtgaatacagaagaatagtaatctttaattgagataactgaccaaattgatttcttgaaggcttgtttatttatgtacaagttatcacttaccatattgacatgagtagtttatcaaatatttacagagcaccaccctta

SEQ ID NO: 108473 - DNA, 1040 bp, Homo sapiens
ctgcctcagcctccccagtagctgagattacaggtgaacaccaccatacctggctaatttttgtaattttagcagagacagggttttaccatgttggccaggctggtctgaaactcctgacctcaggtgatctgcccatcttggcctcccaaattgctgggattataggtgtgagccagtgctcccagcctggaattgatttaaaagacgtaagtgagaaaactgatctaggacaggtaaaataattgttgaaggcattggagatgaaatttatagctgttccagttcatataattatttgatatttttcctaaggctctgtaacccagatattagtaatctaaatttactcttcagcaaaaagaacaagaatgtgagttatgattcattccaggaactcctttcagtagttgtagttcattgagtgtcctgagttacttaaaacaagacagagtataatctggcatgtatagtcttagaaaatgtttatagatgtcatgctgtttgcagcattaatgggctgggatatgaatgtctcctaactggatgcagagaggacctgaaaaaacataattaagaaagttaaaagccccatattccatattaaaacttcatccttcacctgtcactcagaggcttgccttggtatgttccttgctagcttctcctcagacctacagaagtagaaattgtggattgaaagatattggatgtatcttcaataagaatatcaaaatacctcagcattatggctcaaattaggatagagaacactgaaccaagaaacaaagcttcagtgactgggcatggaaggagggatggcttatgaggctgatctatcacaaggtggaggagtggtggtaggaatcctggcaagggtcctaaaggctgatcagtcttttgaatgctgatagaaacaggatggcttgcatgtgatagttaatagctaggagacagcagttatcataaagtacctaaaaagtaagtactgtaatattccaaggttactgggataatagcccagttttagataagggcca

SEQ ID NO: 108474 - DNA, 1240 bp, Homo sapiens
tagagctagatccttgaaggaagttagaaactttaaataggaattttcttagcctctgttcagttacacctaaaggtacctactgttactcgtgagcttagcttttagcaaatatattgatgttattatttttctgtacttgctgatttcaaacacgtggttttaaattaacatgggtgttttagataatattaagtcccttcatgatttcccgtaaatcattttccaaaggctttatccctatatatatagaattttatacagattatctagggcagatcaagtaagtaaagagatgactgtagtgtttgtgattatgatgtgtgtgtgtgtgtgtgtatatgtatatgtatacacacacataaaggattatacatttactggttttatttaatgtttaggaaaaatggactttatgtatttacatacttcatttatattattgtttatagatgtttaaatatatgaaatatggtggactttctattagtttaattttcaaagagggaacctaacttactttaatgcttctagccaaattatcctgcatgtaccctcagtaagaattgaaatacagaaaacattgcatgaataaagctatatccaggtataaatgagatttcttaaaaattctttctcaataaatttggtttgaatatgcctgtgcagtttctcattgtacactgacttgaatcatgtatgaagcagaatccttgcaaaaagctaattcacaatttgtttccaaactactaaagaaaactgaatgtatgttgatagaatttctcactatttgctaggttttagtcttagcttttgagataggaagacaaaagagatttgtttacttccagtgaggacctttgatctcagtacaggatttcttaatctggagtcagtgctaggattcttggaggacatgaacacagatggaaagagtggtgaaaaggaaaaaattggaattgattaattttatttttttattattattattattattattatttttgagtctcactctgtcacccaggctggagagcagtggtgccatctcagctcactgcattcaagtaattctcctgtctcaacctccttagtggctgagattacaggccaccatgcccagataatttttgtgatgttttgtttgtttgttttgagatggagtctcactctgtcgcccaggctgtagtgcagcggcgtgatctcggctcactgcaacctccgcctcccgggttccaac

SEQ ID NO: 108475 - DNA, 1858 bp, Homo sapiens
aatttattgtctctcattggagacacttatctcattggagatgagagaccataaattggtaagtgaagcaggcatataatgggaatgaattaaattactcaatagagagcataaggactgagaagaaaagatacttaggggagacctctaggtaatactagcaggtaagaaatacagggaggggaaagataactgaaaggaaaggaaaaaagtcttgtctgttaagagagtttcaagaaatgtctattgcatttagcaacgttggtgtcactggtgagtttggtgaagtagcaactgtagaatgagtttgtatgtgaatgaatgaatgtatgaatgaatgaaattaacaggaatagatacagtgactgccaacaattttttcaaatgatccttggccctaaaggtgagatagagataagattatagcaagtattaactttttaaaataaagttggggggaggggatggtatgttaattaaagaatgtaaactccatcagggcaagaatgtttgtctgttttgtttattgctgtattgccagtacctgaaatagttccagatacgttcagcatatttgttgcatgactaagaaatacttgagcatttcagtaggggtagaagttgaatatatggcatttcccagaaatgttttctgtacaagatttctgaggaagtaggagagtatcaatgaatgtatgcagaaggaaatgtcaagaaggggcaaggttaaaatattcaacattggcattattattgtacaaaacactaaagcaatttttaaaacatcatctaggtgtggtggctcatgctgttaattccagcatttttgaaggccaaggtgggcgaatcatttgaggtcaggagtacgagaccagcctggccaacatggtgaaactccgtctctattgaaaatacaaaaattaactggtcgtggtggtggggtctgtaatctcagctactcgggaggctgaggcaggagaatcacttgaacctgggaggaggatgctgcagtgagctaagagagtgccactgcactccatcctgggcgacagagcaagactctgtctcaaaaaacaaaagaaagttaccttcataccttttatgtataaacttatgttttgctctttgcacttttttgaattactgagaagaaattttaaagtttcttttggttagggattatatttcttctatagtagtgatcattttatataaagcaaagtaaacctaatcgaatggaatctttttttatctttttttcagtctacaaataagaaacctcgaaaatctccaggtgagaagagcagaattgaagctggaattagaggagcaggccgtggaagagctaatggacaccctcaacagaatggggaaggggagcctgtcacattatttgaggtggtgaaactggggaaaagtgcaatgcaggtaaattttaagtttttatttcacgtataaagcaatacagttaataacttgggtggaatcagttagtgtgtatattggcactttatatacttctgttgattatgtaagcaacctttcagtttatcctgaaaggttattattttgctttgttttgcaaagagtgtcaggaatggctgtttaatcgtaagatgtacttttgtttaaattgttctaagtaaaaaggtctactagaagctgcccaagagaatttttattgtcttgatattttttttttgaatctgatttagtgtaagtaacacatgtgtctttcagagtatttgaaagaagaagggatataaaaaaagaattcttaagtagtgaattaggaataaccagaactacatcatttgtaactttctttctttctttctttctttttttttgagacaga

SEQ ID NO: 108476 - DNA, 1017 bp, Homo sapiens
taattttttcttttctttttttttttttttttttttttagtagagatggggtttcgtcatgttggccaggctggtctcgaactcttgacatcaggtgatccacccgcctcagcctcccaaagtgctgggattacaggcctgaggcaccgcacccagccctcttttttttttttttttttttccacaccaccacaatatcattgtgaagtcccagtataaaatattttattaatatcaccaaatagccagttttatagtttgtaatcatcttatgaacatttaaaatctagttcggtggttagagtcatgacacaggaatgatccaccccctgcaactgatggttatgttgcttaaccagttattgtctatatgtcttttacagtgagttacacaacaagactggttttttgataagttaagtcatttttccctcttgtttgccagaatttttaattaattactcctccaggccaaccttaaaataaaaaacaagatgaaagacttcttgtattttgctatacacttgcttttatcctctacttttatttaaaggaaaaaaataatgggggaagacatgcagtatagtaactttttgtattatttcttcatttgtagaagtatttggtggtacagtattctttacaaacgtattttgggaaaagtgagagttttgcacttggaagctgttgactattctagttcccattactaccatgtgatttttctgagaccataggcaagtttcattgctatcctggcaatctcaggatataactgcagaattggaaataagactagatttgcttaaaggtaggagaatgaattgcccacatgtttgcttacttgaatttgttctccccaacttgaaattcttcacttacaggattcagattaagtactgtctccttaaagaaacttttttatttttcctaaagagaatttaccaccccaccagcaggctattgtataattcgttagaacctgtttaagttttatgtgtgtacagctgaatcctt

SEQ ID NO: 108477 - DNA, 1015 bp, Homo sapiens
ttataacttaggtgtttgtattttttttttgaaaagactggcataacactgcccttcatgactttataaaataaacaaaataaataaaaatattcctaagccttcatatttttgtactgaagaattagtcttttgcagttatattttgcatttatttttgtatagcagctatcatttccacaatcatttcttcctcttcatttccctctttatttgggggattcatttcactcactgttatgtgaaattaggaagggaggataacatttttagtttgctagagagtttctctgaaagtagaagtataaaccacttctaatcagccatatagcaggtggtaaggaaagtagtgaaacagaaatgcattatacttattaatttgttcgctaaaataatataacattttctagggattcaactaatgaaactactgcccattccgatgctggcagcgagcttgaagaaacagaggtcaaaggaaaaagaaaaaggggtcgtcctggccggcctccagtatgtattatgcttgtcttctttgttcctttaatagtgaccgtgttaatgagtttatatgagttgttaattctagtgctagtatggttaatacttaaaaaaaattcagtgacacaatagagattggaaactttttttcacataaattgtcttggcagtgatcagaaaaaggagatgattgtagtatgattttgttgccctccttctctttgtaaataaatggtagtccatgtgaaggcatagagaaggtcactaacagtgaatgaggtttagttagttaagacttgctgcttttcagatgcaactctgatttcttatgagctcccaagtactgttttggagtttggggccagtctcagagtatattctcattgataacctgattgggaagtttagaagagctctagataatcctactttgagagatagcttaatgtattgtacgagcatcagtcataatttaagcatgcataaaccctatagaagatactgttatctgctt

SEQ ID NO: 108478 - DNA, 1017 bp, Homo sapiens
tctgctggccttggcctcccaaagtgctgggattacaggcatgagccactgcacccggctgtatggatctttatgaaaaagcttgctgaccctggacatcatttacaatattatttatagtttcatttttgttgttttgttttgtttgtttttgagacagagttctactctttcgcccaggctggagtgcagtggtgctatctctgctcactgcaacgtccatctcccgggttcaagcgattctcgtgcctcagcctcccaaagtgttgggattacaggcatgagccactgcgcccagtcttatttatggttttaaataccagattaactttaaagatatataagttagagtaatatgataactttgaagatttacaagtgggtaagtaatgatgtgagaatattactggcagcggtgtgtagaatggcttgaataagcagcagtagggagataaattgagattatcatggggagtggtgattgtggtaataatcctggaaagagtgagaaacagattatattgttctgagaaggatggctgaggtaggattatgttagcaggaggcacaagaagactgatatcattctatcaattcgagtttatagacaggataatggtgacaataaatttgtataataacttaaagcatacgtatgcataacttaaatcagttaattaattgtatctctgtgagtagaaagtcagaggtaagtcaggattggattcaattttagatgtggcatttggtgaatttgaggtggcattcaagtaagtatgtcatgcatgcaagataaaaatcctgagtcagagatctggaatgcggtcaggtgtactgatagggtattgaagtcatttgcatagaagttacacattaactggatgaaatctccaagggagtgtaatataaatggagaagagcagacctaacagttgagctttaaggaagagggaatgagcctaaaagagcatttggtgaaggagattgagaaatagtagattgtgagttggacttacc

SEQ ID NO: 108479 - DNA, 1374 bp, Homo sapiens
gctcccgtgatccagtcacctcccaccaggtccctccctcgacaggtggggattacagttcgagatgagattttggtgaggacacagagccaaaccgtatcagcatgatagagatataataagctatatacttagaaagttacttggtgcagtatagtattagatgggaaaggccaacactagaaacaaggagacctgtcaggagaaggatgttgcagtatctagggaaaagatgataaactagttaccctggagatagaaagaggtagacagaatttagagagctctagggagcaaaatcattttttaaacaagatttgatcttactcttccatgctcttaatttatgtctagtagtgttataaatgtgaacattagccatttgcaggagttttgaagagcaattggtcaaagtttgaatttccataccccttgacctgtcattttcactgcatatatcctaaagagaaacttgattatgtagtaagatttatttatgtacaagaacagtcatttcagccctgtttgtaatagtgcaaaactagagacaaactaagtgctcattgataaggaagtagctaaataagttcagtgcatattatggagtgccattcaggaatctaaaatatttatatggaagattctcatgtatgtaacacttaaaaaattgaaatattgatatttatattttgagagagagagacagagagatgcaaaagcctaaatatttatggcagcgtcaaactattaacagtggtattctgcagatgggattcagagttaggatgagataaagtgaaacttttccttgtattcttatatattttctgttgctcgaaattttctttttcaaaagcctagaatttgttttcttatgtcttaataattaaacatacacatactaacacataacagtgcattagctgtttgttggcaatagttctcactgtttaagctgactgcagttggcagcattattaaacaaattgtacttttctgactcttggtaggggcatcaataaacaatactgctgaagaataggttagtttcactaatgggtcagtaattatattctagaaccaacctgctcctatagttgcctggacacttgtaagcatcaaaagcacttggagattttgtccacacaagataaatacgaaacatagtatttgcattgtagtatcttaacatgaaaatagaaaattcaggttgatcttgagatctaactggactctgccacttactaagtgtgcgactgtggacaagtttatcgggttttcagatctttcatttcctcattcataaaatcaggaagataacatgcttcttacaaggtttttgtgcatatgtattatagataacatatgtaaact

SEQ ID NO: 108480 - DNA, 1195 bp, Homo sapiens
gctgtgttgagctttggttgttaattgataaatgtggtatcctctctgtgaaagcttttaaaatgcataacacgtatttcagaaagcagctgttgctatggcaactctcgggtcacttgcagctcagcttacatgattggctgttaatggagtctaatatgcttgagaagagaattgagcaaatgaaagagggttttgaaggaatcctgttaaagctcttgaagttaacagaacagctcacaaaaatttaacacttatattactgttaacacaattttgctggaagtagttttatgaataatgacagtgagacaggacaaatttttggaaaaataattttcaaaatccttttaggaatgttgtaatcttgtcacttttccttattttactgttgtttaaagaaacactttcacagctatcactcgcgttctgtgctctattctctgaagtacctgtctcagaggagttaattacaatgaggcgtgagaaggttgttaattgtgcagggtcaaaaagagtggtaaaaccaggaatagcgtcaaaattttactctggttacatgaattagattagaattgcctcttacttgattcttaagatagccccatgaatacttgcctcattcttaggggtatttggatggtgtgaaaagggaggttgtggtgtgtactgtggattttgaggccagtaaagtaagtaaaattaagcataattaactaccataataaaaattaatagagccatggaaaatggcacagtaacatatatcttgttaaatgacagaattttcatcagtctccacctactactacttttgacagttaaatataagtaaaacataattatcagaatttataattcagatgaaatttactaatcaataatttaacatcacctcggaaatgatttcactttgtaaaaacttcagttggttagttcagccatatgtacttggaaaagagtactaaggcatgtagcttattttacatatctgctgtttctacttagggtcttaaaaaattattgattatggtactagtgttgaaattgatgaactgattatgttacagctatgctggtgtatagttatatttggttttttggttttgcaagcaaaaattggtgatacaaatcaatatctaccaacaccctaaattacctttgatttttttttttaaatttcctattcaagtaa

SEQ ID NO: 108481 - DNA, 1048 bp, Homo sapiens
ccacattttctgatctgagagtggagtttttttccttccatatgtttatgatttgatttctgagtttaaaaacaaaataaaacagctttctgttgttacctgaagatcaagggtggaacaaagagtacatttgtatgctcagtccaccgtgttcaattggaaaccttatagtttacttaacagtcctaagttagtgttacattttggtgttttccagtttttctaagagtttatttttgctatatctacatgaggagccatgcttatttttaggaatgatgaaaacatgattgcttgtctgaagcctacctgtaaaatctttcattccccttatctctggtgctaactgattgggtcatggttaagagtgaatctatctctgatcaaactgtcaggtttctatctcacttattaaattctgccacttataatctatgtgctcttgagcaaattgcctcatttctttgtacctatttgcttattctaaagtaggaatagtaatatctacttcatagggttgttgtgagagttaaatgttaagggcatataaagaaagttcttaggacagttcctggcttatattaagcatttgataactgctgtttgtcaacatcatcatcataactatactcatccatacatatatatcctttttaaaaaaacaaacagcttttttatcctcttacacagtttttgtataggctgtgtaggtttatttattttcaacccacttgattttattttaatttaatttaatttaattttactattttattttatttatttgagatggagtctcactctgctgcccagactggaagtgcagtgatgcgatcttggctcactgcaacctccacctcccaggttcaagcgattctcctgcctcagcctcccaagtagctgggattacaggcgcctgccaccatgcttggctaatttttgacatttagtagagatgcgatttcaccatgttggcaaagctggtcttgaactcctcacctcaggtgatccacgcacgttggctccccaaaatgctgggattaacaga

SEQ ID NO: 108482 - DNA, 1309 bp, Homo sapiens
ccggctaattttttgtatttttagtggagacggggtttcactgtgttagccaggatggtctcgatctcctgacctcatgatctgtttgcctcggcctcccaaagtgctgggattacaggtgtgagccactgtacctggccttttttttttttttgagacggaatcttgctctgttgcccaggctggagtgcagtggcgtgatcttggctcactgcaagctctgcctcctgggttcacaccattctcctgcctcagcctccccagtagctgggactacaggcgcctgccactacacctggctaatttttttgtatttttagtagagatggggtttcactgtgttagctagggtggtctcgatctcctgacctcgtgatctgcctgtctcgtcctcccaaagtgctgggattacaggtgtgagcctctgcgcctggccttctttcacttctaaaggcctgtttgattatatcatacctacctggataatctaggataactgccttattttaaagtctgtaaccctaacgctatgtagtacagtatatagaagagtaacagcaagggacaaaaatcataaagggcctaaatcttgcctagccacagtccttcctctggcttccatgatccatatctatctcacatacaaaatacaaccaccccattccaaggtcctcaaagatctcattgtataacagttcaatatctcatctcaagcttttcagctcagaagtccttaatctcacatctagatcatctaaataaaaatatgggtgatgctctttattgatggacctgtgaaactaaagaaacaagtttacttcttccaaaataagtgttgggacagtaatagacattctggttcaaaaagggagaagatgtaaaaaaggagtcgcaagtcccaagcaatttcaaaaaccagctggagaaactccactacatttcaaggcctgaaaataatcctttgtggtttgcagtttcaccctctgggcttgcagctctgcctgctctcttagatacttttgttagtttttaaaaaaatatcttttctttttcctcaggtttgatggttcttggttgcccatccatattcatgaaaggaggattaagttggtctgtttaagtaactggaatgagattctctgttgcaggtttatttcatccacaggtctttctcttggctgtggcatgtggtagtctttaatgccttctcaaaggcatgcgtttctcaaaaaattggttttgggggcaaaaaaaaaagttgctctttttgtgtgtaaagcacagatatacatacaatacacaaatgtat

SEQ ID NO: 108483 - DNA, 1648 bp, Homo sapiens
gaaaacctcagtatttggctttcttcaccagtctgaacattctgccttggaggtaccactgaagaagtatagggcatcatgtagaaagcaagcatagttggaaaattactgacctctaatatttttaatggctgcatcatattccatcctttgacatctgtgatagttctggaagtgttttgcttcgatctcccttgaaggaagtctctattgaggagtgttagctgatagcttccagctgcagagcctttgggattggctacatcattgagccacattctcctcaggcagctccctcccagtgactgatcccagtagatactacggtctgaccatttctgctcaacatggggcttctctcgagttctctgctgggctggcagatcagaactgtactgttccgtgtcctttcctgatttcccctccttcctcctctgctttcacagttggcagcctgcattgcagcctgaaggctttctctatgcttactcctcttgctttctcctttcattcttcgtaggcatttctcacaaaatgtttcttaaagttttaactccatcttgggcctactttatttttttatagatatataaatataaatataatatataaatgttatatattttatatatattatacataatatatattttatatattatgtataatatattatgtataatatatatcatgtataatatatggtatatatcatgtataatatatatgtcatgtataatatatattatatatcatgtataatatatattatgtataatatataatgtgttttatatatatatatatttgagacagtctcactctgttgcctcggctagaatgcattgtggcatgatctcgcctcattgcaacctccatattctgggttcaagcaattcttgtgcttcagcctctcgacatagctgggattacaggcacatgccaccatgcttggctaatttttgtaattttagaagagacagagttttgttctctactaaagagaaccaattggccagttatctactattctctaccagttggccaggatggtcttacctcctggcctcaagcaatccgcctgcctcagcttcccaaagtgctgggattacaggcatgagccaccatgcccggccaggtctactttctagagaacctgaactgacacacaaccaggtggtttttaaaaaataagtatttaaagacattatcattcattcttatggtttaaaaaacacagaaatggggccaggggcagtagctcacacctgtaatcccagcacttcaggaggccaaggcgggcagatcacttgagatcaggagtttgagaccaccctggccaacatggtgaaaccctgtctctactaaaaatataaaacttagctgggcgtggtggcatgtgcctgtaactccagctactgggaggctgcggcaggggaatcactggagcttgggaggcggaggttgcagtgagccaagatggcaccacaaaaacacagaaatgcacaaaatgaaaaataaacaatccaccccttctccaaactctaagaaaaccattttcatatgttcataatcatacctatgtcataatctcactgatatcattatttcattttctgtctgtctgtctatctatctatctatcttt

SEQ ID NO: 108484 - DNA, 1364 bp, Homo sapiens
actcctcaccattgagttaatttggtttcagcttgatataatcatttacaagatctgggttctgcttcccatgccacctattttggattttatgtatttactttgttcattccacacagatggtttatcttgtttcattcttcttaatttaatgctcagtgttcacttaagatttttttttttttttttttgagacggaatttcgctcttgttgcccaggctggagtgcaatggcgcgatctcagcttaccacaacctctgcctcccgagttcaagcgattctcctacctcagccttccgagtagctgggattacaagtatgcactaccatgcccagctaattttatattttcactagagatgggatttctccgtaatggtcatgctggtctcgaactcctggcctcaggtgacctgcccgccttggcctccgaaagtgctgggattacaggcatgagccaccgctcccggactcacttcagttttaaaagagccacttgtggattggatttatccttacaaagttgagtgagatatatattgcttctagtgcattcttgcttttgcatctaggaagagtatggattttgcagtccatcctagattgccctgtcaagtatttagctgaaactttggagcaagttacttttttgagatcgatccatccatccatccatccacccacccacccacccacccacctacccacccacccacctacccacctacccacctacccagccacccacctacccacccacccatccatccacccatctacccacttatcatcccagaggcactgtagtgctgccgctccttgcttttctgtttttccttgacagatacgttgaggtataatttacataacataaaattctcccattttaagtgtacaattcagtgatgtttagttaatttggaaaactatgtagccaacactacctaatttcagaatacttctatcaccccccaaagaagaaaatctgtgcccatttgtagtcatttctcattttctaatcttagggtactactaatctattttctgtctctatagatatgcttttttgggacatttcataaaattggaatcatttatatgctcttatgtttggcttttatttagcaatgtttttgaggataatccatgttaaggcatgtttcaatactttcttgtattttgaagagttcttcattttattaatttgtttacttcatggacatttgagtttcaaacatttggctgttgtgaataatgctgtgaacattcatttacaagtcttggtgtagacatatgtttcattcctctttggcagatacctaggattggaattgctcggtcatgtagtaaatttatgtttaat

SEQ ID NO: 108485 - DNA, 2436 bp, Homo sapiens
ctggtggtagattaaaggggcgagagaactgtcatttctcaagtatctgttataggcattatttttggtgctttaaatacatagccatcatttattgaatacaagctttttattaaggctttcaagtgctttagattcattacatgccattttcttcacatataacccttcagagaatatggcaaagatgtttttacagatgagggctttgttaggctctttttcttctctctcctcccctccccttcacttcaaggggaaatgatcataaacatagatggggaatgagattggggtggtgctgggattatcactgctgccagctcgcctattacttaaggctgtccaagttatacatttttcatttcatttatatactggaaaagaaggcagatggtatttattcttacatgagagacagtatcatgtaaacaaaataatcatatattatgatgaatgctgtctatgaagggaataaatgaggtgttatgatggataataatgaggtacttaacattaaaaaaggccaggaaaggcatctctgagggtgtgaaatttaagctgaggatgtgtacagaacctaggcaagaatggtccagatacagggaagagcaaggataaatctttttagcagaaatggctctaggaattcagagaaggccatagtgactagagggaacataatgcaggaagagtacagtggtgttgcatgaggttagagaggtaagcagagtctggattatgtagggtgtatttgggatagttaggactcatagattttattataagtgaaatgagaagctgttagagagttttaagaagaggaatgtttaaaaaacattcttctaggacgggtgcagtggctcatacctgtaatcccagcacttttggaggccaagacagattgatggcttgaggccaggactttgagaccagcctggtcaacatggcaaaaccccatctctactaaaaatacgaaaattagctaggcaaggtggcgcacacctgtgatcccagctacttgggagactgaggcaggagaatcacttgaacctgggaggcagaggttgcagtgagccgagattgtgctgctgcactccagcccaggtgacagaacaagactgtctcaaaacaaaacatattcttctagcttagtggttctcaactgagggcgattttgcttcccaggggacatttggcaatgtctagatttttgattgtcacaactgggaataatggtttatgctgctggcatcagtggatagaaacctagggattatggtgtatgctactgacatcagtggatagagacctggggatgatggtgtatgctactggcatcagtggatagagatcagggatgctgctaaaccttctgtaatgcacagaacagtaaacaactattggcccaaaatgtcactagtggcaaggttgagaacccttgcttttgctattgtgtgaatattggatggtgggtggggtgtggggaatgcaagagggagggttaggttgttacagtgtacaggtgacagatacagtgccttggatgatggttgtaatagagataatactgagaagtgttcttattctgtatgtgtattggagttagagtagataagtgaggaaagggataagtcaaggacgatctccaggtttctaactaataattgagtgatttgtgatacagtcctaaagtagggaagactgggaatgaagtgttctgatttttaaaattttatttcattgaatttgagttgctattaatagaagacacaacactattttagggtacaataggaaggaagcagtaacctcatgctgtctgtacttggtcacaccagccattcattgctttgaaatcttatctgttctcagggatatggcagtttcttctacctttatttgtattgcgtggcatatgataggctgtccttctgcatgtgtctcagtaacaaaacataatacagcttcatctacttgtggctgttctcatatcccataagtcatcactttactgttgctttgcaagaaaacatagaattggcgttattactagcaataattaatacttaacttgctaatacagattttttttgtgcctttctgcatacttaataacttttcagtgccaaattgtagagtagtattttgaaagcagttaaacacaacatgcatggaaccagcaatgttaatagctcaactgatgatcattggtcaagctagtcagattttagaaataggaaataattcttttgtcagaagaccttattttaaacacacacacacacacacccgtataattttgttttctagttcttgcctactgaagagtggtaatattgatgtatagagtgactcatttgcttagggtaagatttttggtaaaggttcactaagaaatttagaagcttccttagttgatttaaaatacgggaa

SEQ ID NO: 108486 - DNA, 1053 bp, Homo sapiens
aaaaaaaaaaaaaaaaagcctggcgtggtggctcatgcctgtaatctcagcactttgagagggcgaggtgggtggatcacttgaggctaggagttcaagactagcctggccaacatagcaaaatcctgtctctactaaaaatgttaatacaaaaattagctgggcgtggaggcacatgcctgtaatcccagctactcgagaggctgaggcaggagaatcacttgaaactgggaggcggaggtttcagtgagccgagatcatgtcattgtactccagcctgggtgacagcacagctctgtctcaaaaaaaaaaaaaaaaaaaaaaggaaaactacagatgttgtagatatttcaaagtacaatttcagtacttcaaaattagggtaattgttagactaacctctagatcttatttactgtgttaaagaatcatattacaatattttaagttgctttaatatattgataattgtatttgaatataattaattctcttataagcatggtaccattcacaaagagggagagtttagtggatagcttgatgtagggtagacaggaaattttaaattcataaatccctttgtctaggctgagcgtggtggctcactcttgtaatcccaacactttgggaggctgaggctggcagatcacttgacctcaggagtttgagaccagcctgggcaacatggtgaaaccctgtctcaaaaaaacaaaaacaaaaacaaaaaaaccacacacacgcaaattagctaggcacgatggcatgcatatgtggtcccagccactctggaagctgagtcaggagaatcccttgagccagggaggcagaggctgcggtgagccaagatcgtgcctttcactctcgcctgggcaataggagtgaaatcctgtctcaaaaaaaacaaaagaatctttacagaagagactgtctctctttcccatccctcctttatttgttttgttaaatagaaatgaaacctaagttctttgttgttacatgtcaaagtattagattaaaaaacacttagggtttaggagtgctttttactaa

SEQ ID NO: 108487 - DNA, 1050 bp, Homo sapiens
ctgtctcagtctccacagtagctgggattacaggcgcacaccaccacacccagctaatttttgtatttttttagtggagacggggttttgccatgttagctaggctagtcttgaactcctgacttcaaggatccgcctgcctcagcctcccaaagtgctcagattataggcatgagccaccgtgcccagccttgttgtttaattttcaatatttgggattattctagataacttattactgatttctaacttagtttcattttgagtcatatctttatgattttaatcctttaaaatttattgaaacttattttatgggccagcatatggtccatcttggttaatgtatcttttatacttgaaagtgtgttttgcagttgttgggtgtagtattctgtaactatcaattaggttaaggtgttttaatagcacttttcaaataatctatgtatttgttgttgttttttgttgttgttgttttgtctcattctatcagctgccaagaagaaagttaaaatatccaactatgactgtggaattatctgtttttcccttaattctgtcaagtttttctcactcattttgaagctctgttgtaagacatgtacaacttatgattattatgttgttttgacaaattgacctttttattgtgatgaaatgtctctctgtttctggtaataatcttttccttgaagtctgctttatttgatgttaatatagccactccagcgatcttgagcttactgtttccataatatatctttttctacctatttacccaaaactcttcattatatttaaattgcttttgatggtagtatatagtcgagtattgctttttaaaaaattcctggccaggcacagtgactcatgcctgtaatcccagcactttgggaggccgaggcaggcggatcatctgaggtcaagagttcaagaccagcgtgaccaacgtggagaaaccccatctctactaaaaatacaaaattagccgggcattgtggtgggcgcctgtaatcccagctacttaaaaggctgaggcaggagaat

SEQ ID NO: 108488 - DNA, 1468 bp, Homo sapiens
tacaagggatgtacgttgcgtgctttatctaatgcatgatgatctgaggtggaacagttttatcctgaaaccttctgattccccaccccatccgtggaaaaatttttttccacgaacctggtccctggtaccaaaaacgttggggatggctactcctttttgccagtcagtagtgaaggatgtcataaatcttgccttcttccctgccccccgtttgttttttatttatttttaattttgtgagtccatagtaggtgtatgtatttatgggttatgtgagaatgtcttaccttctttatgaaatacattcctttgtgctatgggccaaaatgatgtaccatttagttgtccaagaatttcaatggaattttgctgtaaacataatagcaatggcttttaacttgttttctagcttctgctagcagttacaaaaacattttacattgtagcctagtacaaacacacacatccacacacaatgaaaataagtttcatgaaataatactttatctttatgcagtgcactctgatattttctgatcttttctattaggaatgctggttgtggctgggcacagtggcccacacctataatcctagcactctgggaggccgaggcgggtggatcacttgaggtcagaagttggagaccagtgtggccaacatggcgaaaccccgtctctactaaaaatacaaaaattagctgggtgtggtggcatgtgcctgtagtcccagctgctcgggaggctgaggcacgagaattgcttgaactctggaggcggaggttgcagtgagctgagatggcaccactgcattccagcgtaggtgacagagtgagactctgtctcaaaaaaaaaaaaaaaaaaaagatggttgcagtttacctaagaaatgtcacgactcacagcagctaacactgggaaaagcattgaattgtaatctcattggtaaaaaggaaagtgcaaagtagagccatgagaagaaaccatttcacttccatcagattgacaagcattaaaagtctgataatgtcaagtattggtgagaatgtagagaaattacattctcacttttgtcagcagtgtaaattgatacaatcattttctgaaagatgttagtaagatagtaaattcaagcttcatgtattttaaccccagcagttgtactcctgtctttatattcctgatgaatgaaatccttgtatttttattttggagacggagtttcgcccttgttgcccaggctggagtgcaatggtgcaatctcggcttaccgcatcctctgcttccccagttcaagcaattctccggcctcagccacccgagtagctggaattacagggatgcaccaccatgtctggctaattttgtatttttagtagagacggggtttctctatgttggtcaggctggtctagaactcctgacttcaggtgatctgcctgcctcagcctcccaaagtgctggga

SEQ ID NO: 108489 - DNA, 1043 bp, Homo sapiens
aaaatgctgggattacagttgtgagccactgtgcccggccagagttgtctttcaaggtcactacttgttggcacaattaatttccttgtgatagtgtgactgaagtccccatcttcttgttagctgttggccaaggactgctctcagatccttgccgtgtggccacatagttcacaacatggctgttagcttttatccatgctagcaggagtcagtctccctatttcctgtgtgtctgacctctgactcccccctttaaggtcttttttaaaagctcaccagctaagctctgaggcccttgtggtaaacttaactgattaagggccttaattacatatgcaaacatatattttgtcatataatcaccgtaatgatatcccgttatatctacaggtctctcccacactcaaggggagggcatgatacaagggtgtgggttagtggaggcttttaagaattttgcctgccgtaggaaaagaagtatcttcacatttacctcttcagattccggacatacaaggagaggacctaggcagagcagtaaccccacttgatcagcttactcttacttatattgccttttcctcaccttttttcctttcccgtttcctggtaccttagtttacatgccttcctctatgaaataattttattgcattgagaggaaattaaaaataaaaacgaaaatttaaaacgttataaagaagggaggcaatgggagaagggagtttgtataattattttttctttcatttctgccactaagaacacctttttaaaaaatttaaaaaaattactattattggcctggtacagtggctgacacctgtaatcccagcactttgggaggccgaggtgggtggatcacctgaggtcaggagtttcagaccagcttggccgtggccgacatggtgaaaccctgtctatactaaaaatacaaaaattagccaggcgtggtagcacttgcctgtaatcctactactcaggaggccgaggcaggagaattgcttgaacctgggaggcggagcttgcagtgagctggg

SEQ ID NO: 108490 - DNA, 2764 bp, Homo sapiens
aaaatggcgggcggcaactcggcgagccggacgcgcaggcgccaccgtggccgtccttccgccagccgcgggcggcccaagaaccgtccacagcgcccttatccagaagcctacgcctctcgcgattggctgaactgcgcgagcgctccgtgtgggggcggggccgccacgcagcggccacgtttcccgccccgctggtgcgcgtgcgcgcaatccccactggaaagcgtttgcgcgcgcccctgccgcggcccctagctcgcgcctcagctccctcccctttccgggcaggcccgtcccgtcagcaaggcagtgagcaccgcggccagcagagggcggtccggacccaagtctgcagcggcgccattggcgtgtggaaaatgccaccagatggcgggttaggattgcagctccgttgaaggcgcggcccccgctcccgaacccccggcgaccaccccgtaacaacccccccacatcgggaataacacaccggagacttttggggggaaactaggtcgatggtcggcggcgcccggatgggcagctgaggtgagtgcgggcggcggcgacggcggcggggggcgggaaagagggggaatgcggcggcagcggcgcgggggctggaagcgccgatccaagatggaggccgggcgagagcgagagagcgcgagcggcgagcgggcgggccgggcgcgggccccgtgcgggggagggaggccgcgcgggcctgtgcggggtgcggcggtcgtgggccgtccgagtgcccggagagacgtctgtgggcgcggtgggcaccccggcgtcttcgtcgcttgccacccctcccgcgggcaccaaaaattttgcccccgcccgcccgggcactacggcgacaggcgcggaagcctttgtggcgcgctcgggcccgccgccaagcccgccctccgcccccccccgcccgggctctcgggagtcgcccgcgcccagcggggccgggccgacgcgggctggcgcgaatgccttccgccgcctgccgacctgcgtttctgcggtgttttagcggcggcggcgtcacatgacaacgagttcatttcagcggaggggcctggggggtcgctcggcggggcggctggcccaggcttcttgttggcggggtggggcagcggggtggcggctgggggagatgcatcaatgctgggctttccagctatctgccctctcagcccccgacgggggcctccttgtgaaacgtgtccaggcctaagcactgccccgctagtttgccagtcccctgagagacgaggccaataaaagttgttttccctcctttctcgaggtgggggcggggtgggaaactagagtgcttggagttggacctgagccccgtttgcagggtccgaactgggttcttcttgtatggtatgggtactaagaaattttcaggttttaggattgtcacgtcacccccatctacccacatttgaaatgttatctgtcgattctcttcacattgcagggaatcgtgctccgggagtataagtcataggatagttttggacacttacagacaaaaaaaaaacaaaaaaaaaaaacgcaatttgtcataaaaaaaaattatttgctgttaaagttggtgttaagatggatagagtttattctcgtgattctgactagaaagacttgcatcttcgcaaaaatagtgtttacttgagaaagtatctgaattggcacaaagttgtgtgatttgtaacttatctggaatttgaatgactctacattttagttttcctcgtgttttaagaaaattgcacattccgatggtgaagcacttagggaaatatacagaagagtgaaaataaaaataacttgtttattgtatggtaatgtaacgtaccttgttctaatattcataatgtatgaggaattcagactgaaaaattttaaccaagtagggaaatatggaatggaaagaagcagaaatgttatttccttgcttttgatgattaagaatacttataagacaaattgttacccaaataaagttgtagaagatctacaggtgttttgccacgcattttcctttacatatttaaaacgtacttcgagtaaactaaattaattcaagtgatctaccagtggtcattttcacaaacgaactgcttttgagtggaaatttttctgtatccacttcagtttcgatgttctgataaggctaaggaatatttaaatagatgcaaaatatggaagtttgttgtgttactaggattgcctcctttgaagagactaataaaatgactgtagatttgattggctcttttaaagccttaaaggcactatggtgtaggggagaaggagtgggtcctggaccgaagttactttgaacgtcccctgggtttgtggtgttcagggtgttacctttgagccttactttctttatctctaaaaatggggagctgggcccagtggtgcactcctgtagttccagctactctgtagtgaggcaggaggaacccttaaacccaggagtttgaggcttacctgggcaacatacaagactccatctctttaaaaaaataaaataaaatggggatagtatcttacggtgattgtgtaacaagatgtctgtgaaaaacacacatttaattgctgtaacttaaaatttacagaattttgtacagttttaatctttttttccttgattctgactctgtgtatgttcataatctcagtgctgtgagaagaaataatgtactctgggaaagatacgttcttgtttcccctttta

SEQ ID NO: 108491 - DNA, 1045 bp, Homo sapiens
tgccagctactcgggaggctgaggcaggagaatctctcgaacccgggaggtgaaggttgcagtgagccgagatcacgccactgcactccagcttgggcgataagagtgagactctgtctcaaaaaaaaaaagtttcttttgtcttttttttttttttaattcagtgatgttactccctccagttgctatgctatcaacgttcctttcattgacacattctcaaaagaaacagttacggttttcaccaatccccatcccctacttgaaaccctttttccctttcttttaagacacttccccggatctacacctacctagtttgctggtcttctgatttctttgctagcacctcctctttcttcaatctgttctctactacatgccttctcttaggtctcccaaaattagtctgttcttgatttttccttaactgagtttcctcgtgttcagctacttgccagaaagctgcagctcaaacacttaaaataattcatctctcttatttgaatttcctaatttatcctaacattgtaatttcagctagtgtagtgattaagaacatgaactgtgaaaccagactgctctggaaagctttgtaaccttagacaaatctctttctgtctcaatttcctcaactgcaaaatggaaatagcaacagtaccaatctcatagggttgttacgagtgttaaactatttaactatttaatatttaaactatttaatatattatagaaatgccatcagcattattacatttattgtttttaatcttactaagaagtttttagcatttttttaactctgagggcatgggtaatcaactttctaagtttatagaaatctaaaattgtattttgccctcacacttaataattgattataagtcatttttataatcaattttataaattgtttataaataattacatagcagcctaggctctaaattgtagggccagacttgattattttctttcaaaaaagcctaagtcccaccatacctcattcagatggcttgcttttttttctactgctgccatcctt

SEQ ID NO: 108492 - DNA, 1036 bp, Homo sapiens
tttctttccttccttccttccttccttccttccttccttccttccttccttccttctttctttcttttctttcttttcccttccttccttccttccttccgtccatccatccgtctgtccgtccgtctgtctctctctctctttctttctttcttctttcttttttgacaggatctcgctctgttgctcaggctggagtacagtggcctgatcacagctcctcattgtaacttgaacctcccaaaggccaggattacaggtgtgcatcaatgtctggctaatttttttttttttttttttttgtagagatagggtctcactgtgttgttcagactggttttgaattcctggcctcaaacgatcctcccaccttggcttctcaacgtgctgggattataggggtgagccactgtgcctggtctgttgctttcctttaaacccataccccttattattttagtattcccttggtttttaatgttgtgtggacttgaatcatagaattatagagcattattgctggaatgttggaatccaaccttgtgttttacagataaggaaactgaaatacaaatagactagatgcaccaaaattcaaacatttagtgatgggggcagaacaaagactcaacccttgatcttctgacgcaagttctgtgtgtttatgaaaccatactacttctcatctcttgtaattttgccttatttgcctcacattattttgcattttgtgtatttatgccttctcatagattgaaaacttcagggcaggggaaccttcatatttacattgtaaatttttttttttttgagacagagtttcgcagtttttgccctggctggagtgcagcagcatgatctcggctcactgcaacctccgcctctcgggttcaagcaattctcttgcctcagcctcctgaggagctgggatcacaggcacctgccaccacacctggctaattttgtatttttagtagagatgggtttcaccatgttggccaggctggtctcaaactcctgacctcaggtgatccgc

SEQ ID NO: 108493 - DNA, 1414 bp, Homo sapiens
gccatttatgtttaattcccatatagtatataagacttagatcaattaatgtacttacatgtttgctgtgttaattatgacaataaattcattatgttacacgttttcataattggtggtttatatctaattgctcataatttagcaagattattgctcttacgtttgtagtcacataatggcttctttctttagataaaatgtaataatcttcagattataggatgatgatactgatcttggatcagtttattatagttcagaggggtaataagtaatattctgtaatgcctaacaaaataatcatatagacagtaatgtcttatatacctaagatatttataagtttgtcaaagaaacagaattatagttgaggtttttttaagagcaaactttttgcttatctttctttattctcattcctttgctctgtctcctagtctccactaactactcaataaacatttgttgagtgaataagtgaatgaattgtgctatgcacagcacttttgcctttgtcattattttgtgccttctcatattggggatgatttcaaagtgatatttccaaaagtggacagaattagatggaattttatttgacctacactattttttaaaaaaaaagaagaaaaacttaatttttaagtagcctttatttctgactagcctgtaattttttgttttcccagtggtgggatctgtttcattagttgtttcattagtaagagtatttaccaattaaaattacttgatgagatactagggtttaaaaagctgaagagaataaaatcatcttatgaattgccttgtctttttgcattacttacagcatatccaagttagttaattggggactttctcccccttcattgtttactgtgagatctgtaccccaaccaaacttccggacttagtcacttgggtattgttacttagctgattcttatcagaagcaggaaattgtcaagttatgtgttaaagtacaacagaatctaaaactgaacaagagatttccctttagaattttattttattgctagctggttccttacattttccttagggtataactactgacttgccaaaaaaggtcatatttatcatgacctatatacacagccaacagtacccttcctcagtttacaaattatacacaatatgactgattaaatgatttgacaaactttgtgtcattaatatatagctatacctatagaatttataaaagtagtttgggaaagaacatgttttcaggtgttttgtctagcattattcatgtatttacattagcagttctctaagaaagggttactaaagtggatctcttaaggggtctacggagccaaaactattttcataatactaggatgttaatttcccttttcactagagattccagaggctacatgaa

SEQ ID NO: 108494 - DNA, 1017 bp, Homo sapiens
ctgttggagtttagacttataggcagaattgcctctttggcaccaaggcaacttatgtacatggcacataatgaattttaacatctaatgaccttatgttttgaacttcacttaaaaccctccattttgtttttctatttgataagagaactgtggatcattactgtacattagcacctacagagctcttttctattttgtttctctttttccctttatttctccaaagtttttgttttttatttttactggccctccattagggcctgagacagtggagcccacttcacactggacttggctaagctgataggaaggaaatatgcatgggcaaggaatggcctcttctttaaaaaaaaaaaaaaaaaaaaaaaattaaactctccttagctgacaggaaggaattgggagggacagaatttcatttttggtgttcaggcaaacatgctatttgcgtaattgttctttgtctaggtgtagaagaaaagtacaatttctccttgtgcagacagtttgggagcaatatagcatgactgacaaatatgaaatactgttgactcactactttacattagtttttatttatttattttttatggttttgtagagatggagtcttgctctgttgtccaggccaaacttgaactcctgggctcaagcaaccctcccacctcagcttcctgagtagctgggactacagatgcttactaccatacccagcttagtttttattcttattcaacattattgttattctagaatgttcttctaattatcaataaaatacaaatatttaatgtttttaaccattgtaaaactgcaaaaactaaaatatagtacaatttggagtaagatataaagtagtggattatcagtttctgagataaaaatatttccagtgttctaaaggtaattaagtagatataatgtgatgtttaactgctgaggtaactttttaaatacttttgggttttgtgattaagaccattatttttagtttttcaatggaagacaaat

SEQ ID NO: 108495 - DNA, 2104 bp, Homo sapiens
ccagttagacttttttgttccattttaagaggacactggtatcttgggattagagtgaatgtgacagtaattaacaaaatatagtgaaaaaactattatcatagagcaaaggggggaagtagtccagtattaggtattactgtatgtaaatctaaaatcccatttaaatataatttttatttgttaatactccaggatgcattccgtactacagtattctgatgttattgagacagttttatcaagattttatctctatttaagtcttaggaaatctctgttaactttattactgtattacagttattgctacctttattccagggtgcttggaaacattgttttgagttagtgatctgtagttaacctgtaaagagatataagtccagcttttacattagataaacttttcccttttctcataatttctgtatccctttttggtaacttaaatatccggtgtaattaatggatttgtttcgcaatggttgtgctggtggagacattgtttgaaagttgagaaggaaaaggggaaaacaaaaggattaattcatgaatatattttaactataaaaaatatatatgctttaaagcatcttccaaaataagtctgaataataaggtcatatttttggccatgattatttacttgttatacaggctgtgttataatttagaggaaaaaaaagttttggaaagagaagcctcagaaaaattttctattgcctgggtgtgggccaggtcacatggattgggtgtgggaagtttcagtgttgcagaacagacgaggaagctcactgagaattatcctgagctgtgttaacaaactgacagaacacagaatttttactcaaaatggattggttaaacgtctttaaagattttttcagtaagttaatctgtttattaaatccactgttttcttgaagttgtgaattagattttctgcttttgtaaatttaaaggaaaactcttatttggtgggtttatgtaagctactacattatgtgtatgtaatataaaccaaatgattggtgatatatccaaaaattgtagtttcgacttggtaagtaaaataattttaaaatgttttagcatgaatgtttaacaagtagagaaaggatataaatggtttgagtttgatgcagttctaattcagtaattttcaacttagcacagacatttgaagtgaattaaataaattgtaaacattaaaaacattagataaaaaggattaggtgaacaaatttcttcatcctcaactttggaattaacttttttttttttaactactttttgcttactttttttttagcggaacagtgtaaagataatctttaataaaaacactagtaaagagaatatttttatttaattaatgtagtattgctagaaattgatgttttgattaatgtgagatttgatattttgatatgagttatgagaacagctatacaaccaagaggaaaatagtgaattcttgactgttattgagtttgggtcatgaagtaaaactaataataatttataagagcctaattctgctgattctgctagtggcctccttatgatcttatagtgaacttaatttgatctccttgaacatttgcttggtgtttctagaaaaatgaacagaggaattattatagaagtctcttatgcacaacaagcctaaggaaacaaagagtaacctgacaagagattccagagaaaagggcaaaagagaaaaggaataagcactttgttgaaaaagaatgttgtaattgtaatgtgaagactcatttgttagctttagtgactccctctggaatatgtctcttctgtttactttttggggagttactaaaatttcagatctttgcatttttcattttttgggtaagttttacctttgaagaacttacttatttgctcattcatttgtttatcaacacattcttattgagagcctactccaagccaggcagaaatcatagggtgaaaaactaatactaactctagcaaatcttacattctggtggagaggtatatgatgattgttattaataatacagtggatttcatatctagatttagtcataagtgatgttgaccataaagcaac

SEQ ID NO: 108496 - DNA, 1351 bp, Homo sapiens
tgagaggtgcttaggtggaggtatgctcccttatgtgtgtgttggccaaataaaacatgatgtaattaatccacttttgatagatattctttaacaatggtattgagaaacttggatgcttccaaatgctggcatccagtatatcaaggatttgcaaaccaggtcacataaggaatagttatgggtacaaagacttgcctcagggagcacagctgtcatatgaagaaggaatgttcacagtgcttaaccaggttcttaagaattcttgtggagtttataatgcattgttctggttaagaaacagtgctataggaaaagagaagtaaagaccagtgggtggtagtgagggaaagatcagaaattatctttacactttttttttttaatttaagcaaagctaacaataaaaaactgcctcagaatggtacacttcctcagtgcttagatctgagcagtttccttccaactacagccaggtccagctatataatgcaagaataaagatttaagtaatctttttttttttcttgagacagtcttgctctgccacccaggctggagtgcactggtgccatctcagctcactgccacttctgtctctcaagttcaaacgattctcgtccctcagcctcccaagcagctgggactacaggtgcatgccaccacacctggctaattttttttgtatttttagtagagatggggtttccccatgttggccaggcatgtctcgaactcctggcctcaagttatctgcctgcctcagcctcccaaagtgctgggattacatgcctgagccaccttgcccggccaagtttaagtaattttgaaaattaaacaccataagcactagaaggtaggaaaatagtaaccaccattgatggagttcctgctatgtactgtaagtgctttacacatagacttctaaaaattttttacaagcattttatgaatttatttttttacacaccaccattgtacaaacaaggatactggaggtttttttttttaacttttagggttgggggtacatgtgaaggtttgttacataggtaaatacatgtcatgggggtttgctgttcatattatttctttctttcttttttctgagaccaagtctcactctgttgcccaggttggagtgcagtggtgtgatctcggctcactgcaacctctgccttccaggttcaagtgattctcctgcctcagcctcccgagtagctgggattacaggtgcctgccaccacgcctggctaatttttgtgtttttagtagagatggggtttcaccatgttggccaggctggtctcgaactcccaacctcatgtgatccatccgcctcagtctccca

SEQ ID NO: 108497 - DNA, 1029 bp, Homo sapiens
ggcaagccattgctcaggtccttcagggagctgccagacaagttgaaacccacaatcacaattgtttaagaatgagatctgtattgcttcctctggcattaggagtgcaggttactgtccacacagccatcactgacttggggtgtgggggatggtgggcaggcaacttaggatgcgatagcactctctttaccacaaagcagcaacttctttctttaccaagccttgccctagattttataagttttttttttttactagattccagagttctgcaaaagttgagtctgacagtatttaccagctcattaattgcattcattgctttttgcagggacagtgccttggagttccttactctactatttttggtggtatcaccccaaatgtagggatttctctgaaggctatcattaaccggaagtaagaaaattaggaaggaagaagttgatttaggggtatagactggattatttttatttggacatgagtgttgggtttgaggtactgatggcacaatctgtgggtgtctagtgacagttggaattgtaatgcctgaattccagaaaggtcttagagctgcaaagagatctgggaaccttctgcacagaaattatagaaaatgaaagtgtatgatttccttggaatagagaggaaggtcaagtatgtcatcttgtgaaacactttcagctaaggaattcttcatttattcattcagcatgtttgctgactgctgaatacataattttgtttttcctttgttcctactactgatgtatgtactgctaagcgttggagacagaaacgaataagatctcgttttctgccctcaggaagttcactcatattgaggaagacagacaagtaaacaagtacaatgcagtgttataataacaaggttagaggagcctagacagaggtaaacaagaatatgtaaacaggttgggagggaaaataagaaattcggggaagtcaaagaagaagaaaacataatggagagagtgggctgtgatcttggttgctgcatat

SEQ ID NO: 108498 - DNA, 1031 bp, Homo sapiens
tttaaagatctatatagagttgaagatctctttttaataatgaataagttcattcttttggtaatcatttttttatattctcctctcatggccctttttaatttcaacaggcattggaaaagtgaaaagaaaacctagtgtgccagattctgcatctcctgctgatgatagttttgttgacccaggggaacgtctctatgacctcaacatgcccgcttatgtgaaatttaactacatggctgagagagaggatgaattatcattgataaaggggacaaaggtgatcgtcatggagaaatgcagtgatgggtggtggcgtggtagctacaatggacaagttggatggttcccttcaaactatgtaactgaagaaggtgacagtcctttgggtgaccatgtgggttctctgtcagagaaattagcagcagtcgtcaataacctaaatactgggcaagtgttgcatgtggtacaggctctttacccattcagctcatctaatgatgaagaacttaatttcgagaaaggagatgtaatggatgttattgaaaaacctgaaaatgacccagagtggtggaaatgcaggaagatcaatggtatggttggtctagtaccaaaaaactatgttaccgttatgcagaataatccattaacttcaggtttggaaccatcacctccacagtgtgattacattaggccttcactcactggaaagtttgctggcaatccttggtattatggcaaagtcaccaggcatcaagcagaaatggcattaaatgaaagaggacatgaaggggatttcctcattcgtgatagtgaatcttcggtaagttgattttcggaggtaaatacaaatagagctctgggtattttaaaaaaaagagagagagaaatggagaggttaagtggcttccctaaagttaaccaggtaacaagctgggacgtaacataagcataaatgttccaaagctaaagtccgcattctttctagctatctattttgaataaaagagagctgtggcagtgttgctaca

SEQ ID NO: 108499 - DNA, 1073 bp, Homo sapiens
cagcaagacacatgagacatagattagaaaacatgttgtacaattttaatttacaactgttggaaataaaaatcacttaatttttttccagtgcttctccctcatctggttattcaagaaaacaaaacagtctctgagatatttagcttttcaaactgtaaatagatgctctagtgttatttatttttttaatcccacttgtattattttacctctagagcatcttgtattaggacatgttatatttatgccagtgggaaataagttatggccaagttttgcaaaaacaggaagcagtgagatacttgtttttttctcctcactaaatatcagtaattgtcaggaatggtattacctattttcatttcctcttttcagctttaagttttgttgattgggacactaaaactgatgtatacctgaggaaaaaatagaatgtgctcatggttagggaaaattatattatttttaattttttaatttgttttttaaccaagtaggaatttgggtgtatggataagaggccaatctgcttctgtaggctatagaagaaaaccagttgtattttatggtcataatttgtccccctattattctggagatttaaatttaagtaaagtagccatcagtattttaattgaaaaatactaaagccacataactgagtaggatgtcgtatgatactttcaacaaattccctaatgctgcctaagcatatggatgttttaattctttgctgttataaatagatatctaatacgccagaattactgatggtaaaattgaagttgtgtaacttgtgaattttttttatcaatgttttaaatattatttaaatcttaaaatcatttaaagacttatgttgccactgggtggcagccatggcttctcccactaagcaacagaagtgaccaaatataattaagacaaattttcatctctattacatctgcttttaaaacattttagttcatattctattatttttctaactcagtactcctttgttgagggtaattattagtagttaagtttttaatggaaataaaaatcatgtatgcttatctttgctg

SEQ ID NO: 108500 - DNA, 1020 bp, Homo sapiens
tggaaattaccatttttttcagaaacactcagttacattgtccaaatcaagaaatgaggagtgtggcattacagtactccctaagttttccattttaatactttgctagaagataaggggtcctttataatcttgcatttatatagaacttttaactttccaaatggcttcacaatcaaggtcactttttttcttaaaggacttttgatatagtatagatgctatcttatgttttgaacactactgttttttaaagaatgccaaattactgtttctggagaaacacattattagaagcattggcttgctactcgattctgataggctggttctgttagtgtttagcaagtttttgtgactcaattctctgctatcttttaaacacttgacagaccagcatgatatgcatgcccccacaccctaatttcttgctgtaacatgacctaaaccaaatgacttaggaactgaaatgtttatttctagtttactaatgaggtgcaccttgtatctgaaagcatacatagtttgctgagatatgtttaatgagtagaacctaggttaggcttggtggggttttgaacagaggaggagtttgagctatcagccaccttgttcacagagggaagtgttctaaattagtgtctttgagaatatttcctggcgggttaaaagtagatttctaaggtagttgctttaaataaatttctgtgctcagataatttatatctttagactgtggagaaatctttcagatagccttcatgaaattactgagacaaaaaggtgaattccagaatgagactgttaagtgttgtctattttaggctaaacacaggaatggttattaaattgatattttttgagtacttttgaaggaaacagtaatcattgagtaaggatggcttctctaggagaagtaatgtcaaacttgatgttttctagacttaataggcaagggggatgttacagagaacaaattcatcaaggcatatgatgatgtcaagatgcaaatattttttt

SEQ ID NO: 108501 - DNA, 1043 bp, Homo sapiens
agaggaatcaggaagccaagatggagaacaaaggtaacattggggacagacgttgaggccatgtatgaagcactcttaagaggagcagtgagagactgtacaagcagctagtgaccagaggtcaaagtacagatgtggccactgactcacagtgctggaatcaaggaaaatatgcaccaggttttcttgactatggtgtggtaaaaagatatacagcaatgtttattgtatacttattttgtgccagatcctgttctaagtttcacttaatcctcacaacagccctgagtcagacactattataattgttcccaattttcagatgagaaccataaagcagatagtttaaatgacttgcctaaagaaacacaactaaaaagttgacaccaatcaacctgagacaaagattatttatatactagagactcccctgcccatataagcatctaagctcaaatttcgcaagctgaacatttgcagcctttttctatagcacccccaatcctgcctgtcctgaccacactccacccacttcattatttcacttgaggtgctgccatccacccagttacccaaactcagaacctgaaagccatgtttggctcctcctccccagccctcttaatgcactcaatatccaggagctatcagttctatcttctttatcttttgaatttggtcatttctctctgcagacatgagaaacctagtggaagccaacaatgtctgtcacctggatcactaccatagctccctcatggccctcctgccttcaatctggccccctgtgctgttttctccaccctagtcacaaactttttaaagctcaaatgcagggaatgacatggtcatatttgagctttgaacccttcctttgaccttcattcctctcaggataaattccaagctcctcaataaggcattcaaaactctctagaatcctgtttctgtctgccactaagccctatttctcgccatttcaaccttgttctcgtgttgcaccaaacttcttcttgcttcctaaaaacaacattcctggctga

SEQ ID NO: 108502 - DNA, 1131 bp, Homo sapiens
gagccaaaacgaactataatcctaaaggtcagctggccctggggctgagcaggctctagtcttctccaggtgttcaggtgcttgcagctattgaatagtgataaggacacagaaattgctccatatatttcattaacaatgaatacagactgaacacctacatgtgtagacattcttctaggctcagggatacagttgacaaggtttctggattttgagagcttacatctagaggaggatacagatgataaatatactaggccagcattctctagtatggtagccaccagccacagctggctatttaaatttaaattaaattaaattaaattaaattaaattaaaatgtctgtttcctgccacactagtcacattttaggtgttcaatagccacatgtggccagtggttaccatattgaacaacatcgatttagaatatttgcatcatcacagaaagtttatttttggaaagcactgctctagggaattttggatagtaatcagtgctaggaggaagctaaaaggctgatgccatagagagttgacactgaggctcctttatattagatggcctgggatggcctctctgaggaggtgatatttatgccatatctgaaggacaagaggagccagccatgcgaacagcaggggcagagcgtttgagatggagtgaacagttagtcaaaggtcctaaggcaaaaagtgctcagcattttggagaaatgaccaatgtggcaagaatatcacgcttcggagcagagtgagagagaaggccaaagcatcttgtaagaccactggcaagagtttggatcccattctaagtcctgtaggaagccattaaggagagaaacgtcacaatctgctgagtggtgaatggttttgagaatggcaggtgtccaagctgggagatcacagcaaggcaaggaatgacagtggctgagattagggtgatgaccctggagatgaagagataaaagagatccagacacattgatgtttatgcctagctttccctatctggcaataaaaggagtaagggacgatggatggttggtagggaggagagtggaggagctaggataatgagaaagtacttattttacttacctgtacaaagtaggtgaacgaagt

SEQ ID NO: 108503 - DNA, 1080 bp, Homo sapiens
aaaggggattttaatgagtttctcggcaatgaggctagagaaaatattatccatctccccctgttctccaattcagcagctcggactcctgttttcatcacagtcctgttagataattacagccccaaaggcctcctgttccttctttctgtgttccctgaatcttctttcccagagccaggacctcttggaaattctcagcctctgttagttgcccgctctgggagcccgactcctcacatccgtcatctctttcttctcccccttcacctgctgtagtgtccccactgtctctctttacctcagctccttaccattcctttccctctacacccttttcctttggttcatagtcaggatgtgctagttgcattcaagccctttttgatactaagaattcagggggacaaatccaaaccctggagactactgtcttccccttagtgatgctaatgaatataattcctgatctgaaattacctgcactttatttggctccatctacttttctgccacttactccctgtataaccataggctacgtaccctacctctctctgggtttgtttactcctcagttaaaaggaggattaaaatggcaatcacaacaccttgctacagatatgttaggaagattaaatgggataacatgcagggtgcctagccttcctggcatatagtaaatgcctataaaatataacaagtgtcatgtattattattaaattgtatctacctggtagaaactaatggagtggactactttattaatttagatttctctctttttcctttcctatgatatttaagctggaaaacccagtatagtttaaaaaatcagttgttcagtcattgtttatacaatctagattcacttaaataatctctccagtttttatgtagacccaatgacatgcagaataataaactaagggagagggtttggtccacaccttcagggtcagaaaacagagttttaacccagatagaatggtgaaagggcttataagaaattactgaactttaaagctgtggtctgtgcatacccagagtctttttttctttctttctttctttttttt

SEQ ID NO: 108504 - DNA, 1125 bp, Homo sapiens
ggtctatggattctctctccaactagtatttgaatgccattgtgcttaaccagaacacgtatgttattattagaagcaccaatgaaatctattattaaataaaaacacacctattattaaattagccaagcattacactattggaatgctgtttgtgtagagtaagttagaaaaaaaaaatagacaactagggttattttaggaagaatggtcactactttgattgttttcaactactgactactctaactttggccctatattcagatttgattaagacattcctttctaaccttgcatgaatcctcatcttggattcagatgcctccctggaccctcccatgggctctgggtggatgtcaaaagctcgagcaacttccaataggtcttgaaagggtacttggattgtgtttacagcagtttagttttttaaacattgttagccatggacagtgtgtttggcataataatagtaattgggagtacaaaaatgagcaagctgtggtctcttatcctaggattcagtcagatggtagaaaagcatgttccaacgaagtcccttatgctatgatgtggtcagaattgtgacgcagtcctttgcattatcctgctgtgcacattttgatggggctcccaaaccctgaaccattgcactttcagcaactttgaagccgctgcttacccttctctgatcctcatttcatgccccccagtcctgcaagaaaagcaccaggcactgatcacagactcccaggccagcagcagcaggtgtgagaggcttaggggaaggagaagaagggtagcctctctctgtaaaggtgaactcctgtctcctctaggatgcaaagggaatctcgattcagactctcagacacctggaatccctgctgagagtccagcgggagcagaaggcccggaagttttctgaatttctgagtctgaggggaaagcttgtcaaggaagtcaccagcagagcgaaggagagacaggagaatggcgctgtggtgtcccagccagacgggcagccttcaggtacactggggagagggcttgctcagggctgtgacctgtaagggtcccattcttgccaaaacttgtttgcacatgaggagggtatagtctctg

SEQ ID NO: 108505 - DNA, 1620 bp, Homo sapiens
ttgcaaatgattcagttaggaacctattggctaaagataacagaatagtctattaggggctattatttttattttcacagcaagagaggtgacagttgctgggcttggttagcagaagtagtatgccattgtgaatccagactgtgtttttctttttaccatcttcagtgtgatgacttttgtttaccgcttcactttcatgttgcaagcagactactgtagccccaaccatacaaccatatttggcagaagaagttgatgaaaaggtcccttcccaagacttgtgcttatctatattattggtcaaagctgtgtcacatgggaaactacagctgcaaaaaaggctgggaaagtaaacaactagttttgcagtttggagtagaggtaggcaaaggagacagcagtggggaatggatactggatgagtcatatgtcagcatgtgccactgcaggtaataaaaagcaaccgaagcttaagtagaagagggagtttgtcataagggtagatggagcatctcacagagctcacggcagggagcagctgagtctgggagtaaactgaaaccagagacatgaatgtggtcatcagttttccttttctgtgtgtctctgttcctttctctataactgctttattttttccttttaccctgaagatcagcttctgctgcttatctgttttatgtggtaaaacaaatatacgaaccaagaaaaaccacaaacaattggctgccagcagctttgacatcattcattaccagtccagagctctttgccttaacttgggtgttgggtccggctgtggtgtgaagtctcattgttcacctgtggctgtcctgcctgcagccatgaagggggaaggaacaggaacttcttggagcaggggggttgagcagacagttcagtgaatgtctacatctggcctcctgtccgggaatgtgtctgactccttcctcccagggagtgctctgctcagacgcccgcattgtgggagggagcctctcccttgccctggctgttttccatgaattataccaataggaacaactgtgtgcctgtcccactctgtttctatggggctcctgccctcgaggcataattcttctttgaagaggggacattcttgcctccccaccttggaaaatggagcatgctgccattccctttcacacacggaccccagagatgtgtcagggggctggggtggtgcatctgagctccttccagttcccaacgtgagtcatggaatctgtagccatcccttcctcactgtgctaggcagacactgctcaaagcagagttctcacaatgttctctgctggttgtaacccgctctattccacctctttgcagatccagtccttgtctctcaggaaggtggaaggtaagtgtctacacagggcagtgtgtagcagtcttgactattgtctctggcttttctccctccttttccctctcccccagtcaattcatgggtggtggattggtgacagcagcctgtggacatgtagtgtcaggcttctgggccacacaggctgcagctctgtttgtgctgaaggcttcccatgcagctggcagggcttcttgcctggcttgctcctgtctgtaaagggatggagg

SEQ ID NO: 108506 - DNA, 1034 bp, Homo sapiens
ggagtttagaaattgttaacctttggaaccagtattgtttagcaatagttgagaagtgttagcaagaatgatatcaagttaaacttaggcacttggagttacatccttaaagccttaatagggcttatgagttttatacagtcatacagatagaaatatgttgcttttgttactacgacagtcatatattataagaaataatcaaaggtgggtggaaaggcatcctctctttgatccaattttctgtacctttttcttcaggtcacacacactgctagcccaggaatcactaggtattgatgactctacttcaagctgtgcaaagccctttctggagacagccaggatgttttgtagggagagaggcaggagtcctcagggagtggcctggggtgagaccctcccataggctctaagagtctcattctcatcagtgtattccagactgaggaagaaatggggcagcagtcaggagagctcgggattttgagtatagcagaatttaagtgaaatggaaactacactctttaatttgttcttccatggaattgctttttctatgcaagggctgagcccccaggagagcccttgtgaagggaatgctgatttgtgtgaatatctgtaggtgagtaggtatctagtgaggatgagttgggaggatgagttgggtaaggcgtgcccctctgacactgttctgggtataaaagacaacatcatgatgagatcttcatctgaataaaactatgccctggccttttcagaaactgcgggcactgcagtcccacagtgtgatggagtccaagctgggatcactgcgagatgaggagtcagaggagtggcttcggcaggcacgggagcttcaggccctgagagagaagacagaaattcaggtgagctgatgctccatgcctttcttcccagaggaagccaagagccatcttctcttccaatatattctctcatttatgaatgtagagaagttgaaggacatcaaagttctatattttcagaccttctgccagtacatgaaagca

SEQ ID NO: 108507 - DNA, 3057 bp, Homo sapiens
aaagtaacagtcattcctttgacacacaacttaggggtatgtgtgataaagattattttcatcctattccgtgtatgaagaattacctgtggttgttttaacattctttcttaaatcatgattcatattgtccaggcaaaggataaaggacagacagccagagcaaccaaatttttagccttggacaaatgcttaccacatagagattttcttcaggtaagaagagtgaagtggctttataatatagttgtactcttccagagacttaaaaaaatataattttcctttcggaatttttttgttctgtttgtaatttatgtattctgagaattctttgggggtatcttacttattaatttaaaattaaatggattgatttaaaattaaataattgaaattaaatttaaattaaattcctttttattttattaaattatattaaagtgattagactgttacaaatatatatgtatttcttaacattgatttcatcctgtagatattagagatagaacatgaccccagtgctcctgattacttggaatatgatattgaatggctcactattctcagggctacggatgatcttattaatgtgactgggcgcctgtggaatatgccagaaaataatggcctgcatgcaaggtaagtcagactttatttaggacctgctttttccattgcatgcataatttttatatctcccacctttgttttgttttgttttgaaacagggtctagctctgttatccaaactggactgcagtggtgtgatcttggatcttggctcactgcatcctctgcctcctgggctaaagggatcctcccacctctgcccccagagtagctgggaccacaggcatgcaccaccatgcccagctaattttttggtatttttggtagagatggggctttcccatgttgcctaggttggtcttgaactcctgagctcaagctatccacctccctcggcctcccaaagtactgggattacaggcgtgagctgctgtatctggcctccacctttgtttttaatcaagggaattattgttgaatgaatgtcagaacaattcaaagtttgcaggttttccatctaaaagagacaggaaaatggactgttgagcattacctcaaataaatttataagtgaataagtgtacataaaaccatgatatggtgaagatatagtccacacattaaaattgttttggagtatgagttaaagatggctttttctaagaattatttttttttctaaatggtcctttgctaaattaactctaactttaaaaatggaattttgatagatggcttattttttatccttgcacctgaagtctgtaattagatttcatcatttattgtttagagctgataaaatgtaaaaagctattgttttgtacttttataggtgggattatagtgcaacagaagaaggtatgaaagaagtattggaaaaattgaatcatgatctcaaggttccatgtaactttagtgtaacagctgcttgttatgatcctagcaagccacagacacaaatgcagctgattcataggatcaatcctcagacaactgaattttgtgcccaacttggcatcatagacatcaatgttaggcttcagaagtccaaggaagaacatcatgtgtgtggtgaatatgaagaacaggatgatgtggagagtaatgactctggagaagaccagagtgaatataatacagacacatctgctctgtcttctattaatccagatgaaataatgttagatgaagaagaagatgaagatagtattgtaagtgcacatagtggcatgaatacaccatcggtagaaccttctgatcaagcttctgagttttctgcaagtttctctgatgtcaggatcttgccaggctctatgattgtatcttctgatgatacggtggattccacaattgatagagaggggaaacctggtgggactgtggagtcagggaatggagaggacttaaccaaggtgccattgaagaggctgagtgatgaacatgaacctgaacaaagaaagaaaattaagaggaggaatcaagccatttacgctgcagtggatgatgatgatgacgatgcagcttaagatgatttacttgttttgtttttgtgtttgttttgtttttttgagatggagtttcactcttgtcacctagactggagtgcaatggcgtgatctcggctcaccgcaacctccgcctcccaggttcaagcaattctcctgcctcagcctcccaagtaggtgggactacaggtgcccgccaccacacccggctaatttttgcatttttagtaatgacagggtttcaccgtgttggccaggctggtctccaactcctgacctcaggcgatccacctgtcttggccttctaaagtgctgggattacaggcgtgagccactgtgcctggccgacaatttacttgtcttagtattatatgtagatatgtgattttttgagactgtatttttagagctgaatttttgactaaagacttaactttataataatgaagatacattagagaattttagttagatattgactttatctttaggcttttgtatgtttcagatgcaaacatattaaagtttcatatatttacttgactgggtatctttttttttgaagacatacattattcacttccatttttacaataaacacttacttaacatctactctgtgccaagcactctgctataatatgggaccataaagatgagtaagacaaggatttttgcctccaaggacttgttatcactgtaaacattttgatgtatacaatatggctatattatattttgttttataaaatcaagtcattgtatatattatgatgtatgctttcttttcatttattataaatatttttcctgatcagcttttaatatctgtcaaataaaaattgaaattgaagatggtatataagatttcaggaaataaactactctgaatactaaacattggtaaacgtacaatcttaatttgctgagattagtataaccctgctgacttttgcatattgagttttttttg

SEQ ID NO: 108508 - DNA, 1243 bp, Homo sapiens
tattgccgtgattgtcacaggccacaatgtgggtgacaggtcaggtctgacagatcttgagtggtactgtaataggaaagtgaatgcaccagctgctgcaaatgatgggctgagtctgaggcaagcaccatggatagctccaaggcagggctattactgcctgtaagaatctgaagcaaataaagcccttttttatcaggaaggcgcctggcctgtctgaacaatactacttcgaaggtgtgccatgaaagatggtacccaggatctctaagtaattacatgacagcaattttgaataataatttcaactattcttatgggccaggacaacacctcacccatatctgaatagcctcactttgttatgtgaggattgagaagttggcatttaaatacatcctagtggacttcttgggtcatcttatcaccttgggaggcatataaatgaacctcaaccaatccagaggatatctcagtctttgtgaaactcctgatcatttttgtaaccttgcatgtgctttccagagatagttcttgctcccttggactttcagattatgctgtctcacacagtgggttcttatctcatttgctctatccagaggtatcttttattgaccctccgtttaagcattctcatctacagtgaagagtaaatgaattgaatttaatagtgagaagaaaccttaaagatcttctagagccagatagctctttatgatttataccatattttaaaagggaaaacatcatagtacttgattagaagcatgaatgctaaattactttcagtcttgtgaccaccaagcattttatggcaatatttaatagtttacaagggcaataagaatgcattatcacattaaaaactcactacagagccagatgtggtgccgtacacctgtagtcccagctcctcaggaggctgaggctggtggatcacttgagtctgtgagtttgagatttgagaccagcctacacagcatagcaaaaccctgtctcttgggggcaaaagccaaacaaacaaaaaaaaaactccagaaaaagtaaaggctgctcttcatatcccttttaatctaactgtgccctggcttttcttttatgaaaaaagaaactccctctttgtttgagtataaaatcatggaatcttttcttggaagaaacctgcagataatctttagttcattcttgtcattttttattgaggaaaactgaaaaccggagaggctggcttgcccactgt

SEQ ID NO: 108509 - DNA, 1077 bp, Homo sapiens
atgttatttaaacaagtaaagcaaaatattatttcaatatatctgtgtaataagttattactgaaatttgttgcaaaaatagcaagtcttcagtatctgatgtatagtttatacaatttggatgctaaatttttattggaaatacttgattcatatttaggtgtcataaagtttatagttgaaaatgtaaactcatatacccaagtagttccaaatcattcttaaaagttttaaaataactgaatccagtattggttttttaattttaattaaagtttaaaatataaacaaaattcacttcctagccacatttcaaatttcaattgccatatgaggctagaggctggcttactggacagtgcagctctttaccatctggcgcctgttctctgcctcatctcctgctgctttctcctttgctcattctgctccagctataatggcctcctattctttgattatggcagatacttctcattttagggcatttgaatttgctgttctttttgcctaaaaaaagctctacccctaggtaggtgcacagtctgctccttcaccttctttaggacttcgctcaaatgtcacctttttagacgttctttctcttatcaacccatttaatatctgtacaaattgccttctctccctacctcttatatttctaggctgccttctgaaagaagagagaagaggactgggaggggagaggtgacctgatctacaaggagcagtgaaatatcagaattgtcctatacagataaatgaatacattagacaaaagcgtagagtaagataaggttgaataagtgatcataccccttcagcttgcttgctgtctgagcaacttatatgattatttttgcgtatacataacaatttcagatactaagcttcttaaatgcaaggctctgccttaatgtcctcttataccttctttggcatctagcatgtaactttgaccaaaaggcagtgtgaaatctccaattgtggtccacctattggttagccttttgtgttttacatcctgcggtgcctctctatcctctgttcttttcagtgccagcaactagtatactt

SEQ ID NO: 108510 - DNA, 1133 bp, Homo sapiens
gtaagaatataatactgtatttttgtatttaaatatgtttagctacacattacctaccattgtgttacagttgcctacattattcagtacagtaacatgctgtacatgtttgcagcctacaagcaataaactataccatatagtctaagtgtgtagtaggctataccatctagttggtgtaagtacactctatgatgttcacacaaggacaaagttgtctaatgatgcatttctcagaacatatccccgtcgtcaaataatgtgtcctcgtcgttaagcgaagcatgactgtaattgattttttagcttgggtctccagtcttcaatacttttaaagataattttgtttttaggtgatattaggctttcagttaaaatgtatgctatttttgaccatttagaaataaatatattcatacttgattgactgaaatggtttctccagcaggtctagatcctttttttttttttttcttttttctgttattttaatagcaacatatagtgctttttctcttggttttcatcacgcttataatgctctaatttagacatatgctgtggtaggcactgtacattttaatatgcaagccctttttctctgccacactaaaaatctctttcagagcaaagaaagtaaagtagaaagtttaacctctgtgtaaatgtgggagcttatcaagtccatttattagcatgcaaatttaagattttagccagattttggctgaaaatctttctcaacaaatgcatgtttgtaacatcttaatattgacttcttttctcccactccccaaaagtgggatatccccaaggcttacttattcttatctcacctcaaagataattcagtgtgtacaaagtcaaaaatcaatccttgtcttctctctaagctttctgttgtttcctgcacccatgtgcccagacatgaagtagtcactcgacatgtcacatatcacatttttgtacctattaaatcatcttgttaactgcttcctcaaaatgacctttgtattaatgattcctttggctgctccactaatcagttttgtataaccagatacctagatggattgattaagtccttcaacaaatatttattgagtgcctgcctagtaccaagcattgtgcta

SEQ ID NO: 108511 - DNA, 1870 bp, Homo sapiens
cccaaagtgctgggattacaggcgtgagccaccgtgtccggcctgtccttttagtctttaaatttatttcaggtagggcctactaatgtgtatgttttccctacctcagctatctagtttagtcttggtaaagagctcataaggataggaatggagagtggaactaacttcaaactagccagaggcaggggaaataaatatatactgaaaggtacctcctctttcctgtgccatgcaaaggctaaaccagtcagcacttgcacatcaagaaacaattgtttgggtggctgtttattgttcctttacttcatctcctctagcttcattaattcccccagctcttcctccatttctcctatcttttctgcactagacttccttatttactataatgatttgaaaaacctacaggttgtggaaaggggactagtctggtaacattactcttctgccagggtttgctgtattaccaaagtgccattaatgtattctaggttcctcctgtgggcacatgctagtgctgcagagcattgcccaagtgaggggcagggcttcttcataccccagctacctatcctgtgagtgcttgtcaacctcaggttccacattaaaacatcatgtgtagactcagacttagaagtgaggattagattggattagaatggaaagaattaaaaaaaaaaaaaacatctcttaggagcttctggaaattgtaaagcatattatatatggttaaggattgggcccttggtattatcccaaaccagtaacctagttttgaggaatagtagcacaattcatgggtgttttaaaagttagcgcttcttaaattttattgtaatattgtttcctctccttctgttccctgtctccaatccatacataaaagtattctatttttttattcgctttgaaagccacttggtaattaattgttactaagttctctttgtcttaccaactgtattttgtatagtgttcttttaattttgattagggatttatctagttaaatttaaattgctacttcctgatttttttcctattcaaaattagttctaacttttatagttaattttaacttactgtactctgcagctgtacaggtgttattgttatttctttgaggcctgttagtattttaagcagatttacataattttttagaagagtttagattctgagacattaaaatttgcatttgcagaattaaacacattttttgtttgttcatttatttttacaggttcgaatgcaagcactgaaatgtttctcagttttagcttttgaaaacccccaggtatcgatgaccctggtaaatggtaggctggagctttcagtggcacctacatgatttaattgatgaactttttagatttaaagaatttccttaatcattgttgtttgttttatttctagttttggttgatggagaattgttaccacagatttttgtgaagatgttacagagggataagcctattgagatgcagctcacatcagcaaaatggtaaaagtcaggacaatgtgggaagaaagacagtgctttatcaatatcttagagtatttttggacaaccaaatttgcttgcttccaatccccattttattttgagattttgaaatttgaaagtcaggagtccatcccacattttcttaaatggatgtgagttttttatactcagcttattactagtaatatgcagaacaggaactctcgtataacatctgagactgtcttcagaaaattactttattacatcctcaaactactgtccttctacttcagttgaaataatactgaattagattagatttaaccaacatatactatgctaagtattagccagggaaatacaaagatatagaaa

SEQ ID NO: 108512 - DNA, 1491 bp, Homo sapiens
caaaagtagtggattctccaagctgggtattgacataaccgtataatcttattcttggtcatggaatcatctctgttgttacattctcattctttaggtcaggagtaatctttttgttacaggagactaagttgtcccatgttactttccaccacagtctattttgttacctttccctatcttctctttttcccagtttcatactgtgctttgggcctgctagtgacagctaaagcatcatttaatcttgaatttgggaccaaaaaggccaaattgtgctttttctgaaaacctaagttccttagaatagatcggtatttattttgacttgttgcatctcagcctgtttgccctatccatttctttaagcataggagatgaacattctgtaagagaaagtttattcaaggaggtcatggtagagagaacattgcctcttaattagtagccagtactgtttcatgaatgtaactgtatttttcatgccagtggttccaatggtaactattctccttttgacctctccctcatgcttttgagtttcaaaaaacctcatttggtaggcagttgttcatttggcttttaactttgaaaataaagcaaactattaagggtatatctttactctgtcttaagaagggcctaaaataaccttcactggtatttgtattagtaatgtactctactctctgggtattaaacttatgtgtctgctcttctttcagtagtggtgtttttccagtagaagtgatgggttacatacatttaaccagttgccttgtctgttttccttctggtcattttttcacactgacactgtatcttaccaatacaaagatacatgagcaacccttagctactgcctcatgaacgccctgagttgaccaccccaggaaggcaaataaaatgttttgatggccatgagagtaaggaaacaattttaagaacatgtagcctatgcatatgcaaatcatttaactagtacgtagattatcccttctgttagtttttccatttcatttccatcagagtaaaactgtaacaacaataatccttaaaaatgacatcgtaataccaaacttgagtaatagtttgttttgtcatctttatttttgatgatggattatccaaaggtttctgacccgaaaagtatagacactagacccgtaaagagaaatcttcacatgttaataaatttgtgattttcatgatatgttagttcaagtcagtattatatcttaatttatgactagaatgtagttaagactttaagagtagatacttttagaacttatcaaagtgagtattctgtattgggaagttcttcctataatccatcagtgtctgctttgaacagaagttttggaactattaagaattgccttcagagccaccccaaattatatatatatgtaaaatatatatattgtcttttgctttctgtggaattttttgttacctacgttatattacccaactgaatttctccat

SEQ ID NO: 108513 - DNA, 2042 bp, Homo sapiens
ttatttcaaagcaaacatactagtgatatatatatgatttatggatgttgacgccaatgttcagtttgggtacgttggtgtattgcaaggggagaggcttttataacaatagatttgaacatttttaaaaaattggactgtgtaacttaaatacacaattatttggtttaggatggttattagggcccattagaaacaggagaagtattttacccattcttaaagctctaaaaaaccatctcatggactgaaaggtagatagacagatggaccacaatgggaaataggatgtccatttgtacttctttgtacttttttgttaataaactgttttggaattaatggcttaatttgtgatatcatgttctagaaatacctgcaacatgacagtctaatcagtagtctattaaaacttgtattcataatgtgtataatttcctggtaaggctaactcctgatcgtttctgtagaaagatgacaaataaagaaaaagttataattattaattatagttttttgtgtggtaaagcaaagatactgtgatattatgtaatggggcttatatagcattttaaggaagatatttaatttctgggaaattaagtgtttgaataatttacagttcatagtaactactgaagagataaattgtaaaatggaaactataaagtaattttgtgataaaatctacttgaagactggccataggcgtggaaaaattttattttcagtgtataaaaaatgataaatagtagcacttttcttttgagtgcatttcttttccttttttgttgttgaaataattatttgggtagatttttatttactttctccatgaaatatttatttcttgtttacacttatgtcttatgaacttgactgtattttttgtgtagatccttaaagtacaatgtttattgtttgatttttttaaaatgcaatgtttatgcttgccaagatggaatttcagttaactgagtcaataagtagagaaactgagttaatgagtggagagtctctgaaagaaatttaaaggactgtagatctacttccctcaatccctacttctccccctcaaaaaccaacaaaaagtttgtttgtttcaggagaaaaacatgaaatgttcagttggtctgccatttaaattaaaaatgagaacataattcaatacattcggtaaataacatgtattctagtgccctattatggccagttaaggaaaggaggcagaatgaagaagagaaaataagcaaagtagagacaatgagaggtatacacagtagtaaaggagaaggacgctggcctctcttcatataattgtgtctcttttactgcttctaaagacttctaaaggtctgctgtgttttcatttcttgataccttctctttgggccagagaatattaagctgaagatggaatgtgacttgtagatcagagatttaccacccctgctttgaagcagtgttggtgtattcccactaaaataaaccaactgtataacattccctggaacttaataagcactcaataaatatttgttgaataaatatagaaatgaaaatgcagaaatcgtacacagagtgactttttctttaatttgtttggacctttatcctgcatggagcaaaattggtattctaattccgagtgttgcatcctttattactctatggcatacttgaaaatttcttaatttattgtggtgtcctgtcagctagagtgaaggaggatggtgctggtggaaagagttgtgcaggtgagagtgaaaaatactaccattgactgtgacatgaagagggagaagaagccccagaaaagatggaggatcactgagcctggcaacagttgtggcctggccgtgttaaacttagaagaattcaagctacctgtaataattgatcctgactctgaatggattttggttagagagagtaagagcataggcaggaattgagagctcagtggaagaagggtccagaacacattagcagtaactgcaatgacagcaatgccaagtaaaaattagctctcatctctgcca

SEQ ID NO: 108514 - DNA, 1034 bp, Homo sapiens
aattttgagatagattcttctatgacaaataattgctgttatgaagaccatcacttgattaggacctgtcgatcaccagttaagttggaagttgaaaaaggattatcctctcttactcttcaagtaactagtagaacttgttagaaatgttagtgaaaattaagggaaattagaagtaaagtgtaaattaaaattcaaggaaattggtatactaaccaggatgttggttttatttttgataaaagtaaacacattgcaaatgttaagtacgtattgtaaccttcattcccctggggcacctgactaatggagccttggggaaagttttctgcttcaatttgaatacgtatattttagctggagatttctttcgaggaactagaatgtaagctccatgagggcagggatttatttgtgttttgttcattaatgtattcccagcatctacaacactgtctgtgcatagttgacacttaataaataattgatgaatgaatgaatgaatgaaaaaatgaacacacagacaaatggatgaatgagcaatattgcattattaagcacccattatcttatatgctcttgtctgcattaggaactttcctaacctcactagcaattctgtctgtgtgtaaagacaggaaatttgaaatggagaaaatatacctctggtcatatagtcaggggtttcactgttatacttagcatagagaaaaatgcaggaaattcccattttttcaagaggcaggcaatcctgagggcttgtcttctgcttgcttggctatcaatcaaagaaaacatgttttatggtattgtacttgcttcatttcaaaataattttgaccattatttcttaattagaaaatatagagtttttatctttctagatgtatgatttttttaaagtttgtatcattcacacgtgtgaatctggaccaggttttctaaggataaaagtatgatttggtttatagaaattaacctttcaggaatcaacctatttgcaaggttatatatactgatataaagtatttttc

SEQ ID NO: 108515 - DNA, 2239 bp, Homo sapiens
tcggatttcataattccttgcctcaaactgtggttaagttgttagttaccttcttaaagcaaatccaccaaagaattttatgtgaaccttgcaacattcattcacaatggtaagtatttttaaagaaataaccatgacaggaccaggttttgccacttgcccacagtattgagacctttggccttcaacatactgaaagaagcaaacctgggagtgataatgctgtatatataatagaggtatttataaaataatgaatttttatttcatagtttcattaaatggagatataaaattgagtgttatactatttgtggtatgtcccttgcttaagccattgaaagtatgatggacaagttggtttattgtttattatctagttaaaagacagaggttatatacaccaagaaatgggctaaaatatctttattagatctgtaaatctaaatgttgtgacttagttggattttcaagaacattctttctggaaatgaatgaaatatttggaataattaaatatgtatggaatagtagaacttgaaaagattaggattgtgataagaatcagggattgttgctatgctctttcctatgaataaagtgctagcatagaggttggtaaactacaacctgtgggtactgttacctacattataattttgtagcttgcaagataaaattatttttgcattttttgatggttgggggaattaaaagaagaatattttctgacatatgaaaaggaaattaaattcaggtttatgtccgtaaagttatattgccgtacgaccttgttggtttatgtgttgacttttgactgttttgcactaccgaggcaagttgagtagttgtgacagaactgtatgtcccacaaagtctaaaatatttactgcttggcccttacagaaaaagtttgcccaccctgtgctaatactgcatagctaaccataaactctttttttttttttttttttgagacggggtctcgcactgtcgcccaggctggagtgctgtggcacgatctcggctcactgcagcctccgtctcctgggttcaagcgattctcctgcctcagcctcccaagtagctgagattacaggcgcccgccaccacgcctggctaattttttgtatttttagtagagatggggttttcactatgttggccaggatggtcccgaactcctgaccttgtgatccacccgcctcggccttccaaagtgctgggattacaggcgtgagccaccccgccccccccccccccccacccggcctaaatagaaactctcataaaccagtttggcgaaataccaaacttcgcatatgcctgtgtgtactggcatatagaaagaaacagggccctgaccagaagagggagaagccagttgtctgactttctgaagaaaggcattatcaattgttgacagtagacattgtcactggatactttcctacatactgattcccttgtttgaatgattttggcatgtgacagaccctagaaaaattagattaaaactatggctttgggttatgattggaaatcttactgggttctgtgtattggttagcaaggttctctgaataagatttttcactatgcttgagagaaaaaaaaatctagttcacttattaagcaaatatattaagcctttgctaaatataaagtgttaggtggtatggggcaagcagaaatcatataagtcagatacttaagtcaacagaatctgtttgggaaaccatatacaacagaaatataactactaccatttgttgagcactcactatgtgctggaccctgtgctaagcattagcacattctctcccttaattgtcataccaccctatgagatagtttttgcagatcaggaaatcagcaatttgaccaaggccccccagctagtaagtagtagagtctctgtcttatcccagtctctctgactccaaagcctatgtttttaactattacatcactttatacatgctaagttaaataccattatagatccaaattatggcatagaatggcaagaaattttactgaagagtatatgattagcctaaaaaaatactacaaactgagagaacttggtatatagcttaatagtttgtcctagctgtttacaaagcattagattcagaaaacgccatttctctcacatagcttttggtactaagtgggtaatgagatgctttaatccatctgtacactcatcatgtaacattgatgtatgctcaga

SEQ ID NO: 108516 - DNA, 2979 bp, Homo sapiens
gagtaaagatgtgagaacattatggaaaggtagtttttggatcaaggtagataggctttgagcttgaagtacccaaccttgacaagagtaaagaaaacagcaaaagcatggagacctttcgtcagaagtgggaagttgcaatgtgtgtccccaaaatcaaggtccctacgaagatgaggtgggcacagagtggctgcgagcatgagggaggcagaagaatttgaagtaagaggtagctaccataaggaacatgggcatctccagggggttacaaggctggtcaccagcagtgagggtgccgctgaggtgggatagcttacacggaaagaacagtcatgtttggtggtttttctagagcaacatcagcagttggtatctggaggaggagtaatgaatggtgggaggacagtgaaaaagggaaactgtcttctaagtggagtgtctgagcaggacatccatgccagggggaaaagatatgagggagtcacaaagagtaggtagactgagaaagggaggaatttaggggctagaggtgacaatgaggacagagagtgattgtgcatatcagtaagaatggaattaggtttggtctagggcgaggagtagatcaatatgtaaatgttttggaaactaaaacaccagataaaaattaccattcctaatctacagctaaaatgtggttccctgttcttaatagatgatattttccctgatcattgttaatttcaacaatattttcttctcttcttgtttggctgaaacatcctgaggttttccactctctcatgttctaaggtcagacttctgaatcctctcattttagtctaggtcagtgatcttcaaccttggctgtgtactggactcacctgaggagattaaaaaaaaaaaaaaaatttaggtgcctagccctgaccctggagaatctaatttaattggtctgctgtatggcctggacataggattaaaaaaaaaaatctccccaggtaattcttctgcaaggacaaccaaggttaagatctattggtctaggtattctcccaggtgagagtaacgactcccattaatgagttgcccatattgggaactacctggtgagtacaagaggactaccttaaccagggctgtattacaagtgtggctgagcatatagactctggagtcacatgcctgggtacgtatctcagctgtgtgattacaggaaagctctgtattatccagaataatgcctacagaagagtgagggttaaattgggtaatataacatgcttagcacagtgcttggcacatggaagaactcaacaaatgtgtttgttaatatttgtgttgtgatgtcatgagtactttattctaatatgaaaaggctgtttttcaataggcccacacaagtcaaattcagtttccttcacacactatttattttgtatctagacattgatgaaggaaaattgcaggttatcttatttttaagttgaaacaataaagcttcatgattatagtgattatatgtagcagcacttcgtgctatagtgaaagatggcaagggttacttttctaaaagtttcagtcggttggtaagaaagtagccacagggtggctctgtcctaagcccagatttcattttgtgagggctgagcatggactgtgatttctttagaacctcactctggaaggaacctgcccaatgagagttcatttatttcttttcctttttctcaagattatttacataacacctctgcagtacttataccatttaatttttgtgttaaatgtctttaaaaataaacaacataacctgccccttacgcctgtcattcagcctggcaggtccttagtgggctagacctacctttctgatgagctgcccgcccccagcgcaagatgattgtttgagaggtaaaaactcttgccaaaaacaacgttaaacttttaatggatgttaacatacttgcatttacaagcagtgaagtttgtcaccttcatgttgttatttatgcagcattaacctttttctccagatcattgagactgaaaatatgatggaccgaattgtgactggcttgtctgagtctagtgtcaaggtgcggttagctgccgtcaggtatgagctttaaatggtctgaataaaaaccttttgccatatatttaacctgtttcctttctggtccttcactgagtaaacacagactacaaatgttcctcaaaaatctgctcaggtgaattcatagagtatataacattgtctaacagagagcctggcctccaaaccccataaagtggtctgatgtagttcacttaacaatgtagatatgcttgaagtgtacattagtcattgtaaaatgccagccagtttgtttgaaaagtaaaagttttgatttcttgtgaagctaattttgattattctttgtagatgtttgcacagtttatccagatctgtgcagcagcttcgaaccagtttccaggatcatgctgtttggaaacctttaatgaaggtaagaagaaagggtcagccagtaacagctgtactcacagaccctagagtgagctgagctagctaacactactccctggtctaggagtatgtctgatttttgtgtagagcattttgaacgtttatctcctcaaatctgatattctaagcatctacaaatgcttcatgtgtgagggggaactacaggcctgattttctttctttttttttttttttttttttttttgagatgtagtctagctctgtcacccaggctggagtgcagtggcatgatcttggctcactgcaacctccacctccccggttcaagcgattcttctgcctcagcctctctagtagctaggactacaggtgcgcaccaccacgcctggctaatttttgtatttttagtagaggcggggtttcaccatattggtcaggctggtcttgaactcctgaccacgtgatctgcccgcctcggccctccaaagtgctgggattacaggcat

SEQ ID NO: 108517 - DNA, 1545 bp, Homo sapiens
ggatattttttaacataacatttttggtgttaggtcttctcttcaggccccttttgtcccccccaaaaaaggttcaggacaaatgaatctgaatcaagacttagagcatgtatcaagtggctgctaataatgttatcccctgatacactacaaaacttggtctttggtctatcattttttttcttaagtgatcatataccttgcatttagtcaacttaattttttagagttttgttttgtttttgcatacctgctatgtactaagcaaagccttcaagtacagtgagctaccaaaaacattttatcacagaactcttactcttggcttaaagctttaggtttaggaggcgggggcatcaatgtggcagaaataggcaagagaccattcaggcaggaagaatataaagtgggctttgaaagcaagaggaaaacaggaggattttctggggagcagaatagcatgaggagaaacattatgtatggtatgtgtagggaacggcaagtatacctttatgactctagtggagcagtgggatataatgagacataccagtggacaggtaaggacgaagtggaagagttagaccaatgccagtggccttgggaattgacatgctgagtggttcttccattgaggaggttcatctagtgacagagtatatgatttatgtgttgaggtcctggaataaagcagtaggagtggcttaggaaagaccatatgaaccctggagctacttcagtggaaggaatgatagattgagtgtatgattcactactcaggagctgtcagggggacaccaagagttttctattttctagtctaaacaagtgtcacaatatggtcttatgaggcctatcagaacagtatgtttctttaacaacttattttcagtgggcctgcctaagcagtatgtaacattgaacttgacccattttcatccattggcacatcttcctgagtttcactctttttcaccctattagacatatgtcatctcttctgaatactcctcattctctgagatccttttgcttcctgaacctcattaagagccccaaatctcagaatggttatttacctacactctactctccagctacagtatcagtgcctttctatgcttggaacacacttgcttatggagtgtgccagctcccaccagcaaaagtttatttcaggaccaccatcccttatccaaaactgttggggccagatttgacatttctggatttttatagttgaggaattcatgtacctatttagttgttgagcccaaatttgtatccaagtagtcttatgtttttcatttccctgctacggtacttcccttattattcactatatcacatttaatcctaaatagttctatcaaggaggtcttattttcctcagtttatagatgaagaaatacaggctcaggctagttagtggaagtgtccagttggaactaggtctgtgtgattccatttctgagaaccagtctcccacactgtcctgcctatgcagtagtagcctgcttgattcgtcagtgctcctggtcaaac

SEQ ID NO: 108518 - DNA, 1589 bp, Homo sapiens
gataatccagtcacagctggtgtaccaccgttaatcatccttaactgctcttatattgctccagatctaccttcaggatatttagggtctagttaggaaataggtagatgagctcaggcaaaggatcactaatacgatttttttatattgaaaaattaactcccaaccggggcaacatagcaagaccttgtctctactaaaaattaaacaatcaaccaggcatggcacacacacctgtagttctagctactcgagaggccgaggcaggagaattgtttgagcctgggaatttgaggttgcaatgaggtatgatcatgccactgcactccaggctgggcttcagagcgagaccctgtctgaaaaaattaaaattaaaaaaaaaatagattctgaaccaaagtgggggagggaaatgctataagagcattttttttgtgccaactgacaaaattagagtatgggctatagatttgattaaagtattattttaatttattattacctttcctgaatttggtaactgtactatggttatctaagataatatccttgtttttaggaaatatacattgaaatattaagcgtaaaaggggcatgatgtacgcatcctactttcacatggttcagaaaagatagataatgtggattaggtacatagtacgagagagatgataaattaacaatggcaaatgttaaaaactggcggatctgggaaaagaatatctgagcgttccttgtattttttgctactttataagtttgaatttatttcaaaataagtttttaaaatataatttgtacagttgagaaatgtatacccctttttctgggtatatagatctgaattgcttctgacgtttctataatcctcttgacaagtgacctttaagcattcatcggtgatggtaaatcttaatcctctaaggtttgaatattttttagaaattaccaaaaattcatgttcagtcaagtatcataaataaagttaagtagttagactaaagcatggtattttagatgtaaaatgtggcatgactgtaaaagtacaggactgttttgcttgtataattgataagtagtcctgaaaatatcctaaaagataaattctgcagcatgtttggaataagactgacagcttggaaggaggatgatttggttttctaagttcctttatatttctttcctttaccaaccatattacttcatagagttcgtaagcaatgcacaagatgtacacataaagcagaaagtgacagagtctcagcgaaagatgagagtggggagctaggtaatgggatcataagggtctgtgtgaaatgtacagataactagaatgtctcctgaatcctccaggactacaaggataaaaggaaatgacagagtggtttggttttgttttctttcttttttttttttttttttggcttttcggatttatgagaaaataattgtctttgcccttctcaaggtgatttttatggctacatcactccctgctttgcaaaagttgcctggaattgagtaagagtggggaagaaatcacaaagtgccaaggtatatgcatgtttagtttgcaaactggactttaa

SEQ ID NO: 108519 - DNA, 1542 bp, Homo sapiens
caagatagtattaggaaatctacactgtgttttccatgtctctggcttcccccattaccccagtccattttttatgcttccccctttttttttttttgagacagagtcttgctctttcccccaggctggagtgcagtggcacagtctccggtcattgcaacctccacttcccgggttcaagtgattcttctttctcagtctcccaagtagctgggattacaggcgtgtaccaccatgcccagctaattttttgtatttgtagtagagacggggttttgccgtgttggccaggctggtctcgaactcctgccctcaggtgattggcccacctcggccccccaaagtgctgggattacaggcgtgagcgtaccgtacttggcctttgcttcctttttctttaatatatttgggtttgaggacccccaatgattgtgctttcatattctgtcaggtcaactttatgtatgtatgtatgtatgtgtaatgtgtatatacatgtgtgtgtgtgtgtgtgtgtgtgtgtatgacatatttgaaggcaaactgcagcttcaaaatataataaacactgttctttggcatctagttctatatgctatagtgttttgcatgaagcagttgtgaatcatattgttttaacttttagaagccttgtattcgtcctgtggtctttgtttctttgataattatggatttcccattgttttacagcatatagataaaataatgagtactcatggaaagcaaattatgcaagccgtcactcttattctagaaggggaacataacattgaggtcaaagagcaggtacgttgttcctttctcttggggaatattttctgaatgtgagcacaaaggaagttcttaagagtctcctgaaatattcaaatctgcagaagacagagtgctgagatgggagatgctctagaaataggaagaaatatcttccaccatcccttaaactctctttaagacttcttcctgaaatagaggaaaacatgaccagcgtctacagttttgctctctgtgtcatgcactgtgcacactgtccctgtctctacaggagcagtcacctttcatcatcctggaatgaatcctttttccaggataaataagtgatttccaggataaataaatagtggtttctagccctctccgccgccatgctctcaactcaaaattcctgcgactcgctgataaaataattcctcatcctggagatagttttcatttcttttctcttaggcatcttattcctcatcccataaccctacttccattaagtttcaggagggcaagttaagggtaggtattaaagtacgaagctgtgcatttatcaggacagttgggaattatttttctttattttctgggatttatcatgggagttttaatgaatatattttattttgctctaaaaacaaaagtcacctgcaaacttaagattttaacacaggaccagagatactggcgatcttcagttttttgacataggttttggctacatggttatgttctctttcaaaattcattaagctggac

SEQ ID NO: 108520 - DNA, 1071 bp, Homo sapiens
ccagcactttgggaggccgaggtgggcggatcacgaggtcaggagatcgagaccatcctggctaacacggtgaaaccccatctctactaaaaaaatacaaaaaattagccaggcgcggtggcgggtgcctgtagtcccaactactggggaggctgaggcaggagaatggcgtgaacctgggaggtggagcttgcagtgatccaagatagcaccactgcactccgacctgggcggaagagcgagactctgtctcaaaaaaaaaaaaattcattaagctgtagacatataggtatgtctatctgaaagaaactcgcccaaggtcatcagtagagagttggacccagagagtctaacttcaggggctgtgcttctcatcttctgtattcttgagttaaagtaattcagccagccttggaagaacagtccaggaagtaagagttgtaggtcttaggagctgcaattgaatttgtgagcaaaaagttggtaggtttgataaagtgattttaagacagatattttacgtgatatctcttaaaattttttttaaaactgtgttttgatgaaaaaaatttaacacagagaaagtataatctcataagcatcactaaaattagccgaaatgaaatccattactgaaacacaacaatgaagaaagtacattgttcaaaataaaccattgtactttgagaggataggaatgaattttgtctataaagacaacttacctggatagaatttcagtaacttgaaaagcgaagcaagacagaaaggtgaggcaagatttgaatgagggcaaaatgaaagaccaacaacagtattgtttttgcaggacacaaaggaactttctcatacagattttggaagtgatctggaaataggcgagtatgggaggctaaacagtcggctcactagctagaagtttaatgcttctcaaaagcacctgataaattatttttttgactgacatacaattgacatacaataagctgcacatatttaaagtatacagtgtttcagttttgacacgtgcatccacctatgaaactgtcaccacagacaagatagtaaaac

SEQ ID NO: 108521 - DNA, 1022 bp, Homo sapiens
actgccctggaataaatagttccccagtgtttgcttagctattggactatacaatttatgtttcatgtctactgtgtctcagaggcagccttttctggtttcacacctcaggacttactccctaataatctagtgacagcagtgtgttaatctaggagaaataaaaccacacacgctttaggatattttggggcttgggccactgcaagaaaacaatctcctcaattagcttaattagcttgtcttgcaaagaaaaagtttaaaattggagaaaattatgtgagtctgaatcccagcttcacctctcattcctttgaggtattcctgactgggttccaggactgtgtcacttcctccgggaagttttccctaacccttgcagtatccaacaagtgctctttcttcatgccttctctattctctgtttacttcaatcacagtgaaatgtaattgtttgtgtgacagcttcaaagtcagggagtgtgtttttttttcctgcctcatcctgatgccctgcagagggcatacccataatagttacttagtaaatggtttgttgaattgctaagcttggcactgttggtatccctatcatagtcctttcaccattatcttaatttttgcctcctgctggtctggctttgagaatggaacagctgacaagaacagtttttcctttgagaagactgcagtcatcagtgcagtggttgtcctcaaggtgtactgtccttccagctggcacaggcttcctccagtcttcacattagaccagcctggactaagttgcttcatacattttacttcttttctcttcccctaacagggttcaaaaaagttaaaaggtcctaagtgcacatggctggtgtagctggtggacagggtctaggccttcacccagaaggtcatgagcttaggagcaagcagcaggtggaggcctaggaaagggaggcttccctgggaggggagttgcaacacctacagagcttccaccaaagagactacattgttgaaggaacattgtg

SEQ ID NO: 108522 - DNA, 1090 bp, Homo sapiens
tccccagatgattccaatatatagccaaggtagcaaatacaggagagcagtgggtctcaaggctgggttggctgcattagaatcacctggggaagtttttaaagtgcagatttctgggccccatccctagaaattctgattcactgagtctagagagagccagtatatgagtggtcactgtgggctcttcagtggggaagactccaggggattactcagcagcagcgcccaaaacaaagtgcaagaagggaaactggattccgcccacagacctagataccacgtaccacttgtgtactggggagacaaagccaccctcaaggagatgttagtctagttggaagatagaacagaatgatatgaaattggaagtgccagctgtgctgagaggcaacaaaaagtgctgggaggacagaggagggtagaagacaatagaaaggggaagataagacctgcttagagtagtaagagcctggcctggtctggccagggccatgggtatgtcctgaaagaagtggtgaagctgggagtcagtggcagagggccttgtaccaggctgaagaatctcaccttgaccctgtagtccatggagaaatcagtccaactgcagaacccaggatagactgcaggcaggatgatcaggaggcagagagacgagttagaagactgtcagagagtccaagcatgagcgggtccaactacattgggagagggtagaggacaaggggtacaggaggagtagggagtgaaggacactggtaaggctctagattgttaattgtacatcaaagagagcatttgcctgggtcatgttcccagtaacctggctttaatcgtttaggttcacaagaacgccaggataaattacgagacatgggcatcgtagatattctacacaaactgagtcagtcaccagattcaaacctttgtgacaagtgagtatgaatgtgaaaaggccttgctttgggctgtgttggattctttcgtgaaagggtttgaattgcttggtaattaatggccatactttttaaaatcttttagattcttagattttcttcataattttctatgagccactgtacgacatttg

SEQ ID NO: 108523 - DNA, 1069 bp, Homo sapiens
actcttgtcgcacaggctggagtgcaatggcaccatctcagctcactgcaacctccacccaccaggttcaggccattctcctggctcagcctccgaagtggttgggattacaggtgcccgctgccacactcggctaatttttgtatttttggtagaaacagggtttcaccgtgttggccaggctggtcttgaattcctgacctcaggtgatctgccctcctcagcctcccaaagtgctggaattacaggtgtgagccacagcacccggcctacattctatcttttcctttccacctggccaccttcttcccccatcaccgtaacaacacacatctcacattgatcagttatggtgtcatcaggtgtgatgagaagaacaagatgaaattgtagccttcttccacggttctgaggcatgtgaagcataagacagcctcatcccatgggctcttggccccttccatgcaccttctaatcacctcaacaccatttcctcggtcagttttcttatttgcttcccagaaccctaagtgttctccctagtgttgtgcctcactgcataaaacctacatggcagtaagaaaaagtaaagaatgtaagacctatcacaactatatgccagtgacaaaagaaaacatagaatgtcagcacataccagggactgtggaatgtcactgagctgcagcaggtttaagtgcaggaacagccctctgagagatccacaggaagaagaatatagccagagtagatttcaggtgtctacccactgcagatctcttccccttaaggtaggtgcccacctgggctcaccccaattccctctggagatttacttttttagacttccccagctatcatcattgaaccatagggttttttaccccaattacaattctgagatgatggctaacaggaattttgtgatttcagggcaaagatggcactgcagcagtacctggcatgatgggagtgcccctgggcacctgcgagcatcccacctccttgtttaaggaagtacaggaaccagcctcatttgattccttctatttgcacaagtcaccttggactg

SEQ ID NO: 108524 - DNA, 1780 bp, Homo sapiens
cccaaatagcattagaaagctgaaggcccaatgaaataacactttcacacttaaactctgtggataaattttgcctgtgggtataaacagatggtcaaattaaaaatgctttactataattaacttttctgatttgaatgaagggaaatgtatttattgaaacaaagctgtttgctgctttatgcaggtgcagtgttcagtcagcaaggaagtgggaagagtggacatggtattgtgtctacacccaagttcttaactaagcttctcgctctaatactgcattctgtttctccttttgtgccctgattgtaatccaaaatttatgaactagaaaagaatgtccaatttaataagttgcatttttttttctttaagcactttattcagaacaatacatgttcttctggtagtgtttggataatatgattttaacacatgctaataaaagccaagaaaaatcatggcaacttctaaaaaggagtctgttttccaaatgtctagaacattaggaaacatcagaagataatgtgtacacgcttttggaacctgtgattcttggtaaatgaagggctgggaagtggctttgcatttcagagtgggacccagtgccttaaggtaagtgtggttcccagaggcatctgcagcagtctggggacccctctctttttggcctccttctgaaggccagcagacccttcacaggtggccactcccagccacaagatatcccatccccaatatcatgtccaccccctccatcctcttctccttaggtatgccccatctccactaccaccagcttgcatctccactaccacagtatgcaagagcttgctatccctctgcaaggacacacaggtgctcttcgtctactacgcactgccaccttttcccatctctgaattgtaggcacatctcctatctcaaggcctcactggaaacaaagccaaggacacctgcgccagagtggcgggaggatgatgaggtggctagcaagagagggaataatcatggtgggaacctctgagaggacccaaggtaaggcgaagagagtaggagcagggccaagcaggcccctgtttcccataactaccacaggaaaacttggaagtgaggtctaaggagggaagggggactcccaccccagatcttgatggagggctgacagaacggttccaatttcttgccacctggggtaggaactggtgctgtccccatcctgccccttgcctgtttactgggcagagaggcacatgtttatttccagcatgagagaaggtccaggatctggctttagggaaggctgagggaaccccccaagggccactgagtggactactaagccaccttttctctatctctgcagcccctggctcctggctttggcaagcaatctgccctcaggctgagtggaggtccagagccagtccttaaaaccaccctccttgacttcatggagcccagcctgccctcctcgtcaggcactcacacccaggagccgagggatcttaaagccaaaaacagcacccatcctttacttccatatttgcttctgttgtgtgaaaccaggcctagggtctccgccagtgagttccatcctctgggagtgggctgatatttgagccactctcgggaacccccttacaccccattcccctgttccttatgccatgaaacttgtggactcttagagatgccctgcaatgctgaacccacagcatccctgagtcaccagtaatgggaggaaggggcatgtcaccattcctcccactcctgcccc

SEQ ID NO: 108525 - DNA, 1409 bp, Homo sapiens
tctctaagcctcacaaaaattgtgttagatgtagttaaccttttatagatgtggaaaccgaggctcaaggaagttaagtaggtcacctgcagtcataacctgagagaagcagagtcagaaaggaatctggccatggtctgtctcttcctgaagtgcatgctccttccgttagaccgtgctgttcccagcactgggtgaccaaaaatgtcatgatcccttctctcctggtgcttaggggacctatcccatggaggtgtggctctacataatcagtgcagtgggcaaaggcctcatgaggagcagggatggagcagcctgtgcacaaagatgtggtgaggcagcagaggtgcagaagacgctggctggcaaagagaggcagcgagtccctcgctggcaggagtcttccctgactgtcattaatcttacagtcacaaatgaacccctaaatcatttgtgcacttttttttttaattttgaaaaagaaaagtgtaaagggtagtataacaaataccatgtacctattacccaagatgaacagatgtgaccattttgtctgcacttgatccttttcacagtagggctggacttaaaaccagaccactcatcctttgccctggccagtttggcccatcctcagcctgcaatgggcttttgggagccttgctcctgagttttcatgtattggctctctcttggggcttcatgtcctcagttaatgccagtgggcctccctagaagttgttgactaaagaggcttttgctgcttctgaccacattgtggagaagccactctggggagagtgtgtgtttttggctatgatctttttcagagaagttcatctaccctcacaaacacctgccttgaccattgtgggtttagccaagctgtagagcatggtttagtcatagctgcctaaactgaactgtaatattaatgataggtttgtatgtttggaagacagagaaaacatattctctttttataattatatgacaatgataacaaaatgctttttgttgttgttagcagtgaagtctcactctgttgcttaggttggagtgtggtggagcaatcatagcttatcacagcctcgaactcctgggctcaagccatcctcctgcctcagcctcctcagtagctgagactataggcatgtgccaccatgcccatctaatttaaaaaaattttttttgtagagatggggtctccctttgttgttcaggctcatcttgaactcctggtgtcaagcgatcctcccacctcgacctcccaaagtgctgggattataggcatgagcccccacacctggacacaaaatacattatatactctaaagtataggattactttaagagaaggaaactaaaagtatgatggcttactttgtaatccataacttcacagtttt

SEQ ID NO: 108526 - DNA, 1044 bp, Homo sapiens
caatagttttacacagagaggtttttcattaggccaaggttatacagctagcagaggggctttgattcatgactttttataaaagtgctgtatgtagaaagcagaggggtgggaagcttccctcgaccccccagccaatactgacctttggacaggccttgcctcgcaggaatggagcagcaagctggttactgaggagaaaaaatgcagcagtcatttagggcttggggagggagatgtgaaaagtagccttctgctgagtgggcttaaaaccctgggattggaagggtccctgagaagccgtcacacccacctccagcctggttcaccactccaaagctaggtggccagtccttcttcctccgcatctgcttcacagacctttgcagaggaaaatctcacactcattgccatgcctgcctcgttttcaggaagtttcccttttatttggcttcagtccgtctctctgcagtctggttactctttaaaaatgaaggttgaattgcctctccccacctcaaggaagaacctagaccctatgtctttcttatttttggtcaagcataaacattttcacattcttcattaatggtgtctaacatcttaaatataaataatgaaaacacagcaaagcagcagccttttttgaatgtgcctttttggcctccacctctctgggctctgacatactcctggggtgggctgtgtgcctgtccctgaagaatgccaggctggcccatgtcctgcaggccaagtaacccctgctgctgctctcttcagtgagatcatttcctttgatctcacacctccttgcaccaaagccaggccaagccaaggcagtgcgaagagttgtctgccttagaacggccgtgccactcagatgtgtgtgtgctcaagaaggatgggtacagagtgttgatttatttgggttacacaatgtgtaaaactttttcattggtggccagtatttaaaataataaaatagccagaaatctgagtttttgcatagactcagattgctggctattctttaaaaatttagac

SEQ ID NO: 108527 - DNA, 1042 bp, Homo sapiens
tggcattccaggagactctgtgcttgggttagttggggagtgataatgctggagtggtgggtgggacaatgctagtggtggttgctcaggccgggggcagacatgggccacagtggtggacagccttgctaggccttggcctgggatgtgggtaaagggctgtttgcactgccaagggagaaaaaggaagagaatttggggcagagaggtgggcaaaggggcccacccttgggcaggtgagggaggtgctggctgaatccagtttgtgcagggttgagcctgagcagcggagcagaacagtgaggaggtgcggggctctgtgagcagagggcaaagcggagtcagagcagggctgggaggacagcagcctgccaggctctggggaggccaagggcgctcagtctggggaaccccagagtgtgcagaggctggccttccctggttgagtgaccaccagcatgacgttcccaattgcacgcagattcctatggaaggctgcaggagtcctcctctttcactgcgggtgagactgccccagtgctaggaaaatattaatagacccccagggactgagaacaaggattgaaaaataaaaccacttcctactctctttcctcagctgccactccaagaagttgtgagcttgatgcagctctgccttcacagagcccacgccctgcccctcatccctggactgagttctttcccaccctcccggttgttggttgctgggcagggggcactgtgaggggctggggtaggaccccagaggccaggtggccaagtagcaggcattcctgtgagccagggatgccagcagggaatattgctctgaaggttctgtggcctcttagacactgaggcccttaccaactcctcggttctgagagccgcttagacccaccaggctcagtggacaagcttgggggtgagtggggcagtgttttcattttgcaacttgccaggcctgggtgctgaatcccagcttctcttttcactagcctgtgcccttggtagaatgcctctctccccttggtaaaat

SEQ ID NO: 108528 - DNA, 1086 bp, Homo sapiens
gtacaatccctggtctgtgctgaacagatgccagtggtacccactccattttgacaacaaaaaaaaatatctctagacattgcaaatatccctggggagcaaaattcccctgactgagaaccactgccttagctggcctcagcagcatcaaaacaaaacttcgacctgctcctaccccctcctccccaaataaaatgattcccgcatgactttgtgtataatacagggcaagaagcagagagaaaggagccacaatcatagaattctgaaacttggaaggggcctcagagtcccagagctcaggtgtgctaagctatcatggccccctttctaagcttagacacagcttcaaatccttctcagcatagcagcccagttaataagaggggatgtgaaagatgaacctccatgccagccctgctcagaccactgccctcgtgttaacctgtacaagtagagtttagtggccaaaaagcttatttgacatggcttttggctatacttgctaaacaagaccagtggtactgtgtcctcaacaccaggcctggcacataattggtgttgaataaatgatggttgaataaatcactttaacagtggactgtctctggctagtgagaccaggggtaatgcttttattttcttttgcatttcttcattttcaaacctctttataattgagagtattactttataaaggaggaaaacatatgaatattttcccctaagttaaaaaagccctctgtctcattccacatgtcttgctgccgcaggtctgacctacgagaaacatggcaaccagcgccgtccccagtgacaacctccccacatacaagctggtggtggtgggggatgggggtgtgggcaaaagtgccctcaccatccagtttttccagaagatctttgtgcctgactatgaccccaccattgaagactcctacctgaaacatacggagattgacaatcaatgggccatcttggacggtgagacctgggtggcagccctgcattgggtgggatagtagatggggaggatcagggaaatttgacaggtttcagtggggcaagatggtttccttaatgttg

SEQ ID NO: 108529 - DNA, 1052 bp, Homo sapiens
ccaccagagtcaggcccgatttagggcattgcccacccaggccttcctcgggaatagacaccagattcccagattagatgcttctccactccattagatctgctattaagaaaaggaagacttggccgggtgcggtggctcacgcctgtaatcccaccactttgtgaggccgaggtgggtggatcacgaggtcaggagtttgagaccagcctgaccaacatagtgaaaccccgcttctactaaaaatacaaaaaaaattagccaggcctggtggcgcctgtcatctcagctactcgggagcctgaggcaggagaattgcctgaacccaggaggcggaggttgcagtgagtaactctgaacctttctggggctgaacttttctggagtggtctgcacccctcagatggccaggacttccctgggcatctggatcccaggggtcctgctcccctgaggccatgccatcttcggggaggtgctaagcctggaggtgccctcagttgccctgtaccccactgaactccaggggatctcaactctgcagtttctcttcttccaaactcagaaagaataaaaacgtggcagcacgatgatgaggagaaggaagagaatgataattttgatgacggggtattgaatgggcagaaactgtgtggaaggcccgtgctaagcacattgcatttgctgtctttgaatccttacaaatgctatcgtggtagttgctgttgttatttctgttttatagttgaagaaaatacagcaaaagtttcacacaaccagcaacagtttgagctacctgttgactcctacccactgtcagtctggttgtgtaggaaaatcctcccccacagcacagtggatccttgtgcctctgggaaggggagctgaagtcccaggaagaagtgggtgtggctgaactatcatacctcttctgcccttcttactcctcacccagggtccttcagagaaccaggtgctccggttgtgatctcagtctcacgtcagagatttgcaagctgcttaaggaagccttctctgtgacttccacactg

SEQ ID NO: 108530 - DNA, 1045 bp, Homo sapiens
ccagttctggggatcacgggccttgtgaaaacttatcccaagaccccctcactccattccccacagctgcagggtgtagcctccagcatgagcgacccccaaagctgatggccggcacttctcccctgatgttttccttaagccagggtgttgaggaggttggggccactggcaaagggactcttccctgtcaccagggagccagttggtgcccactacaggactttagcccccttccccttggggagtcccaggtgtcctggctgtctgcaccctgccagcattttggagaagttcaagaaatcagccctttttctaggaacagtgcacggtgaatgcatcagcccttttgcccagcacccaaccccactccatagacacccattacccagaaaggggagcgcaaattaaaatagtaaacacccctcatcactatgtgtgttcaactaagtgacattatttttttgaatctattcttaagcttccttaccttattcttctgtaaaatgggcataatcattcctgcctcccatgacgggtttgtgaattagagatacataaaacattctaggcatggggctgggcacagtggctcacgcctgtaatccttgcactttgggaggccaaggcgggcggatcacttgaggccaggagttcgagaccagcctggctaatatggcaaaaccccatctttactaaaaatacaaaaattagccaggagtggggatgcgcacctgtaattccagctacttgggaggctgaggcatgagaatcacttgaacccagcaggcagaggttgcagtgagctgagattgcactactgtagtccagcctgggtgacggagtgagactctgtctcaaaaacataaaaagaaagaaaagaaaagaaaaaagaaaactttaggtatggcccttagaggcatattatctctagaaattgttttctctattgcttgatattccgtgacccttatttcaccctgtaggggtgtcataaaagtttttgtttttgtttttttgagacagagtttcactctcgttgccc

SEQ ID NO: 108531 - DNA, 1066 bp, Homo sapiens
gatcaaacaagagctgggatgaggtgggggccagctccgacggggccagggtcacctgggcccagaatcctggtcatggcccagcctctcctcagccttttctaccacgtccactctggaggggcccagaaagagggacagaagtcatcccaaggtggagcaacagacctcagaaagaaaaatggatagaatcagaatgtatttttgataaatgaaacagtctttcatcttcaagtatataaaaagatcactttattctatttttagggagctattaaatatctctgtgcctagagaacaagagggaattggaaaagccattagtaacactttccaacctgaaagagtgaaaagccctaaatgatgcttgaggctattgggggctggggcttctgtggggggttttgaaagcacctgggttcctcagaacctctgggcatttttaagggtgtaacagggctttgaggatctctgtgccactttgatcaagttgagctttgccttccagattccgtacatagaaaccagtgccaaggacccacctctcaatgtcgacaaagccttccatgacctcgttagagtaattaggtgagcactgccctctccctagaagcgggcctccacagcatgggttggctcctggaggcagctgggagcttgaggaagcagctcctgttctgaggccatgaggctgtggaattctgggcctatttttggatttcttgtccctccttccatttctttcttttgctttttccacctacctctgccctccccgcagctgctaacgggtttgtgggtgatgtctgctgcacatgttaagtggaaatgccttcctgtctgatgcagtggctcaggctccctggaaggcagctccctccagcctggcttcagtgttctcctcacaccaaagctttccacactgtacaaactaggtctctctcctcttccctgccctgatatcagagcaccctttgatatttcccctgaacaaccaatattctgattccaaggttcaaatttcagaggcattgcacatgtatctcctttcccaaccccaccagct

SEQ ID NO: 108532 - DNA, 1042 bp, Homo sapiens
ttcctccagttcctgtgcctatgcccagctccaccctgtgctgtggggccagtgacttgacttctgtaagctccagtttcctcacgtgtaaagggaaaggacccacttccagagtttgctatggggcatgaacaacaggcctggcctcagggccactctgtgtggctgtgtgagtaggggcaggaagggagagaaaggagggggcacattctagggagggaagtctctgggctgcaggatagatttacatgtctgtgcctcgtcttggaagtatggtggtcatgctcgttgctgacaaagcccagtgccggggggagagctggcagctgtcccctgctacaagaagcctctgacctagcccttttggcatttcttccagtgtcccagggtcaacggtgtcaaggcacacactaatacgtgcaaccgaagacgtgtgactgtggacctgcagatctggtgagctctatcgggctgggtatgggcttcggggtgcaggggacacagtgggaacagccagtttgaagatggagtagtatatatatactctgacttgggatgtggaacccctcacaggaccctcccctcctcccagcttctcccatcccctggcatactctgggttccaaggcccaggcagcagagctttcttggaaggctagacctgggtcacttggagagtcagaccagctgcctcagagaggatgtgtctagtgggagcaagtgtgataagaagatgtgaagtccattggtgaggcccagggagttccaagcacaggctgtgagaggtcagctggagacctgggctctgcggcacctcaggaaaatagagaatgcaaagacacataagtgactagttcagggggttgggcaaggatatctctttgaaatgaggttcataatgggtgtgagtcaggaaggagggagattcagtccaggaagccttcctggaagtggcaagatttgaattgcactttaaaagacaaaggaccaactcctgaggatccagagtgttgccattcctttcccatgtctcattctgccc

SEQ ID NO: 108533 - DNA, 1064 bp, Homo sapiens
ggtgagcatcggcctacagcatttccggagtaggaccatctacaggaacctgaaccccacctggaacgaagtgtttgaggtaagggtctccttggctgcttctagccttcactctgagtcatgctgggcagaggcaatccaggggcaacactaggcagggagtgggccttggagacaggcaggtctgtggaattcctgctcctgtatctaccaggcttccagactgggttactctggcccgactaaagggccagcctgaaggcaaattcctacctcctttccccttccaactttgttagaagttaacaaatcaaagagaaagagccttagaggcatttctgctccactcttctcagcttcccctgtcagagccaaacatcaggagcctgaagttattccttaagttcaaccacaatccctactatttgaagggtgggacccacagcctgttaagccccccagattacacgctccaggagccacatcttaggtgacccctctcaacttctcctctcaatataccatctggatgctctgttacgtttggggtgaggcagtgaaagcaggggtgctaaaaggcagcttggggcttcctgatattgtagactcacggaggggccaggagaatgtaacgaacaggtgctcaggacaccgcatggcccatgcagaacaaacagccactgtcccctgggcacctgctctgccatggcttgcacatgttttctctaatcttctcttccccccgaaggggaggggcttcactcccttcttatgggtggggttcttgaggcactgagggggtcaggaacctgctagcgttctgagccatgatttggctccctttgggtcatatgtcaggtcgactgttgcctgcaggtcaagacacctctttttccttccagttcatggtgtacgaagtccctggacaggacctggaggtagacctgtatgatgaggataccgacagggatgacttcctgggcaggtgaggaggagggcgcacagctgggcctggaggcagccttccctccctgcggggtgctgggctagataccctgctccta

SEQ ID NO: 108534 - DNA, 1506 bp, Homo sapiens
ccagcagcttgcttcagcccagctattcctatgctgtggtccccctctgtgctaggctccatcctcagggcaagagctgggtgaggcacagatggctccagggtattctccagggccccagctggaagaagtttccctgggaaatacccacagattaaggaccccagcaggggacagtcacattataggggagggcaggctgggcctgggttttttttaatcccacagtgtagcacttctgtcttcctataaccacatctcccagtccctctgagcccagagcataccctgtctgggctggtccaccttttcccatactaggacaggtttccctgtccctactaggatgccaggtctcaggactgggctgcccagagagcatcagtagcatctccctggcccttttccctgagctttctgcccctaccccacagtggtttgtcctgaatgacacaaccagcgggcggctgcacctgcggctggagtggctttcattgcttactgaccaagaagttctgactgaggtgagtgtggggtgtcaagggctcccttgcagaaaggtggaggagcacacgtgccaggtgtgtgcaggtggaggaagggtgggagatgatgcccccttcttgctcacctcctgaagaacatgtcactcagcccgtctccacacagggcagctcctgatagctctcagcaaatgtcctctgagcatctccatcatctttagatgatggggtccttagaactctgtgtcaatgcctgtcctcccagttcatagggaaatccactcagtgtctaacttgaatctgtcatgcaccagttatagtcttaacctcaacaaaatgctaggttgtgagaggtcctccggcagctagtctggagtgtgaaggctagctggctttcttctgccatgagtaggcttctccaaaatcagtctttgtgtcctgctgctgggagtacccagtgagggtctgtgtctgtttgcaggaccatggtggcctttccactgccattctcgtggtcttcttggagagtgcctgcaacttgccggtgagtggcgacatgtccagagtgtcacacaaacgcaacaaagtgcccatcactttcaaattgtcctgtgttgctttaaccccgttattcctgtgctgcagagaaacccttttgactacctgaatggtgaatatcgagccaaaaaactctccaggtttgccagagtgagtgagtatgtggctaaaaactccagggagggcaaatcacagcttctctccccagagtaaccacaaccccatgtcttctgggccacagtctgtgcacacacagcctggggataacaagaggtgctgattgtggagtctactgtgtgccaggcactaggcttggcaactcatcccccacatttgttatccctgagtctcatgatgactgtgtcattcatttttattaccattttctgggtcacacagctaagaggaggagccagattccacactgttttcatagccccaggga

SEQ ID NO: 108535 - DNA, 1038 bp, Homo sapiens
ctcaaccagagtacaggctgtggcaaacacatgttcttgtcatcagtctttgctggtaggccgaataatttttatcctaaactacttttttaactaaagagatcccaccttcatgggtcttcccttcagctcctagcctcacagcctcttctaactccctgaattccaaggttgatatacaaccctaggaaagcttaacttatttttcagattttttctttttttaacagaattatccttattttcttgtgaatttggctatgcatttcaaaggatgtttgcttcattttatttggcatttctaacaagtttttcagaatatttggaacaccatatgtattactggaaatggaagttccctaggaagggtctttataattcacaactgaggggaaagggggaacgggaaacaatggctgaggttgtggaagtggtgactcagctcataagccaccctcttatctgcttgcagttcctgcaagtggaggaacgagagctggggagcccatacacaggacctgaagccctaaagaaaggccctctgctcatcaagaaagtggctaccaaccagggtcccaaagcccaacctcaggaagaaggccctacagatttgccatgtcccccagaccctgcttctgatactaaggacgtatccaggagtaccacaaccaccaccagtgctaccaccgttgccactgagcccacatcccaagagacaggcccagagcctaaaggcaaggacagtgccaaaaggttctgtgagcccatcggggagaagaagagtccagccaccatcttcctgactgtcccaggtccccactctccagggcccatcaagtcacccagacccatgaaatgccctgcctccccattcgcatggccgcccaagaggctggctcccagcatgtcctcgctcaactccttggcctcttcttgctttgacctggcagatatcagcctcaacattgagtatgcacctctctgcttaatcttttctaaaatcgcctgtatgaaaaatacctcgctggatggaaaagt

SEQ ID NO: 108536 - DNA, 1068 bp, Homo sapiens
ttatcactcacctttatattaaaatgtatatatatgtatatattttttcctttggatcacttacatccaatatatgtatattttgtcatttaaatcagaacaaccacttgaaattatatacatacaattcttgtgtggaatttaactccatgactgaatagcataaggaagaggttatttaaaagcaagaactactttttttggttggatttttttgttcaagtccagaaagaaatgttatatttgtgcctactaaattatccaaacctcagtgtttatatacttaaacaagtgccactttttagtaggtaattatataccatctgatttaggacttacctgaatgtatgtaccagaaagtgtcctgcctctggcataggggctgggggaggtctgtttctggagccactaccagcattcctgggcagtgactggccaaagggaagtcacttttttatggaaatagaaagtgacccaactcaaaactgccaagagctaacactgccaaagcccttctggctgccacctgtggtacttgtatgcctggatatttgttcttttatttgacctggagctaaaaatgtatttccctactggcaaaaatgttatactgatatacttaaataccttgagttaaatactcttgtgtagtctaagggccaaactccagcgtgtagcattatttccataggaaaatgcaaaccaagttccaagcccaggtctatgtctgactctcatagcaaagcactggagactgctgaagagtgtcaccatcagagaaaaggaagctttcagataagtttaggctattcaacttttctaaagagatggttggttcacctaaataacatgttaaaagcaaagtattaaattatatgcttaaacaagcgcctcttttacatttcagactttacaagaccaaatatacttctcatcccctccaacattcctggacctcctcttctctcttaccaacaccaacactacctgccgtcagttttctgtctctgcctctgccttcactgccacttttctgaagcagggcaacattcgagaacaaagttttgt

SEQ ID NO: 108537 - DNA, 1081 bp, Homo sapiens
ccactgctgaaaaccaattcttgtcctcagtggcagccaaggtattaacaacttttcaggctccctgcccctcacacagcgcctatataaccttgcctcctgtctgctgtgtactaaaattctggttcccttcaacattttaactcctcttcagaccatcaccaggtatttacctgtgttgcctgacacaggtaaaaacggttcaattgaccacgtttaaaataaatgtttgtggtttaagtttggaagaagaggggtaggttttcacttatctgccattttgattagctgttttagggttgctaatgtttcgatgtacatatgatacattcccttatttctctggtgcttctccattttcaaggcacttgtctatttagggggcaattagaatgccatcataaggtagacagggtaggcatcaatgctccattttattatgagaatttgccatttaaaatagaaacctcagcagaaacgaatttcaccatgcatcttctatgtacttaacacggtcttggatggtgagggtgaaaaacaattcaagtagcttgaattgttccctactgttcaactggagaataaacaaaattaaataccaaatacaatataagtagctgcttagcatgtaaccttagcagatgcctaatcaacatttcttaaaacttagtgttataaaggctgggaactattaaaatggaaaatactcagtatcaacagtaaatgctacaggcggtaggaagagtccatttcactatggattgactgacttacttaatagaggaaataggtttgagacatgacttgagtcagcagagcatagtatttggactactctggaatagaacatctgcatgtgaatcagatggcaggaaactggaataagagtaacatgacaaaactttgttctcgaatgttgccctgcttcagaaaagtggcagtgaaggcagaggcagagacagaaaactgacggcaggtagtgttggtgttggtaagagagaagaggaggtccaggaatgttggaggggatgagaagtatatttggtcttgtaaagtctgaaatgtaaaagaggcgcttgtt

SEQ ID NO: 108538 - DNA, 1683 bp, Homo sapiens
tgcagggtggcatactgagtaacagacatggagagtacctttagtgagtaaaaaaacaatccattctttttctcatgtaaatggtgtgattgactgaggaaattcccatatcggccaaggtcctttgctgtgaggttcatttgtaaggcaggtttctcacttaatgagaaaacaggtgtaatttcagaatgggcagggggcggagtcagggaataccttgatcttgtaccttaccacaatgtaagggaattgtaaacaaattctctgttgtaggtttgcttatattgtttctgttcccatatcttgatgctttgttagtgggttcagacaagtattctgactgaagtcgggagcttaaaagaactaaatgaatagtaggagagcatgggctatgtgtgtaggctaagtgaagagcaaccaagatccagctacacaatggagagagttggaatccaagaaagcatgctttatgtaagggaacgcgtttattaatgatggcttaacagaataagctagaaaaaagtgtgggtatctagagaacctgccattgtggcttaccttaagtagggctgggatctggataatgagaaaaaggattttgctcctttggtggccaggagcttcagagagtgaattctaacttaggctggttggaataagatagtcttaggaagaaaaatcaaattcagaaagagcctgtcaaaaaagagcctggattggtttatctggtaagctggaccaggctaagctctataatatattgtacttgaggtttgtacactcgatgaggctatctttttgattaggcagataattgttttttttgagacatagtcttgctctctgtcacccaggccagagtgcagtgacgcaatctcagctcactgcaacctctgcctctggggttcaagcaattctcctgcctcaacttcccaagtagctgggattacaggtgcccactaccacacccagctaatttttgtatttttagtagaggtgggttttcaccgtgttggccaggctggtcttaaactcctgacctcagatgatcttcccgtctcggcctcccaaagtgctgggattataggcatgagccactgcacccagctggcagatacctttcatcttagagtgatccactactaagaaatcttcccaagaaaattaaagaggacaagactgttctatgagaagaaattcctaagtcctcacgtggagacctagggaggagacgcctctacctgggatttcatcatgtagatgcacccgtgtagtgatacagatctaatgagacactaacatatcacacatgtgggcagttggatctgttaataaggacatgctgctaatgaagttaatactagaatcagagggtacttgtgggtatgtggtaacttatataaacagagcccctgtgaagcatctgtatccgaatcagtgataatctatcatcactatcggagaaaaacttcatgtgcacaaaagcaccagtattattgcctttatgtttggggtttgcctttgcatataggttcttgtttcatgtgagtttaccactagaaaaagttactctcttttattattactgtttttgtattacagaaattgatgacttggatgccattgtacctgcagtaaagaaattaaaagtactttcatactgaaaacaaatcaaatcatttt

SEQ ID NO: 108539 - DNA, 1050 bp, Homo sapiens
tgaattgtatacttagggtaaattttatggtatatgaattacatctcaataaagctgttatataacatattcaaaaccaaaattcaagggcaagtttattctttgtgtatcaacaattcaaaataatgaaatattatggaacaataataaataacataaaattacttagagcactcagattcagaataatcaatatataatgttttctgtaaagcctgtgtttacctggagaaacctaattttaactgacttgttctaaattggtagtagtatttttatttaaaaaaaatgatggttacatatatatttttttaacctgtgtaattatgttttattaattttataaaacatataatatataaaacttataattttactaattatgttctattatgttactatagaaattatttaaatcaataataccatatagtttcttttgttataaaggatttgtataagtccttgaaaacactatctgcagaactggtaccttggcttaatttgaagaagcaggatgaaaatgaaggtatcaaagttgaagatttgttgtttatagtagatactatgctggaagaagttgaaaataaggaaaaggtaatacctacatgaacggtcaccttctaatgtttcttatctcaaaaactgataaattgtggatattgatatttgttctactagagttctatttgtcttttaaaagtttttatttgggattattttaagataatgaactctttcttttttacctcttttttggacaggacagcaatatgccacactttcaaactttgcaagctattgtttctcacttccaaaagttatttgatgtgccttctttaaatggagtctatccccgaatgaatgaagtttatactaggcttggagaaatgaacaatgctgtgagaaacctccaagaactcttagaattaggtgatgacctaatttgtcattttgggcccccatttaagaatttttaataaattaacaaaaagtagattaaaaaatgtttaagtgaaaaattgaggataactgaagcataaaatgttt

SEQ ID NO: 108540 - DNA, 1055 bp, Homo sapiens
gtgggcctcatccaatgattcaaagccctgagtagaacaaaaggctgaataagagggagctcctcctccctgactgctttcaagatgggacactggtttttttcttgccttcagactcaaactgaaacattagcacttgcaggggtctcagtctgcctgcatttggactgcaaatacccattaccttttctgggtcttcgcttactcactgcagatcttgggacttgtcagtcttcataattgcatgagccaattccttatgataattttctttgtatatttaatgaaatatgtgtatataatatatatagacataaagcactcctttaaaatatataactttgtaggcataggataaatattttgactatatacactatgtttttttaaaggtgctgtgtagcatcaattcaattatccacaatccaagagctccagtaataatttataaacagaccaaagggggagtccaaaattttaataaagatcttgttcaagattgtggatttgagcatcttgttcctgtaatagaaatgtgggcagatcaactgacatccttaaaggtaaggggttgactatgattatatgctttgaacatctattggactctatgtgctttattaataggacttaattcagggctaaaaattaaatagggtttaatttttttgtttgtgtgttaactctaaagctaaaaaagcttattatctaaaaccgaaatcttcctacttacatatctattttaggtactgtctatttgatgttgtcattactgtaagctttacctcctctaagattctaccaaacaagaaattttggggttagtttccttattgaaaatctatagtggatccactttgtacttctaggcccttccctgttctaccttcatctgcctccttttcatatctccatgctgcgattttcctggcccttatccctcttcagatataatgtcttatccttcattttattataattggggatattttctctctcttcacactttattttctgtctctcagaactgagcttatctccatttctgcttattc

SEQ ID NO: 108541 - DNA, 1428 bp, Homo sapiens
aaccagcctggccaacttggtgaaaccctgtctttaccaaaaaaaatacaaaaatcagcccggtgtggtggtacgcatcggtagtcccagctattcaagaggccaaggtgagagaatagcttgaacctgggaggtggaggttgcagtaagctgaacttgtgccactgcactccagcctaggtgacagtgtgagaccctttctcaaaaaaaacaaaaaacaacaagaaaaaacttataccttaatggagagaaggacctgatacctagcataagccatttatataaaatgtgaaaaccttgaacacaataatatgtaaatttatgattatataaatatgtagtaaaaatttaaaaacatacatgggaataatgaacaatgaattgaggatagtggttctctatggtatgggaaggagaagaatgacattaatgagggaattttaagtatatgtataaagtttgagttaagatttgaatcaaatctgttaatattcaaatttgataaagctaggtggtggatacaccaggatttgttataatgttctctgtttttgtctgtatacttgaaatatttcactataaaaacaagtaacagattagcagcaaaaaacgactaaaaggctttgaataagggattacagagaagaagaaatctaaatggccagtaaactccaaattagcagtcatgaaatattttcagaagcttaataagtatatttgtgacaagtaacaaagttttgtatgtcgttaatatttaagtacctttatgcttttattcagtaaattgaattaatttatcattatttattttccacaggcctacgcagcatgaattaagactttataaacagcaggtgaagaagctggaaaaagcccttaagaaaaacgtcaagtaattatatttttaccaaaattgcctcttttattaggattttttattttatttatttatttttatttttatttttattttattatactttaagggtacatctgcacaacgtgcaggttagttacatatgtatacatgtgccatgttggtgtgctacacccagtaactcgtcatttaacattaggtatatctcctaatgctatccctccccactccccccaccccataacaggccccagtgtatggtgttccccttcctgtgtccatgtgttctcattgttcaactcccacctatgagtgagaacatgcggtgtttggttttttgtccttgcgatagtttgctgagaatgatggtttccagcttcatccatgtccctacaaaggacatgaactcatcattttttatggctgcatagtattccatggtgtatatgtgccacattttcttaatccagtctatcattgttggacatttgggttggttctaagtctttgctattgtgaatagtgccacaataaacatacgtgtgcatgtg

SEQ ID NO: 108542 - DNA, 1401 bp, Homo sapiens
tatttgctagcactttgcatttcacagagtccttcagtatctttcatttgctttttacaccagtcctgtaaagtagatgtgacagatactattttacagatgagaaaataaattctgagagattgacttattcaaataatacaactagttagtggtgttatcaaggcttgaaccaagactattaaatctgttgctttttccacttatgatctacattttcttcatataggttttttggtgacctaaatgtactagaaggaaaaaatagtatgtggagaatgcattttttaaaagaacatggatgttccacctatgtttcgtttgtttattcagcagtgctttttcacctcctcttatattccatactttttctaggcagtgagatacagtggtgaataagacaaagttctggtcctcatggatcatatattctaagtaaaaagagagtaaatggatactgtatgtactataatattagatagtagtagtgttctaataccattctctatgagaacaagtaggaaatgtggattaattttaattcatgtttagattattaaaccctcattacattggtttaattagtttttttctttgaagatagatttttcataagtatactgcatacatattttcataggcaatataaagaagatgaaagtcagtcagaagaagaaaacgactacagaaatctggatgcctcaccaacttataaaggccttttaatggtatggggactgcataactaataaatactttttaataaactaagtaatctaagaaagttaattatttttctatgaaatgtgttgcagtcattacagaatcaactcaaggaatcaaaatctaagattgatgcactttcaagtgaaaagctgaacctccaaaaagatttggaaaccaggtgagagaaacttaattttttttttttttttcctgagacagggtctcactctgtcactcaggccaagtgcagtggtgtgatcacgtctcaccgcagccttgacctccagggctcaagcaatctttccacttcagcctcttaagtagctggggctataggtgcaagccaccacacccagctaattttaaaaattatttatttttaactgagacagagtcttactctgtcacccaggctggagtgcagtggcgcgatctcagctcactgcaacctctgtctcccaggttcaagcgattcttctgcctcagcctcccgagtagctgggattacaggtgcacaccacgacggctggctattttgtgtatttttagtaggatgaggttttgccatgtttgtcaggctggtctcagacttctgacctcaagtgatcctttctccttggcctccccaaagtgctgggattacaggtatgagccaccatcctcagcctctaattt

SEQ ID NO: 108543 - DNA, 1009 bp, Homo sapiens
ttatattttttcaggtttatgatatattaatgttcctggagcttatactcatttaaaaacagcctcaatactgaagttcttgaatgaaacagctcagtagaaactatgaagatgcctttgtgtacaatactgttaggatagcatgtcctagatgtacatatcataatcatgtttttaaaaaatatcttataggtgaagtgccagcattataagaaaaaacgaacggagcaagaagaaactattgcttctttgcaaatggaagtctgtagattaaaaaaggaggaagaagatcgcattgtcactcaaaacagagtgtttgcctatctgtgcaaaagagttcctcataccgtcttggatagacagtaattttgctacataaattgatatgtagctagattcattgttgtgtttgtttgtttgttttacctgatattatcttgggggtggttataactcttataaactagaaaagcctctctctcctcctcttctgcattgtttttccctgctcatcctgttcttttttttttttttttttgttctagaggtcctttgaagaatggaattgaacatttactaaaaataacactaaacttttaaataaattcataattaatcagacatttctcaaaataactgatccttttagtgaagaatactattgagagatcgctgtatgggttttggggttgcttagttttattatgttattgattttaggagtttttagtggaaagaaccagggactatatattttggagggaaaaaaaaatcatcattgatttttttttttaacctagctgaagttaagatagtatttttatttaaattctgattttacatttgtaactgttgtctttcctactgaaaatcattcttaagaacaatattataattatttgctatatcctataatacataaaaatagtttcaaaataataaaactagaattactaacaataagcctactgaatgagatttaaatttctgggcagctttctttgatatt

SEQ ID NO: 108544 - DNA, 1012 bp, Homo sapiens
aaaaaatatttttgtaggtaaaattttaataggtaaatcttttggtaatagcttagcatagatgtttaatggtaccctatatttcttctattagtttctgttgcaggatgagcatctcaaatctgaaaatctgaaaggctccaaaaattgaaactttttgagcaccaacatgatgcttaaaggaaatgcttattggagcattttggattttggattttcagatttgagatgcttaactagtaagtatgatgcaaatattccaaaatctgaaaaaatctgaaatatgaatcacttctggttccaagcattttggataaagagaatgcaaagaaactttagaaaggcaatacattcttatatggatatgcttggtaattcgatttatttttaatactaagggaagaaattgtatgtctattaacttagaaatgaacttcagctagagcaaagccgagcagccaatcaagaacaacgagctaatgacttggaacaaattatggaaagtgtgaaatccaaaattggtgaattggaggatgaatcactaagtagggcttgccaccaacagaataaaataaaagatcttcaaaaggagcagaaaactttacaggtactgagttatgaattcttagatgatggttagttagtactaaaacagctcattatggtcccaggtgacttccatgttgtttgattcagtggtttttaccttttttggcttatcactgctaccttgaaattctcttcacttggtttctagaatgtcctttatttccctctgacctcactgatcattctctaatttcttttgctgtttttttttctcatctccctaacctcttagtgttggaattccccagtgctcagtccttagatcttttctctttcttacatactctgatgcccttggtgatgtcaatctaacataggatccaaaatttatatccgtagcccagtcctctccccgaattccagactcatatccagctgcctacttgatatctctactggatat

SEQ ID NO: 108545 - DNA, 1064 bp, Homo sapiens
attttagataagcaattattttctttcagcacattgaagatattagtgtctaggtatgactgactttttttttcttttttcttttttttttttactgtatcccagttgcaatatgttgggtttctagaatgtgtggatttatgtctttcattgattctcaaatttttcttagccattagctcttcaaatgctccttctactccattctttcctctgttcttgggtaccagttatgcattctgtggtggggggttagacaggacagagtgtatgtgtgtgtgtggtatatgtgtaaaatcccagaatgctttatttccagaggagaacattataagatagggtttattcaaatgagtcttacaatcagctatctaagaagtcacaaagttttgacgcaggaatgacctgaattgccctgcaagagtagtggattcttttaaatatacttttctttaactccttttgcactttttgtcttttttcatttaggcaactcaaattttttaattgccaatttctgtttcttttgattctacaaaagtaactatgtttccggtagcccctaaaccccaggattccagtcaaccatcagacagactcatgactgaaaaacaggtaaacttaaaatattttaagacactgcttctcaaaatatgtgccaaagaatgctacatctacaaacaggaaaatttgactttaaaaggattctttctcaaataattttaggaaatgctgggttaaagactatgaaatggtttaattactctaagacttcacaatattagtctccaaagggaggatttagtatacagcatttcatacatacttaacactagtttgatgaacatttcattagactagtgttctgtagcatgtactttggaaaatgccattcccaactattttcagaatttacaattactttatcttaaaatgtaagaggtatcaggaaacaatatgtataagttaatcattcaaaatatgtgactttattatgtatagagcattttgtttttatgagttacagtagaagttctgagacactaactcagagcttttggctc

SEQ ID NO: 108546 - DNA, 1007 bp, Homo sapiens
tcacagcctgtagtggggaaaaggctgctgcaaactattggcccgtttatttcacagaatggtcctctgaaaaggagggcttggtcacaggtgcaaatgaggagtagttttgttcctgtgtttgcttttgtgatcagtggtagtttgtctgaggatgcttcattttagtatccttgcaaatgagaatatcctacctgtggagccagaagtcagaattgatgatagatgatgatagatttggatacccagctaaatgtcttaacaaggtagggagaggaaagataagaaggagagagaagagaagggaagaggcatatgatggtgagctgggaaggccattagcagttatttcagttgtgcctgctttatctgtgattaccagtaccttggatgcctgctctgggagtaacacaagaccattcttactaggaggttgaacatttcaagattttgttctttttatctttttgaaacctagatgaagatccagtttcagacatgagactcgttgggtgatcatttcattgagatcaacctgaatgaccaggtgtaaagtgcaagagtaatatgctatgactgaggtatgtctaatgtaacggatgactccagatgttgggaggccatggaaaaaaatctaatatttattgagtactatactaggttcattacatatatttccttttgacttcctgataatcctatcaggtagatattttacaactcagcaaagaagctgaagctcagagaggttaaatacctacttaagataacacagaaagctgatcaccaactctaatcacagtctccatcctgctgtgtgccagacaatgctttatgttctttctatattaactcttctaatctttaactcgtgagctgagtacttttattatccttattttatgatgaggaaattgaagcacacagagattagtactgtactctcctggctgtgtggcagaatccatgatttgaacccaggcagtctggctacagagctctgcagg

SEQ ID NO: 108547 - DNA, 1422 bp, Homo sapiens
atttggtgggcatttaactatttgttgagttaatggattacatttgctcattctgatattactttgtatagaccatccagagaatcaccagttacgaagaagtaagttgacttttgtgtgaggatattctcaaaatgaaaaatcagctgatgggccaaagtatcttaaagtctgttttaagtaaacattgatctctgtgctttagtgccttttagaataattattcatgtttacttcctttcagacctctaacctaaatctctattttatttcatgtttccctaaagactcactagtgggcatatttttacgtgcatttgatgagttgactagtggtttttaatgattttccctgatatgaatggccaaaaaacagatgtcagtctgttaacctgttgcatttgtggctattaagagtgttttctatgtgtgctctcctgcttttgagccagaagagcaatttcaattaaattttaaagtggtgaaattggaatggaatgtgtaaactgacagaggtcataagactagtgaaactgctgggataggtgatagagaagcccaaaagcaggaggcagagttgattttggacatttttcttaaacattagatgggatttgttgatgggaattattgtttgtggtaagatcatttgaaaagttttctttgctctgtgtgcattattggcaccctctacagctttgttagaaagttggataggtaataagaacccaggactggcagtggagatggcacttggagggatatgtgttactgatttccccgtaatgaaggagagaggctagaccaggtgattttattgttttttgttttccagtgctgaaaattgtatgactctctcatattttggttaaggctgttgttataagatactggtcactttaatccttgcatagaaagcagtttttaaagttaatctctgccttttaaaatggtacaaaatttgaagtatttcagccttttataagctgaatatacttttaatgttccaaagaataatttcgtttgttttgttgttgttgttttttgcttttggaacagggtcttgctctgttggccaggttagagtgcagtggcatggtcatggctcactgcagtctcaaacccctagaatcgagcgatcctccctcctcccatgtagctgggactataggcacgtgccaccacacccagctaattttttttggtgttactctgttgaccaggctggtctcgagttcctggcttcaaatgattctcctgtctcagcctctcaaagtgcggggattacagggatgagccaccatgcacactccaaggagtaattataacagtattttataattattaaccatttataaaaagatttttttagtgttttgcttaaaataatggatagcatgaacaagaaaattgaaatattac

SEQ ID NO: 108548 - DNA, 1047 bp, Homo sapiens
aaattagaacctttttgttaaaacaaatccctagtgcgagtttaagtatgggaggtttggagagttcttgttttagagtgattagacctgaaaaagagaaataaaattaattaccatggtttttacatgggagctggtgggagaagaataaagactttttactgacctttccatgcactatactgtagcctaacctagaatactgaccaggataaactgatgcattcttaatcctattaatattaaggtggcttttttttagaagtaatcggactatgtacccatatatagtagttgtatcttaaaggaagagtgaataagagggagaaaatagttacatgtactgtgagtagaatttcttaggtactgtcactttaatattttgacattttagaggttttaatctaatattttcatcttggaaggattaattggttatttaattagtattttggcctactataattgctttattttattcctttagccctccttacagcctagaaaaaatgacagatctcgtagctgtttgggatgttgctttaagtgacggagtccacaagatcgaatttgaacatgggactacatcaggcaaacgagtagtatatgtagatggaaaggtaggaagaaaatatgttactttgtaaaatatgatatatagagaaacttgattttgttaaagtagcatcttcatatgtgaattcagggcttttttttcttgtagtcatgtttttgatctgtatcattttgctgtgtaaagcaaacatagttatagaattcatggaatatagcgtgtaatatttaaacttaaaatgcttttattttctaaaaccttggcatcataaattaataaaattacatcttttttttttcttttttttgagacggagtctcgctgtgtcacccaggctggagtgcagtggcgcagtctcagctcaccacaacctccaccttctgtgtttaagctattctcctgcctcagcctctcaagtagctgggattacaggcacctgccattacgccctgctgattttttgtatttttagt

SEQ ID NO: 108549 - DNA, 1038 bp, Homo sapiens
attttatatataagatatcttaagccaggttttatagtgatggatttgaggattataaatttaggttttaaaaaaatgtaatattgccaggcgcagtgactcatgcttgtaatcccagcactttggtaggctgaggcgggtggatcacctgaggtcaggagtttgagaccagcctggccaacatggtgaaaccccgtccctactaaaaatacaaaaattagcaggacatagtggcacatgcctgtaatcccagctactcgggaggctgaggcaggggaaatcacttgaatccaggaggcggagattgcaatgagccgagatcgcaccactgcattccagtctcaaaaaaagcaagactccatctcaaaaaaaaaaaaaaaagtaatattgatgtagattttggtattatttggtatttctctttataaatatatcttaaaggcagttggaaatttaggatttatcagtaagaaagcaatattttcctagataacaataggcttaggactgcatcagatcaaaattatcaaagtctaggactttttgaagagttttttttgtttgtttttctaggcttttctgtttgggtttctcttttcttatgggaagcagatatatatcttttctttgcccatattcctatgtcttttagcagttttactcgtgttctctattgcttggaattcttttcattcttttatgtttttgagacagagtctcactttgtcgcccaggctggaatgcagtggtgtgcatgaacatggctcactgcagccttgtcctcctgggctcaagtgatcctccagcctcagcctcccgagtagctgggaccacaggtccatgtcaccatgccaggctaactttaaaaaaattttttgtagagacagggtcttgccatgttggccaggctaatctagagctcctgggctcaagtgatcctcctgcctcagcctccaaaagtgctgggattacaggtgtgagcagctgtgcccacccttcttttcattcttaacaacaatattcttggaagtctgttgc

SEQ ID NO: 108550 - DNA, 1030 bp, Homo sapiens
tttaatttatctagtatccatatttgaaaaaattttaggtgaagttaaatattatatttgatttaaatcaatataccaaaaatagtatttaacatgtaatcagtataaaaagttattttatacatttttttgtttcatactaggtcttctaaatccagtgtctattttatatttaaacagcatatctattttcagactagtcaatttgaagtgcccaatagccacatgtggccagtggctactgtattgaacagaacaggtatagatttagtggtgtttggttttgttatatgtatattttactgtaagccaccttatacccagaggaatcagattttcagagtggctaagaacactccatccctggctggatgcagtggctcacacctgtaatcccagcactgtgggaggctaaggtgggtagatcacttgaggtatattataaataactaataaatgtcatatttatcatttttatttttgaaaacatagacacatagtcatgaggtttatattcctcccccaagaatttaagattcttaaggattgtaggggttatgaaaaggaaactttcaattcataacagaaatgtaaaagcatctaagtacaagctttagactttgtttttcaaagcttattgtttaactaatacattattttattgcactactagtacttttagatggtgtgaatgctctagacagagataaaagtttctgcaccactaattccttcttcttttgttgctccagggtgagtttgtagatgatgggactgaaactcacttcagtatcgggaaccatgactgttacataaaggctgtcagtagtgggaagcggaaagaagggattattcatactctcattgtggataatagagaaatcccagagattgcaagttaatgaattttcatcttaagaagtaaagatcaggactttttaattactgtggtaattaaatgtgttcagtatgtacttatcagtacatttagtctgcaatgttttaattttttaaaaagttacatgaaact

SEQ ID NO: 108551 - DNA, 1051 bp, Homo sapiens
tgcacgccaaggaatgctactagggattgtttccgtttttgtttgttttttctaatatttggtacttcccagaatggtgtaaatacttcttttcaatgttgtgaccaagtattgtcactcagccaacaacttttccacacctgggggttggtggctgttcttactgtccaaatgaagctaaaaagaaaggcatctttcttcccttttaaaattgtgtaaactgcaaattataatataatttgaatttatgattattttccagaagaaatcttgtaaacctgtggatactcattaattcttttgttaatatttatttccatgatagcatcattccagccagacttgctgaaaatctactggtgaggcaaatataatatatataaatatgctacatatatatttataaaatttctagtgggagttctatataaatgtttctttggtattcttcagcctgtgatttaaagttttacaaaaagcagagctttttcctaagttacttttcagttaggtaactgtgtgatccagttcttccagctgcttctataatgaggcacatattaatacagtttttatatggtatctatgaaagagttcacttcatagagaataatacttgagcaaatgtatccaagaaagcaagcaaatgaaaagaaacctatttatggaataaactccagatctgaaattcagtattttagaaaaatgccagctcttcttactgtatttattaaaacttgtaataatgtgatttttttcaaggatattagttcaaattgaaatggtttcacgccacacggaaatctttaagttatttgttgaggtaccatatatttagggtgctaggggcaagtaatgttaatatgtgcaataggaactactggtttgaatgtgtaaatgggtgatctctctgagtcctggcaacatccagcaaaactactgcttattctccaaagaatattgggagctctcaatcctcggtgatatgggaaagagaactgagtatttgccctatgactgagctttctataggaattttattaaagaatgt

SEQ ID NO: 108552 - DNA, 1042 bp, Homo sapiens
gaactcactcactgtcatgagactagcatggagggccacattgattcagtcacctcccaccaggatgctcctttgacatgtgggaattatagggattataatttgaggtgagatttgagtagggacaaaagccagaccatatcacaatctaattcatttgattaaaatatctctagtatctgttctttgaccctcttgactcccttttccccatctgaaatcttcagctttttttgtgatattgtaacagtggtacagtgaaggaaagcatgtaacaagcctggcccaaaagaaccattgtgtttcaacaagttcacatttgatagtttgataccaagggatctttttctggcacaggttgtttggttactcactgtgtcttttgtttctttcagtgatgaagaactttctcaatatcttttacaactggtgcaagtgttaaaatatgagccttttcttgattgtgccctctctagattcctattagaaagagcacttggtaatcggaggatagggcagtttctattttggcatcttaggtaagtcttttatattttactttgagcccaccaggtgctttagtaactataaacaagcataatatatttaatagaaaaatagctgctttagtttttttctgaaccgtttataacatttatatggttttggtgccttctcctgtttcttgataccagcactcttgatttttatgatttgagatttgacaaagtaattcagttatccaagacccttatgtgtccctccatgcctgcttgatttcttcatttcttccttcctttcttttttttttttttgtgtgtgttttctacctgcttgatttttaactgaaattaataatgtattgctattttccagtaaagtgtacttattgtcttaatatatttgggctcaatgcagacctatttatttcatctagaaagttgtgggtggtactgtcattactagtgttattgagtgaaggtaaaggtatactataatgacagcaattttattcaatttctttattaagtaggtaatttcc

SEQ ID NO: 108553 - DNA, 1013 bp, Homo sapiens
tatcgttagatttgataagaagaatgtcattgatgacttaaaataccaatttggttattgtgacaaccatgaaaaccagattacatgtgattaagaagtccatatgtagtgatgagattatagtttctatgggccacctaattttgatggagagagagcagttccaattaaagtcttttcaagattgagaactaaatttgaattaagaggtaaagtagtcattcagttttgttaactttctcatttttaaaacatgtatgcaaactcacactgaaattttgttccaagcattaacagaaaattagaggattactgatagaattgtctgtcacacttctgtagttgacatacttctaaggtgattttcatgggaggagatccattacagcttttttaaagcctagttttaaagacattttttaagaaccaaaattatttgcatgttttagatgaactcgaagaaatgttgaatccaatgggaactgttcaaacaaatccatatactgaaaatgcaacagctttgcatgttaaatttccagagaataaaaaacaaccttattattaccctcccttcgataaggtaagctaattatttaaaggacctctatgcatgaaatgattgaatgatcagttcctctatgtatagtttaagctctatctgtctctttcaaaacttcccatacagtgacagctttgttgagtgggaagaccatggatcagggagccttcttaactctgttagttttggttttatcactgactaagtaagaaaaggtacctccaggccgggcgcagtggttcacgcctgtaatcccagcactttgggagcccgaggtgggtggatcacctgaggtcgggagttcgagaccagcctgacaaacatggagaagccctgtctctactaaaaatacaaaattagctggacatggtggcacatgcctgtaatcccagctactcgggaggctgagcaggagaattgcttgaacccgggaggcggaggttgcagtgagcca

SEQ ID NO: 108554 - DNA, 1005 bp, Homo sapiens
agtagcaagattcctagtaggtatgtgtataatattagatcctgtgtgattaattttttgatgtgggctacatatttgactgtctgcttgccctacacctagtggacaaggcaaagagaaaacatgatcagttataatattcagaatctcataaggtaaaacaaactagttatttatgagtttgtagcatatttcaatactgtaaattgagagagatatgcttagggaatccttatgaatgagacacagtgagtaatgtagtgagcaccaacacctctgacaacatcatattatagtaggcaaaataatgcttctcatctctcttataatgtctttcactaggtagacataaaatacaatattgacagtataatctggaaaaagtcattctagaagagaccaaattaattcagtcttagtactgtattcacccatttgatggtttatctttaattgaataatatttggacttcctaaataaatgttgtgtgtttttcaggaaattctgtatgcatatttttattcaaaactggatttgggaaagattaggcagtggagactttgttgtgttcatttaaagtcaaataagatcaaagtgtatatacatatatatgcacacatggatcatcaactgagcctagagtaacattaaatcatcttggccatgcccagtggctcatgcctgtaatcccagcagtttgggaggcccagacaagtggaacacctgaggtcaggagttagagaccggcatgaccaacatggtgaaacctcatctctaataaaaatacaaaaaaattagccaggtgtggtggcaggtgcttataatcccagctactcgggaggctgaggcaggagaattgcttgaacccagaaggcggatgttgcagtgagccgagatcatgccattgcactccagcgtgggcaatgagagcaaaactctgtctcaaaaaaaaaaaacttaaggatatgaagtttctaagcagaaatcatgtgtgaatagatggc

SEQ ID NO: 108555 - DNA, 1136 bp, Homo sapiens
agagatagggtcttgctatgttgccaatgctggtcttgaactcctagcctcaagcagtcctcctgctttggcctctcaaagcactgggattacaggcacaagccaccatgccagaccagatttcatttttaaaggcaaaaatcacatggagtcaaatctacccacaagtcatatggaatattatatatatatatggttttgtttagtaatttataggtatcgatatagaatctacgtagtaacaaatgggaatttctgcttgttcttcccatttgcaggttatcatatttgtcttctgtagataatttatcagttctttgatttgtttatggttggtatttctctgcagccctttacttaatttcttcctaaagaatatccaagaagccttcattcgtgttttattttttctcaagcattatgcgttattcctttgtcagtggtcagaaacccaataaagtcattgacattttatgtccatatgttttgccacttctatcaggtatcaagcttgattgattctattgtttgccgttgttatgttcatggagaggattaatgggcttaatgacaggtagtatttaatgtatgtacctcaccccaccgtacctagcactgtagttctctttttctttcttctccccagcaggattatatagttgaatttgagtacattaaatgtaattatgacatgattttcctgtagatataccttgctacacaggtgaggagctccagtagaatgttaaagcaaaatctgaaaaaaggtggcagctttacatctttctttccaaacttttttctttcctgtatgcactggctaagaatcccagtacaatttcaaatagaagtgataagggtaaatggattactcagggttctccagagaaacagagccaataggatacaatatgtatagctatatctatattatcacatataaataagcaaaaaatatagaagatttattataagaaattgacttaaatgattatggaggtgggcaactggagacccaagagagccagtggttgagttccagtctgaatctgaaagcctgagaaccaggaatgccagtgggtgtagttcctatctgaaggctggtaggcttgactcaaacccaggaagagccaatg

SEQ ID NO: 108556 - DNA, 1948 bp, Homo sapiens
agtagatttctgtttctttaatttaacatttctttttaccttaagaggtgtaaaggagaatgtatattttaccagcattatcctctattattataaagaaaaacagaagcatgtatgtgtttttgtgcagggttagacaggagagaccctgtacaaaagagagagagagagagaatatacagtgtaggcaaaggaatgtgagagaaatggatctttcatagtgaaaagtttttggatgaatatatttatcataatatcatatataacttctgagagacattctggaagttttttttctctgacaaaaatgtatttttaatggttctgaattgaattacgatacattgaatcacactctggatctgtataggaaattcattcttctgaggaatacattggattcctattcactttgttaggaatctttggtaatatgaataatcaccccttttcttatatgcctctggagagtcattctagttttgtgaaaatagaacatcaaactgggatgatcggtaggtttttgatgggaagacggctggtaatacttgcctagagctctgtgatggaaaggggccatctcagggatccatagaaagtgtgaatctgccacatgcgaaccacgtattcagcttttctagccaagctgaaagtatggctgaagtatgactttagtgttagacaaatgggtttaaatctaggttttacagatactaggtgtgcaacttaacccttctgagtttcatttctttaatatgttaaatgagtgtaatgagattagctgtaacatacaataatcatctaactcatttctttaggtacttaggtgttcagttaatgatagctattttttgtattgtgatttaaaattctcatatgcttaggctgggcttggtggctcacacctgtaatcctagcactttgggaggtcaaggtaggcagatcacttcagctcaggagttcaagaccagcctgggtaacatggcaaaaccctgtctctacaaaaaatataaaaattggctgggcatggtggtgtgtgcctgtagtcccaggtactccagaggctgaggtgggaggattgctttagcccaggagattgaggctgcagtgagctgtgatcgtgtcactgcattccagcctgggcaacatagaccctgtctcaaaaaaaaaaaaaaaaaattttttttttttaatttcttgatattctgctgtggtttaagacatactttcacagtgcatttgatatagtgttgttcagcttcattttattctattgatttaggtgttggcatgaaaatcaataccttcccctttcttgcccctatagtatatccggaactgtgtgatgaacagagccctgccccattttatacttgtggaatgctgcaagatcaagaaaatgtatgaacaagaaatgattgccatagaggctgccataaatcgaaattcatctaatcttcctcttccattaccaccaaagaaaacacgaattatttctgtaagttttatttctgaacctttagtaaccccaaaagccatgtgattgtgttagtttacataagtttcacacatatttcctttgctcacttctccttctgtgaaaaccaatacatatttgccaaaaatcgatcaccatttatttaaaaattatctttctagatactattatttttactcaagccacaattaaatgtaaatatgccgtttatatttttgatgtctttttctgccgaagaaaaatgccatcaaattagagattttgatttaaatataggacttcaatgagtaattggagacatcctagtagaaaagttagatgtgcagaaataattgaattaaccagtatatttcatttctatcagcttaactatggtagtatttttggtataatttgcctgccttcttaatactgaattcttttagtactaaacatatatgaagggcacta

SEQ ID NO: 108557 - DNA, 1054 bp, Homo sapiens
attaatacttggtttgtaaataaaaacaatgaatcttttatgtgtggctttaaaatatgtattgtgaattactttgtaaaactggtaggcaaactacatttctttatgaggttttgagttgtattttttaaaaaaatataattgtatgtttgtcttctgtacatgagatttattgttttatctgggttttttgatctttaatggtattttcctccctagtttcatctgcttgataaaagccaagcatccaacatccaagttagtttttgttgaatatactttgtattctttctatattcttttattattgttagttactgaaaatgacacctttaaaaaatgtgtttaggtctgcatgaatttgattccttgaaggatcctgaagtaaatgaatttcgaagaaaaatgcgcaaattcagcgaggaaaaaatcctgtcacttgtgggattgtcttggatggactggctaaaacaaacatatccaccagagcatgaaccatccatccctgaaaacttagaagataaactttatgggggaaagctcatcgtagctgttcattttgaaaactgccaggtaggattatatttttttaagaaatattttgtaataaatttctcatttttacccgaatacaactgcatttttagaagtgtctgtcgcttgcctagcaaacactattagaaagaacaattttatatttcagatagaaatgtatttaggattatatataatagtctaaagtgatattctgtacacgtatctgttttgatacagtggaatggtgatttagaatgggattggcaaactggactgtttaattggtttttacagttttaaagggatgttaaaaagagaaaaaaacctcaaagatttgtaaagggatgtttaaaagaagaagaagtaaaaagaatatgcaacagagaccactgtgttgtatgttgtttgccaaacctggtcctttacagagaaagtttgccagttgctggtctagatagtgttccttattggaaatatttttttctcatgtgacttttctcccccatcggtagaaatg

SEQ ID NO: 108558 - DNA, 1004 bp, Homo sapiens
ggctgaggcaggagaatcaggcagggaggttgcagtgagccgagatggtggtagtacagtccagcctccgctcggcatcagagggagaccgtgcaaagtgggagacggagacggagacgagagggagagggggagggggagggagagggagagcctttttttgttttttgatacagagtctctctctgttgcccaggctggagtgcagtggcgtgatcttagctcattgcaacctctgcttcccgggttcaagtgattccactcagcttcccaagtagctggaattacaggtgcatgccactgcacccagctaatttttgcagttttagtagagatggggtttcaccatgttggtcaggctggtctcaaactcctgacctcaggtgatccacttgtcttccaaagtgttgggattacaggcgtgagccactgtgcctggcccggataagcattttcgtagaatattatacctagtaatgcaatttttgatgctaaactccctttggaagaggttaaatcagtttattctcccataagcaacgatctatgaaatggcatctcagtgtggttttaatttacattttcttggtgaccaatgaggttgaacattttcccccatatgtttatgggttatttgggcttttgggaaactaattattatcccaattttttttgttggattcatgttctttatatgttctttttcacactgtaactttcaaaagttgtttattttatcattttttatttatctgtttgacattcttcattgaatctcttgttcttttgcatgaagaacagcaccttaatttgacctaccagcctccccagtaccattctgcccctgtactctgcttgttgaattccataaatgcttaaggtttctcaggtctttgcatatagtctttctttccttgcctgcctagctaatttcctgtcttacattgtctctgttaaaatatcaccctcatgggccatggtggctcatgcctctattcccagca

SEQ ID NO: 108559 - DNA, 1018 bp, Homo sapiens
atctgcgcaaggataccagaaaatgtgtccagatttctgggcttctttacaaggtcatattcagatcccttcattctccctcgttttgcatcagttgtttctctcaaattccagtctttctccagcatcatactgccactcccgtttctccccaaaccaagaaatcaccagatctcttacgttgttagttaccttgcatttttttcccatgaattttggaagacttagccatggcttttcttggggtttttccaactgctctccaaggaaactgccaaatagtatgcttactatacaagactgtatgttgcttcttcctaggaaccccttatcctgctgaagttttcttctagtcttctaattctaaatgaaaatttgtgttgaattttatcagatgttttcagcatgcattgtgttatgtatttttttttaatttgttaatctggtgatttcacccaatggaaagtgtttgcattcctgctattccacattattttataccttttaaaatctaccctgagttttttctcatgtaaaccaaacttctaacttttaaaatgttagtttattactgtagttgcctcatatttttatataggagataaaagattactggtaaagctgatgtcaacaagctggttttattttatttaaaaacatcaataactattcagatctaccactatgccttaccaattatttcctacatttttattcttacattccactccttcactgtagcttcagttttctttttgtgaagaatatcctttaatatttctttccactgtgtcttacgtgtgataaactatcttgcttctgtaagtctgagcatgtttttgtgtgataaactttcttagaattgactgtaaatgttttaattacaccttcattcttaattttaaaatgatatttaactacagtactttaaagatattagcccgttgttttgccattttttgttgttgcaggatgtcttctgtcaatcaagttgttagtccttttatatgtaatttgg

SEQ ID NO: 108560 - DNA, 1109 bp, Homo sapiens
atcaatcagctcatcctccaactgaaatagacacagaatttctgaaaacacagtgcattggaagcacatgtttttgttttttgaaattatcaagtatcttgagagattattttctgctctgtcttcaaaaactggaagggaagggctagacaaaagatagtaggttgtgtgcatggcagtcacctctcatcacagttcagttccaaggaaaattttcagtgttttccaagttggctgttgcctcctctgaaatcagcacatgccatgaaggaaggagtcttgctttgcctcatcttctaccctagggtttaatgttggtgaataaataactcaaggacccctttctacaaggacccctaaaactcctgcagcagtggaccaagcccaggggcatacttacaactgggaagtcctagggccttattttgaaaagacttgaaatacaattaggaagacaagcacaaaagcaagtgttcacttctctctgctgtgagtccaagttccaacttttcagtcatggctttgagagctctcagacttgcctggctctaagtctatatggtggctttttaatcctagcctgcaactggcttagtcctttttgctggctcaggatttgagaatgaagggtcccttcaccaggaaaacatgcatatactcaaaatgttgcttgcagttttaggatgttcataaccccttctcctcagggaccttatataagggagtcctgctcttatcaggattggtcacccaggctttgatgttgctagcatctggttaccaagatagctttttcccttcacagtggcatgttgtgttgccctctgcaccatctatgatactgggaaatgcccaccattattccccctgggcttcaggatggaattttggtttccctgatgattatacttctccttaaaacacagatctggatggaatgaatcattttcttggtttgcatagatgaaattagctttatttggcttcctaggccccaggcaggcagcttaattgaccttctccttgcatattctggactccagaagcattgccctctgtcttgctggtaatgatgtagtagtccagcaacagagcttccagggatttta

SEQ ID NO: 108561 - DNA, 1098 bp, Homo sapiens
caggtgcagggagagaggtagagctgacaggactaggtatgctggcccccaagtgagaggtgggattggagttgctgggagagcttgcttatgggccagaggatgtctggctcatctcagtactgctcatggggcggaatgaatgcgaagtccccccagatggggacaccatgtggcagagtgggaccactctggctttgatgcagtctcgccatacctctctcagctgtgtgacttcaggagcaatccttaacctttctgagcctatatcagctataccatctccctccacctgaccttgagatggcaattacagtggctgtagtccagtttatcaatagaaaggagccatggctggacagacgtggggacatggggcagtcccatttcacaggctggaaaacagaggccctaaaacaacacagctcccttacacagctggcctttggggctgcttggtcctagctctggatcctccacaaggatcctcacactgtggtgctggaagtgcctggtggccttgtggtggccgctcccacctccctatcagctgttaacctacaaatgccctagtaaggaaaatattttcattcttttataacaccattctcaggactgcttaatcatatttttctttgtctttgaaaacaagctcctgtgtggttttctattttcttgctgctcttctaaggatattctagaactgaaccttgctgtctggcacttcatgcctttttaattgcgtcaccatcctctggctactttagatggggttagggtgggcaggcgctaagcccctccaagtgcctcacaccacacttgacctcacttctattctgggacaaaggtgtcacctcattttgcagaagaaactgatgttcagagaggttaagtatcctgctcaaggtcacacagcctttttgatgagaattcaagccattttgatctccaagccagggataagtctgttaataaacccactctgccctgatctctggcaccagcctgctgtggtgacctcaagcaagtccgttaaagtctctctgccccacgttctctgggtgtgacagcctattgtgaaaacaggagaatgaggat

SEQ ID NO: 108562 - DNA, 1046 bp, Homo sapiens
tacacagggataggtctggtcttgcatctgtaggggctgggctggcctggcatcagggtccattggggtaggcctgcaacctgtgtctgtctgcaggcctggactggaatggtcccggagcatgagcctatgggtattggcctgtatcctgggtccatgatagtgggcctggatcttaggcccatggagatgagggtgaatcctgagtctgtgtggccagtgtgccactggggcaagcctggagcatgagtccatagttctactttatttttttctctagggcatcttagttttgctcataaagtctttctcatttcctatgttttattctagtatcttcatagttttatttatttccatgtttaattctttaactggaatttatttttgtgtgggtatgacaaaattttaagaatctttaatgaaaaacctttcactttcaaatctgtaagtaatatcgatgttataaaaagatgaaccaggtttatccagtggtgccctctgagtacactttcaggggcacaagtgaggaaccaaaagacacatttaaacttcctaatagtgccttgaaagctctccataatctgtctccaaacatttttttccaatttcttcctaacctgccacctccttcagaaagccttttgagatttctcagcttgcatggatgctttttaatcactcagagcactttaataagttatgcctcctggtggttttgctttattattattattgttattattattagtagcagtatattttaaggaagcttttttatctaatcagtcaaccagcttcttggaggcagtttttatgtgtcccaattcagtgtccctgtacacaataggtattcaaaagcatttctctaaaataaatgagaatatgctgccattttcagagtctggggttaagatacatgagaagatggcagaacatctgtgtgtgttgggcaggaatggggaactgggatccctttgctgctcctttgacggaaggaggggctggcaagagggtagggaaggagctatagccagttttgtcac

SEQ ID NO: 108563 - DNA, 1048 bp, Homo sapiens
gtttgagcctattccatgcatgcaaggttcagcaattagccagagtttagccagagtttttacatagaattcatggctctttgtctttggctctctactttctaggattactcctttactttttggcagctgaggtttctctgagctttgttctctggttctctaagtcagaaaaactataggttttcaataagagtgtgagtcaccctacaggctactcactactcagtgtgtattcaagatgattttgaactatctacaagctgaaagccgtaaaaatgggaaatatcctgggccccattccttcttccagatgtcagcttccctccaacatctgcctgctttctagttcctttggatagttgcattttttattttgtctagagttaatagttacaattgctgggaagtttggtccagtgggtctgttgaccatatcataagcagaactcctcctactatttttctattttaccatttttagaaggtggcttcatttttcaagacagtctcatggtcgcaagatggctactgcagcttcagccattatgccaacattccaggctggaagaagaatgaaggaggaagagtaagatgtgtttttcagctacagcagccatcctttagaaggttttttcattattctcacctaacaacttttatctatatcccattgatcagaatttaattgcaaggttataaataaaatgtaattattaacctgggcacattcctattcccaataggatcagagttaagttattatggtaagaaataagggaggattactctcagaaaggcaattagaagatctctcatttcatagacataatatgaagtttaaaaatgttaatacctattaaatgcttagtgtcattcatggaacttcataaatcttgcttttagtattgataggaatttcataatagacataataagcctaggccatgatgaaaatcccaaagagagatagagcccaatttggagtagaggggtgtcagggaagacttcctggaggcagtgactactgaatctaaaagacaaataa

SEQ ID NO: 108564 - DNA, 1046 bp, Homo sapiens
ggataaataaaataattgtgtgccacatatatcaatcattttctgtgggtttgtaaagaaaatatctaatattctgtttgtgccttgcctatatttgtgtcatccattcgaggcaccgagtataaaatagaaaatggaagctgatgttactttagctcttgacatggtcaaatatttctattgatggtgactctgggtcttttctttctagtcatttttttttaagtgagaaaaacatccactttgtaatttataatgctggataaccaattttaaaaaagaaagaaaaactcaacaaaaaataaatactcaaggctgttgtttgtcactggattttgtttctaagcatcccacttagactgctcctgaccctttcttggtacagtccgtctggaagggctggtttccctgggtccctaaatgggtcggatgtcagtggtgaacagtccgtctggggtgagaggcggaagggctggtttccctgggtccctaaatgggtcggatgtcagtggtgtctgtggggtctgcttccttgacattgtctcccaaatgagaagtgaccattaagacttccgggggcttaatctttcagacctagatcagccctgctcagcaatttcaaacaaacccaacaatgtggctgaaactggcacaagatagggtaccctgggatgaaagcgcgtgttagagcagcaactgaaatccagaaagctagagctgtgtagctttcatgacacaagcatttgagccagcatgtttgaccaacgctcacaacccccgcttgcgcccccttccaccctccaatccctcttggattgattaaattggctcaagatgacaccaataattggctcaagatggggcttcgacaggcccaatgatccatatcttcacattccctaaaatcagtcctttcagctctgtgttggatttaggatggtttacattggctccgtcacaaacattttaataaagtcccagagaaaccgcaaacgggtgacatcattggatggtgttaaaaaaaaaaaaaaaagagtcccattttg

SEQ ID NO: 108565 - DNA, 1011 bp, Homo sapiens
tttcttggcatcatcaaggaatttataagacagaaacattctatcttctcaaaaagcttcagctaaagaaatccatctaacttaggcgaaaagagtctcctgcttccattgccttgtagatttttgtccatttgtggtttgggatgggtttctgtctgtatctgtgtactccttgttctgcctcagcacatctggaatctggaaaatactgtgcctattatctgctgagaaatggtaacaccatgatgtggggctggtctgcatttctcatccctcatatagtatatcttccagaagggtctcacccagtcagaggaaatctggtttggacgcatcagagacagccaggtcacatcatctctcaagcccttctccacatagtatttcaaagaaagatcattttgcgattagacatatactcacccggtgtggtatgctatatgatatatcagtaaacacatatttggttgtttctgttccttccaaaatcttatcttcagctaacacatcatttattggtactcgctcttccagaactggtggcatttttaatcgtactttagctgcctcaactgcctgtcttgtagcctaatgaaagaaaatatttattaaggaaagccacaaggttacataatataaggatcatctgacaaaagcacatactaataaaaaatgcaaaaacctgcatagaaaagaaggtgtagccacaaatcagtgagtaaaaagccaaacctggacttgtgagccctggcctttgcctctgcgatgtggctgagaccaccagctatagactcaaccgttatcaaaaccacaaaggcatgctctgagacaaagccaggctacaaaagctgcttgaaacagaataaaagaatgcagttttggggtgcttactatgtgccagatagtgttcaaacagtctaaatgtatttggctgatttaatggcctcaattaccttatgagttaggtgcaattgttatcatctccattttacagaagaaaaaacagaggca

SEQ ID NO: 108566 - DNA, 1199 bp, Homo sapiens
gcacagagtggccagtatgtgggtgggcaggcctgtcatgacatcaggacaggtgctgaacttcagtgttctcatgtgatgctaactctgctgtgtggttttagactatgtatagccaggacaggcatgttgatgtcctcaatctctgctttgcccagtttgagccagattccacagagtatatcaaggtgagtagattttagtttctaaaatataggcttaagtatggttatgagtaagatttttaatctagctcaatgaatttcgttgtaagttttgatacaggggaaagggaagagaaatacctgaaaatctattgagtacagttgtgtgccagatatatattttataatcacaacaacccttgattaaagatgagggaatttaagcttgtagaattaagtagcttgctgaaagttgcatagctactaagtggtagggttaggacccaagtttgatgacaaagcctattctcttttcagtttaccgtataggaatcaaattatttactaaaattttgctgaagtacagtgtgtttgtcttacagctcagtaagtattcattagtaccttctatgtgtaaggtattatcttgggtagtataggtgatgccacgaactaggatagagtatgctgtgccaaagccagcagtccggatatggctgtggggaaaggtgctagtaagtatacaaataattatctcctcaggcctaaaatgctagacactaagagaagattacaaattctttgaagaaagccttcataggggtgtaaaggagggttctagaagtgcaggaaatgttgtggcaggtggagctgggtgaggtgtttcaggtagagagaacagtataagcaacaggcaggaaaaaaggaggcttgagaaacggccagtgatctggtttgcttatatatgccatgtatatgtaggggagtgattaaagattaagttaggaaggtggatgtagccacatcataggtgacctcagatgctaggctgaggaatctggaattcagtcagcagacctttgaaagccttttgaacagaggaatgcccccatcagaaccttcatttaggaagatcaatctggaaggaggactgaaggacctttagttaataagatggaatgggctagctggtagaatagggtagttgatggggggagggataggggaaagggagagtagtgaaaaaatacttga

SEQ ID NO: 108567 - DNA, 1055 bp, Homo sapiens
tctgtctaagttaacgtttgccctatttggtaacacaaaaacacaccagactttttaaccgtacgctcatctaacatgatttgagaaattcataaccaggcactcaaatatccttgtagcctacgaaaagtgagtagggtaataatttttgctttgtagggagaactacaaattgatatcttttaatctggccattttttaacatttagctcaatattaacagagaaatgtagtcagtatttagtaaaataaatgtatttttaaaatatttttaggaagctgcagaatggcgactgagtgcttcttgataagtctgcagtgttagttctatataggctcccttctgtgcttctgtttttgcaaagacctgtttaaattaaaaagaaaattttaaaacaataggacatatgctatttataaagtttttcagttttaagacatcattagcatttctgtagtagcaaagagtcctacttaaaaagggctttcagatttcacaatttttcccccgattatacaataattaataaacacacatggacagaaaaacaatacccaacacatttcaagcaatactaattctaaacaccagaagtatccaattaagaccctgacattgtattaatattaatacttccttcgagatcaaaacaaaaaccattaggttagagagaaatctggaggctaagagttaccaaactaacttttgactttaaagaatattttctccaaaaacattgcgctttatcaggttcataaagaaaatcagtactgtagtttctctctactcttcctaggatgtcatcacaggtcattgtttccttagctttgcagcatgcaaacagtattactaggatagaagccagttccacaaaaccatgtatattctgagcattagaagagatgaaattaattatacaatctcctccccttcccttcctgaaaatatcatctcaactctcagcacttacagataaatgtacataagcccatggttttgagaggtatgcagctccaaaatgacaatacagctaaggcttgatgatatacaagca

SEQ ID NO: 108568 - DNA, 1125 bp, Homo sapiens
cctgcttcggcctcccaaagtgctgggattacaggcgtgagccactgtgcctggctgagatggttcacttttaaacatcatctcccacttcctaattctgatcatccttttcttgggggaaaactttaaattcccgagtaaattcccttgtcttcatatatatcttcacttgtggtttcaggaacttgatgggaaacctgcttctcctactccggttattgtggcctcccacacagccaacaaagaagaaaaggtaggtcagacatcatactcaaacctccctctaccccatcttcctccccatcaatatctggaggatacgtaggcctctgtggtttaagtgacatcagtttcagagcaggggctttgaaatgggaagatgctctttttgactattaagaaaatcttagttctcactttgaatcatgaacccacggataactttcctttaacagtactgtaaaacttaattaccctcttccttttgtctgcagagtttactcgaactagaagtagatttggataatttggaattagaagatattgacacaacagatatcaatctggatgaagatattttggatgattgactgtaatgctttccatttacctgactaaacagatcattattatatataggtattgattgctaccctgaccacagtgctttggactatgagaaacttcttagatttttatatgtaaatgctgtggaccactgggagcacaatgcccacatcatcttaagaagagtttatgtgcagcatttaaatcactgtgttttccttgttaactaaaacagacatgggctttgatttttttcatactattagaccatatctcataaaaccttttgaattaatgaaggtacttgtttcctttctcaataatgaaaataggcttctagttttagaaggctgagccgaaactacaccttgcctagggatcagccccactgtcttttctttgtataactaaatctgcattttcaaatgttgtcaatcacatttttcttagagctgaatatccaggctgtaattctctaaaccctttttcttgacctcattgcatcattccacaggtcttgccccgattttgtctagcagctacccatttctggagtca

SEQ ID NO: 108569 - DNA, 2031 bp, Homo sapiens
ttgaagttattgtctctctcttatctttttaaaagatgtattatgttaaactttgcataagttaaattgattacattggagatattcttagcactctaatttgttttaagaaaaattgttttcatatcttatgtgagctctattttgcaagataagaaaagatgtaaaatagtatgtaaactagtctggaaagcctaagagtacagacatagcagttatttgccaatgtctgaaactaactaaaaatatgttggttttgaaagacagcccaaccccctcatcttttggtgttgaatagagcaggcagtcagagaaggacagtgctgccttggtggcactcaccttcagcagcagatgctcttagcacatctggtctaaatgtttgagctaaatgagctgttcagggaggctcaagtgggagaaatgttaataccatttttgtaatgatatttttatagatctttgtatattgaggctcccaattgtttcagactggcatttactggtaaattaatttcagatgtgcaaaataaattttagctacgttaagatcatctaaacatgcagcattttgagttctgaaaagctacaagtgagacataatattattgtgaaatatttaaagacgtagttttgtatgctttcaaaaaagtgatattaaatcacttgttaaaataattgcagtctaattgccttaaaactccagtgagatggttttactttccctgtgtaattataagataaaagtataatgggttgacgataattatttgcacatcattaaaattgatttgtgtttaaattcattttgtatacattaataatttccatttcctcactgtacattttgcaatgccattcttattttgatagagccaacttaacaaacacagctctttttataaacattgtctgcacagttaacagaataatgttggaaatgtaaatgcttatttctaaagatattttaacttggaaactcttttcttacagtcagaacagaagtggaaacaacttgctgaacttgccattagtaaatgtcagtttggcctagcccaggagtgcctgcatcatgcacaggattatgggggcctgctgcttttggccactgcctctggaaatgctaatatggtgaacaagctagcagagggtgcggagagagatggcaaaaataatgtggcattcatgagctactttttacagggcaagtgagtattaatttaaaagattaattaattctacactgaggatggtttttggagagggaagtgaagaatgaaccctggagagaactgatgaatggccaaatggtgttgaatagacggggcagtcagaacaggacagtgctgccttggtggcactcaccttcagcaagggatgcccttagcacatctatctaaatgtttgagctaaatgagctgttcagggaggctcaagtgggagaaatgttaaacaccttcttcaacagccctgccagttaatggtggaagcattttattttatgattgcaggaggctattgagctgctctagtaggtacctgaagggcaggtgattttacccaaattggataactttgatccatttatggcaagaacaaaaggggataagtatgccacttacttgtagatttgagcccactataaagcataaagatgtctcatatttttaagtctaaccgagttagcataaaccaaatcatttggacattagttggcagtattatgaaataaaacacaaaagtattctttcctttttttttttttttttttgagatggaatctcactctgttgcccaggctggagtgcagtggcatgatctcggctaattgcagcctctgtctccctcgttcaagcccttctcctgccttagcctcccaagtagctgggattacaggcatgcgccaccacacccggcttgtgtttttaatagagatggggtctcaccatgttggccaggctggtctcaaactcctgacctcaaatgatccgcctgcctcgtcctcccaaagtgctgggattataggtgtga

SEQ ID NO: 108570 - DNA, 1027 bp, Homo sapiens
aatctcctggtctggagactctttagtttgtcctctccaaagaataaacctgtcttctttgtcatgaggtgggagaggggaggtgagagaggggaggtgggagaggggagcggatctagagtttctgaatgcttttagggcagtttgtttgtttttagccctaccattcatgagacacactgggtgtaaatcacattgtttctatgctgttctcactcctgatttaggatctgttttctctactgttttaacaaaatgtttatattcctccaccagctttccagcttccaaacttttgttactgtttcctctccctttctgtgtgtcgttgggagcttatgcctttaaaaaaaaatccttttagtgtgattttattagtagtagggaattagcagaaaacaaaagtatatattttagtccgcctcatttcatgtgttttgcccttggctgtatctgactagttccagagatcttccatcctccactcttgggttttatgttatctatatcaatgctagtggaaaaaaagtaactccggttatttagaatgccttatttacatcgtattcatggatggatcggggcgggttggcagcctgtataagctgagaagttaaaacatttcaaacttgatgataaagccatcctgaagatatagccagacagaaccctaaagctgtccagcttctcaatcttgactatcccataaatgagcattctccctcagtctggtgaagaggtaaactatccctgagctttttgtgtaacacattacatccctagagctaaaaatgaccccatcagtagtgtttgtcttgaaggagaagctaatttaataattacaatagttgatttaaaacagtggtccccaacctttttggcaccagggaccagtttcgtggcagatagacaatttttccacagatgggaagggggtacatttcaggatgaaactgttccacctcagatcgtcaggcattaagagtctcataaagagcacagaacctagatccatcacatgtacagt

SEQ ID NO: 108571 - DNA, 1050 bp, Homo sapiens
tgaatatacgataatttgtttaatcattcacctattgtggacatttgggtcattttcagtttctaaagtggtttgtaagccctagtaattcatgtcatacacagtataaaaccctttcatcatttgtccaactgtaaggagttctctgatctcttaggaaaacagtacatcagataatcttcaaatatttattttatatttttgcataattactgaaaaatatttgaagatatttccaacatttggtagaactatgatttagtatataacatgttatgtttgccttcccttttttctcccaggtatgcaataagagagagcaacagcattgtaaagatatttaagaactttaaggaaaaaaaatcatttaaaccagattttggagcagaaagtgagtgtgatctacatatgatacatttttaaattctttgtaatggctcaaaaatgcctaagcaaaactctttttatgttccctttaggtatctacggcggcttcttattgggagtcagatctgtaaatggcttagccttctatgactgggacaatacagaactcatacgaagaattgaaattcagcccaaacatgtgagtttcccctccattgttgtttttggaatatttatttttgtgatgagttctgggtccctaaggccaagaagtgtcttttgtaccctgctctccctcttcgattatcaaaagccatttaaaatataaaacagcacttagaatttaaataacttcttatacttttgaaatacacattgtctacggcctcattaggatacaacaatcctgattttctgagcaattggaggtaagtggcagtgccattttgacaggaaaaaagcatgctttgagaacaagaagtcagagaattcttgacttggaaatgccttcttccacatagttcagaaaaccttttcatacattttgatgatagctgcttgaacttgaggtgaccatctccagtgacaaagtgtttacctttagaactgcccgctgctttgacagttttcactgtcaggagattatctttggaaacaaaccag

SEQ ID NO: 108572 - DNA, 3531 bp, Homo sapiens
cgccatagtgattttgctccctgaaaattcaagtaaaatgagaaagaacaaaaaccaaacaggataaaaaataaaatttgatagctcttctctcctgggctttggcattttacataatgtgtcagaaatatggtggatttgccttttgtaaagcaaggccccatattgactggccgatgctgtttctctctgcaggtgtggcagttgggctcttcgtcaccaaacttcactttggaaggacatgagaaaggcgtgaattgcattgattactacagtggtggggacaagccatacctcatttcaggtgcagatgaccgtcttgttaaaatatgggattatcaggtacagtttttcataaccttacttccatatgttagatatgtttcttactatttcttataggacagttaagacttgggttgttgaaaactgttcacagcataataacttaaggtatcagtatttgcacctaaactgtgttcccagaattctccataaaaatgaaaacaatgcatatcaagattttaaaaataaaataccaacatgttcatatttcatttcataattgcatttagaaattttaacattttaatgttgaattatcctccataatcttcattgatagacttctattcatttttgtaagctagcagatcaacaattaccaaccattttgccaaatcgtactcttgtaaacctagttatgaattcttgttaacatgcttcctatctctaagattttcttatattttgatatttttgttttccacatcaaaagttcccataagcaattaataaaatgaggtctagaaagtcagtttttccttgaaacattttcagatttgtacttaaatccagaataaaaatattaaaggctaaagcagcactgtctacttagccagtgatggtaggtgtgagttttaagggggaaatctattatcctgagaatttgggggaataatattcagacaaaagccttcttgggtttttttccccttctttaaatgtgatagttacatttacatttattttacaaagtaattagataaaatattcatatatacaacaagatcatcctatttcaaaaatttctatattggatattatttagattttcatgactactatcatttataatgtatctgtacactgagaaaattaagggcgggctggttacatgtttttcattaataaaacatgttttctatgtcttaattacagaataaaacatgtgtgcagacactggaaggacatgcccaaaatgtgtcttgtgccagctttcatcctgagttgccaatcattatcacaggttcagaagatggtaagttagaagggtatgtttattcctgtgctagtaactactcagtgggcatttaaagcaagtaatgtctctgcattataattgtaggtttccaaggattttgatatttttattaaagtaccagacttaagctataaaagagtaaaggggcattattttcatcatcatcatcatcatcatcatcatcatcgtcatcattctcatgtattttgattctgtcacttaaataagaggaccgtcagctgtcctaaagagaaactgaaaaagcatgtgctttggagtcaaacaaacctgggttcaaaatcaggctctgttatgtcatgaatgtgtgtttgggcaaattatgaaatggaaacatatatatctgcttcataaaattatagtgagaagaaattgtgggtagaaagcatctggcacataggaaacactttacccaggaaatcctgttattatttcatgtttaaaatcgtaattcttagtttttgtttcttatatgttatgtgttatgtttatgttgcttttaaaaatcatttaaagacagtaggtcaaaaaattggtcattaagctgccaggaagtgttatctgtttgaatagaaagacttctatgggtctctttcacctgacacagtttattgtcggatgtttgtatcaaaagggagtatttacattgttctttttaggaacagtacgtatttggcattcaagcacctaccggcttgagagcacactgaattatggaatggagagggtatggtgcgtggccagtctaagagggtcaaacaatgtcgctttgggctatgatgaagggagcatcattgttaaggtaattatactatccctctcagtaggtggacataggcaaaaccattttctttgtattttagtactgtcatcttccaagtaaccagttttataaaactggcacttctttcattaagcactagacattaagcaatgaagatttaaagtggaagaaaggaaatggagctctctgttaggtgaaaaaaataatctgttttgttttggttttattcattttccttttcattgctgagagctatttttctttctttcagcttggtcgggaggaacctgccatgtccatggatgccaatggaaagataatttgggccaagcattcagaagtccagcaggccaacctaaaagcaatgggagatgctgaaattaaagatggtgaaagattgccactggcagtaaaggatatgggcagttgtgaaatataccctcagactattcagcacaatcctaatgggcggtaagccatcaccaaaattgtccctcagcttctgtgtatgttagaacaggtttgcagatccacagtccactcttgccctgtggttggcatctctaatcattcctcaatgtgcttttgccctggcctcacaatcctcaacacagctgcagtcagccatgccacttgatcaagttggcacaaaagatggagcatgtttcccatctggacttgttctataccacacaattttgaatagttaaatagtagtttcctgttatttcgcatgcattgagtttgtgtttttgtgtgctcctttgagggcaaggagtatgtcttatgctgagacttagtaggtgccctctctaaatgcttgctgactcattgctctttcaagaagaaaacctgactctgagatatgtgtcttttgaaaaagttttgggattgataataattctgtttcttatttgtaattcgaactgtcagttgaatttctcccttaagatttgtaagtcaccaaacatcttgtgagagaggagtttctagcacagtgaagtctaaacctgtggagctttaaaattattttacagcaggtctgggcatcttataatgctgtgctgagtattgaaaaagacaaaagatataaaccaagtatgccgcctagttcagtaaatggtatccataattatttgtaatataattgtcttataaaggttaagaatgcattatgcatatttcccttaatatcgtaaaacattcttggctgtaagttttgcctttggcagtcttttgataccagcctttacagtgttataaacaactttaaagatagttgtcttatgtccattgggaaaattttcgttgactctgcagcattctgttttctcattatttaaatgttaaaatatcctctgtattttgctgaatttaagtctttaaaacctggagtgagatattt

SEQ ID NO: 108573 - DNA, 1090 bp, Homo sapiens
aggccaggagttcgagactaccctggccaacatggtgaaaccccgtctgtacgaaaaatacaaaaatttgcttggcatggtggtgcacacctgtaatcccagctacttgggtaactgaagcatgagaatcacttgaacctgggaggcggaggtcgcagtgagccaagattgtgccactgtactgcacttcagcctgggtgacagagtaagactgtctcaaaaaaaaaaaaaaaaaaaaaaagaaaagaaaaaaagaaactaagagctaattcattcaacaaatatttattacacactacttgtgtgccagccactgttctatcctctgcctatacagtgtgaaaaatattcctgcctttggagagcttagcaggaaagattggcactaaacataattatgaggtgctacattatgaaagggaagtacaagtttccatgggtggattttcaagtcagagacaacaagagcagaggtgaggctgggagtagccaaaggtgaggctggaaaagggagggaagggctggagcacagaggatctggaataccatcttgtggatatttgccttctcttatcttttaaaaagtgttttaatttcgaatctattaaaagatagttggtcttttttaaaaatttgaatgttgagcttttatattttagcctgagaatatactaaaatgagaagtgatcttaaaaattggatgtttgaaatataacagagtagattttgtggttattttcttatagctcaatttgtgtattcttgttacattttaaagacactggtgaagacatttgaagtatgtgatcttcctgttcgagctgcaaagtttgttgcaaggaagaattgggttgtgacaggagcggtaagtaattaatatgaatctctattcccattttctgaattggtcaatgattgtgtaaatttgttgcaggattttgattcccgatttgttttgttatttacagcaatgttttgaggcatagactttattccttgagcctgtgatatagtttttttgtataatttacttgataacagggatgatggttttaaaatttctgtttctaggatgacatgcagattagag

SEQ ID NO: 108574 - DNA, 1065 bp, Homo sapiens
agtcaatgacccaaatttgataaaaatccccaaaaaagatgagtaaaagcattgtgaggtgttttgtctcaggaagttgtctctgctagatcttctttttatattcaaaagtaaccttaaatttctgtcccattcatgatcatcatagaagatcacagcaataaagatttgacagtaactcaacttgccaaatgagcttttaggttgtgtttaagacctgttgaaggggaaatatattttaaatcagtcttttctcagcatgcctcctagagagaattaagcccactgccctaaggatcattgtatatattgaattaacttttctcctataatggcattttttggagaatggagaaaatagttattcaaataattatctgttctgtaattcaaaggaagaatttggcttgaaaatgctagtataaactattcatattttctgacttgagagaatgtttttatttttgttttaaatttttccaattttcattgtttctgtaatttaaatccattaaaatatttcagacattcccatttgataccaaaggccatcatgcatagggatataacccttattgatcacacattatgttacctagcatttactagtatttttgacaagataaatctaccatttttctccaaagaactcaatattatgctttatggttactaggacttcatgaataacacttcttcagaatatttcctgatatgacactattgacctgggcacaaaattgtgatttgtgaatatttaaaattcattggccgggtgcgggggttcacgcctgtaatcctagcactttgggaggccgaggcgggcggatcacaaggtcaggagatcgaaaccatcctggctaacacggtgaaaccctgtctctactgaaaatacaaaaaattagctgggcatggtagcatgcgcctgtagtcccagctacttgggaggctgaggcaggagaatcgcttgaacccgggaagcagaggtttcagtgagcagagatcagcgccactgcactccagcctggacgacagagcgagacttcgccactgcactccagcctg

SEQ ID NO: 108575 - DNA, 1063 bp, Homo sapiens
cccagattatcaagtttgggagctgccccctcccccagcctccaggagctccccgcttgctcaggattgacaaatgtgtctctttcttggcagacaacagtgagctgggacggagacaagctccagtgtgtgcagaagggtgagaaggaggggcgtggctggacccagtggatcgagggtgatgagctgcacctggtaggttcctgggctgggtcaggccgggtccccagaggccctggtcattgttgaggtccagatggaccttggaaaaaggcaccatggatgggccttggttctgttctaaagcttctcttccaagggcctggaaaagatgcctgggtgactttaaaaaccaagcaatgtattttcaaggtctaggctgacccaatcatctaatcagagggaagaggtgaggagttatatccattaagcatcagcaatgagctaagcccttttgcattctataactctattctctcagaataggaatatggctcttattttagagatgaggacctgggggctctgaaagattagattacatgtccaaattgcacaactagaaagtgacagaacaaacatttgctcccaaatgatgtatatattcaccatgccaaattgtataggccaaagccaagaaggattctctaagcttctctaagatatgatctcaatctgggtcagcgggaggtgattcgggaggggaagcgtcaaggggtcctgttggtcagctctgagccacatccattcctctcagccagctctgtctgtagggtgctgcagagcactccactatacagtttaactgtctttccaaacaattggttacttaaaccaactcttggggaaaaataacagccaatgagtatttttagagttcttgccgtaagtgtgactctgctctggccaatgaccaacatctgcttttgtttcaggagatgagagtggaaggtgtggtctgcaagcaagtattcaagaaggtgcagtgaggcccaggcagacaaccttgtcccaaggaatcagcaggatgtgtgggccaggatccccctctttgcacagcatg

SEQ ID NO: 108576 - DNA, 1048 bp, Homo sapiens
ctaattttttgtatttttagtagagacgggggttcaccatgttggccaggctggtctccaactccgacctcaggcgatccacctacctcagcctcccaaagtgctgggattacaggcatgagtcaccacaccaggcctctttttaattttttttaaataactcctttattcttgtgttgctcagtgttagtttgcacacgggaatcacccagggagcttttaaaagtacccatgtcattggtctgggttggggcatcaggatttttaaaagctacctggtgattctaatatatggctagctcacagcttcagctgccaagtatatgaattaagcttatgatcagtaccaagatgcatccaaaccagtggtctcaactctggctgcagaaatcacttaataagcttttttaaatgctcacctcctcccacccaccccagagattttgatttgtcaggggtgggctctaaacattgctattttcataaaggttcccatatgtattttgtgcaaccaaaattgagaatcactgttacagtcaacacagttttatcaaatgctgattaagatttttaaaattattatttggagtaagtttcatctccaaaatgtaccaactgcatttgtgtttgattactaacactttccgaaaattatcaaaatcaaagttttttaagactgaaaatccagttataattgtaaagtcaggtggttttagaagcatggtagaaatccaccccatcttttgctccatttagtgtcctcttgataaagtccgtagtgaatctgcatcatagtgacatagtaacaaacatctctatgatgtaaattcactgtagagcttactgaggattccttctttccctataagatagtttgttctttgcagacatgatcttgtgttgtcctcattttacagataaagaaactgaggctcagagaggctacgttaatcacggtcacacacaaataggacgtggagctcccatctgtggagctctgaagccatgcttatggccatcttcaaaacagggatctgcaggctgggaa

SEQ ID NO: 108577 - DNA, 1043 bp, Homo sapiens
atcttgcattccatcacacttggggagtctctactctagaactgtgctttttgatcttctatcacaaaggtgataaaatgcactatttatgttcttcatacactctcgtgggccagagggctatgctaactttgagcacctctgatctccccagcaagacaaacaggtcctaatgctagtgagtgcaactgtgttacagaatagcctcgattcagtgataatccttattcacaaaaaaggtgcttcatcaataggagaacagataaactgtggtatagccaaataatggaacaccattcagcaatgaaaaggaacaagctgctgacacacagaacaatgtgagtgaacctcagaaacattgtgctgagtaaaacggacacagaagaccagacagtgtgattctatttatatttaaagttctaaaagaggtaaaatgtgtctgtggtggaaaaacttagaatagtggctgcttgagggaggggtgcagggggattgagagggaagggacacaaggggacgttcagggtaagggagatgttctatatgttgagaggggttggagttacacggtgcatgatttgttaaaatttattacatgatgccctcaagatttgtgcatttcattgtaagttcaaagaaacgaaaaaaaatgctaaacaaatactgaattctggttaataacatgcatgctgaagtgtatagaaataagtatgctgctgtctgcgacttcttttgaaaggcatcaaaaacagtaagcgagattgccaaatggatagaggagtaggtatatgataaaacaaacagtaaaaaattaatggtagaatctaggtggtgaatatccagatgttcactttaaaattcttttgactttgctgcatgtttgaaaatctttcacaataaagtttgggaagaaattgcatacattcaaaacaaacaagtacttcatctgcatgtctgcacttttgagtttttgccaccccagagggtcttgataggggatggctcctcacagaagtcaaatgggcagaaggcttggagcaatg

SEQ ID NO: 108578 - DNA, 1051 bp, Homo sapiens
gactggtttagttgttcattcttgaaacatttaactggcgcccactttaccctggctctgaggattcagagagaaatcagacaggggccctgccctcctggagcccatgtccggtgggccaggtgaaataaagtgacagttccaccctggcacaacccagagaaagggttcttacccactggccttgcaggggaaagcttctctgtttttctcagaaagccacccaggagcccctgaaggtatggttcacacagctccactgagcatcagttacttcttgaatttcattggtggttctcagcttttggtgtcacctcttaaaactggacagaagacttcccagaagcagcaactatgctgggaccttgctaaggacgtgtcagaccttgagaccccatggatttgggagagcattttaggtttcaggaaacatctgtcagctgctcactgtattttattggctcaaatgatcccaatttcttatttggctctgttcacaacattgttgtagacaaagaaagtgctccatgaaaaccaactgagaggcccagagagtaggggaacccagatgaggcaggagtctggcaccatttgtggggagtggtaaaaaagaacaggtatgatgttaacagagggtgttggagggaagaggagagagagcagccattgtgcagcctctcttttcccctctcagaccactgcaggatgccagcccatgagaagggaagctccaggcttggtggtcacagacctggcacttctcagctctgtgactgaccctgggcagctcactcaccttgtgagtcgtgaggattgctcaggcttaacaggtgcttagcatatcgttggccctgaagaaatattaactcccaccctctccttctcctgaatgaactaaaatatacatagttgtagtgtctacctcagaaggttattatggggatttaatgaggacctaaaatacatagagcagtacctgacatgtgggaggatactactactataactattgatatcgttccttagtctggacaaaaattgatgaaacaag

SEQ ID NO: 108579 - DNA, 1048 bp, Homo sapiens
ctggaagccagaattaaccagaattccagagttccaaggactttgttcccttggaacagtgcaatacttgttaatagaattctggggataattgaggattggtcttcaaacctgttctcttctgcaagtccctctcctgtgtcctcagtttcaataaatataattgattgaagacccctgtcataaacatgatgatcctcatggctaccaccttcagaggtgaacccctcatgagttgattaatgccactatcaaaagggcttgtgggagtagatttactctcttctactcttttgtcatgtgagaatacaatgctgctccccgttttgctcttccacctttcaccatatgaagacagagtgagaaggccctcaccagaaagcagatgtcagcaccttgatcttggacatcctagtctccacagatatgagaaataaactattctttatacattacccagtttgtggtattctgttacagaagcacaaatgcaacgaggcaatgacttcgtggtttggttagtttggattctgaagtattccagaaactcaataggtagaatatattgctgcataaaatatggaaaaactataaaaaagaaattaaatatattttaagaaactcaaatgaaaagttattgacattttaattcaaattcatattgctaagtcggttcgccagcaacagtagaagacataaactctttttatttgttcataactttaagctataaaagacatcattattaacacttttttctcatatagtagtgcagccttcaagtttaagagcttggaaaagtaaagagaacatgcagagtattaataacattatggagttgtctaggacttggtatgtatatgcttttttattcctctgacttgttcacatgcattatctcatttgagactcagagccagcctgcgagatggataggaagggtcttattcccattcaccagagctgtatactaaggcatggaggtttaagtgacttgcccaaggtcacctaactagtaaatgtcagggctgctaccaaaagtaaagcc

SEQ ID NO: 108580 - DNA, 1027 bp, Homo sapiens
cccaggccagagtacagtggtacaatcacggctcattgcagccttgactacctgagttcaagcaatcctcctgccccagcctcccgagtagctgcaactacagatgtgtgccaccatgcccagctaaatttttaatatatttgtagagatggggtctctctttgttgcctaggctggtcccaaactcttgggattcaattttcccgcctcggcctcccaaagtattgggattacaggcatgagccaccactcctggccagaaatggtactttcaagaagctgatattgcccaccctggcacagttctagggaaggatgggcagggtctgtggttttatcaggaagaagaatttagtttagcattgtgaagcctggccctggaacttagggtggaaactgctgaattatttagaacaactcaatctttattgttctttttccaagttgtgaattttgcagttcgacccaagcccaaagtgcttgtaagcctgagagaaagtgattttgatgtaaacatttgtgggaaactgcaatgacagggtgaagacgcaggctttggggcctcaaaatgacactgcctgtcctttgagaaccagtttggaaactggagccatagggcaaggactaaaatctctggtttcctggactcaaccaagacatgttcacaccttcctccataagaatctctctctgtactcctgcccacatctagaagtggtccaagatatgctgtcagttgtcctgctccaggggagtgatataccagggctaatttggaccacctttccctgcttccccagagggcatcatgtgatctccccagggcccagcaaaggggagatggggtgtctggaagaaaagcaacgtttccagggagctgcattgactgaatttacactcttgctaaatgttttacagcatatgttgcactgagtaaattgaaattgggcaggaaggtttttaactaattcatcagtccaagtaaatccctgttaagaggtagaaatgagcttttatggggataata

SEQ ID NO: 108581 - DNA, 1216 bp, Homo sapiens
agctagcatagccagctcattatataaaattttatttttaaaataaaattatttaaatgaacaaagtgagtctatttaaagaaatatttaaagtaaataatagtacaggtggcacatagctatagcagaaatcatgaaagtatcatgcaaatgatgatggaattatggaaaatgttggttttatcttatttgggtaaatacaggtgctgtgttgatggaaattgtgatgagcacatattgttcttttggggcaatatattgcatacttgaatgcagtgctattttatacgtggctaatttcagaagctaaaacaaccgtatctattaaatgctatttgatttgattaataaaaatgctagattgttttaggattgaataaatataaaatgctaattggatataaaatgcttatttatgtgaccatgggcattgccataaaactataagacagttattactgtttaatattgctttaattagaagtgctcttccaaaagttagaagacaataagcttctccttatagcagttcccgagaaaccaaagtgatattgcaatgagatcagcagtcaaaatagaacagggagattttctttgtcccaagaagacatagagtgatgttaaattgcacttttaaaggccagagtttcaataggctgctaccgagttgctgaatttaattaaatatttatttaatgtgcagtatgcaccatgctctgttagatccctcgggatatggtgatatttatattagccaaggttgtttcagatgcaagggatagaaaacttgactcaaactggctcgaacacacaaacagagaaagaatttgtaggtttacacaatgaaaagtctaagtgtgaacttctggcatggctgaatccaggtgcttgggcaacatggttgttatatagcctctgtctctcaggtttgctttcttccttaccctcccatacagcccctgacaacttgaggtcatcctgttgattttgggtctaataaggagagggatttactccacagcagctttgacatcagtcttataattgagacccattgtccaggtctgcttgttctgttatgtggggtggggatgcaatcacttgtgtggactgaaggtggtttccaaagaaaaataggatacctgctactagaggaatggaaatcgacaagtattctgtcttcaaggggctcactagcaactgggaagaaggtatc

SEQ ID NO: 108582 - DNA, 1002 bp, Homo sapiens
caagaactgcagtaacccatggaaatgaatgtttatatttctaacaaatggctaaggcaagagatgattttctgaggcttatgtctggtgaaattttccagaagttcacgctctgcaaggccttattagtagaacatggatgatgaacggtccatttcattagtaacctgaaaccttctatttggagataaagatgactgcttccatttaaaaaaaaaaatttcaaaaactaaacactcaggcatgctgtctacagagttctatgctaggtgaagtgaacggttgtgagatgactaagccagtatccctgccctcaaggggtcaaatcaggtaggtggaaataagatgtgttcctaaatcccaggcagtagagcactgaaattctgtgtgggtagctgtgggtgaaattctcaagggaaagccctcatctggcctagtaatattggaactgggctttgataggtcaccaggatctcattaggattttattaatgatggaggaagcatcatggatggaagacatggcatgagatgttgaaagggaggtggacagatgcattgtatgttaaaggaatttaggaacagtaatagaatttgcatgcctggagcggagatcttcatggtgaaagcttgagctggttaagtctaggaagggggtgatatctttgggaagagctctcaattgtttgttttcctgggaaggaaaggtctataacttttgtcatctattcaaaagggccaatgattaccccaaaagtttagacctactctcctggtgaacagtttttgtcaactaagcattgtagaacagagggagatatgcaaaattttgtgctggactgactctggggggccttgaaggccagggttaaatgtctagacactattgggacccatgacaaaaaaaaaaaaaggtcaggtggggtccaagacagaatgaaggtgagagggggtaggtgggaattggatggtgtcctgcgaaaggcaggaaagccagaggga

SEQ ID NO: 108583 - DNA, 1081 bp, Homo sapiens
cctttgcatgtgctgctttctatgcttggaattctttttacttccacacttcttcaagagttagctaaaaggtcaattcttctaggtgctacagaagcctgtgctcgcttctcctgacactgatcacacagtatttaaaatggctgtttttgcagaagcttccttttatagactgaaagctcctgtctgccaatagtctgcaagctgcaggagtggctaaccaattattattatagttagtattaatattaatagtggtagtggtagagtactgtagagaagtaatttcaggtgagaactcagcatgagtgaaatgcatcaggtatgcagggaaggccaggagagtggtgggtccatgccgtagagccccgggtactcagtttgcaaactactggtcatgatgacgtcagtcctccctaaacatgtgaacatcctcttctgagaagcacctctttctggttccaagttttcaatctcagcaagtctcaggtagcagcaaaaagaaccatactccacattgaggggtccctattctacaggcaggcatgcccaccctcatgagatattatattgaagtattctattatctttctgagctgctcaatacaattatgaagtatacacgtgtgtgatgtgggttttaagtgcaaagagaaatcaagcctcctcacccttttgtgtggctactaaagaatcatttaatctattacccagttccatgtgagcagacttcagcaaaacaaataataaatgtttgtaaccagctccctggctgagcaggcagagctgcagactgcatagatagctttttattttccttttccttgccctgccctggctgagccaaagtccctctcccagagctgccatgactcattatgtgactactgtacccctgtgtttccccactttttgtaagctcatggtatgctagtagggtgggaaaacttgggttcttgtcccagctctgctgtgtgaccttgagtgaatcacatctctcctctgggcccatttccttgtctgaaccagggttcttaaacaccctggtttttatatgaggggtctctgtagcagtctgatg

SEQ ID NO: 108584 - DNA, 1043 bp, Homo sapiens
agatgcacagccagcggatgattggaatggatggatagaaggggtcctgatggaatatcaggccgcagcaagcaggggaaagaggccgttttggcatggttgctgatgtatgggacattacatactgattgcagtgttgtgaggcaagtgtacttgttgggaaggttttctatggcagtgttgtgtggtcaaatggatagcatcataagagcaaaggcatatgtcaaaccagtgggtattttagacctacctataatttactcaatgactaaagctagtctagtgcttgaagcaagcttcaaatagtaaatatggcctgtatgttctgaatatttgtttttccaaaatttatatgttgaaactgtaaaacccaaataccccagtattaggaggtggggcttttgggaggtaattaggccataagggcagagccctcataaatgggattagtgcctttataaaacagaccccagagagactcccatcctttccaccttgtcagacatattgaaaagagaccatccatgaaacagaaagctagctctctgcagacacaaaatctgccggtgctttaatcttaggcttcccagactctgaaactgtaagaaataaattgatgctgtttataagccacccagttcatggtattttgttataccagcctgaaccaactggcacagcaatttaagacaccacctttggacatcatatgaaccctacagatgatgctaagctggtatccgtgcagggaatcactcccaaagcactccttcattatatttaggtttccctggagtcttggataacactgtaagggcaaagaaccttgtaggctctcaggaggcttcactggcagcgtgaggtcagcctggcagtttctgaaggcaataaaaggtctcaaacttggtttttaagcaagaaaataattatctgattataagtcaactatttcttcacaatgaaacatcttttatagatcttcccccacttctaacctttctcaccaccataacagtcaaagtgcatggtgagaaaagtattat

SEQ ID NO: 108585 - DNA, 1012 bp, Homo sapiens
aagttcatgcctggcacatacataatagctgcttaataacagtttattgatgtaaacttaactgcagtaagaaaatggcctctctccaagaccaaggcctcacttaaccaaaggagaggtcatcctattgaacaccttcccaaacagattccctttttatttgtgttaataccctatttgtgttatactgcatttgtgttaatatcttattaagtttgtagttccagtttgatgtttattgcagtttattctctgtaacactccagcaaaatgttaattttaccttatatatatttttaaagttctatagcttattaaagtttgaaatgtcaaggtttgaaaacgccatggcatatcatgccgtggactattcagaccttagctgtgctaacatgcaggtgcccctgtgggaagtggaggtgtgcacagtactccaaacttgcctccctcataccacagagcctcttcttcagagagtcttgatttctcagaaggtacttcgggagaccctgatctagttattctggtatgtgtggcatctgtcttctaacttgataaccacgtgttccagggctggcaatgtgttttacactcggctgttattcctcagggcttagtaggtattgaaggaatgcctactgaatgaataactaaatctaagtaggtctgtgaaaaagacaaatagatataagttccagggtggaataaattttatttaattctaatttaactcaatgactatgttcaggtgactgcttctgtgccaggctgtgtgctgagcatggtgaatacagaaatgaagaagaccaagcaccatccccaagaaatacaaggacttgaaagagagacagataaaggcacttcccaactgtggacaaatggaacagataatgaatttacaaggcttggaaggtgcaaagaaaaaggagtgtgcaatccttaacctagatgatgactaaaacaaattgtggaaggataactgaattcactgtggtgacaagaatggggcagg

SEQ ID NO: 108586 - DNA, 1064 bp, Homo sapiens
tcatcttgggtaaaatgctcaacctcttctcctcaagtaggaaattattttttacttacctattgttgtaagtccgaagtaaaataacctacagcgattgtccaatgccctgaatgttgcattagaggcgagctatgcatgatagtttgcttctccctggaggacatagctgtcacacacacacagagacacacacacacacacacacacacacacacactctctctctctctctctgtctctctttctctctctctctctatggtgatactctctctcttcctcctgttccctctttagtactaatcactgtgtagcctccactccgtgctgaggatcctgtacgtggattcaagctgtcaccacacaagacagggccagaaagggctccatttgtatattattatttatctaatatatattatataatagcctgttcatgctcatttccaacaaggagcaaaattagaaatcacatctcttaatactttcagaaactgaatacaggtccctttaaactccattcccattagatagtgtcttcgaaacaccttaagttgctgtgtgtatagtgtggtgggggtaaaggcatttcaaatcccttatctccaaaaggaaagcaagctcttccttcttttccctttacatcacctcagcaaggtcagacacatcgtgagaggaagcagaacgtgctcaggcagaaatgagaagctcaccagggactttggtaccaagaagaaccctgggatgccttgttgagctcacctttccatcctggacagccatagtccttaccttccagcacagaatgacacatttacaggacaaagaagaacttggggggcccttaatagagcaatgtgcagccatggaaattcagactcttgaaaaatattttaaagagacaaaatacgcccaatattttgttaaataaaaaaagtgaggcacgggattgtatgtacagtctgatcatgaatatgggttttttttttcaaagtgcacaaaatgaagcctggcaggactgacactaaaaactgatagataactttttaattatttcatta

SEQ ID NO: 108587 - DNA, 1018 bp, Homo sapiens
ctgagctgtcttaacactgggtaaagagggaggggaggagatgtggaggacaaaccaagagagaacagcaggttcaaatatacgaggacaagaaatgcacacagaagactctgagctgtttaatgttcttgcgttatcaaactggaggcaggaaaaaagagatgaagctgggggaggggtgagcaaggtcctatcctggaggaaaagcctattaagatgcttatactcaatgctgcaagcagcaggaagacatgccagctgttcagcaagggctttgttcttgcttatcattggcaaatggtagaaatttcaataattttttcaacatttacctgtttttttatatggattgctatttgttttattgggcttggatgtacacttgtctgtaatgagtggacgagaaatgttgtgaatatacttagtcttttaaacctggaaggtgctgagcaaatgaggaagttcagagcctatgaataactctgtctacccccttcctgtcacacagtgtatgcttgttttttcttttcttttctggcaaaaaaaaaaaaaaaattataggaaggatccctttgcccttccgacagagataggtaggagacaaggaggagtaagaataggagagtcagttaatgacttggcagtaggctgggtggaggacctcatcccctgttcatttcctctagatcttagcagaacctttgaaaattaaagaaggctcagctgagcagaaagagtttgggtcttagtgtcttactgacctgtattcaaagccaggtttaggcttaggcaagttttcaaattactctgaatctcaaatctcctttgcaagggagtccatgatcctgcactggggtgttaaggccattaaaagagacagtacagctgtaagtacctggcccagagcttgactgagtaggaccccaggtggagctcaccgaatgttggattgctcctctcctgcctctcctttcggcgtcacttctctctgcctctctttctgtaagtgcacgagctt

SEQ ID NO: 108588 - DNA, 1029 bp, Homo sapiens
gcagatgtggggtggggacagacccacagaggccctctgggagaggttgccatgacctggagtgctcactttagcactcgccctgttgacccaagatggtcccttttgtgagggaggcaagcagaggcaggaacactgagcccaggcagaaaagaggccgccaggaaagagagagcagggcagagactccactatctgtctcattttgtgtttttctcaacatgcctttagaatgagattcagagacagggttagtcctatgcagagtgcagaggagtatggtttagatgctatcatcttcagcatggcccagggtcaccaatatgttctagtcagctccaatgctgagctgaccaacctcaatgactttatgcttaggaaaaatttgagtttctggattacatgtcaggaatgcagatgcttttatggattctaacagcccatagcaaggggttaatgtaaagtgccctggcaagaatgtctctccctgttatagcatgagccaggctgacactgagggaggctactcatgtcacatgggggttaagctgtctttgatcctccatcagagctgatggctggtgagtgcttgctgggcagggtaggactccccaggctctgtgttagaaggtggccaaccaatgggtctcctcgacttggaattctgtgaatcctgcctctccagtctctcaaagtgttagggagacatggccaagccccccctccatctgtccttgggaaaactttctggaagcttcctggctttaggaagcatttaaagctcccagaggtggctctgggctggggtcagcagcttcacagggctctggtcccggtgtgtggctaaacagctggtgaccttgggaaagactctgaactgtccttttgggggaatttttaatctataaaatttttcatccataaaatgcctgaaagacctaccacactgtagtattagtaatttaaagatcattcccttaatgaatactaaagcacttagaaaaacataaggcattatcaaaggcaagg

SEQ ID NO: 108589 - DNA, 2120 bp, Homo sapiens
ggcgccggagactcctttagccctcgctccttgcagcgctcgcttgggcctctgcacgtcactcacgccccacctcggacctcgggccgctcatttccgggctcggctttgcaaggtgggtggtaagggggctacgggatcgagcggggaaggctttggtattctcccgtggttgctgtagggtgtttctagcccttggaaaatttcttgcccgaggttttccaggtggtgaatggggtgcaaagctttccagtacctttggggtcagattcctttcgagaaaaccacccctcttgaacaccgcttgcttttctgctgcttaggagaaagtaggagtggagagaggtcagattttttgaagatagtgttaatagttactatgtgtgtgcaagattaggactaagcctaaagtcttagttccctgattgccaaaatgagtgttagagcttccagtttagcctcctgtttagatttgctccttctaaatcatttggagaatcatagcaattttaagagttacttatttggaggattataaagagttttcttatcaaaaatgccttcggtgaattatgctgagactcttaccggcatcttcttaaatcctgcagtttttagatcgacttttaagaatatgaaagaaatacacacgcagttctattcacggtgccttgctttgagttggacatatggactctattgagccagtgatggcaatactttctttaggttggcacactttcatcaacaaatatttgttgtacaccaattatgggccggccactgttctggcataaaaacaatatttttctattgatctgtgagacccagtttaggcagtttgctttccatatttctgaaatgtttactgccaataatcaggcaaattaaatctttttaaaaaaattctgtagctatgtagatgctcttgaaaagatctcatgcaaataattgagctccctcttgtaattagatctataaccctgaagtgaggagaccgcagatgtagtctagcactattttaatttgggtgaaaaatggacacttttatttcaattgcttcatctataaaattaggaggttgtattatatgatctctaaagcccttctctagctcctaacatttctattattctgcgttcaggattcatgtatcaagtttagttaaaaatggggcatacttatatttgaaataaatgttagcttgattgcactaatttcccactttggattaggatcatcattttgttataaaaacatgtaaatataggttttctggtttaagaacaggaatgggaggtgtttgtagcatctaaacacacagattaggagctccatcccctcccccccagtctagcatatgtagttagagtattaaatgagatatggtatgtaggatttgatacaagataggtgctcagccgtataatttctcttcctttgcatctcatcttgattttatttttatatgtggttacataagtgagttcagtaaaacacaccttatctttttaaaggaagcccagtatattttaaaagaaccaagagtaacctttcacagagtatttaatcttaggcaagggttttccgaatatggagcctttaagttgtttttctgataagtagaattgtaatattcaaatatgtttatcggaatcccacatttctaatagcctagtagctgtattgttaaacaccagcactggaccttggttctgggtgaaatactcacatgcataactcgtgctttctttaagacaccctttgatcccattatgcttttgccagagttaatattcagagtttgtaaggtcagtagttaggttaattgagttaaggaacgatatcatgacagcctgtaaaaaaggtgtaaatgtgatttaattttagctgtacctctaatgtatgtatatagagatgaaagcactattaaatgtatttttaaagactgatagaattgtacattgtctagttattgtatcagctgcatatatctacagaggcagctcattttttttctatttgagggagatattgtctcaaataggagctatataccttaagattttaagtggatgaagtattttctttgcagctcttatgacagataatttaatata

SEQ ID NO: 108590 - DNA, 1119 bp, Homo sapiens
ctagggaggctgaagcaggaggactgtttgaacccaggagttcaaggctacagtgagctatgatcgtgccactgcactccagccttggtgacagagcaagacactatctcaaaagaaaaaaagaaaagggatattgaacagtttttgttattccaagaattcccccacaccccttgaagtcactttcttccctctcctctaccccttggaaaccactgatctcatttctgttcctctcattttgccttttctagaatatcataaaagtgtttgcttaacgagggggataatttttttaacgtcaaaaataaaagccttttgtgcttagctttttcaattagcataatgcttttgagatttacccaggtggtggctttttactgcagaatagtattctattatatagttgtaccacagtttgcttccactagttgatggacatttgggttgttcccagtttttagctatgaataagtatagctattataaacattcatgaacaagtctttctgtggacatgtctgttcatttctcttgggtcagtacctacaagtgagatagggctgtgtggcagtgttatgtttaactctgtaagaaactgacaaactgctttctaaaatgcctgtaccatttttaattcccaccagcagtgtaagagatttccagttcagcggttggctgtttgttggtcagtctttttaattctagccatttaatagatgggcagtagtatcttataatggatctactttgcatttccctgatgacaaatgatttgcagaattctgtgtgtttatttgcgtctatgtatcactatctgttaaatctcttactgaattacttgattttattcctgactgtaagcacttttgcaggtaatgatttgtaaatatttgttctcagtctatggctttcattttcttctcagtttctttcattgtgttagcagtttctttcagagtagaagtttttagttttgataaggtccagtttttcagtttttttctttaatgatttgtgcttcttttgatgtccatataagaagtctgtgcctaacgcaaagttaaaagatttttttccagatgtttttttcctagatgttttatagtttcatcattt

SEQ ID NO: 108591 - DNA, 2156 bp, Homo sapiens
ctacctacattgtacagttttccacgtgtaggcctgacaggtattaattgtgagactcaaatgccaattttttttcttttttgagacagggtctcactctgttgcccaggctagagtgcagtggcctgatcatattcactgtagccctgaactcctatgctcacacagttttcccacctcagcctcccgagtagccaggactacatgcatgccccaccacacctggctaattttttaaacaaattttttgtaaagtggtgtctggctatgttgcccaggctgatgtcaaactggcctcaaaccatcctcttgtctcctcccaaagctctgggattacatgtgtgagccatgcgcccagccctcaaatgctgtatttttttgtaggtgaaatacttctgaatatttggggatttaaaataagagaactatgtatggttaactatcagtgagttcttccttattgttcagaagaccatttcttcagtttgaaaggacaggagtttgaaagataggatatacttcaaagaatggcctagattttaacagagccacaagttatatatatacatgagtactaaatcaaaccttaggacagtatttaaagccattatgtgacttaccagtacaattttagtaacagcacctatcagttgaagtgtttagcagttattcttgccagatagttactaagctgtgttcattttagttactgaagaagtttgtatgaaatcaaataatggaatctcttaaaaatcagtttagtcatctaacattaaaaattataaattttagtatgttggcaaagctccaggtacccatgtggattacagctctgggcatatatactaacttatgaattaagtagataagctgtgttcttttttttttttttttttagatgtggtggtacagtgggagctattctgacatgtccactggaagttgtaaaaacacgactgcagtcatcttctgtgacgctttatatttctgaagttcagctgaacaccatggctggagccagtgtcaaccgagtagtgtctcccggacctcttcattgcctaaagtgagagcatagtattcaggagtgttttttagtttgtttgcgttagtgagttccagatgtttgtttacttatattctgccacattgaaaatgattttttataaacctatttacagaagttactctgaattgtactcataaggaatgataatccctaatggagaagaacagttagacagataagataaagtgtaattttacttccaaatcatgtgtatttagaatatttctacatttatccagtggagttttttctaaagctattataagtattttattttggattattcatttacttttgaaatgtgataatgtttaatgctaactcctttcgtgtatatttttaatgttccaagtaagtacatccaattaatgataatctgtgatttttatgtaacctaagtacaactgagacagcagagttctaatgctgttcagtatttgtttaacatttcctgatggtttggaaaagatttgtttttacagtttgccatacttcattatgttgcaattggatttgaaatttcaaaactattaaaattaggtttcgtatgtttatacttgtaaataatggaatgccttcgtgtctgccttatcagctcagtgtttgaacttagttcagtagtgtttattttgtaatagcaaataaactcattctgtgtatttacctttgttactaaaaggtttcatcagccttttcttttttcaaacttgtttacataagtacatgaataggtagaataaaattgataacagttttgaattaaaatgccataagtggtggctcacgcccataatcccagcactttgggaggctgaggtgggtggatcatctgaggtcaggagttcgagaccagcctggccaacatggtgaaaccccgtctgtactaaaaatacaaaattagccaggtgtggtggtgcgcacctgtaatcccagctactcaggaggctgaggcaggagaatcacttgaacctgggaggcagaggttgcagtgagccgagattgcgccactgtattccagtctgggtgatacagtgagactctgtctcagaaaaaaaatgctatagttatacataaatacttctatctgatt

SEQ ID NO: 108592 - DNA, 2200 bp, Homo sapiens
agtctggctactcagttcaggccttaaattaaccattagacccaactacctttaaaaagatccctcttaagcagatagatgtttgagaactacttggcctagtctgttaactctgaattaaaatacctactcttcagtttctattccttctcactgccaaaacttcatttcataacttactccaggaaagtcttctgtgacttacacatggctctgttcctttctctgctgggcatatatgtatctaggttgtatagtatttgcttgttaatatggtctgttaatttatttgttttgttacaattctttttaccaaaacaaaacagcaaatttcccaatgtcaggggcctcgccttcttttttctatctacttactttttctagttataaacagctaattatacagttaaatactcagtatagcaacggttaactgagtggcaggagaaataacaggccaaccattctggtaccttaaaggacattagggtgatagattctgctacagcatttcaatggaatggggatgagataatactgtagtagtaagaagtattgtccaatgttgagtaaaagacctgaaaactaggaaggaactacatttctaattggcgggtagttattaagctttcaatttgctggtaaagatagtaaaattaaggaaatcgaagataagagtagcatgatcatatgaaaataatgtagaactctttatcattgtgtcttaatctttcaggaaagaatctgaacagattttttaatcattactagtaaatctattatcagtcttcaacaatttatgctatgtcatgaaaaaacaatgttttgtgtgtgtgtgtgtgtgtgtgtgtgtgtgtgtgtgtgtgtgtgtgtgttttctttttcttttttttttttttggagacagagtttcgctctgtctccaggctggagtgcagtggcgcaatcttggctcactgcaatctccgccttccaaattcaagcgattctcctacctcagcctcctgagtagctgtgattacaggcatgcaccaccatgcccagctaatttctttatttttattagcaacgaggttttaccaggttggccaggctggtcttgaacttctgacctcaaggaatctgcctgcctcagtgtccaaagtgctgaaattacaggcatgagccaccatgcctggccacaaatttttaataagtaaggaaaactcaccagagaagcacaacataatacaaatgtactggatttagactctaactttatatacaaagtaaataaagtaccagactttgaaagatatttctgatagaattttttttctctctttcagggtgatcttggaaaaagaagggcctcgttccttgtttagaggactaggccccaatttagtgggggtagccccttccaggtaaaaaaaaaaaaaaattgtttaaagcaagttatggcaatctcttttgtttcagcacacctggatttaatcatttatagatacagttaaatttataaatgtagtattcaatgtttatgggaagttaaaatacttaattttctttttaagaatttcagattctagccagaacaaatttatataataaagtaatgtttggtggtaggaaatgatactggatattttgaagacttaacagtatttcattgctgttagaaattaacagtagtaatatgaatacaaaggctatgtttcataatgtgagggagaaggtatagtatttgcattaaattattgatagtcttatactgggggaaaataataaagtatcgcatattatacctagaagtttaaggaacagtgtatttatagataagagttttaaatgttaaaattctataaatggacctgagatttttttgggggagatgttgtaatcaaagttgaaaataatgaatatattatatatctttatattgcatagactaggagatataaaattactaatatttgcaggataaatggaaatactctcgtagctagtggcagtgtattgagtcttctggggagatgcttatcctctcatctgaccataggagttagaagaatttgggggtgcagaattgaaaatctacacagggctaaggctgcaaaatactcctgatattttgagataagtgtttgctagatttgtgagtttaactaaaccagctcttgcatcttgaaaaattttgactctaagaaaggtaagcatt

SEQ ID NO: 108593 - DNA, 1033 bp, Homo sapiens
aacctcttccatgatagaacactgtataaagttcatatttagagtgaaaatgctttctgtatccaaaccatgtaccagatccatgtcttgttatttattacgtttcaactttttatgggttcttttctctctttaagaaaatatccaaaattgcatcctaattataaaacaagttaaaagaaaaaaaacaccattaatagacagttcatgtatattcttccagtaatttttctcggttatcatatacataaaaacatgtatactttattgtgctttacataaactgaataatactaaatgtttaacctaatctaactgaagtttttccatgataatatgtggggtgatttttttaaaattgtatagcattctagcactaataaacatttccttattatacatttagattatttttagattttcattgtataaacaatggttcagtaaacatacctcaacctttatctttgaatactttaggaagtatatttttttaggatggtcacctaaaattagaatttctggataaaagggcatatgcatatttaagactagtgaatattgaccgggcagagtggctcacacctgtaatcccagcactttgggaggccaaggcgggtggatcacaaggtcaggagatcgagaccatcctggctaacacagtgaaaccccatctctactaaaaatataaaaaaattagccgggtgtggtggcggtcgcctgtagtcccagctgctcaggaggctgaggcaggagaatggcgtgaacccgggaggcggagcttgcagtgagccaatatagggccactgcactccggcctgggcaaaagagcgaggctccgtctcaaaaaaaaaaaaaaaaaaaaaaaaaaaaaaggcatactggatttttatcccttatccatagccttaccaatgctggctactgtccatcttttttaaatacttaccaaatggactaagagggatttttcactgttttaatatgatttatttaatttttggtgcagtcatactttcttgtaatttgtcat

SEQ ID NO: 108594 - DNA, 7557 bp, Homo sapiens
tcttaaatactttttgtttaaattagttattattttgtttttatttttttttaatttcattttttctttttatcttcttggttaccaagttttagtgagttaagtggctgtcagagtattggaagggggtctgtttgaggatgaatggtaggaattttacatttgatgttgtcttattttaatgagtcaatacagaaagtacttcagagtatttatgaaaagtgtaaatctaatgttacatgagaatgtggctaggactttatggtttttaaatttctccattctaaaattatgaagatcaatttatatgtaaatcttacgcattaagaacatgcttattgataaatctaaatctctattttagagcaatatactttgctgcttattcaaactgcaaggaaaagttgaatgatgtatttgatcctgattctacccaagtacatatgatttcagctgcaatggcaggtatgaatgtataatattaaaaaaaaaaaaaactttctgaaacctagaggcttaatattgaattataagtttgtagtgaaaagttgatgattaatgtgcttttcattgattagatgatttttacgtttatcgatataaaccaaattaggtatatgtaaaatctgtcatcagttgacatttttgtagtcaggagtttacatgctagggtacaagtaatatatttatattgccttgtgtagtccactgaatgtttagtgatcattgttaacagttttaagaatccaaccataattacactataaataagttatggagctgtaatttactcttctctcctcaatttctgttagtgccttttccctttttgctgcatgttttggcttctgtctgaaatgtgtcggcaattcttggtaaagtattcattttgtcctgtgctcaaatgctgaaatttttgtgagtgatgtattattattgacaattcagttactatgtgtattttttaaaattgtttattattctacataattcacactagacagcacctgaaatttagacactggctatgtgtacatgcttactatagaaatgtttccaggaactctctgtttctgtcatcactgataagtatatatgattctgaattaaaataactagttttaggtctttaccctgccataaagataaacagttggtttgaccaatctggttctggaatcatttgctgctatgcatgttagacaaagccacgaactttgattttccattgaaaattctccctaatatctgagatttattgtatatttactcatatctcacattttcaaattatgctgtaactttataaactgtagctgctttcatcagctattgatcaataaattgaatgtcaattatgtgcttaataatgagtgccttaaactgttaaacacttttggtttagaaataaagtgaatcaatttgacctatatacttcatgaagtaagtaagtttgaaatacaaatttctgaaaggtcaatagcccttatcgtattacaaattgtttttaaggctttttgtatttattaattgtcagttgattcactgaagctttaaaactggaagggacaatccaaaggtcaaaagagtgaaatacaatcatttaccaataaggaaaccttgggcaaattatgtaatttatgtgaacctctcttagcttacccatggaatgagtcaagtggtctacatagatttggattttgagaattagttctttcatttagtgttatagagattatcttgttacaactagaattatttttaatgtaatttttacagatgttgaatattagtagataggatttttcccctacgaatttggatgtaaggtaaaggttggtggccagtgacaaaccttataaccactttatcaggttctttaaaaatatatttctgaattaccagtgattatgtttttggcttataacctcagataattataaagaaatgttaatcttatttgaaagaattggaatctagaaagttagatgagcagtcattttatattgatatttgttatatcagtatagcaaatgcagaggttcagaatatctttatttccactggaacatcttatttcattggagtatctcatcagaatttattactgtatttgtatcacattgcaaagaatttcagtagaattgtcagtttgcacttttttctcaaatgtgtacaaatgttaacatatagttcatttttatctgtacattgatgccatttcccaacttgaattcctcaagttttggtaaacttacaatctcatacttgttcagaggttattgcactgtacacttactgtgtagaaaatactgtttgaatttgtttgcagttacattgttctgagaactgtgctctcagagcttctgtgcactattcatgagcattaacacttagctttgcagttttatacataactatatggttagtaaaactgaatggtccaatgcagactcattaaagtaggcttttgccccctttgttcttgaaataatctagaccagattactcggggttttttttaggattatttttataggtctaaatatgaatgatttgggggtatgaagtacttaaagatagttctgtgaaaaatcattttcagctgtctattcaagggaaaaaatgctaaccttgtcactttactacacaaaaccacactaaaataaaccattaatgatactgcctgcaagattttaacacaccagatagcacacacattaaggatttataaggcactgtacgtaatttttattccaagtgacctctcaattcattttcattttgcattttatccatatgaactcatgtttaatttagataataaaaatttattttattaaaaggacagtttatttaaagtgggtctttttatttgttgtagtgcatactataagaatttgtaagcctctaaagttgagctataaattttcatgcattaaaaatttgtttcagttgtgaggatatttaatcagattaaataatgttgactcttaatattttgcctgccttttttttctcctacacatgacctttgacagactaagtatatctcagctattgagggtatctgttttgttgcctgtatattttgtttaaattaacttgtatattcctttgtatacacctaggcacagatgtatgcaaaaaaaatttgttaaattacttctttctttatactaattctcaatttttaaaagattttatctggcatgtatatacttttatatagaacattataaatgtaaaggaaatgaattctaattttaattggattatgtattcatacagttattctcaatttttaaaatactaataatgtaatcattgaatgtttcctacatacgtagtgggttttatttgctcacagcatacagttatttttcaatttatgtttttctattagacttaaatttcattataataaaggcttttactcattaaatacaggtattgtcttgcatttatgaaatattttttaaaaatattttatttgtccatggcagttaattcagccagatggatggttggacagatgttttgtgtgtttgtgtgtaaacattcttcctgttttttgttttgtagaacacaagaaattaaatacaaaataatgcaaaatatttcataagtatggatgtgcaatattactggccatagtgcaaaaggtgaaaggtactattgtagcaacgtattctttattttattaaaaatttatataaatagctccaaaatgaagttacttgaatattctgttggtttttttttttttaagatttattaagtaggctgattgttaaaggatagaaattgtgttttcatctccttaattataatagataatagtggtaggaaaatgggagatgatgatcccctctaaatattcccttttgacaaggttagcattttttctttaaggcagaattgatcttcttttaggtaagtatttagattctgaaactgctgcagatggcaggattttcagtactcggtacatttttttaaatggcccattttgatattcctttcttttttttaacttaaaattttcaaaaaagttagatctcacagtaaatatttctcaaatccttccaataggattcaatttgtacacatgtttctgatgaggtcactgcttgttgttatgatacagaaaagcctgtgtctattttaggcatttactgtacatttctcccgagaaaagagtgagatcgtgtcatctcatgctccccatccgcaggtcacttcctgtagaaatatggactaacttaaacctcgtgagtactgatctgagcatctcttgcagcctgtagtataagaaacccaccctgggattttatgatagctgtggaattagaaggcgggaaattaacttttatttcctgaatttgtgtgtgcattgctaagtctgattcctttataatattccttctagaaggaagaatgaggtatttttcagtcatcatgtaataaaagcctggggtcttcagcttggccataacagccttgacctccaaagaatgtaataacaatatatatatagctgtaaatggtattatactatcttaaaagttttagataaaatcatagttctctttgcttagcataacatatttaaaagcctaatacaatgctttccattcttttttgtctgttgatacttggctttcttagaactcttttgcaaaaaaaacaaaaattaattactttgcaaataaatgcaggataagaatatatgggatcttagctgttttagttttaattacttttaaaagtggtgttaatacatttaggaggttaggtgggctttgttcttacagaagttgaaataaaaagtactgaaaatgcaacactacaggtatcactcacttaatgaaatcaacattttcagcaagtttaagcagaatttttctgttaatctggtttttaattgctcgacactatcaaatggaatcttacttagataaagcaaaacttttaaagtagcatttttaaaaattttttaagctttctaacatactaaccatcctactaagagtatggccaatatattggcactttgctttaactgactgtggagcaatattagttcttcttaacttacaaatggatccctcatgtcgtcttaagttcattttcatgtttcactaggtgctcagaatcttaatataaattggcaaattatgaaaatgtcacaaaattaaaatgcaaaataaaaagtaataggcaatttctaaatttcaggggcaccattcccagtatctttgtgtgtgtttgtcatataagtagtgggaagatatgtttagcttgggctaacctcaaattgccttaccatatataatgctaagttacgataaatttttgtttttttccattggcttcatttcttagattattagattatatttattagatgtaattagcctagtaatgtctatttagtttgttaaagtgtctttggttaggagaaagtaatagcataaaactcaaggacctgagtttttagcggtaaagggctaatagctaaaactgtggattgtgtctagattctttacctaacccaatggtttgctggcatttaggttagtgtctttataaagagctagctctcattgggagagttgagccagagcaaccatagtaaacatagcttactgataatagcaattacgtagggataagataacattctctcacttacctaaattttaatgtgtcctgttacataggttaatttgtgcttggaaatgaattttagttaagtgagaaatacctgttgtttgctttctgacattatagtaatatgtacagagaataatttaaaattataatttatgggtctttaaaaggttttgttcctaacaacatttataaaaatttattgtactattgtaaagttttttatatatgggtttttttccagcctcaaattcttttgtgacttggaagagtattatggacagaagcttgggtactgcttaaaatttatgtttttagaagtagaacttttatttaaaaaaaaaaaaacttaggtgctcatcttcttttcaaataagtataataagatgaatgagaatttttacctagattggctgttttttaaaaagtttgatgtaaagattcccagttttaagcttttaaaattcaataaaaagcaaatagtttttcttaagatttctataaaatgattaataaaaatcattatagtgatgcagaatattttgttggtttatgctgcttagcagctttttactcataaacccttaattttgctgtacagacatatttagctattacaaatatttaagtttacaaaacaagaatcattaaattggagtttgaccagaatattgatgtctgattgctttaaaatataatttgaatatcctagccttttcatgtagaaaaatgaggttcaaaagaagagaaaaataatactctataactttattctcagttaagctagaaccatgcaagaaaatatttaaactggtctgatagtttcatgtttttcttttcttttcttttaccaagaatatatgcatgaaaagaaccttttatttaaaaagatgttcctggcagcctgctcaacactttaaattttatcagtttagtacctgctgatgcgtctaaaactgttggtcccattctagttttatacttacatatgtagtattaaaagcacttaagagaaatgtagaatatataatctttataaaagtattaaaggaattatttaaattgaatttgtatcccatttatcttgcttgctaaatagatttaattggagcatccatttgtataacgtctggctatttctacaatgttaaaacagtgggttgaggaagtaaaatttgagttactcagttactgacatagaaaagaaccctgtgagaccaaattcagctttggaaacaatttagtgtaattattttgcatatgtagatacacctttgaaagccaagaaaggtttatgattggatctgtactatattaatttaaaaacaaattattcttaagtatattgtagcatttctgttcctgtaagtactttactcatcttaaatgtactgatcattagccacctttataaaaagaatgtgcctgacccactagtatttgatagaaatattaaaacagttaagatccttaaacatttctgcatataattttttattgagtaaatgtaacttaacgtaagtagttctatgaagtctgtgtaaattaaaaccctgttttgtgtagatgaagcaatctttataagtttctgtcatcaagactgtattttgtgtgctatttttccatagctaggaaggtggcaagtaaaacatatgcactatcctagaaacatactgttccaggtagatcttaatttactacctggaatgagccatcttaggtgaccaccattctgcaccaatacctagtacataatactttagttttaaagtaaactagagctgtcttctaccctgagtttattccatgtctataaaagagggaacttccaatttgtgactttttgaacttttgagtttttgtatgtgtttaagtaaatga

SEQ ID NO: 108595 - DNA, 3772 bp, Homo sapiens
tttgacatttgtgtagaattcattttgaatgtagtgatttgggatgctaatcaaaccccaggtaactgttttttttagctggttttaaggatcccaagtgcatgctttttagccgtagaatacacaaaatgtctatgtgtttgtagagatggatttctgaattcagcttagacagtagagagcaccctaaaggatattctaagtaggttgggaaagcaatttatattcattttgcttttaaaagaatctgttagttaaggacagaatttgagaattcatatagattggaagtgaagacaaatgtttgtcgtatgtgaaaagtgtaatatatacataaattagtagtttatttatatacattttcttgaatgtagatttatctaatttttaaaaccttaaagttaatagtgaattcttcatttttaccagagttcattttaaacatgtttgtttaggttttactgcaatcacagcaaccaaccccatttggcttataaagactcggttacagcttgatgcaaggtatgttaattccttaaaataaaattggttaaagtggatttaactaattttttttctacaaagtttttctttcctttgctgctgaatttgtttgttgttgtagtttaattttgaaacttgggtctgccatcagaaaaaagataatgtaagagttgacaatatgaacttttccaggtgaaaaaagtatattattaatatgtgttgttttgttttgttttgttttaaaaagagtggctagaaagataccatagagaaacagaaaggaaagaaagagatagattaacccagcccaaaaggtaatactttccttacatgggtacttataattggcctcgcagaagctaagtaagccacaaggtcagctagtctagactgaatctttgaggatcattgctcaaatttagtgaccttgtgaatagagaaccctaggctgacagacagttctcatatatcgtctgttaccactgaccactttataatagcaagattcattcattcaacaaatctatattagcagatactgctacgtcttagagatgcaccaggaaacagtggggacttattttaaatggaataatcaaggaaaggttttttgaacccattttaagctgaggaaccaatcggtgcaaacctcagaggttctaaagtgtagggcctttggtgttctgggaactgagagtaggccaaaagcagtgctgcgtagggtcttgccatctcaactctcctactggctttagaatagagactcttaagtaacgagatggtcctatcttatatgttacaataataatgttaatggttttaaactattttagactttcagtctggagtaggttctgtgtataacatgtttctactgtttttatattttggtgtttgggaaatagtgttatgtcctataggctttaggtaaaactgatctaataaatcattaacaattatgcctgcttaaatatctgttttccatcttctgttatgttgaactatatactatttggaaacttgaaaagaaatatctaattgtttcatctgaaatagatcttttaatgaaatcttaagtgttgtagcaaaactccaagtttatttcttaaagccacatatctgaaaagtagtggtagctaagacttattccaaagattagaaagtacaagatgctagtccacattattctattgtaaactaccagagttaggtttcactatgtttagcgttgctctatgaggaatccaggaaaagcatgacttaaaactctttaatattatttttttccacttataattgtaacacaagctggcacaattcttaggcttgtggggttggggaattggataggggtggggtaataatgaaaggttgacttgaggattctggtttataaggctgagggctgagcgcagtggatcatgcctgtaatcccagagctttgagaggccagggcaggaggattgcttgaggccaggagtttaagaacagcctgggcaacattgcaagacttaatctctataaaaaatgcatgcctataatcctagctacctgggaggctgaggtgggaggattgcttgagcccaggagtttgaggctgcagtgagccatgattgcaccatggagactccatctgttaaaaaagaaaaaaaagaaaaagaaaaaaattaataaaaaaataaaaatagggctgatatgtcacctttcaggatttgtatctcttttaactttcttgtgaggaaggatctttaatgaaactagttacagttggtttgtggatcatttatctaataggtattcaatatctaaagacaatccattcataaaactggtggaatctgtaggtaattaagtgggtgttgtagttgtgattttattttatgtcagaaacaagttaggtataatttataaataggtaaattttctgtttttttagtaggtagcatttaaacctgtctcttatagataaggacctgttgggggaatcagtgtaaggtaacaaatattgttaaaactcaaaattacatgtgtaggagatgttgtattctataagagtaggtgctgcccccttaagtagaactaaggaaattgtattaggaagagtactgaataaatataacactacagtttctcatttactagtcaccagggagactgatatgaccattgcctttaaatgatcatagggaatttgacttacattcaccctatcacttcttgggagaatatgagtggggttgaaagagaatccctcaggtgcacagaattttagttaatcatactgcctggtttatgatattctatcatcattggtgtctcagtcattctatttatgttactaaatgcaaaggaaattcagcttacttagaactggaattaatacagtgtgaggatttttgtttactttgttttgtttttgtcttgagctgcagtcagggtgtatagttcctaaaggattttgttgcttatccctgccatgtgaaccccaatgaggacatgagaccgaagattcagtgtagtgcattttgcattcagtaaaataaactatttacatatcacccatttaatatgacaaatttgggacaaaagaataggaaatctaaaatatgaatattgttttaaaattctaattcttcatgagttaaagaaggccattcttttattattagaatgacatattttattatattttacttactttaaaaaacctatcagtaagatgtttctttttgcttttcaggaaccgcggggaaaggcgaatgggtgcttttgaatgtgttcgtaaagtgtatcagacagatggactaaaaggattttataggggcatgtctgcttcatatgctggtatatcagagactgttatccattttgttatttatgaaagtataaaacaaaaactactggaatataagactgcttctacaatggaaaatgatgaagagtctgtgaaagaagcatcagattttgtgggaatgatgctagctgctgccacctcaaaaacttgtgccacaactatagcatatccacatggtaagaagagttatctattaaatcagaaatattttcccaccccagccaacagctcacttattaaagcatttataattttactgcattctggtataacaaaatacaattattgggagttcataatgagattaaatctggttaagtaatgtaggctgtattaataggtcagtattatgctatcaaatagcatggtggtgattgagcatgagctctgaagtcagtcaaattccagccttac

SEQ ID NO: 108596 - DNA, 4257 bp, Homo sapiens
tttatcgtggtctgacaactcatctagtgagacagattccaaacacagccattatgatggccacctatgaattggtggtttacctactcaatggatagcagcacgaggactgctgtactgcaaaaaaagaagaccaaaagattacagtggaccatgggatacagaagccagcatggcagacagaagaaaaatagtttgggaacatgtaactattctaagtggaagttttgttgtaggaattatagtaatcacaccacattacttggcctttcggtaatgtgaaaaaaaaaaaaaacctcagagcctccaaggaaatgcctttagaagcactcctctctcaaaattgccattttctctaccatgtcccccagacacagttgggttttgttgatttatggcagtcttctaaacaaagccatccttaattttacatactgtattgtaactatccaaagatagtattggcagtcataaatttataacttctggcctttgtttaattccagtaaaataacagcaatgacaatgagatcgtcagtattattttcacatttccctgagaggacctggcacaatattttaaatttaattatttggcagtagtcactgtttttgacaaccaatgaaatagcgtctaaatatcttgtatattttttagcatcaaaatgttttggtttccactgctgacaggtgcttgttgtttagcctaatgtggatatttaaattgttaacataccaaacacacatggtaatagtttgggacaaaataactagtaaaatgttgatttctcggctttttcactgactgcggcatgtcctcgtgtcttctctgattttgtggtacatgaatgaatgcatttatctttttagtgacttactagttacgaacttgaattatcacctctttgtcatacttaagtatcatttacataaagtgtaaaagattttttcacttttgaatctttacctacttgctttcacattaagaatttgaacttttgagttttttccaggtctatatataatagattacatttattttgtaaagaaaatagtaatttaaagttttgccattttaaggtgacaatatttgggacagtataaatattatagacaagggcccccttgctgtctgctttagcaggtagtgacattaattgacttatagttttgtgtaaatgaacaaactgcttttgacaagaaatttattctgtcctagtttcctgcgtggtaaatcatagaaagattcaagttcatttgggttaaatgtgctaataggatgtagcttttaaattctgctattgagtcagctgtaccttttaatactttaaatgtgttatttgtatggcccttataaaggtgtttgctgtaattctgttaaaagacttcgcctatgccatactggtgtataaaaactgccgcaattggacgccggtgtggtactcatttcagtatacctgaactgtacattttgtgcaatggctttatctaaaagaatgacgcttcgtgaaagcactttgtggccttttttgggggggagggtgagagagtaggagagaataccatgttaagattaaaaaaaaaaacaaaaacattggtcacgtattaggcagaaacagtgttcataacatttttctgggttttaaatatgttgtttcggatatccttaatataaatgttttaggtattctgtgtaccctgtcgtacccccaacattatagaatattgcagcgtgtcattgcaagctttctctgctgtcaccagtgaaacatagtgccctgttaaattcccccactttaacttccttgtgatcaacagtaactggatgtttttgaggtgctcaattggaataaaaatattccaatctatttggagaccaaaggcaaaatcagttttcttacctttggaattattcgtaccttttatggtaaatttcagctttgacatgtattatgaggaacgtaccaaaaaccggtttgtaacaaatctgtagagaaggtctgaatctatcgtgtttgccttttcaggtgccatttctactgcctaatacagtgccatttgccttgtgaagacccataaacattcattgtgttgaatgtaagatagagactctccctagtcttactgatctcagtaccccacaaatgattaagaatgatatgaaaaccagcagctaaggaacatcttattatttagttgtagcatattcataacaagtgtccttcaaggataaacatatattctctatttgtatttagcaagtaaaacttgtgttgacctttagtgcattatattcagcttttaacagtattatgtatgtactggaaagcaaagaaatcttagagtcttggacattgtttatttgtgcaacaactagaaaggagcaatgaagtttatttcagttgtatttttccctaagcacaatctgcaatagtttatgtatgacagagataattcaaaaaggaaaactatatataaaagttgtatataaagtttgtctctgaaatatttctttgaagtttttaaaaaatcgactcatgtttaaaaacaaaaacacatattcagagcattggacttttttaacttgttttcatctgtttatcatgacttttttatttctggtgtagagtccacattatttagtttgttgtacttttaaatttcaaagttcaaatctgaagaattagcgtttgtgatttcgggataccatgcagtggttttaatcccaggaaaaaaactatcaccaaaagttcgtttgattctcattatgtaactttgtagaaccatcctttctagatgggtccaccacagtgaatttgtaactttgaagtcaggatagaatatcattagattatctgtgagatagcattactatgttaggaccagcagagtttgggttggtaaaaataatgtttgctctattactgggttacagacatttcagcatttttaggttggttttaaatcactaaaaatatttattcggatttgaaggatttaagtgctaaaaatcaatccatttcttgcccttcaataattgtccatgcctgccttttgttgtttacatgctcttctgcccagactgttagtaatctagggaccccctttggagctgataagtacagttcagccttttctcctcaaatatataatgactttaacattcctaagaatataggtatttctgaatgatttaaatttgaggaattttaatacataaaatacaatgtacaaactttctgcccactcagatctcttctccatcatgtacttagtatttcccattaacctacacactgatttttatgctactccttgtagaaacaaaattctggtttgactcagtttttgtgtttataaacttttggaatgtgtaccccgtttatgtgaagaattatgacctatcagtcatagctaaatagtgaacctcaaaagtgttaacttttgactattcatgtgaggtttggtatcttgcatttatgtacatggctgtaaattatgtgcatttactctgtatttatgttatctagctgacttttacttgaattgttcaaattttaaaaattaaaatacgctcatgaaaatatggctttttctgtaatatatcaacattttattgagaacataatcacacttttttggattatcctatgtgtggaacaaaaatccattgccattttcaggttaagttttaggctcgcttgattcagtcagcaaaccttatcttgagcactttgtatctgttagatctagtgatgtctgaaggaacccaaaggtcaagtaatccaactccctcatagtgtacaaagaaatcttgcatatcttccacaggtttattgacttttatccaacacttttcatgttttaatttcagcctttgtgaaagttgatattaaaaatacagaggtgagaacttgttagaataaccaaatgaatccacataatgttagatcaaaatacaaatgacaaagataaaatgctatgtagtgcctaccctctttacattttgtctattttatttaagtttttctgtattgtagttaacatcaaacattgtccagtcttgaggaaaccaggacgaaatatattttgtatttcaacattgacataaatctgaaattgttggttctactaatagtactctgcactgaaggcactggcaaaataatggttaaaattgagcacaggtgttccaagttgtgtgtgtgtgtttattactgaacattgggagccgtgatagggaagtaatttgtgagt

SEQ ID NO: 108597 - DNA, 1801 bp, Homo sapiens
acatgcctaggtggcagatgcagcttatggttcaagtgggttcttggcataagtgttcctctctttggggacccagacctctaagtttgcagagcccagagttgcaagaagatgaaactcaccagctagaggtgataggtggaatcacccctttggatgcatgcattcctctttttggggatgcagatccacctaatagttttcagtttgtatacaacatcctggaggatagtgtcccatcttgattcagtgtcacctgtgaactggaacttcagctgtgccttcagcaggccattgcaagcctatgaggtcagaagcttttgggtggtaagtgtgatataaccagtagatcttgtgatcacaggcctgctcctatacctccttccctggaaagtgggccccctggtctgatgtgatgtgcaaatgggtcatattttctgtaagttctcagatggaggtgctgtcaggaaaggcaaacccatatgtaaaatatgtgtccatttctgtccaaacacatttctggcccttccttaatgcaaaaggacagatatagtcaacttcccacttcctggctgcctggtcccctcaaggaatggtgtcatgtctggggcttagcattggtctctgttgctggaaggttggccacttggtggcagcaatagctcgatcagcctctacgggtggaagcccatgctgctgggcccaggcagagccttcatctctgccactgtggtgactttgttattgtgccacttgtcagcactagagtaggcatttaagattttcagaagcatcaactcagatgactctgtcacatgtgccccattctttcccaatcagagctctggcctgggcatagcagacctactttggttgggaattcaatctttggagctggtctgctctgatgattagatcctaggcttggtccttagtctccttgccctcccactgcagagatgagcccttctttgtgtgctgctaaagaagcccccctggctttcacacttggctttcaatgacctgctaatcactcagccatttgttaatttttttctagagctgtgatagagcttatatctctatatactagtttcccctgatttttcaaatgcttgatatgttctaccacttagtgcatttgcctttgcagtttcagctataaaatagaaaccttgcgctagatgtctatctctacttggaccatatctcactccctttacctttttactccctcttgcctggaatgctgtcatcatgcttgaggccaagcaacctgtgacaaggtagtcacaagcacacaggacatgactaagcagcaagacaaagaaatcatcccagatagcaatgtggagcaacggtaccactctagacaaccaacctttgatcttaccattatacaacaaaaatgaaaccagctgaagccactagattttttatttctgtttcaaaaaaatgtaactcatcttaactgtgttgattatcaaaatattatactaagcattttttaaatttagatgaaattaacaagttcatgagaatcacttgccaaattaattagtactggcttatgaagagaaatttaatctgtggtttaaaattttctcatagcacacccagaaatcctagattttaaccatcaagtttcatcaaccacttatggaacagatcattgcaaatgtacgtatatttttccagaaaacagaaaataatggtacactctttaatcattttttgattattatatcttgattgcaaaagcaggaacaagaaggcagtatgaaaaattgcaggccaatct

SEQ ID NO: 108598 - DNA, 1024 bp, Homo sapiens
acctggccctgttttctcttccttcctcccctgtctttcctatcagacaattgatttaagtttcccaaataagtaaggctgttaagcctccaagcacttttccatgctgcactccacctaaagtgtcctcacttaccttctccactcatctggtgaacaagcatcccatctcccagaaagccttctctgcccctgctcctcatcttcccccaccctcaggcctgtgctgggttctgctgatctcatggtagcttgggtattcgctcccttccactctgggctcttgaagagtagggccctgcctccctggtaccaggcccagagccgggcacataaaccactgtcagtgaaactgtgctgactgaatgatgggacattgatacttctgcagcaaagcatatgcgtagtcatagcaagggagtaaatcgaggccataaagagccttatggcagttcaggtggggctttgttgccaaagaagttattttaaaaactcagttttcagagcttttgacctttagaattttagataagggattgtggttgcttgaaatatccagcattattgtaaggcttttttaagttagactttttattttgtgaaaaacatttaaacccacaaaaagcttctagtgtattgcacttaatttccatatatccttcatttcttccatttttatttatttattatttgacacataataattgtacatgtttgtggagtacagagtaatattttgatacatgtatgcaatatgtaatgatcaattcagggtaattagcatatccatcacctcaaacacttatcattgtgttaggaacactaaaatcctctcttcaagctgtttgaaaacatgctataaatattgttcactgtaatccccctacagcactgtagaacattataacttattcctcctaactagctgtacttttggatccattagggaacctcttcctctccacccaccccgctacccttcccagcctctagtaaccagtattctacactctacttctatgag

SEQ ID NO: 108599 - DNA, 1051 bp, Homo sapiens
gcctcaagttccgcaaagctaaagtcaaaccataatttgggaggtgagaataaattggtcaatttttggtagaagaaatatagatttttcacattgattcctctcatgccattgctcttaggaactcccataataaattccttcttgcggctgaataccagccgtgtgtgttctgtgggaccatgtgcctaaagggagtccctgcttatccagcttgcattttgggctgagtggttgttagcagaagagtgacacagaggcatttcatctttactcttatgatactagcaaaacatcgttagattataaattcatattatccagggattcgttaccccagcccaagttaattggcatggcaagtgtcttatgagaaaaatctgcagcgttagctaagtgtttctatatgaaacagagacagttgtgtagatggttagatgtccttactctttgttacttctcttagagactgagaattcaattgttgaggtgctcagggtgcaactgtttcagcatcagtaatttccagtgtcttctgcttcttcatctggcaaatggagacaataatacccatcccctagagttgttcctgagatccagaaggagcatgaaagagaaggcactctcgttgtgatgattttgctctcattctggaagctgcagaggagacgtctgcatttcagagagatgcgctgtgccagcgattctcagcaagaacaggactgtgcacgagggggcgctcgggaggcttgagcggtgctttccgccttcaggctgataggagaggaggacacttggtgggtgtggatgggggttgctggcagccctgcaaagtgtgggacaactccatacaacacagctgtcatgaacctcacatgaattcttagtattctaccagaaactgacgtagtgaaccacctgctcataactacttgatcctagaactctgttttataaataaacagaagtatttttgggtggtttcaatatacagtgtttcctagaaatgcatctactgtgtaaatcaaggcaaaattcgtttgattgaaac

SEQ ID NO: 108600 - DNA, 1065 bp, Homo sapiens
tttccatctctcattgtgtcctgtgtacagcacatctgtccctgcacacaggccaagcagaggctgcttgatgggtcaggcatgtcaatgcaggatcctgacattcagaaactgccccctaccctttgtttgaaaggaacagtctctcagttgagaaaaggcctcgatcagatgctgtggcccttctttgaaggaggttttcatattaacatagtcataattcggttcatggaagtctggcttgcagaaaggtggctttgaaatgcaggtgacagcatttgaaatcaggcttaatcaggacaagcatcaccgtgggccacagcatggtcttgtgggaagagcagggttcaggggtcttccagcactggcttggcttcagtcctgacttggtttctaattagctgtgaccctgaacaagtcatttcatgcccaagccttcattttctcatctgaaaaacaaacttactttgctacgaggtgtcaggatcatggattaatatatagaaagtgactgatctagtgcctagaacgtagctactgaaaaagcggtaggtttaaaaatggctaattatgactattactgctctcataaattggtaaaattacagttattaaatatagaaataattatggttattaaattttggtccacactgtgaaactgaaggatttcacacgagggaatctgtggtggtttggatggtcttggactcgtttctctctaagatacatgatggaaatgccacctgaggttcacaggccattgtgagtttgttgcaaatgagctgggagtgtttagccttccctgtgagcggtttccggctgcatgtcttattcaagtgtttctctaaaaggccgcagctccccgtggtgacttgcctggtggacatgcattcacaaggatacccaaatgagcagcaccttcaccagctgtgtgcaggcagacattcagcagggatgagctgccgaggtggcggccctgagggccggcgtccacctctgcgaaaatagtgacttggtctagttgtgggctggccattattggacctttgggaaaaagggaag

SEQ ID NO: 108601 - DNA, 1035 bp, Homo sapiens
gacatatgtcccccgccttgtccatcatgctgcagcctctccacattcttggctggaccctgggaagggcagcaccagggcagggctctgcttgggtaagctctggcttccccttttgtcacctggggtggtggagctcaagctggcctgggcccttgtcaccaccatgctgcgcaagccacccaggagagaagtggtgaattgtgggcttgtatttcctttttggctgacacaggcaacctcccttggatatttaaggtgttctgccacagtggactgttcagatatgtgaaagttaaaaaagcatactcaacctgaactgagttgtacccagagtctggtgtgggattataaaaggcaggaggcggacaggtcctggaaagagcacttgtctgggagccaggaaacctggcccagtgggctccagcttgcccacttgctctgtgacctcggggaagtcagctcctctctttgtgcctcagtttctccactgcaaggaggggattggataagatgacctcaagtggtctccatcattctgcagtctctgagatggagggactgggcatctggattttttggatgacaaacactttacactgtggtgctacatcagctccacatctgccctatccaatgtgggagccactagccctaaccatatgtggtcgtttaattaaaatcaaataaagttaaatgttcagttacttggttgtgctagccgcatccaaatgctccacagacacggctcgtggctgccctattggatgagcccatgtaaaccattccgaccgcggctcaaagttctactggatggggctgctttagagccactggagagggctgaggagccccagagagagagcacaggcctctgtttctgccatgggacttcttctgggccagtggtcagcagagtggctccagggcccagggagtgagttcaagtgggggtgggggtaggagaaagatttagcccagataccagccaatgagtgtcaggctgcaggaccagaaaaccttaggcgaatgtca

SEQ ID NO: 108602 - DNA, 1055 bp, Homo sapiens
ggagtgtaccgttcctccaggtatagactgtcacagcttcccttggctagaaaagggaaatcctccaacccttgtgcttctctggtgaggcgacgccccgtcctgcttccgcttgccctccatgggctgcacgcactgtccaaccagtccaaatgagatgaaccaggtacctcagttggaaatgcagaaatcacccatcttctgcatcagtcttgctgggagctgcagaccagagctgttcctatttggccatcttggaagccagacctaaatcctctctctctttttgtttttaactgaacttctgatatacagaattggattaaacataatccttagttgtaatacactgtcatctttggtcccatgcatagccctctttaattctaatttccttatttatgtatttacccctttataatttaatgcatacccatgaatctaccaccctacccagtgcctagaacattgataatcaagcacctctgtgccccttgtgttgtctccgccaatctgcacccttgctgaaaggcaaccactctcagaattttgtgcttattattcctttgctcttttccttatagattttttgtacacagatgtgtgcctcaataatgccttgtttcattttagttgttctgcaacttcctaaattacttactcctatgccagtaccactcaatgtcattgctacagtgttaagtaacctgatatctggtagacaagtcctgctgtccccaaattcctcattcctttttagaaggagatgccacggggaattggggacccattcctgaggacttcaccctgccctggatgaaattagcaccaactgtctctgcaagcacccttctgcttcccctgcctggtctctgatattggatgtgtttctttcagtacccataggggcagctgggttgttccagtgctgcagtgacagggaacactgcagaggttgggaagatccgtggagcagggtgcatgccaacccagaggcacccccacctgacactctccccatgtgacaagggctgtcccatccaaggccagcatgt

SEQ ID NO: 108603 - DNA, 1003 bp, Homo sapiens
tcgggagttcgagactagcctgaccaacataaaaaccccgtctctactaaaaatacaaaattagccaggcgtggtggtgcatacctgtaatcccagctactcaggaggctgagacaggagaatcgcttgcacctgggaggcagaggttgcagtgagctgagattgcgccattgcactccagcttgggcaataagagcaaaaccctgtcaaaaaaaaaaaaaaaaaaaaaaccctcgtggtccctggagagaggtgaagatgcacgggacagcctgaaagccagtgtatgaatctgccccatcccttctcctggctttcattaagtcttggattaaattaattgcttatctcagagaaaggatgtgtagggggaacttctctgttagggattggctcctggccagcccatcctcactgatgccttgggaggctgcgtttgggcaccaggaacagcgtgggccacctggcctttggagcacagcactccgagtgtttgtggaactgcagtatctgtaactcttttttctattgatcagcttgaatagttagctcaatattacttcactattgattagataagtagcccaaggacatactggggctcagtagggtctctctgtccagaaattcccgtgggcttctccttggccctccctacaccgctctgtgatgagtcgctgtcagatgccccactgtgcaggagcatcttcagggatgggtggaaggaaccacctctgtggccccaggtccctgcctggtcccccctgtctaccacataggggtactcagtgtttgtgaggaaaaaaaatggatgccccggtgaattagtctgagttcacaaccaatgttttctacactttgctacactgttcaaaatgttacccttaaattcaacagttttttttttttaatgtgtcatatcaccagagacaaactcatttttgtgtgtgtttggagcagtgagtgcaatctacggatcagtctctgatggtgggtcgttaac

SEQ ID NO: 108604 - DNA, 1051 bp, Homo sapiens
cgattcaaaaatcagattgcttaaataagtatgtcttcctctggatacagaaagtatgtagtgaacctacatatatttattaagtgcttatgtgtgtttgacgtttttctacactgtggaagtggaggtagtaaggaaatacagaaaagattaagatactgttcacagtttctcaaaatatgttcatcttaaatggtgctaatgacttgctatatgctaattgtctttaataaaaataagtctatgttttcaagtctttaatgttttgtgtttggaaggtgaaacattctgaaattcctgatgtttgaattgtagaagggaacaggcaaggcatagatatttttggttattgtagttaaaatacatacaagtggaaaaataacttcaaattaaaggactcctttagtgcagcaaggaaagactgtcaggatgtgaagacttaggaatcatgagttatgtttccactttttgtgctcatttgtaatcattcacttccctccttggcccttgcattttcttaatgctgattttatgctcatttctccatgttctgaccaccattcccaaaatggtgttgtgacaggagcacgcaggctctagaatcataatttgaatgtcagcttccctgctaagtggctgtgtgtcctattccttcttctgtaaaatagagttaattattgctgttttgcaaggttgctgtgagaacggagatacgggaaaacccttggctcatggaagcatagccaacataaaccttttaagcaaaccagcgcagagttccgtcatagtgcaccatcatcagaaaccagggctcctggtgttccagaagttgccagagtttatgttacttcagccacttggtggggaaagcttttgaaatagatcacgcatgcatttgtttttaatcagagtgcgttggccatgatggggttaatttatactgagcacatggcacccatatctggggtttccctcttggtcagggccccgattggccagagcagagtcgaaggaaatgctgaaggtgaactggagattcagattcccagtg

SEQ ID NO: 108605 - DNA, 1047 bp, Homo sapiens
tggtggagaaggcaagattattagaggggcatgcttaatcagcaagaagaccaataaagagcccattgccagccagacaaaagctgcctgaggccagaacctaggtagtagctgtgaggatgaaggagaaggggatggagaagcaccaggagaaagaatctgcaagacatggggagcagacagcatgtgcaggggcagggaatggagagagtgggacgatgcccagcctaggcgtgactgctgggtgggtgttggcggcctcccggagagcgagcccggaaggcagcacaggttggggagccggaagatagacggcgaagctgaatcccacagtactgagttcagcagaggttaggaactctggccaacctcacagaggggatttcatgtgtcagtgtcagtggtcgagaaataatgaaattggaactgaaaagtgattgagccggtacctgttactgtgggtgcaaaaggctgcgatacacgtgggatttggctcgctgaagctggaaactgtttggattcttgtggagcactctgacctctaactctctctatcatctctctaggaaaccgtatcacccaaaactggaagctttcattagtcacatgtcaaaaggatccggagcctctttcgaaagccccttgaactccttgcctctttacccaaatcacccattgtgtgagatgggagagctcacacagacaggtatgtgtgacccccatgcgctcaggggttcccccacccgctcttctgcttgcataccttccgagcagttctcctgggcggggtgctgtgcagctcagagggggtaagcaaggactggctctgcaaggagctcggtcaccagggcctctaaataaacatcagagttctcaaaactaaatagaacctttctccttcttacaaaaacaatacgtgttcatgaaaataatttaggaaagacaagtaaaaagaagaaaaagtttaagcaaccgtaattccaccacagaaatagacccttaagagtaacccttcttcctgtgcttatgcacacacacacatcttac

SEQ ID NO: 108606 - DNA, 1041 bp, Homo sapiens
tctgaagcaggaaagccaccacagacagtacataaaggaatatgtgtagctgggttcccaggccggacaaaacagatggtgaccagatttggcccctgggctgtagtttgctgacccctcatctaaaaaataggctatactacaattgcacttccagcactttgagaacgagttgaataccaagaattattcaatggttcctccagtaacttctgctagaaacacagaatttggtctgtatctgacactagaacaaaacttgagggtaaataaacattgaattagaatgaatcatagaaaactgattagaagaatacttgatgtttatgatgattgtggtacaagatagttttaagtatgttctaaatatttgtctgctgtagtctatttgctgtatatgctgaaatttttgtatgccatttagtatttttatagtttaggaaaatattttctaagaccagttttagatgactcttattcctgtagtaatattcaatttgctgtacctgcttggtggttagaaggaggctagaagatgaattcaggcactttcttccaataaaactaattatggctcattccctttgacaagctgtagaactggattcatttttaaaccattttcatcagtttcaaatggtaaattctgattgatttttaaatgcgtttttggaagaactttgctattagatagtttacagatctttataaggtgttttatatattagaagcaattataattacatctgtgatttctgaactaatggtgctaattcagagaaatggaaagtgaaagtgagattctctgttgtcatcggcattccaactttttctctttgtttttgtccagtgttgcatttgaatatgtctgtttctataaataaattttttaagaatacctatactatacaactaatggtttgtacctataagtcactcgagttattttcaagtgagagccagtattttatttttcccccttcattcaaatgtcatgcagagaaccagtattttaaaattttattttaactgctttactaa

SEQ ID NO: 108607 - DNA, 1669 bp, Homo sapiens
tacttgtgccatcgtatctgggatgatattaagcacaaagacacaatgtgtctgttttaactttgtctaaaaactcatagttctttacaaagcctataatttcacgacctctggaagttcctacccaagaaagttaagttcccaagagaaaagttttgacacatacatgagaacagcacgtaggcatagaaatcataccctgattttcccggcttctaagtcatcccctgagtcagcatctagtcttcgtatagctgacgtaccaggggagatctgttcttcagaaattctatgttaaaatgactgggagcggggaggcgtaagtctcattttaaaggcagtaaggaagcttgtcatttactggaaaacagtggcatattcctttgtaaatggacaactccctttggaaattaactatcacacactaaaatatctgttttataggccttatgttttactttttgttttactttaatatattaggttgtcttgaagtgaggctctgctgtagtcctgttcttctggctctaagatctgaatgttgtgaccactaatttggtaagtgtcatttgtccccaacagctacttaaatttaagtctcccaattctccttttttagtttgtggtaagattcaaagaaaaggggaaagggcacagagatttctgtacacaatgattacagctatattaaaaaggatattaggataggctaattgttataatagaaccccaaatctataatggctcaaacacaatagtttatttcttgctcatgtaacagtacaggtcagtggggcaactgtctttcatgcattcattcagagacacaggtagagaggggctttgccttctgcagcatgtggttttcaaggtcgcctaggggtgtctccactcctcagtgcagtaagaaaagagcatgaaaaagtgcacatgggagttttttatgggctctgcctagaagtggtgcgtgttacttctactcacattccattggctaaaactccatcacatgaccacagctaaccacagaggagtctgggaaatgtagtccttggtggagcagccacttagcagtgacagctctggaggggtttctgaagaagaggtagttctctctggcacagcacataaaagaaacttggagatactcaaggataaagttgcatagaaacagtgggagaagtaaacaattatccacatttaggttttcctgactgacactcttaggtaacatctggccatgagggcaagatgcaatggatgagatttctcaacacctctgtccattatgaccctaagcatcatgttgcccatggccagtgaaccatgaaggacattttccttatttccttttacttatttttcctctcaggatcctcttggtctaggactatactggctttctcttcttcctggatctagtcatattagttggaattgtgacagaattctgctcccccaactatgagccccagtggtctataggaaagctcttgacttccttagctcgtagttttctctgctactggaggctttggaaatgtatcctacaggatctgctccaggtcttgggacatttgatcagggtgaaaattcccgaaggttagacctttaaaccaagttattaaactgttttttcttttcttttctttctttctttttttttttt

SEQ ID NO: 108608 - DNA, 1034 bp, Homo sapiens
ctccctcctacctccaaaatagtattgttagaaaatgtaatgctgagactctgtcagaataagtaggtgatatatgcaaaatgatatgggcaacttagaaaagtgcatgtcaaggtaaactgctgataaaggccgggagtggtggctcacaccggaaatcccagcactttgggaggctgaggtgcgcagattgcttgaggccaggagttcaagaccagcccagccaaaatcgtgaagccctgcctctactaaaaatacaaaaattagctgggcttggtggcacatgcctgtaatcccagcttcttgggaggctgaggtatgagaattggttgaacccaggaggcggaggttgtggtgagccacgactgggccactgtactccagcctaggcaacagaggaaaaaaaaaaaaaagtgttgataaaaaataatcatcataattatggtcagtattggtgctttgacttttgatattgttattatcattattttaaagatttttttgtctttctaaattgactttcatctgggagccttagcatcacttctaactagccaaagcatgtttgattgtaggccagactccccatggagaggcttctgatcttattcacagggacatttaacctggggttcactgaaacctttgaggaatgatggatgagtcatctctctgccaaaagaagatgattcctggcattctatggggctcccagtgcattgggataaggaggcttggaaactcctccacggaggcattgaccttgggtagtgccttccaagccagagtggagagagtggacccctcatctttgtccaaaagagcattagtataacccctcaccccaaccccaccccattctctcctttttaaaaagagagaagaatatatacaagaaaaaaattggaaaaaatacatcaaaatgttaaaaattgttgagatggtattttatgtggtgttttgcccccatttaacattatgttgtaaacattttaccaaatcactagatggtctttgaaaacatgatttttaat

SEQ ID NO: 108609 - DNA, 1046 bp, Homo sapiens
tatcagttttttgttgttggacattttgattcactttagtgttctactatttttaaagtttctaatgcatattggtgaattggcccctagaaaggtacgaatgtctatttcaaaaccttggtcttttttagtttctcacattaaaatgcatgctgctaggccccagtggtattggaagctctgaggaggagcctggggatatgcattttaacctgccctcccaattcttctgcattaatgcctgagaactattgacatgctgcattcagttcaacaaatattcagttggcaaacatttattagacaaaaaaaattaggaaactctgagctagtatgtctatgccagaatttaacttaaagtctttttttggcttctgatttttagattttcctttaactgtaatatgatgtagtaaaaagattattagctagggaatcaagaaaccatattgtacacatgaaatcactgaggcccataatggttcatttacttcctggtggtcactcagagatttaatggcaaaggttgaactagacaaagggcccagagtcacccaacctttaggtaagagacaaaaggcgccaatgagaagattcactcctgaggcaacgccctgcctcagccaaggagctcttacctgccctcagataggcatgcccgtacttcaagacactcttgggcagcctagacctagcaaggggcccacgtgcccatcttggtcacctaatggggccagactgtggtgtgccctgatccctgaggtggtagcactgaagaagctggacccaggaggacagagggcagccgtgcaggcagcatccatgtgatcagcatcacaagagcagagtaggaggtgggatctggggtcagaaaccaagacagcggagcagggtcagggcaagtgccagactaaaatatgtgggcaaatttgaggtcaaggcagggatgagttgaaaggaagacaagcaagagctagaggggaactgctgaggatttggcctcaaggatggagtcccactgtgtgacctcacagtcaggggaggta

SEQ ID NO: 108610 - DNA, 1404 bp, Homo sapiens
tctccattatctcaaggttatccctgttcaggatcactactctcctgattcttggcctcctagtccaaactcatggctccagggtcatgatgagtaagagttctggaaaagtctacaacctcccttgaaccagaggtaccttgaatcagatggagggtgactttccaagaatgcctgggccggttcaagtcttcactataatgtttgccttatgtaaaacccatcaccttgttgtcctgcacaactttcttgagtgaagcacctctgatactcagatgacattctaattgctcacgagacctggacccctgggccaggaaagcccatgtggtggtgacagcagtgcttccaaatctcacccacaggagacaaaaataggagttccatggcatccagacaaggtgtccacatgctgctggagagtcttgggtggtcacagagtacaaagttcaagggcaaagattgttcagtgggtcccaagatttgacaagtgctactggtggtcccacccttgcctctctacattgattccatgtcccacttcctctcacactatgctgataacgatctaacctgagaaattaaaagtattcacacagcctctggccaaagctacaggaagaccctggcccaggcaaactctgttcctgccccacagctgtcatttcacctgccctaccccatgggagcatgtaccactggtatcaagtcttcctgctgggccaagaggcactgcctcaaagaggcccagcatccccagatagcaatgtcccaccactgcagtcaggagcaactgggcaaacccaaagactcagcccccccatccagaaagaccatcccattttccatcgcctaagtgccagacagcccaaactgctgtgtagacagctaccaggaaaactggagcaatgagagacatctgaggtcaccccagctaagctcagaaggccacagagcttaactgccttcttgactgtggcccatcaaaaggagcccgacacatctagtagatggcttaaataaaaaatactgaggttaccaaatgctggcaaacatgtggggacactggatctctcctacattgcctgtaggaatgtaaaatggtacagccactctaggaaactgtttggcagtttcttataaaagttaaacatatacttaccacgtgatccagcaatcctactcatgggtatttacacaagagaaatgaaaacttatgttcacgcaataaactttacatgaacatttatagcagctttatttgtaatacctaaaaactggaaaatagccaaatgtttttcagcaagttagtgggtaacacactggtacatccacaccttgaaatactattcagcaataaaaaggcatgtgctctttacatacaattcaaatggatcacaaggg

SEQ ID NO: 108611 - DNA, 1031 bp, Homo sapiens
tcagcctccagcttccaactgtgccttagttattagagggactcaactcaagagaccatgatgagagggacagcggtgctcatttctcgggcctggctgtgagttggcaaccaggatcgtgtgctagaaaggtgacaattttaatcgctgactttccgtagtcgttggtgaatctcgtagttttgcaccttttagtttcaaaaccatactgaacaacggaaaatgaaacctgcagcttatttttagccgttcatgctaaatcatgagatttttctttgcaaaccaaagaggataaaggctacttcagcaggctaaacttagtcaattgacttaatatagcaatcaagtctggttctctgacaagtctcaagtgacattgagaagtttcaggtgatattttggccaacattgactattttgcttaaaattatatttagttgagttttgtttttagttaaacaaatgtagtatgatattttcatctgagaggaattggaaaacatattataaaccctccattctgtcatttagtcattaattcaattaacctataactatttttaagtatctgacagcttagaattttttttaattgagtcagtgtgttgaattacaaagagcagaatgctagaaattaaggaatatggcttctatgctcattgatgaggcatttatgtaaatatgacacttactctctttgaacctaattttcttctccctcaaagaaatggtttagatggcattttctaaagcgtcttccttgtcctttaattctgtgaaacacgctctgccactgagggcctgaggaaatgttgaggtattctttgggggctgtggcagtgttgtcaggccactcttatttctgtctcctctttccctgttctaggagagacaggtttacacaaagcactgtggtctgcttgccagacaacttgtggctccccttggtaaacaagtgattaagtgcttgaaagattttcatagagattttcagcccccaagcccattccttaactcctgaagcaagtact

SEQ ID NO: 108612 - DNA, 1084 bp, Homo sapiens
ctggtagtggtagagaaaggactccggagtttgatgttggtgagtccaaaacatcctcagtgagcctctccatggtgttaggaaatgctctagtgccctggaagatacaaagatcttgcaggaagcaagccagagacgtgggcttaggtagataattcaatacaaccaaaatgcattgtgtttttttctttagtcgaaaggagttaaagactcactgaggtttgttaagcttctctgactgagaagaggtgcattgttgtggccctttctgagctgcaatgtcatgtatctgagagaagagaaagcaagtaaatttattcccaggtttaagtcttgaaatatttgttgcccagggtgtgaagaaagatataaagagaagattatgctctcacatgaggtggatttttatggatctgtaagaattcttacttttttaccttcatttatatccccaccttcccttttcagcctagttgccagtctctccaaaaagatgaaactctacttccttgctgaatgtgttttgccaattcagaatctagaaggccctgttgtttcacttgctctccatctggtgcgtgacaagcagtcatggcagaaaatgagcatgtgattgggtagtaggaatgggcactcaaggtcattactcatgccatgtttcaaatgcactgatgcactgagaaatgaaagcagcaactattcagttgctaaagccgaggtagtgatttccataatggtggtgacacctgttgaggatgctcccaccagaggatttgagttgggttaggatgggttgagatgttgtctaccacagtctgccttgcagcctatgtcatttgccacttttcctttgttaaaaaacacatggtttacagttcccttttccttccagctctttcctggagagtaaccccagtttggtccacaaggcttgctgcccaatctttgccaacaggtatgtactcctttctcatgtcctacacagatgctaatggatggacgtgaggatgctcatgtctaagaactggagaaggtttcctggagttcagaatcctcaagcatatcattcacccaacccttcatt

SEQ ID NO: 108613 - DNA, 1016 bp, Homo sapiens
ccccagaaaatattaattcatttttgcaagcgttaaaattaacaacagcatattcagtgatgcaataggcaattaaagacttttggagagataagaagaagaaaactataaatattatatattcaaaatcagtctcagcattttataaaaatgttggcttatgtccaggatctaagggtgggggtgggtatggtttctttgtagctatagagtggaaaagaatctgttctatttccttaaaaataaaagacttcttgttttatacagcatggcaaataaaatgcttttttgtttttttacctgccggcaggatctggaggaaattttgctagcaagctatgctgttttcctctttggggacctggtgacactggttttgcagcaaaaccgtatttgcttattaggcatttcttaaaaatcctgaataagcagctctttcaacagtttttgttccacatgttaaacatttcattgcaattcgagctttgagtgtgtgtgtgtgtgtgtgtgtgtgtgtgtgcgcgtgtgttgataggaaggaatgaaagggggtgcataagaattcttgaatgttttttatttaaaaaattaattcctcaccattacatattgaactatctgcagaaggtgattccaatttattacataccaccaaactagatcccatcaatcttgagcagtgggggtagggaggtggttttgaagatgacatgaaatttggtgtttgagtagatgagatttaattttcggaaaacatttcactcataaaacggatatcaacccagtgtcagcactgacctcctgatgtcaatgtcatcatgcaagcatagctaaaataagcctcaaagtaaaacaaagaaacattgcatctcagcacaacacgatttcttctcttacagtatgtactatctatagccttttggtattcctattaatggcttgttactttaaaatttagcttttggagggggagggagaagataaatcattttgcattttctgtgttctgaacgcat

SEQ ID NO: 108614 - DNA, 1081 bp, Homo sapiens
gcttggagtctttctctggttcaattattttggaacgtgattcatctcatactgattttgttctccaggcttgccatgaaatacccttcctgcaacaccttttttttttttttttttggctgttgggagccattttccttcttgcctgtgactttaaatgactaagtacattttgaatatagtatcaatcagaagattgtaaactgaagggaaatatcagaaacctgattcaatattgcctattttttttagtaccaacagcattaacagttgcaataggatcaagctaattgtcattcgctcttgagcaaataatgagccaggcatttataattaaaacactactgctagtcagaaagcttataactacaatgtcttctattttgataggccagtacaaagtaatcattttgcacctatttgaatcttaattacaagattagatggatgcaatgcaattgttttaccattaaaatgaatgcctgatagattcaacagtgtatttcttctttatagaatgtcgattcttttgtttgtgactcaagcatggttgcgtcatcttgtagattttcatacttaatggcgtttttttgtggcattattcacttatgttgctcttagtcttgcctaaaagaattttaaacccaattcaaggatctagaaagccaaataagattgttgggaagtgtatcgtaccatcgtcattctaataaataaaccagtgaatagaataataattactatatattacttcgttgtgtttcaccttaatactttgccttcatatttcacagcaatcttgacaaggcacaaagctttcctaaacttacccatttacaattattattgaatttccaagattagctgaaaatgcttcttgatgattgtagaggatggcacttaccccatctcattgtttgaaaagctatcctgaacccatttacactttttggctccggtatttttactgggcaggccagagcaggtgtgacagcaagactgtgcaaacaattgcactgttctcaccaaaacaaaatgggcaaatatgtggttttctgttggaatgatttataatataaaa

SEQ ID NO: 108615 - DNA, 1024 bp, Homo sapiens
tcttaaaaagccctacaaggtaggcactaatattaaaattagtcccattttatagatgaagaaggcacgggagttgagctaacttgcctaaagtggccttgtaagcaacaaagctgggctttaaacccaggcaggctgaatccaaagcggaattgccttgccctaccacctcccaccttccagtcacagggaaacacagagagcaatactgcatactagcacttcccaaccctggttcctaatccatgtgcctcagttttcttggaggtctttgagtaattttcagagtttccaaaagtttcagtggaaacatacaaacatgcaattattaatagatcacaaattttttaggttggaatccactattaacaacaggttagctcaggttttgagaaagctctgattggtaattgcatatacaaaaacattgcaggtttttgtttttgttttttttaagtgggaagatgaatcattacttaataaatgcagtttagttgagtagatctttctgaacacatggcatatggaggaagaataaagggtgcttggctttgaggaggttgggaaatgctaatatacatgtgtatgcatgttgcccaaactgtcggccttcaaaactcttccttttatttttaaataacatgattatttaatttgacctggagtcaatatatttttccctcattatttaaaatgttttgttggctttatatttaatattggaatctattcatcaagtgatcacattcttaaaacatggtcaggaactgggatgcagaattgcaagtactgtagattcctggctgaaaacgtaaagaattgactttttaatccttttaagctgtggccttgaattttttttttttttaagaaaatttaagaataagactctactgtcaaaacacagggaacatggacgatttaaaaaaaaaaacacctgtccattattcgtgcattagctccacatggccagcttgtggcaggccctctctgaatactttttcaatgagcagcccctggatct

SEQ ID NO: 108616 - DNA, 1470 bp, Homo sapiens
tcaacaaatgtttattgagcttctacaaggcacttgggtactcaagaccagacagatttgtttttacaatcatattagtcatttccagtctcttagcaaagaatttgttgttcaactgttagcaattttctattgttaatatgctagaatgtcagctccacggatgttggagattgacccatacgtagaattccaaatggatatataggaaagccatttaaaatgtcttaatatcttcagaaaggaatttcacacttctctttaaaattttgattttgtcattctcgttacctgcttatagaggccttttcatttgtacatttaactcataatccaagaaaaagcagtttggcaagggggctttgtttggtttgaaatgttctctttttttagctttgtaggccacagaagactgtgggtattcaaaagtaaagtaatttaagaaatatgtttgtttaatttataaggtagaaaattagagatagctctaagaattgcagtaagccacagaaatcaaatcgcaagacttgaatactacctgtaataacttaatccccaaataaaacgaatgagatgttgaatgtgaacatgctttgtaaacttgaaggtgttctgtgaatgctgtacagcatactagaagtatgactgtgctagagagaatggagaattcagctgccacaaaaatctggtctcttcgctctcagactctgttgaggaaagaagatatgcagaaataaccacgtgataaatgcaaaaagaagatattttggtaatttgaggaggaaggggtcccttttatccctggcagtcaagagactcttgagaaaaagcatctaagcaagtccttgaatgatgtggcatttcaataaaagagatggagaggaggcatttgagataggaggactagtaggagatggagaaacttggagcatattcagggaaaagcatcaagtccaactgagttagaactggtctatatacaggcatcaaaactggagaacattcagtgccaaatgatacagtcttgaatgccaactaggaattgtgaatgcattaaccaataggtgtcattaaaggtacttgaacaggggagtgttgtggctgtgcttcaggaccaggctcttgtgagtagcttggggggagatcgggaggagaggcagggcagaaactagaggccagaaagccagttaagctactacaacccaccaaggaaaaagaggggcagaaaaggcctgaaatggatgataacaatgaaatgggaaaggaatagatgcaaagggaagaactgacagaatctgatgtctcagtgaaggaacagctaaagctgacactgcgatttccagagcagtggtacccatggaggaaactcagaaggaggtaaggagctacattttagaggtgctgtgtttgcagtgttgaagcatgctgtctcccaggcagaagggggctttgcgctccacaagaaggcca

SEQ ID NO: 108617 - DNA, 1110 bp, Homo sapiens
gaaaattcctaagctgtattataacttaatattgaaagaaattaaaacatttacgcagggagagaggaagacccagcttgcgcacccctatttttctggccactactgtgagtgttcataccaggatgcattttcatgaaaaatccagtggctgtttaagtcctggaagggtatcttgggattatttcagcaacccgtgaaggcaggctttgtgcaaggtgagacagatatgagctgtcacttcctgctttgtgagttggatattgtttctaggccctgttttatttatgttatttttcctgttcatgtgttagaacaactgactgtttgtagagttgatgacaattagataataagaccaccaattcagtccaaacaaagatgaattcattatcttgccaggcaagggagacccacatattcagatcagtctccccatacttttgtgcgttttcatgtaagcatggagatttccgattagttttaatagcacagtgattggctcctagacacctaaatgaggatttcctttttgaaaaacctactcagcattctgatctgtccctgcttaaacctatttagtctggtcttatagtccctgacttgagcccaaagagcaaggtttctcaaggtctctgtgcaggtctttgatgctctttcgtggaagagatttacagtggttacagccataaccggtgcctgtggctgaaccatgccttctgtagtgtgttcagcccttcccttgaattaatgcaagttccacctttgctttaatgggaggggacagaaggaccactttgaggaagcggaggcaagaagatagtctgcaaaagccatgacgtggcactgaaatgaagccctgtgtagggttttactcagacgttagagaactggctgcccctgagtgctgtgctaactagggaaagaaaaaaaaccctgacctttaaaatttttcctgtgaaggtctagcaattctggagtgtcttcagcgactacacagtgtaaagcaactttttgcacagaagcaccataaattacctaaatggaaatttgcttctaagtgaagttcttaccctgtctgttggatatttagtattgtcaatatttgtt

SEQ ID NO: 108618 - DNA, 1047 bp, Homo sapiens
actcaagctattctacagaacagtctgttcttttgatttttttttttttagatcagtatatttaaagcataatttttctaaacaacatattgcgagtgtttacctgcagtggtttggagtttgtttggggagttttaattattttttaatgtagacaacttatttaccaacatcattgctccttctgctcagataattctaccctaaaccaggtgaataggggaactatgtaggcacctgactactgccagaaactttccttctgtttctattacctttcttttggggtgaaattggcaacagctcactggaacttagctcccttaatattctttctccctcccacaattttttccactcggttttttttttttatctgaaccattgttcatccatttgaaacactggccagagtttttgtcgcttttccatagtaggaaagcctttgtgcctctctttgtacctcagacctactggtgggcttgccggacagctctgccaagcgcctgcgtctcctgagcctatgaagaggcgactttcacaatcctgtgctgccttcgagctctgtgctgccaggcctggcctccctccagaggtcgtagtgttgccagcagtggcttcaaactggaaacatgggaggaggaattgtgggaaatggggaagaagaaaatgtttgtgcagggaaagtgtgtacgtggacttaaataaatatctgagggcccaggcccatacagatgatctctgtacgctggtattttgcgcctggagccaggtgtctgttgacagtggggaggaggtggggaagacccagccggccgagagcctcagccaccttcctgcaggaggtcctcacaccccagacggtcagaatgctccccagactgaggaatcagctgcacatccccctgatgtctctaaagctgaaatctgcttcctgggtttagccaccattttcattgagcagttctgaggattccttgtgggtacttgtgatcttggtggagatgcttcatggtgttgaccctattgttttgaatacctgacagc

SEQ ID NO: 108619 - DNA, 1035 bp, Homo sapiens
tcccccgttacacacctgctcatgatgacttgtgggatgcttgttttaaaggagagctgagtgcctctgatagaaaatctgatttcatgaaatgcttattaggagttaagtacccctttttcttgaagcttgaacagactttatcattaatgtgactgactggagcaaagtgaagagtttgatacctgccactctgtctctgaagatttacgtagagaaattttccccataggaatggacaaactaaagggatccttaagaaatagtatgtcacccaaatatattctgtggtaaggcttctcaacacctgttcttcattaggacggagcactctgagagttttgaaaacttgaatactgacatctcatcatttaaattttagaaggacaatgactcacagtacagagattaaaatttcacaggcagaacaaaacctacatgtgatttatacttacgtttttatagactaagatctaaaactcacatacatacaggaacaggaaagtaatatgaacatcaaatgtgggcttggtataagaaggtaagcaagtggttagattgtggcaaactggaggtttgaaactttttcacacagataggggcctgatgagagcgtctgcaggccgaatggagcctatggactgcttcttgcatgccagttgcacgccatttgactcagtccgctgatccgaattccctcagtggcaacctgcccagtcttctcctgcagagcgttgggcttgaagctgtctaaggcccagcccagggaaaagtaaagaccattgaaccttctccatgtcaccacaaataagtcagccacttcagatataactatgtccatttcatacaggcaaagtaattatgtcagtggggtcagtagcagagcatagtatttgtgtccagggacatctggaaggcatcagacagagcagccctgactaagttgcccagtgctcggtgtactgatcccagggtgagacaggaagaacatcagaggaagcccctctgtgtccaggcatgtccgtcttaaggcag

SEQ ID NO: 108620 - DNA, 1389 bp, Homo sapiens
tgaccttctggccttggaaaccctgttgccaagcagggaaggtcctattttaggggacagaaaacctttgtgtatcagggaactgacataaataattataatgtaggattttaatggtggaacgtgtatcagtataaaaacgaggggtggtctgctctcagtgaatttttatgggacccttgtaggtggtgaaaagggaggtgtagctgaacttctttaatgttcatggctgagggcattgcctgctcctgagaaaacaacgggaaagacagaaataattaatcccatgctgccatggtgacctgtctggactggaaactactagggtggtgagaaaagggctgcagaatcttagagaggaaattccagcttcatattacattaatctagtttaaaaatgaattaaaagccttttcagcccttccaagttcttgcctacattttgagggcagcatggcctggctttttgtgaatttatggttgttgtgatttttttccattccgtggagtactctcaggtggtcctttgccctggactcacagtggcctggggtcccttgagcagaacacaacttgggagtgcagctggatatcttaggagtctctgagctggctcgctctcccttcctctcttcttcctcttcctaccactgtcaggaagcttagcgtggagttctggatcccagctccctctcacattcattcatgtgagctactgccatggtgtcagtaatgggttgaatggctgcaccccaaaagatgtgtccatgtcccagaacccgtgagtgtgacctaatttgggaaaagggtcttcacagatgtaattaaggattctgagatgagaggtggactctaaagccaatgacaggtgtccttataagagacacacagtagagacacttgtagaaaggagaaggccatgtgcagatgaaggcagaggataagcgttacgcagccacaggccaaggagagactggagccaccagaaactagaaggggcaaggaaggattctccccctgcagccctcacagagagcacggccctgctgactccttgattttggacatctggcttccagaattgtgagataatgaatttctgttgttttaagtcaccaagtttgaggtaatttgttacagcggccccaggaaacaagtacagtgtccaaacctaaccttgatccagcagcacaagggagcttgttagaaatgagattctggggccttaccagattcagtcagtctggagtggcacgaagaaatgaaatcgcagtaagggtctgcaggtggttctgatgcaccagcatccattgttcatgctccccttttagccctattttcttttcatccaatttacttcaacttgggcaaaatgcatgctcacgtttg

SEQ ID NO: 108621 - DNA, 1433 bp, Homo sapiens
ttgtacacctggccagccatgaaggatcccaggcccaaggcccaccacccagcaatgctcagatcatcctggcaactgccacccgggatcaaggggctgcatgccttaactgccatcctcggctgccctgcttggagacctctctggcacattccttgttctctctgtgatttcttggcatatgactcaggctggttgcccccaactgcccaacctcttgaatcccattctgggtcttttccagctgccagcttcttccatggggatcttgtataacaagcctgcagtttggactcactgctgggcccttttgtgccatatagaacaagtcacctgctctgacttaattactgctgtatgtgtacacattcatgtgaggcaagtcacttctccaggctcagttaccacatctgtactatgagcatgttaataatactagcttccatattgagcactaactgttaattcattgaatcctgtgagtacatactagtatttgcattttttttttagacggagttttgctctgttgtcgcccaggctggagtacagtggcacaatctcagctcactgcaaccttcacctccggggttcaagcgattctcctgtcccagcctcccgagtagctgggattacaggcgcctgctaatattttgtatttttagtagagacggggtttcaccatgttggtcaggcttgtctcaaactcctgacctcagatgatcctcctgcctcggcctcccaaagtgctgggattacagacgtgagccaaggcgcccggccagtatttccattttttatgtgccggcctccacaggattgtggaagtgattaaattaattaatatgcaaagtgctttgcaacttgaaatttatctgataaaagcaattttattcaatattggggaattcagacagatgaaaattgtaattggcaatatttatggtgaccatcctcatgtaatgttgatttataaacatatatctttttatagtatagattgttccttttgtaaatgaatactgagggcctgttctgtgtcaggcactgttccaggtgcttaagatatgtcagtgaagaaaatcaaagattggtactcttatggggcttacatttttgcaagcagacagacaataagtaagtccattttgtatgcagtatattggaatgttgagggccgtggaaaagtcaaaaagcagagcagggcaagggggatcgtgagtacaggggaaggcggcaggttgccttttgggggatggtgagtgcagaggacagaggcatattgctttttgcggggattgtgagtgcgggggacggcggcaggttgccttttgggggatcgtgagtgcaggggatggcggcaggttgccttttgggggatcgtgagtgcagggaatggtggcagcttgcttttttggggatcgtgagtgcag

SEQ ID NO: 108622 - DNA, 2647 bp, Homo sapiens
gaaaaaggatcctaatatctactttgggttttagcattaactttatgcaaagtgcacaaaaacaaaatagctgactcctccaatatcccaagtttcttgtgaaagttaataaaattcttagctgtggtatttctaccagtgaaaaaaggagtttaattttagcctagtttaaaactttctaataattgctaataagaactggctgctgaactgtctttagtcactggagaaaataagggtcagatatcctgaagatggcatcttcgtaaatatgttacgtggtaataagctgtgtgacggtctttattcccatctggcttctgcactattaaaatttgtttaaattaatggatacacatgaaatacttaaacaatataactgaaattatgtgcataatgagtaacctaaagtaggacattcatacattatgtagaactacttttctgcaacacaaaccttgtaaaatacatatataaatcactataacttttaactgtccatatcccctgtagagaattatgaggagcaatagatctgcaaataatgaggactgatgtaaaaatcaatagaaagcattttgaatatgatttaagagcatgtgaatgcttttagatggaatgctgttcccttgaagttatggctgagctgttcttagaactggtctactcaattcacagaaaacataggtcatgccttatctatgggggaacaccctcccagaatttacctgtgattacctgtgctgcatattactttgcaatggcctcatctcagagaatgaaagagggtcacattgttctgaaactctctgcagtcttccaaccaccacaaggccatggatgtgggggtctattccagacagacttaagggctcaagtggaacctgccatctcccattccactgaaggactgtccaagagatttagtgcaaggtacactgcagtagtgaattcccaggcacttgaaagtgactgcctaatccctacaattactagccttgttggagattatgcagcccacaagtacagactagtataaagcaaaaggacaaaggaacccccaccctccaccccacccattaatgacttgagtgggcaagaagaagtgatggccttccttgcctaaaacagtagctttgtttttagggggtgggaaggtaggatgtggagtgacatggttctatcctttacttatgagactcagaaatatatctacaaagccagatgctctgtcttcatatttgcagacatctagaccccttgctaaaaacccactgaagttttttttttatgttctttgacccacaccatcaacactaccctcaaatctaattgccctacagcatattctatcatgtggactaggttcctggaaagccggaactcatgattctttttcaaactgccagaatagaagggagagagaaaacatttctaccctttgatcaccagtgtgaacagaatccggaatgcagtttcagcgtgacctgcagtcattcatgttcattggatttgacagatggaaacccaaggttatcgaagattggaaggttatcattgtgaagaagtagctcaaaggactccggtttctgtctacaagtgtgatgtctccatgaagaagacttagtatggatttgggtgggtaagaaagcatttaaacgcccaggaaaggacatgattaaagttgaccttttaatactgtagtaccttgctgttaagtaaccccactattgtatctgcatttatcttttgttcatctactttcacttacatacagtattatataagtagagaaaaatgggaaaatgcaagcaaattcaactttattttatacattgtatatatgtacaccctacactattcatttgggttttattaaagagatagtcacaaagggcttacgaaaatcatttttgaattgataattagaatattgaataagcaatcctatgatccactaatttgttttatcagttaataatattaatcaaagacatttactgtatattctagtcattttgatttgagttaaccccaaatataaaattacctgtagtgatgtctctctcccagcccttatatgtggatattttttaagtggacttgtatgctgataattctagaccaaagtaaatatggcagaatatttatacatgaaaaaataattttgcaaatattttctataattgtattcatttaaaatgttgatagcttgtgttagtttcagggaggggtgtatattttgataaaaaaatacttgactttgtaattctgtatattctatacaatttatagcagagccgttttaagacagccttgtcacatttttttgttaattgtgaaaattttattgagtgatgtttaagtatgcattgagtacatgaccaactagaattaaagtaagtgtaaacagtgaacatactgtatgctgtacaagatataatgtaacttgctgttttagcatctgtattttggttagaagatattattaaatgcagatgttaaggattggaaaagtctaattttatttttagaaataatggatataaatttgtttttgcttgattaaaatagcttattcctacattaagtctctttttaaatgttttcatgttatttcttttgtgcagctatttcatctgtgtga

SEQ ID NO: 108623 - DNA, 1090 bp, Homo sapiens
cctcgctgcggccgggacttgaatcgagggacggcgtgacaggcgggactaaaggcaggatgtagtggcttcctgtgagcaggtctcaaaacacaatcacccagcccgcactcagcccgcttaattcccttccttctcatgcgtgtaattgctactttagtgagcgagcctaccagttgactaaatacgaaattttgctcagagttgtccgagcattactgtggacagattatttgagttctgtcatttgaacattttagttttaaaaacgaccctttggtgtcaggttgccattttttttttcacagtggtttatttagatgaagtgctttttgttttctgtttgtaagagagatcaataacatttatttttgcatttgtcgaaaattagcattattttcttcatgcagtattctcagattggaaacatgcttcatgtttcttataaataaccctcaattatgagggcgtacttttcactttgaagaaaattgacttgcattaaagtggctaacaattctttcctgggcaggatgtaaaattttcctctcctctaataccagtactgttgagctcacattctcccacttttcctcttttcaggtggttcacgtatttgggattttatgaaacctcagaagcagacatgttaacttttcttatctttttattccctgaggtagtcctggggctcttaagagattacagttcttaaaacctggaaagtgacaccagagaggtagatcttagttcccaaaattaaagttactttctagggcataaaaccttttcagaattcagattaaattttatttattttttcttttttctgtaaccttatatttgaggggaaaattttgttttcaacttttgcatatatctaatttaacatttgggaaaactgtaaatgggccaaagtttctccctttatatgattttccagatttttaccactttcttagtgccacttgatgctaggcattgtctattggagactcactggtacgtaactgcaggttttaccatggaactacatatacacatgtcttggaattgagggttagggtttccagaaggacttagttgtcct

SEQ ID NO: 108624 - DNA, 1039 bp, Homo sapiens
tgttcaagagataatagtccataaccttctttagggatttcattcctgtaattatttccccttatacttcacaaggtgaaatatctgtcagttggacagatatttgtctattggacaagaggaaacttaacaaaaagtggtaaccaaaaaggtggaggtcacaaaataacaacatgagacctcaatatatataaaggatgaagccccaataccccttttttgcttgagtgtacttttttttttttttttgccggggggctggggaggagggaagaagggacatgcaaatatgtttcaggtgttttatatgcgctcaaacgaacccagggaattcgagatccatctataagacaaaatattgtcagcaaccctggatttgctgcagtttgcgctaggaaaccatgacagttctgaattgtctgcttccttaaactttttcaagaggtgagtttggttgtttgatatcctaaggttgtcatatgaacccttgataaaggaaattaggggtgtactcgactccattcttcggtctgcactcctgtgtagcgagtagcaagtatgctagaacacctgaaacacatttgcatgctccctcctcccctcaaaaaaaaaaaaaaaaaaaaaaccgtattcaaacagaaaagagggattggggcttcctcctttatgtatcttcaggcttcatgctgttatttggtgacctcctttttgattagcacttgttaagtttcctcttatccaattacattagattgtaaaaatgttgcggagagcacccatgccaccatatgtgtgggcttatctactcaaggaataccagatcaataagagagccaaatgggaaaattttgtgtgaattttcagatgtgtggtacagtgcgagatctgtgggactatgtgttccaaaactcacttagtttctctggtgtcttcagaccaagaatagcctagggttatttgacagagtagggaagatctatagggtatggttaagtgcttgagcttagaggctgggtgaaaaagttagttacctgggttt

SEQ ID NO: 108625 - DNA, 1024 bp, Homo sapiens
atgccttgtgcctttcttaatattcatgaaatctgtgactgaatactaggacttcaacaaatactgctgtgaacatgaacatctccatgacaatgtttgctagtaaaacaacccaaactcaacctcccttctcttctgtccttgaaatttctagtgagtgcatctggttggtggaacttaaatcacatttacaactgtagccacaagagaggctgggaaatgtattttttaactttctcttctctgcagcacaggaagacatacactgaaggaggttgaaatggatgtgaacagtaatctaccatatttactgcaggtttagaacctggttctccttaaggctggctgtcattaaacgggctatagataagttgagaaagtttataaataataccgtcaaacaatgttgagaaactcatttgtttctttgtatatttttattgttttataatgactacattaaaaaaaaaactagaatttgtccttcacctctatgatgaattaagtggtctgtggataccgaaagtttcctcacgtttaagatgtggttagtggataaaaagaccaaaagagggagtataagaaaaaccctcatacaaggttacctgagctgaggaaaggttagtgttgtcaaataatgaagagtggtcaaataaggtgggactgaaaagcagtgttacgatttgggcacttaatattagtggttttttgggttttttttttctttctttactattgagacagggtcttgctcttttgtcccaggctggagtgcagtggcagctcactgcaactcccatcccctgggctcaagccatcctcacacctcagcctcccaagtagctgggaccacaggcatgcaccaccacgcctggctaattttttgtatttttagtagagatgagatctcaccatgttgccaaggctggtttcaaaatcctgttctcaagcagtttgcccaccttggcctcccaaagtgttgggattacaggcatgaccactgcgcccagcctgttagtgttct

SEQ ID NO: 108626 - DNA, 2057 bp, Homo sapiens
gcattccagacaaaagccctaaacttgaacatggtgtggcacagttgatgaatgaaaaaaactaaacactgaccggggttgggggaatggaaggagaagagatcagagagaccattaagtagggctttgtagactgtggtatagaaagataattttattctaagtgaaatggtgtggtattggaggaggagagtgagtgagtaacctaaagaatatgtttcaaatatcacactgcttgatggagaatggattgtaggagggccaaaagtggaagcaggggcaccagttaggcaactctcatgtttgttcgaataaaagattgtggtggcttggactcggtgattctggtcaaggcaaagagaactggttggatttgggatttattttggaggtctgctggatttgctaagagactgggtatgggagtttggggaaatagaggatggtgagagtaagagagaaaaatggtagactggggaaagggcacatcttggggaaagaaatcagatggtttttctgggacttgttaaatttgaaatgcctactggatatccaaggagacagttaaatagtcacatctagtgtttgttgaggagaggttagacctggtgttgcagatctgggaggcgttcgcattaacaccatatactgcagagttggcaaagagaaggaagagaaggtggtttggaattgaggcattgcatgtttagaggtagccagggggagaagtcagcagagagccagtgacgtaggagaaaagtcagaaatactgtgttgtggaagccaagagaagagagcattttaaagagggatatttatgttcacttgggttaaatcatgctgccaggccgggtatgatgaaaacagagaagtgaccgttgatttggcaatgtggaaggcattagtgtcctcagctagagcagttttagtggcatggtggggtcagaagctgattggagagggttgaagaatgaatggaaggtaagaagagacaacgactagagatgatgcttttaagaagttttttttccttttctttttgtgtgtttttttaagttgagaaattcccatcatcgtttatatgctgatgggaatgatcgctagagaggaaaattaatggtgatttgggaaagaaagattaattgtggagtaaagtccttgaggtagcactggtggaatgggatagagagcacaagtagagggattaccctttcataggagtggggatgcaattacgtaatataaaaaagggacctcaagccactttacacacagcccctcccttcagtcttaacaatctcctttagaccagcttgatctttctgtaatcactagtgtttttttttttttctgtgccacattaatatgttctttcagattgaagtcatcctatataaggcttagtatgaagcagttgatgatatttaataacaattttaaattttatgccaacaggtgaagcaaaaaatttattgccatatcttggaccccacaaaatgagagattgtttctgtaccataaatttggaccaggaagaagtttatcgtacccaagttgtggaaaaatctttaaggttggtagaaaaaattggtaaattataatttttactatatagattggtaaatattatgcattttccagattataataatcaagaagacaagacagaaacagtgcttgctttcatgtggcttttcattgcctcaaaatgtatcttcctcttaattgttcctaattttatctttgttttctggagaaaagttttttcacatgacaggctaaatattgcctattcgtttgaactttcctcaaagtacatctttattttatttatctaaagaataagttacttaaagttcatagaagttgcttaacttagtagtgcattatcagggaatgaattctcagatagatgtctcatctttgaaagtgtaattgccctttgagagtatcatattaaattctaattcataaaactggaatataccacctctgcaccgtagcaatgtgaacataattctagtgcagagttgtgctgagaatcttgttcagagaca

SEQ ID NO: 108627 - DNA, 1050 bp, Homo sapiens
ttttttttttttgagatggagttctgctggagtgcaatggtgtgatctcagttcaccacaacctctgcctcctgggttcaagtgattctcctgcctcagcctcccgaatagctgggattacaggcatgcgctgccacacccggctaattttgtatttttagtagagacggggtttctccgtgttggtcaggctggtctcaaactgctgacctcaggtgatctgcctgccttggcctcccaaagtgctgggattacaggcatgagccactgcgcccagcctccttgttggattcttaatgttacttcttcgtaggttctttatttttcttatttgtccctaggagttcttgaatctgtggcttgtcttctatcagttttggaaaattccaggcaattatcttatctcctttttttttctgccctgttctttttttctcttctctgctgtgactccagttacatgaataataggccatttcaccatgtctcatatgtctcctatgctttttccctctctgtgcttcattgtggatattttctactgacctgtctcccatttcaccagtcctcttttcagctgtggctactctgctactaaatacattttcattttggtttattgcttagttctaacttttttatttcattcattttatagtttccaggtatctgctggatttttcattttgttttatgtcttttaaaaaatagctattttaggctggatgcagtggctcacacctgtaatcccagcactttgggaggccaaggcgggaaaattacttgaggtcagaagttcaagaccagcctggccaacatggtgaaaccgtgtctctactaaaaatacaaaaattagccgggcgtggtggcacatgcctgtagtcccagctactcgggaggctgaggcaggagaatcgcttgaacccgggaggcagaggttgcagtgagctgagatcacgccactgcactctggcctgcgtgacagagctagactctgtctcaaagaaaaaaaaagcaattttaaattctgtcaattccaatatctgcgtc

SEQ ID NO: 108628 - DNA, 1050 bp, Homo sapiens
ggaaatgtgttgactgttacacatcccttatctacagtgcttgagactgttttgaatttcttattcttattttttttttgagtatttgcattatatatacttgcccattaagcatcccaaatccaaaaagcccaaatttgaaatgctgcagtgagcatttccttggagcatcatgtcagtgctcagaaagttttgaattttggaggactttggatttttgaatttggaatgctcagtctgtgtttgatagtttcattagtgattgtggcattcctgtttagtctcattttgaaaatacagcataaatttaaaaatgcatacatacatatgtccatacatattactacctattccatataggtagtatatagccatacaactgcagacacatggaaaacaattcttaaccttttgaatgtattagtttgtgtttaaagataatgttttatcttgtttaactggaatctaatatgttaaatctcttttattctaccttagcatcaaggcatgccatgggttgcctctcataaatggccaaagctgtgacccttatgcaacagtttctctagtgggcccttctaggtaatatttattgaattattattaggttttaaagttttgatgtttgatttaaaaatttaaaaagtaagattctacgagcaaatgataaatagctatttataacacacagtaataaatgctttgaaagaaaaatctttagtgagttctattatacacttgtcaataacaaagccctctttttacagacagaaattggtaccccattttaaatctgccatgctcttaggctttaaggaacaacttcagttttatactagtacaatgtagtactttaaaacataaacttgacttttcatgcatcagcattcctacttttcaaatatcctgaattttatgcatgtaaaatcctgttttaatgaatgccagttcagaataacaagacaatttatatatttttatctggaaggcagctcaggactgaaaattgccttttctactcatgaaatctgtcctctacagagagaattc

SEQ ID NO: 108629 - DNA, 1134 bp, Homo sapiens
ggctgggcacggtggctcacacctgtaattccagcactttggtaggctgagtcaggcagatcacttgaggccaggagttcaagaccagcctggccaacatagcgtaaccctgtctctactaaaaataaaaaaaaatagctgcccatggtggcacatgcctgtaatcccagctacttgggaagctgaggcatgagaatcacttgaacccaggaaggagaggttgcagtgagctgagattgcaccactgcactccagcctgggcaacagagtgagcctctgtctccacataaataaataaataaataaataatacttttataatacttgtcatttgtaaattagggatttcctctctaattaaatatgtgttttgttttataaattactattatgtgtattcattaataatgaagaacttcccattataattaatgacatgtaagataaactgaattttttataatgtaccttatcacacagtgtaatatttgcccatttccccatttagttcttggatgaaatttcatctactgaaactaaagagtccagtggtacgagtgagcctgtgcacctgaaagaagggtaatttaatcaaattagacgtgaaagtcatatatcagtatagatattaagtaagtacaaagagcgtgggtctaagagtgaggagatctggctttgtgtgctgtgttagaactgccaaaattagcagtcaggtaagtcgcctttactgtcctacaaactttatggcaaaaaagcatgatttcctgtgcatacagtcctagagttgttttgcaattatagtgagatgatgggtatttagagtacttttaaaaagtaacagcactattagtcttaatgtaaagtgtttattataagttaagggggggaaccactcatttgacccttttttgttctgtatagtacaattaaaaatattaaattaattaaagaccttattcctttagtgtggccaaaataaatgcaacagtcatggatagcaaaaacatttttatatatttaatataatcttacactactattcatgtcatttaaagttaaaggatacttctttgttttggattaacttttaatttttatagctaaatgtttacatctgttatgttggcagtgaga

SEQ ID NO: 108630 - DNA, 1059 bp, Homo sapiens
tagccttcaagttctaatgtttttctgcctagtatttaggaggttttcttttttcttccatcctgcttagtacttggtggataactttctatttgaagatttctgactttatcttggggacatttttatgtgtaattttctcctgaatactcttatttgtcagatattaaaacttctaaatccatccacgatggtacttaactattctatttttgcttctttttcttcttgtactgtatttttggaaagacctcagtaaaatctttcattttcactaactcacattgcagttcactccagttaacactgttaactgtgaaattaaccctaatgatatcatgacagtatatgtgcctgggagcaatgccctttctccacatatgctgtgttacaatttgtccagaaatgaataaatatagcaattttcagggtatgtgcattctttgtgtattcaacaaatctaaagatagaaactccttgaaaaattttaaaattctctgactataatgccccctgtaaattagtacccaaagacataggtctcttcccccccaatttcttaaactcctgatttcctcagatgttatcctcctttgttgcacatatgtctcttcttcagagtgatgagtttccttaactggtgattttttttttttttggtgttttactcatctttgtgttttgcagtccatttacctacttgagtgttgagtagcttactgccaatgattatgagggagggacaggacaagctgctgaggggcaggagtgctgttgcttgtcttctggtgtgggtattctctccttcccttctgagagttagcagctacctgtgacattgcactgctctgcagcccagtatgcatccttgctgctttagcctgtgaatatatgcctctgttgactgctgcttagcacaaacctgggaatggggagggcctgattgacccagctgttccacatgcaactcaccgattaatcatcctgatgtatgtctgagtgcccccaaccttcagctgtctgtgtccactggctctggcttgaaactcttccttaacc

SEQ ID NO: 108631 - DNA, 1048 bp, Homo sapiens
caacatgtttcctgctctgatagagttttacatttgggagggaagagacaaacgaataaattaacaagataatttctgagagcagtaggtttaatgaagccgtaaagcaggacacatatccctgcacaatctgtgcgcctgctcagacgtaacaccccgcagcgcagcaggcagattcagcggcgtcgccccataagggcccgagccctctcagttggcctaggacggcgagggcggggcctgcccgcccccctggcgctggcgtcaggtgacgtcactgtgccgcgccagccaatcgtgggcagccggggtctaggcaccacggtggctggcggcctgcgggcggcgctgtggcccgtcgggcggctccacagagccgccctagccttccgccttccccaagccaacgtctccgccgtcggctccgcggcgccgccatggccgacgtggaagacggagaggaaacctgcgccctggcctctcactccgggagctcaggctccaagtcgggaggcgacaagatgttctccctcaagaagtggaacgcggtggccatgtggagctgggacgtggagtgcgatacgtgcgccatctgcagggtccaggtgatgggtaagcgctgcacgcgagtccagggccgccctgcggcctccgggagccgacctcggggttgggaagggacgggcgtccgtcagaagcctcggaaagtgccctgcctgggagagtgggtggaggtcgccctgccccggcgccggaggaacgcggagccacgctcctgctgcggctcctgagggctgcggccgccgcctggggctgcggggttgtgcaacaggcgccctgcgccgggtggttggtgttctagggagagagacgggcaataaacggagttaaacaaggtaatttcaggtagtgatgggtgtgaccaagaaagtaaaaccgggtgattgttgggaactagcaggaaacacttcggtttgtgtgtccagccccagccccacctctaaaagctcaacacaaggtggtcagggtaaaggccgtgattcagcag

SEQ ID NO: 108632 - DNA, 1046 bp, Homo sapiens
ccattccaaaccctcccagtaaactttattattggttccttgggtatcctagtgtttcttgatgtatgtataaacaaatgctaacatatatatatggtttatttaaagggtgtcttgaaaataaactgtccatgagcatgcccagtaagcgtatggtaactttgaatatagtggagtatggcatatttttctctagtagttttctctcttggcaccgtcaggacatcttttcatcagagcttataaaaatagaggatttgttaacccttgtgaaattgctcctggttataattagtagaatgccttgtactttattcctctttaagtagttatgttcagatgagaaattaatagtatgagtctttattgccatccctaacccttagggcttttgactttgaagtgtctggtttttaaaaattgcattctgagcatcagaatgagaatcgctatttgtttacttttagatgcctgtcttagatgtcaagctgaaaacaaacaagaggactgtgttggtatgttgtaattttgttctcttgctttttcaactgaaggttttctctcagtagggatgtttgaatttgaaattaagattgactttatcaatacacaaaaataaactgtaaagcagtgatccattgttaatataaaatatgttggttctcaaaagagtttaatggaatgaacctgcaagtccttttattgccataattaagaagaattggttatatattccagacatggtcataataaacattttggtaatcaaaaattaaatattttctattaagaaaattataaaatcagaaatttgtcaaaacattatttgaattttggctatgttataggtcacttttggttctaataaggcatttcacttttcaatactcttataatacagtatttaactttaaaaccagagtagaaaaattctaagtctcaagtatatttttggaatgtggtttgtgtatcaaattttctttagagtcttagactacaaaagttgtcgtaggctaaatattttaggcagttcaaagatttttatg

SEQ ID NO: 108633 - DNA, 1045 bp, Homo sapiens
gaccctaacccgggcggcggcggcgcagtgcggccccattcattgctccccgggccggccggactggccgcagctcgctcccgaagcagcggggcccgcgggcagcccggccgggccgcgctggttcctccctccctgctgggagcggggcgcacgtgctgcccgggcctcccgcccggcgcggcgccggaagccggggacccctgcccgaagccgggccccgagagtgcaggagccgagcccccgggcctcctttgtacggagcgctccggcccgagaggccctggcggaggcgcccggcccgctgagcggttcggagaagccagaccctgccccactccaggggagaggaaatttccactcccgccgctatcttgtgactcgtccacgctgccaccccgaccggtcggaagagtgcgactgagtgttaagtgtgggtgtgggttgcttaaacgtgtagcggtgagttaatcacagaagtacattgtacaagaaaatgcacttgaatttggacagtgaaaaggcccttaaaaaggttggttcctcccggattcctttttaattacagaggttttcttccttacaaatttgcttctttggggaaagtaaatcctgtctgaacaacacaggttttttttttttttcccgtgtcttcaaaacaggagagtgatggttgtatgttagcagattttttctatgcgtgagctctttgttttaatatatttaaaccatctaccgtgtagagtagctttaggatgcctttttttcctaaaattgtatcaatctctgaatgcaggctagagcttttttttttttttgcctttatacttaagtaaactaattttacctttttaaatccttttgaaacattttgttagtgggtcttgaaagaccatttctttctgagtgggaataaatctcgagagcttagaactatttgggcacaacatttttaggataagcatggagaaataagctgtgactcagaaaataaactgttggtgcagactgaaatggactccttcagggtgaaaaggcgacttga

SEQ ID NO: 108634 - DNA, 1021 bp, Homo sapiens
gactcccaaagctgcatatctaatcatacaattttgttttgttttgttttttgagatagagtttcgctcttgttgcccaggctggagtgcaatggtgcgatatcggctcaccgcaacctctgcctcccggattcaagcgattctcctgcctcagcctcccaagtagctgggattacaggcatgcgctaccatgcctagctaatttttgtatttttagctgagatagggtttttttccatgttggtcaggctgatctcaaactcctgacctcaggtgatccacatgccttggcctcccaaagtactgggattacaggcgtgagccaccgcgcccggcctcatgagtttttaatgttcttataaccacctgcctatcagaaatctccagttggatgtttcataggttatctgttcatataaatctgtgttgttctcaagggctccttagcacgacatacaaactctttaaaatctcagtggcttacttctctcctgtcatctctctctaccattccacatagttatttcctactccttctgggctgtttcctagcttctgggcctctcatccccttattccatgttggtctggctgatcagatgtcagctttgatagtctgatacccagaaaacatctttgaactcctctttgcattaaggccaggtgcagtggctcttgcctgtaatcccagcactttgggaagccgaagtgggcggatcacttgtggccaggagttagaaatcagcctgggcaacatggtgaaaccctgtcactactaaaaatacaaaaaattagccaggtgtggtggcgtagtgaatttttgcaatcagactttgataatgacctgtagttgcaactattcgggaggctgaggtgggaggatcacctgagtccaggaggtcgaggctacaatgagctgtaattgtgccactgcattccagcctaggtgatagagttagcctatctaaaaaaaagttaagactcaacaaaataaaataaaacctttttctatcatagcatt

SEQ ID NO: 108635 - DNA, 1987 bp, Homo sapiens
agtatactgagaagatgaccagataggactcatagacctaaattctagttccacatctctgttaaagcttagataactcaagatctcttagccttgtttcctctataaaagaaaaaagttcagccagatgtgatggctcatgccttttagcccagcactttgggaggccaagatgggaggactactttaggccaggaattcaataccagcctcgatgacataaggagaccccatctctacaaaaaataattttaaaaaattagctggctgtgttagcacacatctttggttccagctactcaggaggttgaggctggacaatcacttgagcctgggaggtcaaggctgcagtgagccatgattgtgccactgcactccagcctggttgaccgagtgagaccatacctcaaaaaaaagaaaaaagacattgtatgagatagtttcaaatgtaactttgaaattacaaacaaagcctacctatataaatgctttagaatgggaggcagcaagattcaaaggaccacgttattgttggctttgctgaccacacggtgtttgttgcaactacctaactccattactgtagcttgaaattggccatagaactaacgggcatggctagcattttatttacaaaaatagcagcagccgtggtttgctttagaagttagagttggtgagtggtcagtgtagtctgactcaagaaatctgaactggtcttaaatgggatgtggactcttggctttgttcttttcttataacaaaagtaacaccattatttttacagtacagatgtgaatatcagtaagtccaacatcatcctcagcttcttccctgggtaacccccgttaagtgtgtaaatgctttttaaaaggtaatatgtggcatatccataaaggtccggcagtgtcttataaaggtaaatatatacccaccccctgagccagcagttctactcttaggtgtgtttatccaagagaaatgaaaacatacgttcacaaaatgctcttgtacaaaaatattcatagtagccctattcataatagttccaaactgggaacagttcaggtttttatcagctaggcgatagataaacttgcatgtctacacaatggaatactactcaatggtaaaaaggaatgaactacagatgtacaaaatgtgatgaatctcacaggttgactgcgaacgaaagccttaccaaagagagtacatactatatggttttatttatgtgaaattctaaaataagcaattcttacctatgctggaaaaaaaaacccagaacggtggttgcctttagggcagtggacagggagaatgactaggaagggacgtgacggaactttcagggtgatgataagtgttctgtatcttgaatagggctttggatcataagtgaatgcatttgtcaaaactcattaagtggtatattggagatttgtgtatttcactgaatatgcattttttctcaattttagttaatacgcatgctgaattgttctctgatgtttgcaacttgaatctttaaaatgagataaatacagtaaaatgttaattgtagaatcttgatgggtttatgggtgttcacttttaggtttcactcaacttttctgtgcatgggtaaacattcctaattgagtgttggagaatatgaatacattcgtgtgtttctctctacctccttcaccagtctcagagtgtttcctacagatgactatcaggtttcctgtcagtccttttttcagcaccatttttatatatgtatataaacatgtttctgtatatatgtggagtatatagaaataagtaggttcttgtctacctttacctgagtaataggaaactcatatgttctggaacttgattttttttcacttaatatgttttggctgtatatataggtttgtgtcattccttttcatagcataatgtattcgtctattttcacactgctataaagaactacctgagactgggtaattta

SEQ ID NO: 108636 - DNA, 2887 bp, Homo sapiens
ctacatctgagtaactaatttaactgccattttacacctgggtaagagcagcaatttacaacttctgtttttattttctgttgttttttcttttagggggaagaggtggttgataaagtatatttatatgtgagactgactagtttaagtttttaaaaattagatttggttcttggcagaaggatcttgttcaagtaaggaaaactcacttcactgctggaaataacttatttacttgtttctaatggccactagtatatggcatcagatttgggacatagctgttgatttgtgtatatattgtatgaatgtaattctttatactcattattttcattgtgtaatagttccttagaaagcagatttggatatagtttgttcatatctgctatatatttatttgctttataactattttgtaaatttaatttacattattttcctagaaatttaaaatcaaaatgttcaaaacagtattgtaacaagaatattttaagatgacttaaaaacactgctaaataattaaactcttagcaattttgtttcagacatctccactttaatgtcaactgcatgggtcaacaaactactgtggccccagtctgcctatttttataagcaaaaccttattggaatacagccacactcattacatttaagtttctgtcagccctggtgtagaggattttatcccttcgttcctgcagacacctagatctcaaagaatttctcttctgtatcttattaaactggcctgtgggctttctgtgtgtttcatttccctctatagcaaactgtttacttctttgagattggtcttttctttttctgcaacaggatcgcagtatgtggtagggaagtgatgctgtctgaaggtgacatcctgttctcctctcttctgtcctctccatccttattttggccacctggtaattgggggggaggggtagaatgctagtctaaattataaaatgaaattgctttaactatttcccctttacttgaaaaagggggttgggggtgattcctgccttgcagttgagaaataaaagttatctagctttcagcacaatctgttttggggtcatgggatcttttgagaatcagaagaaagttgtggagccactccctggggggaaaatatattcagaaatatattattacagaaatgaatctttgatcagtttttaaaccttgaaatacaagtgactttaccaatgtattctaatatacttgttggcagccacttctgatgttagaactttgaatatagacatttgagaaaaataattgattttaagtgttcccaaagtaaatcactggttcaggatagatctatcttagtgttcccaaattgtgaaaggaaagagattaagcccttaatgttgaaacgtgtgtctcccaaatcttgctttgtgcttagcagtagagctatgaaattccattgatcagagggcttgtttctgaccttgtccttttttcacttttgcacgagccctgccatttgaccagtgtgtcctaaactttattcattgagtgctgtcttcataagttggccttatctgcacatttcctgatattctttcaatgaactcagtttttaaaatatatatttttttaattttttaaatatggaacgactcacaaatttgcatgtcatccttgcacaagggccatgctaatcttctctgtatcgttccactgttagtatatgtgctgccaaagtgagcacctaatttttttgtaaagacaaagtgtttcctgggctagtcccaactcctgggctcaggcgatcctcccatctcagcctctcaaagtgctggcattacaggtgggagccattaactcactttttaaaacttaaatttaagcaaataattactgtctgtgaaatatgcgtttcatgtactaattcttttatattcgccacttaaaggatcatgtaaatattgggggttttgtttacctaaaaccatcttgtatctttttagagggcatcaagttcattttgggaaacattcccctatgtactggaattttaaagctttgattttgaaccagagtatgaatggtggaagctgctttaacttggaaataccagggaaaaggaggggtcatgggatgggtgggtgctgtctgctgaaataccccttgcttgggcaaatttatgtgtcctgaatatgaggatatttggctatgtgcatggcaaagcttgggatcgtacccttgcaagaacagttggtttgttttttaacctggccaaacatgcatacacacacacacgcacgtgcacatttcataagttttattttcttttacaggtttgatcttgctcttctacctagttttttatgggttcctggctgcactcttctcattcacgatgtgggttatgcttcagactctcaacgatgaggttccaaaataccgtgaccagattcctagcccaggtaattatcttgcagttatgactttgttttttgttttttgttttttttttgagacagagtttcactcttgttgcccaggctggaatgcagtggcatgatcttgggtcactgcaacctctgcctcccaggttcaagcgattctcctgcctcctcagcctgctaagtagctgggattacaggcatgcgccaccacgcccggctaattttgtatttttagtagagacagggtttttccatgttggtcaggctggtctcgaactcccgacctcaggtgatctgccccgccttggcctcccaaagtgctgggattacaggcgtgagccactgtgcctggcagtggttacggcttttaacaaaattgagttatagtttatcttcaccataaatctgttttatatagcagatagaagatagctaaaccttggagctgagtaatg

SEQ ID NO: 108637 - DNA, 2343 bp, Homo sapiens
gcaggtttctctctagagcagtggttttcaaccactgagtcatatggcagcgtctggaaatatttttggttgttacagctagagaggtggtactgtgaatagaggccagggatgttgctaaacatcctacagtgcatagggcaacccccacaacaaagaattattcagcccaaaatgccaataatgctgagatggaagtgcccttatctagatccttgctcactgtatagacttctgagctatatcaccagccaaactgaactaattgtctcaaccattttttttcctagaacaatttttttctaatgatttcttttgtttacagctaatcttagtctaaatgtcttgaataactcttttaaaactcttagtgtattggagcaagtgtcagagattagttccatgctacttttccttcatctctcattgtagcactgtttttttctacctcagactaattctaagattattctttacttgctatttaagtgatgtgacttaccattgaacatagtctgatctattcaaaaacactgaactctgtttataattgcatgaaatatataagcatatgtgttaaatatttttaagtacacagtttttaaactgagtttcttaaaattatttgtcgattattttagtacttaaagtatcattagtttaaataaatatacatgcatacacatgtacatataatacatatatattacatatgggacatattaaacatttccttatttaatatatcacatgtacatgtaatacatatataatatgtatttatgtgttgtatattatatacatataatatgtattatatgtacatgtgtgatatattaaatatgggaatgtttgaaggctagagaaaattttaggattgttttaaagcctatgtgcaaggttgaattaatctagatctaatgcttttttttttttttgagacgaagtctcgctctgtcgcccaggctggagtgcaatggcacgatctcggctcactgcaacctctgtctcccaggttcaagcagttctcctgcctcagtctcccaagtaactgggactacaggcatgcaccaccacacccacctaatttttgtatttttagaagaaatggggtttcactatattggccaggctggtctcgacctcctgacctcaagtgatccgccagcctcggcctcccaaagtgccaggattacaggtgtgaaccactgcacgcagctgatctaatgctttttaaacaaggaaaacttacattaaagttggaagcctgattgcttgccttatcttcattagtaagcttaagcaacatggtctgtattacatgggtgtcaacttctgataggaaattgttggtggttatactccaaattcagtatgtgaaaaccacattttaattacagagcaatatctgctattgaaggaagaatatttgccataaagtttaaaatgcatagacctttttcattgaaaaggagttagctgtcttatgaatgtttccatacaatttaaatgacaaaagtacgtaggctttgatttgctcaaatttttttccttgtattaatggcacattgacaaaacctaaaaatgttatttgattttttaaaaatgcatatagaaagttcaaagtaaaattgcatcttttaaaaaggaagattataattaactgtagataaccaaatttagggacagtttctaatcggtaatgtctgagatggttttgaaggtttgagttatttttaattttagatgtctatgccttcataattagaattgggaagttcttgatagtttcagcatactgtcaacacaattttccatgtaatttgctgagatctgctttttagagataagaggaaggaaaagaagagaaggaaatttgataatctctcccttttatgtctttataggactcatggtttttccaaaaccagtgaccgcattggaatatacattcagtaggtctgatccaacttcgtatgcagggtacattgaagaccttaagaagtttctaaaacgtgagtatgttttcttagagtaaggtcagagattttagttatagaaattagtaccaaattgtgggccgggcacggtagctcacgcctgtaatcccagcactttgggaggccgaagcgggcagatcacctgaggttaggagccaggtcttggacctggccaacatggtgaaacccctggccaacatggtgaaaccccatctctaccaaaaatataaaattagctgggcgtggtagcacgcgcctgtaattccagctactcgggaggctgaggcagaataatcgcttgagcctgggaggcaaaggttgcagtgagccaagtttgcgccat

SEQ ID NO: 108638 - DNA, 1062 bp, Homo sapiens
gtcttcatgtcacaccctgtgggagtaccccactcctggataaagccatataattactggatgtagctcatccttctgtgcccctgcccctgagcagatactgagcaggactaattagcactgtgagtacttgagcacctccctcaaatggacttgcttaactgcctggtaatcctatggaatttctctggataattctctgaaaggattatttccaactttcactcaagcctctaaccccttacctttttccttacaactcactctcttcatataacctgatttcttgcttcaagagataatagaagaactcagatgggagctcctccagtttccccattaccagtaaaacaaatctacaatggcagccattttgtctgtcacattcttcctgctctgactgggggctgcccttcctttcacctgaggccacctgtgtcactcctgctttggatctcatcctctctcagtgtctcagaaacatactgtgtactctctcttcttgtgtgtatttagcctttctgtctgtattggatccttcctgtcaacttgaaaaaatcttcaactctctcctatcttaaaccaaaagctgcttctgatcccacattatctactagctgtcttcctaagtctcttttccttgacagttaaatatgtactcattatttaaaaaagacttttgtgaaagtattatccgtggtttaatagctttaaaaggtctgcaatgaagtgttccctgccctcctcccttccagcagaagtcctattaatttattgacatattttttgagggcctgctttgtggcaggcactcatttgggttccagcaatgaacagaagaaaaattcctgtctttctggagcttagactcatggtgaattagaagatagtacatcctgagggggaaaataaaacagaaaaaggagatagggtaagttgggaaggattgtggtttttacatgcagagtggtctgggaaagccttatggaaagggaaccttgagggaagagctgaaggaggtgaaagaactagccctggaaatgtccagcacaggaagcagta

SEQ ID NO: 108639 - DNA, 2662 bp, Homo sapiens
ttctatgagctagtctctcacctgggcggctttaatagtctcctaacttgttttccggatcctttctttttcccttctggactgactccacagaaaagtcagagttaatttcctaagtatgttcatactatccacttgccctggtttaaaacattttagtggattgttaattgatgtttggcaaaacacccacccacacccctcaaaattctttaacatagtttacaagactctatatggtctggcttctaccttccttcattggaagtgcttctcctagcttcattaactcccacatacccttctgcattcagctcagttgctttttttttttttagtgtaggttgtcataacactacatcttcatacctctgcaattctgattttatactcacttaatgactctcttccccacaaaaccgtaagctccatgagggcagcagcagtgcctttttacatcctctccattgtatcaccaagcatgcagaaggcattcagataatgctttagccatggctggtactgccacctaatggtgacagaagagatggatctataatccagtttgtatgattattgaaatgcagtaactttagagaactagttagctgttaaaaggtaaaggggcaaacttaacattctttccctaaagttatctggtaatttacattgctgtttttgtctttgaagaacattttccaaaggttaatatattcctggttgtttttagtaccttttttggctgatctagcacacatatatgtttcctttttagcatatactttagaagaacagaagaacctcacagtctgtcctgatggagcactttttgaacagaagggtccagtttatgttgcatgtcagtttcctatttcattacttcaagcatgcagtggtatgaatgatcctgattttggctattctcaaggaaacccttgtattcttgtgaaaatgaacagagtacgtacatattttacctctgctgctgcttttttctaatattctcttttaaggaggcaactatttttagattgttgtggttgggttaatgccttccttattaaaagttatcatttggggggtagcttgctttaaagactagcagtaatgtttattgatcactggaagaaagtttatatggcaaaaaaaagaggttcatagattaatcatggagtaaggagttaaagtaacttttaaacttttcttctttggaaatagctacatgcattccagcacacattaatgctccaaggggcaaatgttctccttgtcataaccaaagcagagacttgttagggtgcagtgctcatctgtgaatcctgtgttgtaaaataatttaaaattccacagactccataaagtttaaacttattaactttttcgaaatagtagcaaagcatagttttatagtatcagtatatatatatgtaattagataacagaaatacaaataaaatcccattctaacgagttcagtgggatgttgcagttgtatccaaagtagcagcattttgctgttttacagaagggtgcctaaattgtatagtaatgagcaaaggaagaagctaatgttctctgtgtgacaggagtaatgaattagggtcattgtgcaaaggaagatgatacggcttttcttgagtcatgaagtgatccctagcccccgtgccttgctgctctgtaaatgtacttcagagttgtgttctgatgcgcttactgttttgaggcctgcaaggtctcccttgaagagtgaagtcattcatggtcatttaaaacaggtgtagacttctcaaaatcatgagtttatgaatcactaaagtcatcattggtgagcaaattgccaccatccctaataaaagtaaaatttggatcttttgaagttggcactgctaaataagaagcttccctgtagggagaaccagctaggccctgaggtgcccagactgacacccctccaacctctgcttcatccctttgggaggccttggacaactgacagcttccagattgtcccatagcattctaggtgctcagtaaatgattagtggaatgtttcaaccagaccttattcagaattaagaattgaagttaacaaagtaagctgaaagtaatgtgaaactagatgatctagtttataaaatgaattaagtttgttttaacagagatgccttttgtaatcccagtctactagaagtatcctcacgacatctagattgctgaacatttgttcccagtagaaagccaggagaggatcaaccttctgggtttgttttctttctcaagatggtctccttgaatgataatggcctgagaccatgcttgctgatgactcagggcatggctttgtcaggaggacagcatcagacacacaggaatcattgatgagatgagcttacgtagtgtagcaggaggtttcataccagtatagttcccagttaggacgcaacaatacttgtcttttgagaggaatatttagattttacgtgcattcacgtggaaactgtgtataaattcagaatgccaaaaaattatctcacaaaatgtataaatatgtgagtttattcagttctgtcagctacatacacgaaaggagtcttaaaatagggctctcccagtgtgtgccttttggggagcagatgggttgtgagatacagtgaggctcagt

SEQ ID NO: 108640 - DNA, 1050 bp, Homo sapiens
aagggtacttttgtttcatttaattctttggtaatttatttattttctaaattgccccagtacagtaataagatatctgattgctgaagttattttatttaaaagttcattttaataccctcaaataagattaaagtaaaaggcagatgtatacagacttggtgttaatctcaaagtcttcaccccttgttcccagcaacagagggaggaagttccattgcatacttacgtgaagtttaaatttatcactatttcttaaccttagataattggattaaagcctgaaggagtgccaaggatagattgtgtttcaaaggttagtattcaaaaagtaactcctgttaaatctttgatgtttcttaaaatactttaaaagtctaatgatttagtcatcttttttttcttccctgtcacattttaaagtcctttgtagtgccttagaataaaattccaccaaccgtagtctttctcttccttaatgataattcagaaagacattttccatgtgtatttgattttgcacacattgcctttattttcacatataccgtatttcatcaattctaagattcactttttttctgccagctcagtaacactgaaattgggattacccttgtaattgatggtgtcttaatactgtatcatgacatttttctctttcttaatagttagttggcgtgctagtcatcagtgctatctgagatttaatgaaatatggtgcattttccttaaggtagaagcattatttatctcccctatccctacttacttttttttccagaatactgtgcagttttcatctcataactttcttttgttttctctccatgctgcaaatgccactaagacaaataatgtaaaagatgggtaagagttctgaggagacattaagttctaaatttatcattgtgctaaatattaacatttcaactctgattgtatggcagaaatattttacttagaatgttacattgaaatcacttttaaagttgtgaaaaaaaattctttttactgttaatggacttcttatttgggcagaaacttctt

SEQ ID NO: 108641 - DNA, 1035 bp, Homo sapiens
gggactctcatgaaagagagtatagagtgtatctggaagtgtaagtatcaggatagttcatgtggaaggggttagttagataatatttgcaatcaagatgagcaagcttcttctcagaaatacacttgtaatgataatatagttggagcagcattgtagtttctgcaaactgttcatgattgatattcctttaattataaacatagtttttacaaattctttttgtgacctaaagaggatttcttttgttttcaacttcagaatgaagatataccaaatgtagcagtttatcctcataatggaatgatagacttaaaatatttcccatattatgggaaaaaactgcatgtaagtattgagaagttcttatgtggtgattactcttttgggaagctggagcatgtgttgacgtaccacttgtctggggtaggtagacgccagccctgtttaatttgtgcgtcatctattcaggttttgttttattttaatggtgatggtaaatggagttcccacatttacaattcagaacacagaacccaagcagatacgttaaagttagatgattatttctaaaatatcattttctttttcattatagaggtagtagtaggtgcttatgtagagaaagtagaaaagtacttaaaaagaaaatcaaggccgggtgcggtggcttactcctgtaatcacagcactttgagaggccaaggcgggcgcattacctgaggtcaggagtttgagaccagcctggccaacttggcgaaaccccctctctactaaaaatacaaaaattagctgggcgtggtgacatgtgcctgtagtcccagctactcgggaggctgaggcaggagaatcgcttgaacccaggaggtggaggttgcagtgagccaagattgtaccaccacactccaggttgggtgacagaatgggattctgtttcccccaccaaaaaaataaatgaaaagaaaatcaaggccaggcgcagtggctcacctgtaatcccagcactttgggaggccgagtcgggcagatcacgag

SEQ ID NO: 108642 - DNA, 1928 bp, Homo sapiens
acaggtatggacttacagctccaaaaaattaaaaagaatgcagagaacagaaaataatagagctaaattttttttttaatttacaagccacgtatggtggctcacacctgtaatcccagcactttgggagggtgaggtggaagggccatttgaagcgaggagtttgagattagcctgggcagggagaccctgtctctacaaaaaaatttaaaaattagtgggctgtggcggcatgtgcctatagtcccagctacttaggaaactgaggtgggaggattggttgaggcttcaatgagccataattgcaccactgcactgcagcctgggcaacagtctcaaaaagaaaatttacagaataagccaattcctggtagagagaagtattaagtttccatagagtttgaattaatatattttccttttattgccaggttgggtatctacagccattggttgctgttcaggtcagctttgctcctaacaacactgggaaagaagtaacagttgagtgcaagattgatggatcagccaacctaaaaagtcaggatgatcgtgacaagtttttgggacgagttatgttcaaaatcacagcacgtgcatagtatgagtaggatatctccacagagtaaatgttgtgttgtctgtcttcattttgtaacagctggaccttccattctagaattatgagaccaccttggagaaaggtgtgtggtacatgacattgggttacatcataacgtgcttccagatcatagtgttcagtgtcctctgaagtaactgcctgttgcctctgctgccctttgaaccagtgtacagtcgccagatagggaccggtgaacacctgattccaaacatgtaggatgggggtcttgtcctctttttatgtggtttaattgccaagtgtctaaagcttaatatgccgtgctatgtaaatattttatggatataacaactgtcatattttgatgtcaacagagttttagggataaaatggtacccggccaacatcaagtgactttatagctgcaagaaatgtggtatgtggagaagttctgtatgtgaggaaggaaaaaaagaaaataaaagtgtgtttgaaaaatattatcttgggttctttgtaaaatttattttttacatgctgaattagcctcgatctttttgattaagagcacaaacttttttttgtaaaacatgtaaaaaaaaaaactgggattaatttttagtgttggaactgcctcttattttaggctgtagataaaatagcatttttaggttagccagtgtgactatgcacctaattttttatgagattaaattcataagacttaatttgtacaatagtttgtgaaatatcttgttactgcttttatttagcagactgtggactgtaataaagtatataaattgtgaaatataaaaacttggaacttattcaaagcttcaaagcaaacaacagttttgtgtaagcattctttcccctccagtattaggtgtattcttggtaggattatttgtgataatttgggctacttggctgagaaagttgtgcttcccatatgatctgtgttgcttcttgttttttcttaaggctgttgtttattgttacttttctccttttttaaaaaaaaaaaaaggcagccgggcgcagtggctcacgcctgtagtcccagcactttgggaggccgaggcgggcggatcacaaggtcaagagatcgagaccatcctggccaacatggtggaatcccgtctctactaaaaatataaaaattagctgggcgtagtggtgcgtgcctgtagtcccagttactcgggaggctgaggcagaagaatcgcttgaacccaagaggcggaggttgcagtgagtcgagatcacaccactgcactccagcctggtgacagagcgagactctgtctgcaaaaaaaaaaaa

SEQ ID NO: 108643 - DNA, 1084 bp, Homo sapiens
accaaatgtcattacttttgtcttaaagaaaagtctatttcaagaatatgaacagcagtgtttccttgtacatgtcaccttttttcacattttcattaatcagaatgaccttattgagcctactcctggggtcaattgcatttcaaactaatccaatatttagtgtttcacagaaacactagaaaacgttgaacactcctactgcctggatatatggtagtgcagttatgttgtttatggctcaagatgtcattagaaatactgcagtggtgtattcacagctgctccttctctgaatgaaagagtgtagggacacctgccaccatggccagaccctgactgaatttcacattaaggctttggaaaggagcaaataataatgggagaattaactccaaaactttgacctgaatcatgtggatttgtcccaagattatgctagatgcaccaagcatggcccaaattggttcttttttaaatcccatgggggaagtgcaggctccttcctgtggtgcctctttatagcctcaccaccatgctaacactgagcatggtgaggaggaggaagctttggctagctaaacatgtttaataaggccataaaaactgagaaagaaaaacattcaactttagctgaagctcctttgatacaaaagtttcattctgtcagaaataagccatagtacagactcagagatagaggcagtttctagagaactcggtcttatcgtgggttctggagcacacctctcagaccagtcaggaacactggggaggtgacagcaggtccccaggggcctgcagggaatctttcagctgcacggattgggatttccctccaaaccaaactgtcctttaaggggcagcctcctcttttactaactccaccctttctcatctctgggacccagcagggacctggagaggccaacagccactgctacctttgtagtcttcaaaatattgaactgcaggtcccaagatgcatttcaggatttaagacaggtgcactaatgataaccattccttcaccaagtagcaacattcttgccagagttcttgggaaacctgtttttttctctac

SEQ ID NO: 108644 - DNA, 1035 bp, Homo sapiens
tgcaagggccccccgcctctccttgcccctcagcccacctgttccgtctccccacccagctttcctctctccacgctctccagcctgggtcctgctgtgtcattggaaggccagcagaatctgaataaagggcttactcaataaatcaccagaactttattttagcttactcccagtgaaaaggctcagggcgattaggcaggctctgtggttttgatctcttcgtgacctcatttgcagactgggatacagactttctggttagttcaaaggaagaaacatgtgcctctcgtgtgtaaaggggcagaatggcctgggtgggagtgtgagaaccattgtgtggatcctgtgataataggaaagaaatgtaggcttttccaattcattgtaaaaagagaatgtaatgtgttatgctcacaaacaagtaaatagctgtgttctgacagaaggtttctatagttctatatactaattaatattcagcacaagattctggctttaattttattttcttgtacagacttgtcgttatttaatgtatttaaagtctgctattcttcttagacttgaagtctcttttttttcccagctgtctcaaagaaaaaggttcataagacggttctaaaattagcatagtcatttagtttacttttttcctacgtgggaatggcctcttgtttggataccagagtttccaatctaaatcatatagtttcatttttttgtatagtaattgcaaaaagattttgattcaattaaatcatagctcattttggcagattacattttctgagtatgtgtttgggcttatagaatttctttttaggaattacttttaatgtatctaccacttattttgtaaagtggcagctgacagagactatactcattcattcagtaacttttttgtttttttgtttttttttgttttttttgagacagtcactcaggctggagtgcagtggcacgatctcagctcactgcaacctccgcctcctgggttcaagtgattctcctgcctcagtctctctagta

SEQ ID NO: 108645 - DNA, 1962 bp, Homo sapiens
gtggagggaaggaggctctgagtagcttgtacaagcttgttatccgacgtaggtccaaaaaccctttcagttactttggtgatgcagtctttccccataattagccaagaggctttccacaatgaggattacatttacaaaacgatctgcttttaacagatgcctgaaatcatccctgtggcaggcacccacttcagatttttttttttaagttgttattgtactttaatcaaattcatatactttagattacttaaattggtattttgcttcaaattataatttttgcttctaagataatctgttattcaaattatcttagatagggtataaagttttaccctcacatgattttaatagaatttcatgaccaggtgaaacctaccattgtccccaaaccctgtccctgcagggctgaggcccatgatgaaggtgctccaggcctagcctaggagtcggaaggactgtgtcttccttcttttgcctcttgattaacgtgtgttgggctgctgggaagctgggaatccaatttgggtactttccaaacatatttggaaacgtgcttgtattacatgtgacattttttcttaaaacattttactccttagcctctcaggacaggatttggggttgttttcacttgttgaaagtcttctatttattgcttatctgaagtaggctgtagctaacatttgactcatgaaaatgaagtaagcattcaaaatgtttttttcctcaaagctaacaggccaactcggaatagggatatcgtaatattaaagtagaaaggcttttcttttgtggcaaagctgtaggcaactttgagaagtactggatttagaataaaatttctatcctctgtttgtaacagagttagggctaaagtttgtgggtttctatcatctgtcagaggaatgttgttttaattgggaaagtgttttatttgagatgtcattcccctgacagagcagaatgactcatggctctctaaatggtagcaatttctagcactatagctggatttaggcccccattctgttacttaaactatagaatacaaaactattcagacctctccagcaccaccaaaaaccctttactttgtttcctgatgcaggtttgagtatcttttcaattttgacaacacctttgagatccatgatgacatagaagtactaaagcggatgggaatgtcgtttggcctggagtcaggcaaatgctctctggaggatctgaaacttgcgaaatccctggtgccaaaggctttagaaggttatatcacaggtatgttaactgatgctttcatgtgttgtccctgattaaatgttgaatccaaacttgttaaaacctttcttatagaaaattgcaaaattttagaacatctgtgcttgtgtcgacaaactgaaacctttaacactttaggaccattttttcaaaaattagattaaatagtttgtttcataacattatgaacttacatctatacaccacacattatatactattacatctaaattggctcactcagcactgaatttggctcttcagagagatcttgtaattcccagtacctagcttagagcctagttagagtaagctagtaaaagctcaatgagggagttttaaaaaatcttctcttagtgccctgtggatacttcaagggaaactttgggcaatttacaaaagaaagtaggtacatcctggccgggcgctgcagctcacacctgtaatcccagcactttgggaagccaagacgggtggatcacctgaggtcgggagttcgagaccagcctggccaacatggtgaaaccctgtctctactaaaaaaatacaaaaaattagccgggcgtgatggcacatatctgtaatcccagctactcaggaggctgaggcaggagaatcacttgaacctgggaggtggaggttgcaatgagctgagatcgccattgcactctagcctgg

SEQ ID NO: 108646 - DNA, 1928 bp, Homo sapiens
tgaaataaacaatactgatcataagattgctaaaatgtaaaaaataaatttatcactactgggtgacaagattataacaagctaatgaaggggaatgaatggctctgacttgaggaacttttaaaacgttatctgtttcttgagcagatgaaaaacttgaactgcatacagtctttctagctgtgaaattctatcgtacatttaccttattaaaaaaagggagatcacttgtttgtttgttggttggtttttctcagacagagttttgctcttgttgcccaggctggagtgcagtggtgcaatctcggcttactgcagcctccgtctaaaagggagatcactttctttggcttttgagtaatggttataactaaaagtagcggcaagatccagtaaaaaaatttaggccttgatgtatcttataattagtgctgagcctcagttacctcatctggaaatgtctggttggggaaggctggggctggattccaaactgtgcccagaggctgctgagaagttctgtggaggtgccttagaaaccatgtggctgtgcttgagggcagagatggcagagcttaggacctggcctcactgcagccagcctcaacagcaccacttccatctgttttacatgagtttttttttgttttgttttgagacagggtctcattctgtcacccaggctggaatggagtggtatgatctctgctcacagcaaattctgcctcctggattcaaacaatcctcccacctcagcctcctgggtagctgggactataggcacataccaccatgcccagctagtttttgtattttttgtagagatagggttttgccatgttgcccaggttggccttaaactcctggactcaagcaatcaacctgctttggcctcccaaagtgttgggattacaggcgtgagccactgtgcccagcctccctcgagattttatttgaagaaacaattttgtgcctttaaaatgtttgcatatccctgggctacacatcctaaagtttgggggcatatttgaccccaaactgtcaggagtctatgttagataaatggtatcacccttgctgtgtcatttgctgaagagttccaggtgcctactggttctttcccagattgtgaggtcctgtttctatggatgatggaaaaatgtatttattgagttggatcattctttcttaaatgtttaattttttaaattaattcattagtgcaggcgggatgtctctttaaactctaattttaaactatatttaaaggtattatcttaattcttttaaattccaactcacttatgcacaattgaccatattgtttttattgatcattacagcaaatcgctttcaaaaacctggtacagagaaatcgacaaaatgagcagcaaaaccagggcccgccggctctgaactctaccattcagctgccattcataatcatcaatacaagcagaaaaacagtcatagattgcagcatctccagtgacaagtgagtggagaactagggatgggtgcagggctggccttctgttaacattttcatatcatttgcaaactcaagaaggatgcactttattagttgcacccctcaaaggctggcttccttggggcacatgaaacacctcctgaaccatgggtgcaatcttccactagtgtgcgctccaaccctcaccctctgtggtcccctgtcttgtgccaggcactgtgctgtctgtattatatgtgtgtggcagtgtctgggcccaacctatgacgtgctgcatgtatgtggtaactctgagcaagtaactgtgataagttagcccagcactgtgggtctgggacaaggtagattcattggtgattcaccgtcatagtttattacggaaatattttaggtcaacatgtggcattaaaccaattatttctttgttttgctatat

SEQ ID NO: 108647 - DNA, 1013 bp, Homo sapiens
cacaggttatacaaggcaaatctctgaccccaaggtactgtcattctcaccggggagaagagaaatgtaaaagagttaccgaaaatgtgattactcctaagaaagaaatgtacagattctctgcaaagagggctgagggagggctttaccaaggagataatcccagagctcaggcatgaggtgggagtagtctgccaagtggataagggtggggagggccttcaaggcagaggtgccacatgggctgagacaggcatgagaaagcttgcctggagctgggtgtggctagggaacaggcatggagaaaggaggatagatatctaagtgttaagcagtggagacctgatcctgtaaacaaagggaagcagttgataaattacaaagagaagggttgataggatgttttttaaaggatcactctgccagtgggttggaaataaaattaacaggtagggaaggaaatggaatgggggaggcggattagagatggtctgagttacggcagcggccatgagattggagaggtgttttagaggtacaatcagtgcagcttgacctggttggatgagggacaggtaaggggcctggcttgtcagagcttctgataaagggatgctcctacaacatcttttcaaatgcagaacgccacacagattttacagtgaatcttaagtaatttaaaagtaaaacgtggtggatagaggaaccatgaatggaaactgctagtatagactagactggatgtggagcaagtaagagataatctgctggagcagacaagaaaaatgtcttatttgatgattgaaagacaaaattgtaacaaatttagtttaaagatcttaattgccttttatttgtgattctagaatctggcaacacctcactagtaagtagaatgagtattcctataagctgagcagaagaggttgaacattcttcagtgttttaaagatagagaagcagcaaaggcggatagaggcagaaacagaacaaaaagcagactggacatatca

SEQ ID NO: 108648 - DNA, 1194 bp, Homo sapiens
gtatattttatatacgtgtgtatgtgtgtatttctttgactaatatatgtcttactggaagaatgcttatatcagaaatctggcccactggcttggtgcagtggctcacacctgtaatcccagcactttgggaggccgaggcagaaggatcacttgagcccaggagtttgagaccagcctgggtaacatagtgagactctgtctttacaaaaacttagccgggcatggtgatgtgtacctgtagtcccagctattcaggaggccagtgtaggaggattgcttgagcctggaaggttgaggctgcagtgagccataatcatgccactgtactccagcctgggtgacagaatgagaccttgtctcaaaagaaaaaaaagtattctgacccaccagtacaagaacttacacaggaaccagcagtatctttcaatatgtctctttgaacaatatcttgtggtatatagagatacatgctgaaatgtctacggatgaaattatatgatgtctggaattggcttcaaaataatccactaggagaaggagggtaaagtgggtggtattatagataaaacaatattgtcttaagttgattatttgtttaagttaggtaatatttctgtggggtttcattattcctttcctttctcttttgtgtgtatttgaaatttttcattataaactgtaggaaaaagatctattacaatacaaatagctatgagagaaacatcagcttccttaaagggtttatgtctaaggtgggagacgtactctagagcagaggtccccaattcccaggctgtgagctcatggcctgttaggaaccaggctgcatagcagaaggtgagcggccagcaagtgagcattagattctcataggagggcgaaccctattgtgaactgcacatgggagggatctgggttgtgcagtcctttagagaatttaatgcctgattatctgaggtggaacagtttcatcctgaaaccatccatctctctccacccccatccatggaaaaattgtcttccacgaaactggtccctggtaccaaaaaaggttggggaccactgttctagagagcaggctagagacatctatattccaatataaaaatgtctagcttattttatttattttttttttggtggcagagtctcactctgttgcccaggctggagtgcagtggcatgatcttg

SEQ ID NO: 108649 - DNA, 2909 bp, Homo sapiens
ttgaggtttttgaggtttagttgaggttgtataataacaaaaaggtataaactgatccttttgaagttattataatacatgtatttaaatggttatattgtatcaagcatggaatttattaaaggctgtctttgccttctttgctttctttttaaagtagaacaccaacaagttttgcctctgtcatcttcctatagcagaagagtttaaaaaggaggggggagttattagtaatggcacaataaactcttcaacaaatcaacaagttggatatttaacattatttgtgagcaactgaagagccataacatatagttatttgttgcaaattttgttggaaagtattgtctttatttctaactgaaaagtgataagaagctggacaaagttaagtatctgcactattatctacatagaattaagaggccattttctagatgacttagtctcagctactgtcataaaaatttgatgatgatagattctagagatttgcatcaaaatcacttgttaggatatgaaaaatatgtaaaaatattactgctaacatacttcttgacagaaagaaacagctattagtagagcatttgaattcttagtagagcattgaattatcaaataatgaaataattagctcttacattgatattataaactatcaaataattgcttatgaaaaatataaatacagccaggcgtggtggctcacgcctgtaatcccagtactttgggaggccaagacgggtggatcacttgaggacaggagtttgagaccagcctgaccaacatggtgaaaccctgtctctactgaaaatacataattagctgggcgtggtggtggacgcctgtaatcccagctacttgggaggttgaggcaggagaattgcttgaacccgggacgcagaggttacagtaagccgagattgtgccactgcactccagcctgagcaacaaaaacgaaactccatctgaaaaaaaaaagaagaagaaaaatataagtagtcagtgtttagaacaataagtggatagttataaagttataaagctttgtgtgctttaaaatcttttcagattgctggagatctgatgtgctgcacagtgatgataattaatagtactgtattgtgtgcttgtaatttgctaaaaggatagatcttaaattgaatcttcgcaacacacatatacacaataatagctatatagaggtaatggatatgtcagcttgactgtggtgatcattttacaatgtatacatatatcaaaacatcaagatgtacaccttaagtgtatgccatttttatatatcaatgatatctcagtaaaggggttaaaaaatcctttccatgtggtagtgtcttgaaagtatagtttgagggctgggcgtggtgactgatgcctgtaatcccagcactttgggaagctacggtgggcagatcacttgaggtcaggagttcgagaccagcctggccaacatggtgaaaccccttctctactaaaaatacaaaaattagctgggcgtggtggcaggtgcctgtaatcccagctacctgggaggctgaggcaggagaatcacttgaacccgggaggcggaggttgcagtgagccaagatggtgccattgcactccagcctgggccacaagagtgaaacgccatctcaaaaaaaaaaaaaaaagtacagtttgaggtatcataccacaaacttgtgatgttacaagttagtgtaatgtaacaaaattgtaatgtttcaaggttacaaatcttcaatgcttacaaaaagtatttgatagtaataatagagccaatttttggatgtttgcgttctgccaagttttcaaaaattgagggttttttttcctccaggctttgtaatatatttctgatattctgtttgatgatattcctgtattcagctctgtgatgccaagtagtgtagtggatattaccttaaatgaaataaattatctaaaagtgaattcataaatacttgctgtgggtagtccctcaagtataatactgacagtaacgtatgctgacatggattgagcagtatgtgccaaatcctgtgctatatgctttacatgaattatctcatttagtctttataacaacctgaattgctaagtactggtatcaccctccaatttacagatgaggaaatgcatgacttgaccaaggccaaacccctagtaggcttgatggtccagaatatgaatccaagcagttggacttaaggccaatgtattttacttctgcattgtggtattaatggtctttatttgattcctcacatgtcatagtattgaaagcattttagatagtgattaagaatagtacaaattaagggcaacagtggggatggaattttgaaatatctattggcaacttcatggctgccacattacttacttgctttcaaagaactgtcagtaaaatctgtaaaatctcagttctgctcataagtaatagtatttcattaatttttatcttaagctggacaattcatattcccctcaccttttttttttttgagacagggtctcactctgtcatccaggctggagtgcagtggcatgatctcagctcactgcaacacctctgcctcccaggctcaagcaatcctccgacctcagcctcccaagtagttgggactacaggcaatattcttccccttttaaataatatgtcaacatttcattttaaaataatactcctgtggttaatataattaattcatttgatgtggctatatatatttgatatggatgtctgatggaagatataaaatagcttgttaagtgaacacatactacttaatattctatttttaactttttaaacggttttattcaggttggtttgacttccacaaatgcagaagtaagaggatttatagatcagaatctcagtc

SEQ ID NO: 108650 - DNA, 1640 bp, Homo sapiens
aaatggggattaagatggtacaaacctcatagtgttgttgtgaagattaatttagacagttcacttagataacaatgcatgtcacatagtaaatatgacataaatgttgcctattattattattacattactattccctctgttttcctttaacaggttgttcttttaaagaattattgaagacgaaggtttttttctttttatttttttaatggctttacagaatcttaaatagaatacagtttgacatgacggcaaaaaatgtaagtatttgtaaattttttaatgtaagtattgtttaaagtgagctgtgctttttcctacatattttctcaccattctggttaaccagatttaatttacttgcatggatttataattgtatttgtttatgtttatgcagaatatgagataagctttaatgcgattgaatatggtgccctaatggagatagtagcattcttgcaaattggcaccaagttacttctcaacagctgcaaattgctatctccagaaggtttcccaccctgccctcctcttttggatattgtaataaatttgttttggtacttgctggagggttacttggcctttttgagcaaatcactgttttctttggcttattttttttttttttttttggttactcagggaaatgtatgtgctcagatattgtctgaaagtagcttgctaccttccatgagatggttcctgaagaaacattagattttagatgttttggagaagttattcaagtttttccctctacttgaggtgatcatttctgaatatacctcctttcaagttgtatgtcactctttatttatttatttgtcactgtttattaatgagtttgtttccagttatggtaaagaattgtgccttaaagagtacaacatataggggaattatttgtaaattgctttactgttccaatgttatatgtattaaagtctaattgctttactgttcctatattattatgtaggaatctttgactgggaattaaacaaaaagggaatttgttataaagatgcagggatatctcaaggaatttaagagtgggaattttatgggccctcagaaagatccaggcccagaaactagaaatccagcaggaattgaagcagtatttggttttcatttctcatctctctcagcttgttactgtgtacctgcttcatttctccctctgtctgtctgtccaaatcatctttctcagttccccagccaggatggtggaacatggccccactcagcatttccatctatatgttaggggaccagcctgttcagagagaggtgtgaagaaagggaaggaggcaggccaggcatggtggctcacgcctgtaatcccagcactttgggaggccaaggtgggcagatcacctgaggtcaggagttcgagaccagcctggccaacatggtgaaaccccgtctctactaaaaatacaaaaagtagccaggcgcggtgacagacgcctgtaattccagctactcgggaggctgaggcaggagaatcccttgaacccgggaggcggaggttgcagtaagctgagattaccccattgcactccagcctgggggacaagagcgagacttcgtctcaagaaaaaaaaagggaaggaggtagcttgatg

SEQ ID NO: 108651 - DNA, 1092 bp, Homo sapiens
ttcagtgtcctgaccaagatcacaggttgaattcagttttcatatgtttttagtctttttttaaattttttatttatttaattttttttgagaaggagtctctttctgtttcccaggctggagtgcaatggcgcgttctcggctcactacaacctccacctcctgagttcaagcaattctcctgcctcaacctcccaagtagccaggactacagacacgcaccaccacacccagctaatttttttgtatttttagtagagaaggggtttcaccatgttggccaggctggtctcgaactcctgacctcaggtgatccactcgcctcagcctcccaaagtgctgggattacaggcgtgagccgctgcgcccagcagtttttagtctttttaaatctggaaagtttctcagcctttctttgccattcatgacactaacattttttgaagaattcaggccattattttgtagaatgcctctcaatttggatttctctgatatttcctcatgattaaatttagattttgcatattgggcaaacgtacctcagaattcatgctgtatccatctcagtgcgcttgaagagacacatgttggcttgccccattattggtaatcatttggtaactttgatcacttggctaaagtgatttatgccatatttctttcactagaaaatttgaattagtaggtattttgtagggagatatttcaacgctatggaaatatcctatttttcaccatattttcactgactagttttactgtgtattaattattcttttcttattagttatgatggttccaaaatggaagttttactaactgtatcactcatttatatttattagttggcgttctactgcaaagaatttctcatctccccctttagccccagtaatcctggattattattttattcaatgggtttataatctgttactatcattatgtactttggtgttcagttgttgaaaattgtccagctgtaggctctattcaatgggtttataatctgttactatcagtatgtactttggtgttcagttgttgaaaattgtccagctgtaggctctttaagctgatttctgtgta

SEQ ID NO: 108652 - DNA, 1020 bp, Homo sapiens
ggaggctgaggcaggaggattgcttgaatccaggaggtagaggttgcagtgagctgagattgagcaactgcactccagcctgggtgacagagcaagactccgtctcgaaaaaaaaaaaaagaaaagaaaaaaaagaaaatatcttctaattaataccacatctcaaaagtttgaatgcacagagagaatactgaaaggatttatgccaataagttattgtagttgcttctgacaagtaggattatggctgatatttgtttcttgctttttgttttgtgtattttctaaattatgagtcatgagcatgtatttaaaattagtaacatctgccatttaaatatgctacctttcctattaatttttagtagcagcttttttggcagtgttagaaagtctacacatcctgattcaaattatgttactgcttgattctacaaatttatccataactttgtgctttcttccttgtattttgattaattttaaaaggctttgtggctggagctgctaaattgtgattggaatgggaaagggcttgcattttgagaccatctgtgggagttgcattgtctgaaactgacgagatcatggcagatggcgaggtcaaaagattgactttttgagcttgacataatgtgttcatgaagctggaagaagaaatccaacttatttttttaactaacagaagagcttggtgacaggaagaagtgtgcaattgttgagtctggataaaacataatgcatcagtgcacatgactggtttatctctgagaatcatccatactgccaaagatggcaacttcttgaacctttctgtgccaaatttatttaatttctagacactttggaaagtttaagtcatacaatgcaaataatttatagattaaagacaatgtcaaaaaagacaaaaactttaaaactatttagaaatgtgtatttttaaattaaaatgctataaagtatcactcaaagccaatacagcatacttaatttttaattgaatgaagaaagtctctatca

SEQ ID NO: 108653 - DNA, 1183 bp, Homo sapiens
gtgaaacaccatctctactaaaaatacaaaattagccaggggtgctggcgcatgcctttaaccccagctacttgggaggctgaggcaggaggatcgcttgaacccaggggccagaggtttcactgagccgagatcgcaccgttgccctctagcctgggtgacagcgagactccatctcaaaaaaaaaaaaaaatgtagcttactgacatttcagatgtgtgatgtgttaaatgtctgcatggcctttcattttctgctgccaagtcatactgaatgggattctcgtacatttttaaaggatggaaataaataaaatactgagtctataattcatttaacaaatatttcttgagcttcaaccatatgccaggcatttgatatgtaagggtgaacaaaatgcacagggttcctgtgctcaaggaatttatactttagttggcagagacagaccacaatctgattatcacagaaataaatagacaatggcaacccagtgtgtactattaaaggagaaagtaggagagcaataggttgataccccttacctagactgggtagtagaaaacggatgtttttcccggaggaagtgacacttgagaaaggatctaaaggaagatgagtttgtcaggtaaaggttccagacagaaggaacagcatgtacagaggcccttgaggcaggaggagcacggttttgaacttacagaagccaatggaactggatcagaaaagaggtgtgggaaaggagtttaatagagctggagaggtaggcatataccacatcagcatcctagacaacattaaagatttgagtcattaaaatgtcattactgtcaccagtttagattatgaaatctaaatatctgtcagtagaggctagtcaaataaatcacagtataacgatgtaaaggaatactgtgtagctgtgaaaaaagtgaatgaggaaatttacaactgtcaagttgaaatatagagacaaatctctgagattaaaatattttatttgagaagaaaattgcaggccaggcatggtggctcatgcctgtaatcctagcactttgggaggccgaggtgggcgggtcacttgaggtcaggagtttgaaaccagcctggccaacatggtgaaaccccgtctctactaaaaataagaaaattagccatgcgtggtggcaggctcctgtaatcc

SEQ ID NO: 108654 - DNA, 1117 bp, Homo sapiens
agttgatgggtgcagcaaagcaacatggcacatgtatacctgtgtaacaaacctgcatgttgtgcacatgtaccctagaacttaaagtataataataataaaaaagaaaaaagaaattaaacatatgtaggctaaaaggaaatatggacgtcaagaaatgacatatagttttaaggttttgatgacagaagagaaaaatgctagaagttttcccaaaggtaggaaaaataaaaacataatagttctgggcacagtggcacagcctatagtcccagctacttgtgaggctgaagtgagaggattgcttgagcccagggattcaaggctgtagtatgctatgatcctgcctatgtatagctactgctttctagcctgggcgatgtagtaagaccccatatcttcaaaacaaaacaaaaactgtaatagcgataatagtgacaatgtctgttgttagtcacagagcaggagtaccatgtctggaaaaacgattgtacttcatggaaatgctgtggctaatgatgctgttatgaacaagggatattggtatgtctggtaaattgaatatggagccagaaaagttactgtgtttgagaataaaagtgatagtacatgtctctgtcatcaaactaggaaatgtagcacagacagattttttttctttttgcttaactgtaggtatataataaagtgttctgacaaactgttaaacagagccttgatagactatgtatctaggtttgtctgttgtctttctatctacctatctatgtgttaatattaggagcttctgacttatttaatacttcttcctgtttgtataaaattaactgcagtaattaactcagattggctgtgagcaaaaacagaactattacagtaatttgacttactaatttatgtaaaacattttctgccttttaaaaatcatcttaattaatgcaagggtagagtaattatcagcccaccaactatttatttattaggattcccattgctgtaggcagaataaagcaatttttcatattgtgactaatggcaattttgattaattttgcgcaattagcttacatctatcttaagtaaccagtctgcttttggtaaaattttcatgtctgaa

SEQ ID NO: 108655 - DNA, 1034 bp, Homo sapiens
ttgacttgcacaacctacttttttttttttctgggccatgtgttttctcttcatggcttgaatttatcttcacctaataaataatttacctgttttttttttcagctcgtgaatatatattcatctattttctatatggcataatcatgtccctgtctctctttaaaagtagatataaaaatagtttaattgatctatattgcagcttccttttccatttcattgtttagcctgttatttagctaaactttatcactatcagattactgtaattaatctttaatggcagtgtccattctcagacagcaccaggagaaaaatcaaatgcctagaccccagattctgtcacacttgtgtactggctctggatgtgtttgttatttattagaacatcttgtgcctgtaactagtctagtctaagagtagacatggtgtctgtagcgttgttctggctgtgcagttgcagtttgagcactgtggcccttacatttgttaataaaaggttcaagacttactaaactcttacttttcagttctcttcatttctaggtgtttaaaaaggaaagctgaatttttgcagtgtgtaatacttcatattctcattttgtgatcatgtaattcctcccaccctgactcttgtgaatgtgtagtccaagtggcacatggaagtttttctctggcagctaaaattcttaactgtctgagccgtgtgccctcaatataactgatgaagtgggatgtacttccttgtcatcatcttttaaactcttattgcaatatgtgttataatggatctcagaagaaactagaaggcatagattgagagttcttttagatcatagaattttaaattgtagtggattttaaagagaatcaaatacactcacctcttcatacttaaatcctttccgttttaatctgggatacatgactctaggtgtgcggcatgaatagatatgaaagtaggcttgtgaactcttggaaatattatgcaaaattatgcatatttgtatattttttggagagactattta

SEQ ID NO: 108656 - DNA, 1401 bp, Homo sapiens
ttggtggttttttctttttaaatcccctttccaagtaaaaggaatcttttttttttttttaagttttgaagcctcatagccataaatattttggcaccagcatctattggcacctaagtcattggctgtatcatattcccatgggacccttgttcctagaggaatgcaggaatgatcttggagtgggaaggacagaaacaggtgcttgcaaaatcagatatttctgaaattctctgttattctatttctactgtctttccccactttactataaatttgatctgttataaaatggctgtgtttagatagatacccgtgatgtttaggaaacaaatgatatagagactcccatttaaatgaatcttatctttataagaaacagccaaactgttttccagactggctataccatcttacattcccaccaggaatgtatgagtgatccagtttctctgcatgctcgccagcatttggtgttgtcactatttcttatttcaaccattctgtttatccttttcagtgaaatatctgttcatatcttttgcccatttgccaattgaggcaggaggatcacttgagcccaggagttcgaggctgcagtgagatatgatcactaaatgtttgcttaatgagccatatctttaaatatcttttttaaagtttttaaaagtcagtccagtggtttatgtgattatgtgggattttttaaatctttccaggcaaaatgtgtatagcattttgaacatatttacactgtactgagcccaagagttctcatattctttctttgctcattatagagtatggtactaatactgtataatagtaaattttcaaagatacctttatttagaatgttagagtatacagatatatactttgtacatagttatcataatgtttctaacctttttatttaaagcaggctgatttgtgtaaaggtttcagaatgattttgttaataagttattagaaactttcctatttgtacaagatggtaaatgtagattccaatttgtatgcctcagtaaattcataatcttatttctctgatgtgagccactgtgcctggccttctgtgatgctcttaatgaattttgcagttttattaaattgtcattgagaacctcataaatcattgttaagatctatacaaaaaatcaaggatccacagtaatagaatatttttcatctgcatatgaatttttcccttccctttttgtctacttttagatttaaaaaaaattaccaggacattcttattaaatactattacctgttttggtttctgcacattaagaaagtcacagagaagccagacacagtggcatgctcttctattcccagctactcaggaggctgaggctggagaatcacttgagcccaggagtttgaggatat

SEQ ID NO: 108657 - DNA, 1765 bp, Homo sapiens
tctcctgggctcaagcagtcctcctgcctcagcctcccaagtagctgggatttcaggtatacgtcactacgcccagctgatttttgtatttttagtagagacagggttttaccatgttggccaggctggtctcaaactcctgaccttgtgacccacccacctcggcctcccaaagtgctaggattacaggcgtgagccaccatgcctggcttgtcctttctgtcttccaagtttgtttttcatttgtatgctaatatttgaagtttagaaaaatttgtgctacttctcagcatgttttattttcccattatagatctatcagatatttttagaaggtctgcaactgtctgataaaggaagagaatgttcctgttcaatctatcttaaagtgctactaattgcttttatactatagacatactgattttttcatcttttttatccaaccatggcatggtttcctaatctcagcattgacattttggactggataaatctttattttgggatgctatgctgtactttataggatgtttagcaatatccctgacctctgccctctagctacaagtaccatccccctagttgttatggccaaaaatgtcttcaaacattgccattctgagaggcaaaattgcccccagttgagagccactgatacaggctgttagaagaaaatcgaagactcagtgaatatagtgtcatactccttttctttctgcctcattttaccttaggaaatggttgttagcaaaaaaattagttaatcgtatcttgaaataaatagggtatctattttgctgattaataaagaaaaaataaatctcagctgggcacagtggctcacacctgtaatcctagcactttgggaggccaaggcaggcggatcacttcagctcaggagtttgagaccagcctgggcaacctggcgaatccctatctctacaaaaaatacacaaattagctgggtgtggtgacacacacatatagtcccagctaattagggggctgaggtgggaagatcacttgagctccaggaggtggaggctgcagtgagccaagttggtgtcactgtactctagcctgggtggcaaagtgagaccctgtctcaatcaatcaatcaatcaatcaatcaatatctcatgctgtaattgtcttctgatgttttcatccacccagccccacctctgcagccttaattactggagtaggtccatgatttcagtgtagggttaatgtattctgcagatcatctttgatttgacctgcttttttgcttcctttttatctctgaacaaaggagatcatcattctctttaatctgccttctgtgtaaatctctaccagactggaagctccctgaaagcagaaactgtctgcttccccagaacttagcactgtgctttcatgtatgtgggataaatttttactttgttagtgcaactttgtttgtacacgttatccttgatattacatacatttgttgatgggggcaatttatatttgttgtgagtaaaatacttttttgttggattaagaagaactatactcttcccagcactttgggaggccaaggaggacggattacctgaggttagtagcttgagaccagcctgaccaacatggagaaaccccatctctattaaaactacaaaaaaattagctgtgcgttgtggcacatgcctgtaatcccagctagtcaggaggctgaggcaggagaaccgcttgaacccctgaggcagaggttgcggttgagccgagatcg

SEQ ID NO: 108658 - DNA, 1028 bp, Homo sapiens
taagtggtagctgctatgagctaccactcatttcttttttagatcctgaataattcatctttatgattattgaggatttcaaaaataatttctgcttagctccttcacaacaaaattcttttttttttaatttgtatttttatcgagacagagtcttgctgtgtcactcaggctggagtgcagtggcatgatctcggctcactgcaacctctactgcctgggttcaagtgattctcatgcctcactatcccgagtagttgtgactacagacatgcaccaccacgcccagctaatttttttgtatttttagtaatgatggggtttcgccatgttggccagggtggtattgaactcctgacctcaggtgatccgccctcttcagcctcccacagtgctgggattacaggtgtgagccaacgcgcccagctacaacaaaattcttggtcataggaattcagagaggaaaggagagctaattgtggatttatggagaatataatacaatatcaaatttgggtgcatcttggcacccatatgtgtagtatatcaatttttaaaatctcttttttgggtgtatatcctttgggcatgtaagcatcaaacttctcgactttcttttctgtaatatctaagtgaatttttatgttgccttagtttattatacctggcttgttttgaactagtcctaagacaaacaaggacaggtgagaaaattggtggcagaaataaggaaaatgtttaaagattacccagtaaggttctctgtcattaggttaatgctaagtgatttaattttagaattaaaaagtaaaatttataaaataaaatcaaggatttcaggaaaaaaatgtggcccactgaaaaagaatgatacttttgttgtagtaattcatcttacatattttgttccccacagggcagatggaggagtttgtaagaatggttttgtcatgcagatgacttcagacctgattaatgagaatatagacagacctgccgacattgacatgtcatgcctgggtgcagct

SEQ ID NO: 108659 - DNA, 1036 bp, Homo sapiens
gacccttttaagtgagcaatcttttacattatattcataataaatgttgatgcaggtaaatactatcatgtaacataattctgtttgtgcctctctaacctcttcattttgttttagggttttttgttgtttgtttgtttttgcagaccttttcacagatgctgctgagactgaaaaaatggccaaaagtttggaggattctgaaggagtttgttttgttccatcttttagtggattacaggtatgtattttttaaagttaatggcaatcacaaatatttttctcctcctgccacatccaaacttatatatctaccattctgttaccttaaaatttgagcactgaacagaactaagatgaaaggtagattttagggctgagaagttatgctctgaccaagcatgaattccatgaggaagcagagcatcctgaatgtggccctgctggcttggcttgtgctggtagaattcagctgacttctgcttagaactgtgtggaacctaagagttggcaggtttatcatagaacttttacataagacttagcattactttatcatgaccaaaaatagccatttcacagtggggggaatgtatcagtaaatttgcattctttacttagaggaaataagccattgagaattaagataaataatgtcaaggtacatacatcacacacatatgcacacacatgtatatgtatgtgtatattttgcacttgtacatttgtaagttttaaactttttttaaaaatcaaaatcttggctgggcgcggtggctcacgcctataatcccagcactttgggaggccgaggcgggtggatcacaaggtcaggagatcgagaccatcttggctaacaaggtgaaaccccatctctactaaaaatgcaaaaaattagccatgcatagtggcacgtgcctgtagtccaagctactcaggaggctgaagcaggagaattgcttgaacctgggaggtggaggttgcagtgagccgagatgccactgcactccagcctgggtgacagagcgagagtccg

SEQ ID NO: 108660 - DNA, 1037 bp, Homo sapiens
tggatcaagagatcgagaccacctggctaacatggtgaaactccatgtctactaaaaatacaaaaattagcttggcgtggtggcgcgcatctgtagtcccagttacttgggaggctgaggcaggagaatggcatgaacccaggaggtggaggttgcagtgagcccagatcacgccactgcactccagcctggcgacagagtaagactccgtctcaatgaaaaagaattagctggatgtggtggtgtgcgcctgtagtcctagctgccttgtagtcctagctacttgggaggctgaggtgggaggatcacttgagtccagaagtttgaggctgcagtgagctgtgatcttactgcactctagcctgggtgacagagcaagaccctgtctctaaaaaacaaaacaaaacaacaacaaaccaaaataaaaacaattcctgaggcatgtcagttatctgcagagtattagtcctagggagactcctatcctatggttgttgctccctattctctttgggatttttttttttaattttaaggaaaaggaaaaagaaacgaagatgtttaatcatgagagtacaataagtgagacaatgctctataataaaattggccactgttaagggcaatgggtttacatttgaacatttttggtaggttgctgaccagcaatcagccatgtttggagagtgctgcttccagacaggtgatgtgaaattaaccatgggaactgggacatttttggatattaacactggaaatagccttcaacagactactggaggtaagtagttaggatttatcctatttattaataaaatatcacttctgttcatatttaacttctgtgatacttatactattttcccattttgtgatattctctaacatattttattattcttaaagacagttaattatcatttccctttcttttccctttaagtgaaaagcataaaaaacaagaatgatattgttgaaaaattcaggatatatggtcagctttctgggtatttttctataacacatgttgtatttgt

SEQ ID NO: 108661 - DNA, 1671 bp, Homo sapiens
tagttctgtcacgcttcttcccattatttagagcacagttttttaaagcaactgtacaatttctcagccttatgagcttgctgtatttcttggtatcatgttgcttccaaattttgtttttactgtagaagacaattaatttattgtagagaagtggctgtgaaagtcgttctctgtctttaaaaatcaattgcagaagttcatttgtcatttttctagagataaattatagtactcaaactggcagtgctcagtatatacattttgtaagctttgtcagtgaaaccatcagttttgcaggagcttcctttcctagtcaagataaagcttaaaattccagaaattaatgtcgttcggactgactttattcatatttccatcaaacttctccaatacagtaagagatagtgttgaaccagcatcaagtctccagaaacatggcagagcagacaggccgttaagtttcacagacatcatagatccttttcttaaagaagaaaaacatgtataaaatagttttagtagtccaaaatgtcaactatctgtagctgcttttgtgtgtgtgtcagtgaacaaataataatgccttgctcaatcaatgcattcagccatctcaagtgcaatttgtgaaggagactatggtttccaaaagatacatttttttacaaagttaaacctgtaaaaagtctttttttttttccctccagccgtacaccaactgcacttggttgtttcagcagttggtatactattaaattgtccaggccaaataggtttctgtagctgttttagtaatttgaagccaaattctcatgctgtttctcattaaaaagaatgagaatttggtccatagttagctttaagttctctcttcctttctttcccttacagttaagggtttggtgggggatggggaggttgttttcgttttttggatttttttgtcttttggctttaagtatcatattttcttttgcctgtatccaactgcttctttgagtattttcatctagtttaatgtgagtaatagatgctgtgctgtcattgaagtgttcaacattttgttcatttaaacaaaagtgtaattcatacatatatagatacatatcttaattgatttctcaactattttataagtaactggaatttttcattagatcttatacagagaagtattttattaaaaattcaaaagggaagacttttatgtgctcattttgtaatttttgattttaaatatctttacattgtctgccaattaaagtgttttaaacttgcattggaatggactccgaatgtatttttgtggtgttacgttatccgtagatttctagcatgaagttagcctcacgatgctgtgcaaaggattttaaaatatgagagtcactgaaagagtttaaacatctgttcatgttaaatgctctatggattttaattaaagacttgagaatgattttataagctgtttgttcttttattactatgctgatatcaaaagtagaaacattagtctttttgtttgtttgtttttgagacagaatcttgctctgtcgcccaggctggagatctcggctccctgcagccttcacctcccaggttcaagcgattctcttgcctcagcctcctgagtacctgggactacaggcacatgccaccatgcctggccaattt

SEQ ID NO: 108662 - DNA, 1235 bp, Homo sapiens
ttttacactatcattgaggaataattacatggagcatgaaatttgggcctccagtataacttactgaatgtggattttatttctctttttaatgatgtaagaaaattgtcaggagaatggctcttatttatgtgtgttttaacttatgctttgttgcctctgagggtctttagacctgctgtgaaaggatcacatttgttgtggtgctgccagttttgctttattctaaattttgtaccaaagcaactttagaataatcagaatatttcatctaactgcttagaactataaatagcattctaaatttgagtaaatacaattttttaggttactcaagaaccagcattagtaatttctagtaaaattgtttcaaaatctacagggtacaatgattacaaattaatcttctaacaaaataaaatatgaaatattagtcatgttaattaataaactgtattattttgtatagctttttatttgcttacctgacattttatgagagcttcatagttggtcggtatgtagtgcttcttgggactgaagaaattctaattgttgtttaagttccaaggtgtgctacaatataggaggcacagtcatcagtttgtgacatacattatttactgcctatttcattctgattctatatttttagctttatgctgaactgttcaatgatgctgggattctctctttgcatgtcatatgtgaatgtgtggttcaagctgtaactgttgaaattattttagaatttatgacgatttctcagcagggcctatgtttatatatatatatatatttattctttagtttttgtgatatgcttatatttttaaggaagtaagttatagcatacttttttaaaagtaggaaccacaatctttatatggagcagcttgttatatctgattttcatgtaactcattggaaactctgccatgactcttaaagtagtcttacttgttttttaaaatgctggtattaaactaaatggactcctttcactaactgctgatttcagagtttaaatgttagcaggatatttgtgtattagcagtgccttcagtataagagagaaatattcattatctgtcatttatcatagtcgtataagtttccatgattttattttctgttattttcataagttcagatgtttatcagttcccaacattgtttctttatctgtagtgggatcttgagtaatgaggctcaagtaaatcctcaatgtgtat

SEQ ID NO: 108663 - DNA, 1049 bp, Homo sapiens
atttttttggagaaggatctcactctgtagcccaggctggaacgcagcccatgcacaatctcgactccctgcagccttgacttcctgggctcaagtgatcctcccatcttagactcccgagtacctgaggctacaggcatgtgccaccatgcctgtctagtttttgtaatttttttgtagagatggggttttgccatggtctcgaaccctaggtctctaccgatccacctgcctcggcctcccaaagtgctgatattacagttgtgagccactgcacacagcccaagaattttaaatattttgtttgtaactaagtcctttgaattactaaagtcttacttggcaattataagtggaagtcacagatcagctgtgattgacaaatattaacagcatgcatggtttatggtaatttccaacactagctaattttttgcctacattattaattagtgatgcttttattcctaacaggttactaaaaaaagggttgcaaacaaaaagaactttgagaataaggaagcccagagttctcaagccactccagttcagactagccagccagattcttccaacattgtcaaagtaagtccacgggagagctcatcagcttctttgaagtcctctccgattgctcaacctgcatcttcttttcaagttgaaactgcctctcaaggccatagtatatctcaccataagtcaacaccaatctcttcttcaagaagaaaatcaagaaaactggctgttaattttggtgtttctaaaccttctgagtaaatttggctcttagaattaagttaatttcttctctttccatctacctttttataaatacatatctatgtctcataaaaattagaatgtactattttaaaataatatgtgtaaattgaaatttttttcatttttaagttatcaggcacttttcatgctgtttaaaagactgtgtatcaaattgtgcactttaagtatgtgcagtttgttgtatgtcaattatacctcaataaatctgtaataaaaaactaaattaaaccttgcattaaaataat

SEQ ID NO: 108664 - DNA, 1028 bp, Homo sapiens
tgccatggttcgtattttgtaggaactttcttactgtggtaatttctcgactgttgaccatgcagacatatcccatgcaagtgttcaaacacttccatcatggaggctggtatgttacatcattattgtcatcttgtgaggaaaccaggctgccctgggcaatttagccatactttttctctttagaccacagttcccctgcttttcaaacattgctactaggtaactgggatgaaagttaagcaggaggataagtatcgtttctgtatcagaaatgtgggtgttgggtttttttttttcagtttctatctgaatgtagttaatgtcttaattgttaacaatggaattctttccaagaaagatcaataagttctacagatgtaatgttgactttgttctcttcaccctcaccatctccatgtgaatcattttcaaaaagaagggaacacggatgcttaaagaaattctaaaaattgatggctctaacactgtggaccataagaatgaaatcaaacagattgctaatgaaatccctgtttcctctaacagaagagatgaatatggattaccctctcagcctaaacaaaataagaaattaggtaagtaaactaaatactattaccaataatatcattttaaaaattcaattcatttggttctttttaatcatgtacttttaaagataaaactgcttttattttaatgtatttatttattttagagatggtgtcttgctgtgttggccaggctggtctcaaacttctgacctcaagcaatcctctcacttcagcctcccaaagtgctgggattacaggtatatgccaccacacctggcccaaaactacttttattcttaaaactataatttttatatttgtttcagttatataataatataactggccaggtgtggctcatgcctgtaatctcagaactttgggaagctgaggcaggcggatctcttaagctcaggagttcaagaccagcctgggcaacatggcggaaactctgtctctctaaaaaataca

SEQ ID NO: 108665 - DNA, 1088 bp, Homo sapiens
tttgtacccagtgtccatttgtctgtgctgataagaaagtaaatagagcctaccaaaagcaaaacggtgaaataattcatttgtattgaccttctctagcctccacttctgctgcttcttgttgcttcaactgtgggaaattgtctatctctttttgcattcaggctttctctccctatccaaaaatgaaaggatctgatagaatcttcatatgaaatttatgccattttgctaattctgtctatgaactgtctcaatcactgtaactttatcatcagtctggctatttaatattgaaggcttccaacatttaaaaaccttgacaatataaatattaataaaaatcaggtattgggattgttattaatcccaataaaacatgggattaataaaaattaacatggaagggaatgtaagtgtgctaacatcctcaattttcataatgtagagccagaaatgataaattttttaaaactttttaatggaaaagtttaaccataatgacatcaagtaaatagaatgaatgaacccaccagtattcattccctgccatgctctagtccagtactatttcttctataacccctactcatttcccacctccacctacccaagggatgggattattttgaagcaaatctagggggatctttagagactgatatttctctaaaggtgaagaaacatttacctaaagtttagtattttgtttggtttctgcatttgttaacatcaagcaaaattagatttaattcttttattgaaaggaggatttttggctgggtgcagtggctcatgcctgtaatccaaggactttgggaggccgaggtgggagaattgcttaaggccaggagtttgagaccaccgtgaccaacatggtgaaaccccgtctctactgaaaatacaaaaactagccaggcacgatggtactcacgtgtagtcccagctactcagaaggctgagtcatgagagtcacatgaacccgggaggcagaggttgcagtgagccgagattgtgccactgcacttccagccttggtaacagagcaagaatctgtctcaaaaaaaaaaaaagtagcatttttataa

SEQ ID NO: 108666 - DNA, 1165 bp, Homo sapiens
atgaaagaccgattagggtgggtttaagagagaaggggggagagaggtgccagtatagacaattttttcaagttttgttctaaaaggaagcaattcttgcctttatctatttgttcaactttttaattaactccctcccgctctcttaatcttttactgaggaacgttcctccaaatccaacaacagttttcttttcattttttgccttactgcttgactaatgactttgactgtaacctctctgctaagtattactaatctatatctctgatttgaacctcagtcaagatttaatccagtatctgcaactttctaggacagatatcacagctggatactccaccatcacctcaacctcaaggtgtcccatcttagacaaggcagcatgagagaagaagaacatttttttttaagttaaaaaaaaaaaaaaggtcccagaatcggcctcacctaaagttactcctcttacccttatttctaacaccaccattcctcaggcatataatctaaaatgcttagagtcaaaaatttttgctttctaacattatttttacaatgatattataaatcattctatcattctactcctcctcagttcctgcaactggactttagatcgtcatccttggcctaaattaaccttctaactacgattcttgtttcctatctttttcacatatagtccttcttacatactgctgcctgattaatctttcttaaagaccctgtcatctgttttggccccaaggcataattgggcaaagtatctcttgggtttgaacccagtttataccctgaagcagtgtggtgcagtaagtacagtactggactcagaatcaggaaatcaggttttgtgattcaaatagtttaaaacaaaataatttatagataacctaaagaaagcttataatagcatattggctgaggagaactacgtatcttgtcaccttaatttttttctttattctttaagttatgacatatacactaattttttatgtttattttattatttatatttattttaccatttatgtttatattccctttgtaattttctcttttatctctgataatgccaccattactgcaggacattagaataaatgagggtctgaaggtacaggctactggtttataaacttgaacattcctttttttatt

SEQ ID NO: 108667 - DNA, 1042 bp, Homo sapiens
acttatctgttgatttttcatcatatgattttttagtgtctctttttctctccctattgtaacagctaatagagaagccgatgtactatttgaagtattatttgatgaagaatttcctggagggttaacaataaggtttgtatttcccaatgataattgccctttgtgaatatgttcatgtggccagtgactttacattactttttatttgtttacaatttcagtttgtgggatgtgtaagacgtacttgctactagggatgtaacactgaataaggcagacatgctttctaccctcagagagctttcattttagtgagggaggtaattaagcaaccgattacattattaattatttaattaaagcatggcaagtgctaggaagaagtgcaggtttttataaagagtatgacccatcctgagagtaacagaaaggcctctttgaggaagtggtatttaagatagaacttgaagaatgaataatagctaaccagggagaaaaggggggaataatgacatttgcacaggaagagggaatagcatatgtaaacaatgctattagggttaaataacttgaggaatagaaatgtcctttgaaattagtgacatgtatgtctttgtcaccaattttagtggagttgtaggtactcacgacagattggcatgatttgacaagtgaatggcaggtgtagtaatggagacaggaaattgaggcaacacttgggaagtttgactataaaggaaaggagaaagttaactggaggttaggaggtttaaaggaagagggttaaattgtttttaatttaacacagataagacaagtgttttgggggaaagtgccaatagaaagtttaaagttataggaacaagtatcatgataaaatgagaggcaccatggtgtaaacttgcagttaaacgttgtatttccttgggtaggttaattaagtgtctgaccctcaatttcctcatctataatgaagatatatacatacttccctaggttattgtgaggatgagatgaaatcctttccagttttctgctt

SEQ ID NO: 108668 - DNA, 1007 bp, Homo sapiens
tcctccccatgctgtcttatacttcagcaaaaaattttactttaaaaaatttttaaataatgatttaggctataggcattttatatgtgtttatttcttcttgctgcagctgcagaactttaaatattttaaaaattaatctcttcatttggctttttaaaattcagacatgtggaagtagtgagtaggtagtgattttataattttatattttaaaaatatttaacaatttttctttttcctcagcaaagaaagaataataagaaggtgcgagtaacagtgaaaccccatttgctatacagagtaagtttcctatcaaagaattcagagttgttgctttcactttgaatgcatggaaggagcaaagatgttttcagtatattagtatgaaaatttttttgtttattataattaatagctttcttctcttcagcctttagaacagcaacatggagtcattcctgatcgggatgcagaattttgtctttttgaccgtgttgtaaatgtgagagaaaacttctcagttccagttggccttcgaggcaccatcataggaataaaaggaggtaatatcctaatacttgaaatgtcttcaacgtaatttatattgtaaagtaataaacaggcttgtctgttttttatatctaaccagaaagtgactataaatcaggaacaaacaatctttttatgttttagttaaattttttttaggttatacttttcagagaaaaaaaaatctcttctgttttttattgtataatctggaaagagattaaaaggagaaactgagaaggggctgctgagaatttagtagttttatatcacattaaaattatgcaagatcttggtgagcatacatatgttttcatgaaactgataattttcattgcttctcctgagtttcattgctcagagctttattttcattgtaatcacttattttctgagattaaatttcattgtaatcacttagtttctgagattaaatatatattacgttagttaca

SEQ ID NO: 108669 - DNA, 2550 bp, Homo sapiens
gtgtgtccttattctctggctatatatagcatcttgttcttacagtgaatggaatatcttcatttatttctctgaagataattctaggatttatccttctattttttgtgttttctgttttctctaattgctttttttcctcctgtttgatttagtctctcttgcagtgttaaagttttgttgttgttgttcttgtctgatgatctttgatatccaattatatttaagaatgaggcactaaatagctgattggaaatttagtgtacttaggtggggtttatcaggtggatcaggagggactttcctgtttctacagaggacctcctagtatcactacctgcatgtttatcttttctttcccggagaggtggcctccacccttttccttgacagtggatatgaatgtagtggattaaactgattgccagtattctggaagttaaccagggaaagaaggtttcattaccaagtggatactgtgatacacctcccagaccacttttcaagactgaaagacctatccccttgcagcaggaatgctgctttccggcagccctcagctgtgagccctctttagtaattgcctggatgaggagaactgcctcaactaaggttactttcccttcccacaacagccgcaaatcaatgcccaatctataaggaggtatagaaacccagacattctgattgtcccaattcatggcaagtctgaagggccatcccagtttgagatctttgtggggctgttcaaggaattcattgagaattggtcacagcccatcctcttcctgtgcccaattctgctttcttcctctcccttcccttccacgggtgttgatcaaacaagcactccctacctgcatgcttatctccatcccagagtccatttctagagaccttatgcttcctagtgacacattgtatagtatttatgctttcattaattcactgttttcagtataacacctgtcctctcctccttatgccttcctcacccctaagtccgtgactggtatacacaaggctagagtatctatttgacctctctaaaatatacgctacaggtcatatgctggggtggtaggcaggcaaccacatgacagtataactgcttgttatacaaactttaaatcttactaaacctcaccccacactttcaaatgtacctggaacctataattcctgagctttttcagagtgttctgtgttttaaatcaacttgcttcttattgacttcccccactggtagttcaagattcaacttattcctgtctgtcaaatcagataatattcattcatccagtttccagtttctaaaattttaacaggttatatatgccaccagataccgtgcttcatttttcatctgtctctctaggtctgtgctcttttttatactatattgtcattttaatggattggagagggatggaagataagcatatacgttcagtttgctatatgtatcgaaaagtcctgcactcttcagaaagaaatggagttttgaaaattatcagaagatgcttttaatctattttaatttgttgtattgtggagtgctctagttttgttgtgaaaattagaaaactaacctatagataccatttttgtctatcagctgtcattttaatgaaagagagtagagtcagtaattgaagtttattataagtttatgacttgaaccttagccagtgggagttttttgagggtctaggagtactctgacttaccagtcttacactttctatcacttttaataatatcccttattaatattatagtagtcctcaataagctttatatgtttctttaggatctgaaattattatgtaggaagtttatccgaaattaaccatatatattttaagacaatatttttgtttgtttgaccagagctccagaactatttagttatatagccaaaaatagccaagaggatgtgttctatgaagatgacatttggcctggagaaaatgagaatgggtaagcaagatttatgatatttattacctcatagttcaattcagtgttttcaatgacaactgcagctggtttctcaagaatttcatattacttttttttttttttttttgagacaggttcttactctcttgcccgaatgcagtggctcaaatgtggctcactttagccttggttccctggactcaaacaatcctcctacctcagcctcctgagtagctgggcctattaggcgtacgcctccacatttgactaatttttttttttgactcctaggctcaggccatgctccttggcctcccaaagtgctgggattacaggcgtgtcttgttacttctttttgttttgttttgttttgttttgtttttttgcattgtttcatttttgctttaagagcttaacaaattttctttcatttatatcaacaaatacttttaaactaatctttttgtgtgtcttttaattactaagaggtaacatgtccatatttatattagatttagaattagtcccgattaagttcagtgactaattattagttatataagttttatgtcttttataatttat

SEQ ID NO: 108670 - DNA, 1853 bp, Homo sapiens
tgttctggaaagcatacttgatttgtattacattattgctaaatctgattatgttcttaagtatgttttattgttatgtacatgatgttaagagtatatggtagtttatcctagttagtattggattcatgaatcatttgcttcctggttaaatattatatgatctgttacttctttttttttttttaatgtgacaatatgttttcttcccttaagtatataaattaaggttacatttcattgactgtattaattatgggtctatacatgcttgtatgttttcatatgatagtaaatattaggggaaaagaatattacttatatccatatatgaaggacacttttagtttttctcagtagcaacgattttgatgatgtacctattttttaattcaatgtaataattactgaggcctcattttgtcccaagtactttgctaggccctgcttggaatatgaaaattagtagaaacgaaaacaaaaacaaacaaaaaacttgcctgtggagtttgccatttagtacttacagtagagtttatttcttaagacagtttcacaaactgtatatttcctccccccttttatccatccttgggaattctgtcctttaaggagaaagagagaggagcagaaaaattctgcctacagatcctttcaaaaaaaaggggaaatggatctaagtgaaaatccttatattgccacaatccaatggttagtgatgtcttgattatctccagattttaaaggtaaagaaataacatttaatgtaaacttgtgtttccataattgacctttttgtttttatatttaaagaaatattctataaagtacaacccaggatatgtgttggccagtcgccttggagtgagtggataccttgtttcaaggtttacaggaagtatttttattggaagaggatctaggagaaagtaagtttatgttagagaaatttacttaaagtggcagaaaaattaaatgataaagattaaatgcttaatatttcagtatttattttcttattaattgctctggattgtcttaaaattgtgcataaatttctctgatggtaatctttcatctgaatggcacatgttttaggtggttggaaaagacagttcttattttttagcagctaataaattgaaccttgaaaaaaggtatcagagggtgtgtgtgaacctcagtagtatatttccttgcatcttgttatttcattttcctctataattacataatttatttacatgctttgttaacttgggttttgaagcttttcttctagtttttcaattactgctactttggaaataaccataataactaaaatatagaagaataatcaaaactgagcttttctaagaattgaaagcaaaactttttgttccttgaacgacattttaaaactcgtgtgtgtgtgtgtgtgtgtgtgtgtgcacgtgtgcgcatgtgtggtttaaattcagccctcatggagaccataaagcaaatgtgggtttaaatctcaaattcaacaagaaaaatgaggaggtacctggatatactaagaaagttggaagtgaatggatgtattcatctgcagcagaacaacttctggcagagtacttagagaggtaagtacataataagatactagtagtcattccaaaatcttaggaaaatactgtttattttgccttcctgatattagttttagaggacaaatatttccattagtaaaatctggcatatgttacatgtaaacttaattttgcatcatggaatatcataggcactagctaaaattgagtagaaaaataccatattattaaaaagaaaatatataatgaaaattgccctctttagttaaaattttt

SEQ ID NO: 108671 - DNA, 1068 bp, Homo sapiens
tcctctgagaagtatggtctttatgctgggaactccctattatggctgcactggagaagttagtttccattattgttactgatacatttttctctagtttaaagcagttacttaacttctcttcatttaggtttaaattaaaatataataatgaagggaaaaaataaagaatttatccatgtaacttatgaacacagtgtttgacttatatatctaaatactatatatctaagactaaagaccatatacttttagtcttgagcagattaggatcaagaggtggtgtgttcaaatcctgatctctttttttttagcagttttgtttattgtagtggtatggatgaaacgattttgtaactattttagacatgtaataggcttgagtgaatttgtaaatgcgttcatatttgaggaactttggttcttaaatggaaaaaggtacatgcaaatatggaaggagagaaagcaagaaagaacctatagggacagatttggaagtattagtgtgaactcttggtttctaaaatatgtatatatgtttgtatatctgtgtatataggcacatatatatgtgtatatatatatacacgtatgcatatgtttctagctctatttgctgaaaggaataagaagcaaagacaccttagcacaatgagcacatgtaccacccagatcttgacgtctaatttcataactcactaaaaggaacagggcttctcagagaaattgctgattctggatctggggcagggaagatacaagatgaacctggaacatcttgttatgtcagaaagtaaggaggtgctcagaagaatggtgggagtatgtcatgtaaacacaggaaccaggttgagggtactaccactgcccaaatcttggatactttgagtgacaaaataattaaattcagtagttaattataaaccactggggggaaaacaggaattcatgattccgtagtgacagtaaaaagataaatagggaaaggaaggtctcttgtctgtagtagcatgtaagaagtaaatttggagagagtgctgcagttgaaaaaccattgtgcaaccatta

SEQ ID NO: 108672 - DNA, 1069 bp, Homo sapiens
gtagaatacatgtgatattttgatccatgtatatgacatgtaattttcaaattatctgttacctcaaacacttatcatttctttgtgttgggaacattttcaatctcttctggctattttcaaatatacactaaattgttaactgtggtcaacctactgttgctatagaacactggaacttattccttctatctaactttgtattaaccaacttatcttcttcttcctctgtacttcccatgcttttaaaatttgaatgaaattaacaagccttgttctgtaatttatattagtttataaaaagacctgtaattattatagttttgtaatttacattacagttgtggggttttttgctagtataccatgtgaaaaaaatatttcatttggaagactcacactgctagaactctatattaaaccagaacattttggttatataatttttattttaactcttaaggttttacttggaagaacctccaggaacacagaagctttattcaggaagaactgccccaccatctaaagtggttcatcttggagataaagaacaatctaactgggcaaaagaagtacaaggaatttcagaacagtgagtatcgttaaaagtatttaatatcatggaactaaaatccgttttaatgtactcattctctaacttattttccatttaacatagtagttactctgaatactaattacaccttcatcctgttttagaaagtaatgagttctagtttaaaatgatacctgattagcagtagttacagccttgcccagtttgtcactaaaatacctaatgaagtatagaaaaaaaatgacaaattaatgtaatactaggaataacacttaatacattgactgattttgagagctattttcactaactgtataaggccattgaattttttggccacatgtaagtcatgaaaattggaagaaaaatcctgttttgttcctcatcttctcccgttccccattccctttactctcttccacccaagccatattccccagggcttagaatgcagccaaactgaaatgctaacccacctgggaatgttgg

SEQ ID NO: 108673 - DNA, 1061 bp, Homo sapiens
tagttcttttctagatatttctgctgttctttttatttttctcagttaccataaaaaaataaggaagataattagaatgatagagttttacacctggatggaagatggaattttgtaaagcaactaattcaacttgttcattttatttatttatttatttatttttgagacggagtcttgctctgttgcctaggctggagtgcagtggtgcaatctcacctcactgcaacctccgcctcctgggttcaagcgattctgctgcctcagcctccgggtagctgggactactgcgtgtgccaccacacctggctaatttttgtaattttagtagagatggggtttcatcatgtttgccaagctggtcttgacctctggactttaagttttgggattacaggtgtgagtcactgcacccggccccaacttgtttattttagaatttaaaaaacttaaatggagattggaaaattttgcctgtgtaaagttttctcttagacctgaaatcatgaatgaacttttttgcttttactttaagaccgtagaaaatgtagcttcatcagtgcttggaaaatctgtctttgttaattggcctcaccttgaggaagctagagtcgtggctgtatcagatggagaaactaagtaagtaagatttgatttataatttttctaacatatatttgctttgtgactttgatggcttttattgattcatttttttaactgacaaaattatattaagaacatttacactctgtaccaaaaatgaaagtcgtctaatgacaccacttgaagttcaaacactattgacagtttattgtacctctcttgagatattttagatgcatatgttattttttcccttttaatttcttggaagttctatatcctaattcttttctagaagtggttatcattatattacttagcaaatacatttctctttctaacaagaattaatagcatatgtaaccttcccttttccctgccccatctggatttcatttaaattgtacattaattttttagggcacatatcttttgttttaagaaaaatatcttaa

SEQ ID NO: 108674 - DNA, 1757 bp, Homo sapiens
ttctattaaaagtgtttgaattttttctctctaatgtatatccctgcattttgtctccctcgaatggatatgtgaatttttgtttccattgtcagtgtttctgctcccagcattatttgatacgctgtgatattgattataccccccagccacccaactagaaagaaggaaataagaaataaagagctccatttttttctcttcatgaaaatatcttccttttttttctcttctctcaccttccctgcaaataatctacccagatggcaattgagttgcaaataaagtaaacatctctcagttacaacttttccttttgttaaaggaaagagaaagataaaacaggcattataaaatgtttattttccatcctgggttttggaacatggaggatatagagatttgtgttatgtgtcatattttatcttaaaatttatatatatagttttgttttagattaatggggaaaatctcaacttagtaatctacaggcatgattgtgtctagaccagtaacaatagagaggctggttatctgcttgtgttttctttgtctggaactaattgtcattctcttctttaaaagcaaggatgactcttacgaaatatacaagggaaagttaaaaaactgtaattgtttgtaatgtattaattttaaattaaatgccttgatttattttctaggtataaaataatatccttagatgcttggcgtgtagacataaacaaaaacaaaataaccagaattgaccagaaagcattatatttctgtggatttcctactctgaaacacatcagacacaaagtcagtggctatttagttcagaattttttcactttattaagtgtgaagtgattatggagaaagaattaaaattaaattatttgaattcttttaaagttttttttgaagaaaagtggtgttcaagtattccagcaaagcagtcgtggagaaaacatgatgttggaaatcttagtggatgcagaatcagatgaacttgtaagtattttatttatcattcatttattagatgcctataatgtattaaactgtagctgctgggatgtttaccagggaggtattatatgttgtaactctagaaatttggagcctaaataaggatgaagcaaagaaacattcatacaaattagataatagttcaagaacctgtatcactgtgacacaatgaatatacaaattttctagaaattttaaaaaggagaagagctatgtaaaccaaaagttaagtatagacttgtaaatgagaataggcttgagctgaggactgaaaaacaggttaggacacagaaaaggaggggaaaggcattctagtcaaaagaaatatcatgagccagtcatttcagtcaaaaatgtcatatattattgtttttaacctttttgtgtatctgaactatttcttaacacttagtcttttctttagaataaatgtgatatatttgaggagaaggaataaataagccttattgaagcagaggatttgtgtttggaaatagtagaagataagtttgaaaaatcagattgaggccagattatgtcgaaccttgagtaccaggctgagtttggacttattttcccatgaccattattttggaattgatattttcataaagattaatttggtggcagtataataaactaaattgcacaaaagagaaatcaaagaaagcgggaaagcttgcgagtgtagcatcaggtgatagagacataaacttcagaagtagcaatagatctagatg

SEQ ID NO: 108675 - DNA, 1056 bp, Homo sapiens
gggagtaggaagaactaaagagagtcattggcagtagacaggaaatcagagaatagaggagagaaaggattgagatcacaagggaggaaaaacagatgggcaggatatgaaggatgttataacatggaagaactatagaaaagcaaatgggtgcatggaagagaaatgacatctcattttgaaatgtatcttgccattcattttatgttgatttacaatttacagggccaggaaaattctctgtgttggactgctttagacaaaaatgaaggcgaaatgataacttctaagggtaagtatgaagtatgtgttttgatatgttactactttgacaggataattgttataccttttatttattattactaattttgggtggaacagatttctgtgatagcatataagcatcaacttggatatgcatttatcaaatcattaggtggaaaaacaggctattcataattgtcagtcactatctttctgacttttttccccagataatttagaagatgagactgaagatgatgacctatttgaaactgagtttagacaatataaaagaacatattacatgacgaagatgggggttgacgtagtatctgagtacgtttttgccaatgcttttattttaaaatagaaaaaattagattttgcagttattcagaaaatatgattttgatgaagtagtgggagaaaaaggattttttggtttcatgaattattgtgtatgtttcaactagtctggttttggagaagatggtattaattctgacttgtattatattcctgtgataaaaattgctgaagagaaaatgatccttatgtataaggatttttgttacaaagttgtttataatagtaaaaaaattagaaataatctaaatgtccaataagaaggttcatcataattggccactgcttcttcattacagtcaccatctctgtcacctcttccatctccggaatctgcagaactgctaaactggtacttgcagaaagttcataacaatttggaaggatgcttatagtacattattaagtacaaattgtaaaggc

SEQ ID NO: 108676 - DNA, 1040 bp, Homo sapiens
aaaccaattgttttgaactttaacatgtattatctattattgcaattgtatttttatctttgttaccctgcaaccttcatataaattgtatgccttaattacaagaccttactatcttctgatgatacttttgatttaagctttgttacatttttaagctgggaccttaaaaataaaattcactgtatcttgatcatctgactaattccagggtatgtgctccagaagaaactacatttcaccttctacacttgtctttaatgagagagtatattgactatgagttttcagtattaaaagtaagtattaataaagccatggaccaaggatttccattgcagaaattttcactggatttgactttgttctctattttactgtaggaaaagatcacatttaaatatgatattgaaaggataatagatgattggattttgatggggtttcttgttggtaatgattttatccctcatctacctcatttacatattaatcatgatgcactgcctcttctttatggaacatatgttaccatcctgccagaacttgggggtaagaagaatttaataatctctcgaggatactttaatttagtgccaccttaccctaaaaatgtgacttagtttagtagattattgcatgcacgctaaagcagaaaaacattgaggatttattttggtctaaggtgctaacctctgaggttgtcattttcagtgattcacaaggaaagaaagtgaacagagttaacgaacctcaattattgatatctaactaatctttgccttttttttattatttatttattttttgagacggggtcttgctctgttgcccaggctggagtgcagtggcgacagtgcaacgtttgccttctggattcaagctatgcccatgcctctgcctcctgagtagctgggattacaggcatgtgtcaccatgcccagctaagttctatatttttagtggagatggggttttaccatattgaccaggctggtctcaaacttcggcctcaagtgatctggcttcccaaagtgctg

SEQ ID NO: 108677 - DNA, 1026 bp, Homo sapiens
tgtaatcattgtagactcaggttccaaattaataataatttttcagaataataatttcagtagtaatattattattattattgacaatctgatttaagctgcaagccttaaaaaaaaaaaccttcagaattcagcagaagaaatagaaggttgaggttcattagagatctcaaactctgcccttacatgaaaattcctgaagcacagtgctgagacactagtaaaattccttgactttccctgtgtgacactgattctatttagggggactagtgacattagaaacagttgtgatatttgcaagggaaaagtacattacttgtttttcaggataagcaagagagcttttgaccttctttggagatcctatacctacctagctattcccggcgtactcagattcagttatgtgttgtcactgagaacttaatgtttttatgtctttcttagattaacctttttaaaacattatttttaggaactgaatttatggccaggttacatgaacatctgaagtattttgtaaatatgaaaatttccacagacaagtcatggcaaggagttaccatctacttctcaggccatgaggttattatctttttttatttaaagagtttaaaaaaagtatttaatattctcaagcatataccatattactgcatttttaaaaacaattttatttagactcctggagaaggagagcataaaatcatggaatttatcagatccgagaaagcaaagccagatcatgatccaaacaccagacactgtctttatggtttagatgctgacttggtaggtataatttttattattataaacttatgcattgatagttaaatatctaagagatttcattttgtacaggaagcttactggctgtggcaacaaatattggagacacaataatgattgctacttctatcattaccaaatttctaaaaatcattggaaaatgagctttttaaccatagtttattgaccaacagatctctataattagtctacaggtgtgactaatcctag

SEQ ID NO: 108678 - DNA, 1036 bp, Homo sapiens
aacaagttgatatcctcagagtttttgttatgttaaagaggttggtgagagagaagttaaacttgaagaagagtttgttcatcacagaaatagaattgtgtggggcacagtagatgaagctagtagcaaggctgtagaaactatactcaaagcagagcttcctaacttgtatgccatgtggcatgctggtacgctgcaaaggggtggcagtagaagtcaggcaggtagtaggacacccatattcaaatccaggtttgcctgactgtaaaactcaggttctttctagtaaattctgttgcctcaaaaatgtgatgattttgcagttgatttcattaatgtcattaggctttcattttaaatgtttttaggaaacacaaagatagatatttcaattttataattgcatttttatataatcttagggataattttaatgatcttaaatgtatacattaaatgatgattaagatcattaaatgtcattatcattagatgtagtatatataatgaacatttaaagctatacttttgatcttatttttagaatgaatttgccatatatttgtgacaataattattttatgtttttaacattctgttaaaatgttctacttctgtattcctaatccgaaaaattcaatttttttttttttaaatgagacagagactcactgtgtcacacagcctggagtgcagtgggtacaatcatcactcattgcaatcttgagctcctgggctcaagggatccttttgcctcagcctcccaactagctgagactataggcacatgcccctgtacctggctaataattttttttatttttgtagagatgggatcttgctttgttgcccaagctggtcttgaactcctagactcaattgttcttcccaccttggcctcccaaaatattgagattacaggcatgagccactgcacctggcctgaaaaattcaattctttaaataaacaaaacagacaagtctggggctcatttttatcaatcataatcatttcaaaacttgtatgttttgaacg

SEQ ID NO: 108679 - DNA, 1007 bp, Homo sapiens
aagctccaatagtagtctgccctgggatggtaactagaaagtgaactaagaggttcttctaatgagaacattattgacacttaattcaacaaacgtgtattgaatgcccagactctgggttagatgctgatttttgactgagcataagtccagattgggcagaaaggcaagtgagatcagaatgcaattgatggactgtgagaagtgagctaagttaggaaattcagggtattatcagcaccactgtgtgacttaggcggtaggagaagtaaaaggatgagaagaggttacacactaggattttaaagttcattcctggacatgtggaatatttctgtgtaacagtgagatcaggctgtgtcccggttcatgggtaacagaagtaaaggttagaattgaaggcaagaaatccctagtggagagtgtttgacgggtcattagcataatgagtccttcaatcataatggcaagtaaaggagtggaaagaccatctgcacatccaatgtggaagtcatcaaagaaggtgggacggtgctttgaagaaggctgccggtgagaggaagaggatggcaaaaagtactgatttcaatatcaaaagaaaaaagatactgaaatttttagaaagactgtgagatctttgaaggcaagggccatctctgagtaatatttaaattctcaaataccacccaagacttactctatcagaatctctagtagttgagaaactcctgggaactattttttaccatactcccctggtatttgttaaagtagtttttgggagccactagcctagaagatctagtgttaaggagggattttataaacctactacatcagtctgggttcagttgcaggtgatagaaagcactctagctatttcagacaaaaaggggtgtaattcagggaattgggtgtttataaaaatcactgtaaagccaaaagggcgggaatctaggtgagccgtaagggataacttcccaaacagcactacagaactgactcac

SEQ ID NO: 108680 - DNA, 1180 bp, Homo sapiens
ggacactaaggataggttttgtgaaagctttatatagaaactgggaggagaattatttttaaatttcactgtaaataaattttaaaatttggttcattgttgtgatacctttcaaaaatgtttgattaaaaagagaccaaaggttatcagcttctctgttaagtagaacttaaagatggtaatgcctaaataagtcacaggcattcaaaagctagtcctgggcgggaaggatagggagaagaagtaagttacgggaagtcagtggtgtggcctcagtagcataggttttcagtttctctgaatcatcttgtaaaaacagaaagagaaactagaaaccaaagtttaaaatccataaaacaattacaacaaaccatgtgacatgctatccccatgaaactcaaaacataactaggtgaggcaaactatcaatagtctctagacaccgttgatattgccatctgtgcaaaagcgagaaggaagcaatggggcaacatctgatgaaccttagaacagaattccagaatagccagcggtatccactaaaagactgtgctggccaattagatagcggtagctgaaacagaggagttttattcactccattattgactgggtgaaggtctaccataagaaagaccaaacaggcaggagtagtctacctcctgtgaacactcaaaactgacttgccaaggtgccattctagaccagagccctaaggaaaagggagtggaataaagtcttacggaaatgttatgctggaagtggaataaaattttatgaaagggacaatagagacaagaagagaaggagatagaccatataaaagtgaggcaaagtcatagaatcaagaaatcttagaaaacaaaccacaaagcaaaccactgtattttttaacactacccagaaacagctttgtgaacttatattccctgaacctctactcattctaaaagttcaagaaaattaaattcacataaaaatgagctacagaaaggtattgagatcaaattacatacaaagttattatacgagaaaaagggacagagtatctctccagacataaaaacttgcaatgaaaaaaatgcacacaaaatagaccaaaattataaccaaaactattatctatttcacaatgagttaaaaggcattaagaaaatgaggtaagacatgaaagaacaac

SEQ ID NO: 108681 - DNA, 1024 bp, Homo sapiens
tttgaagttccagaaattgtgccatttcgcctgactcataatatggttaatggaatgggtcctatgggaacagagggtctttttcgaagagcatgtgaagttacaatgaggctgatgcgtgatcagcgagagcctttaatgaggtaatcacctatactttgtaaataatttaacagtaacctcgaatataattattggcccctacatatgtttgtttttatgtagaaaccactttgtactgactgaaatagtttttttaaataatagctttatgcagatataatttatataccataaattcacccctttaaaagtacataattcagtggtttttagtatattcacaagattgtgcatccattaccactatctaattttaaaacattttcatcagcccaaaaagaaattccgtaggcattagcagtcactcctgatcccttccccctcccacccctgctatctacttgtaaccactcatttataatattttctgtctctatggatttacctattcaggacatttcatataaatggaatcatctaatatgtggccttttgtgtttgtcttctttcacttaatgtaatattttcagtgttcatcatgtatcagtacttcattgttttttattgccaaatggtatcctgttatatggatatactacattttctttttctgttcatcagttaagagacatttggattgtttccaccttttgtgtattataaatagtgtggctgtgaacattgtgcacaagttttatgtggacatatgttttcagttctcttgtgtatacctgggagtggaattgctgggtcatatgttaaatgctgtacttaacattttgaagaactctcaaatcattttccaaagcagttgtaacactttataatcccactagtaatgtatgtgggtttcaacttctctgcatcttttctatctttagataacatctttatctatcctggttattgtctgccttttttattttagccattctagggatgtgaagttgtatctcattgt

SEQ ID NO: 108682 - DNA, 1074 bp, Homo sapiens
ggacagttggagcctcttattccaatctaaaacgtcagacttcattctagccttctctccttcctttctccaatagtgagaaaactggctctcattatacaacatatttacttacttgctgaagactagtactgtatatacatagtttcagaattgttaaccaatatctgtgaaaaacaaatattcatatatagttttgtaagctacctcaaatcctgttgggatgaagacagggaaggaatcaaaatggaaggaaggaaggaaggaagaaaggaaggaagggatggaaacacttaagtgtttctgtatataaaatctagaaatttcactatagcttatatcaaaaaacatatgctagcatatattaataccaattatacccatattatataacttagtacccacactgtatatgtataagaattaattttagtacccttttctttatatagtttggtcagaataggtctcaaaccagcagtgttgttcacccattcaataatcccacattcatcatttagtggaataactgcatatgttcgaatatgaagttctcttctacgagactctgcatcttttcttaagcactgttaaaaaatacacataaatttaaaaacaagatagaactcaaaatttctaaatgttatatcaaatatatttaaagattgttcatttcataaccaaagaatgtcattgaaggcttactatgtggtatacatgaataattcttctgaatggtaggaaggaagctactgggacagtatctctaatctatttacagattattaaaaatgtcctgggtaggtccttctttttaattattcactattaatgtgacaagaatattgtatttaaaatatttaagttgtatatttaacaatgacaaaatgctgctgttttattttctattgctttataggtattactgaaacattaagtctttaggcacagagactgctatttaatttttcttttttttttttgagatggagtcttgctctgtcgcccaagctggagtgcagtggctcaatctcggctcactgcaaactctgcctctcgggttcttgccattct

SEQ ID NO: 108683 - DNA, 1050 bp, Homo sapiens
caggagaatggcaagaacccgagaggcagagtttgcagtgagccgagattgagccactgcactccagcttgggcgacagagcaagactccatctcaaaaaaaaaaaagaaaaattaaatagcagtctctgtgcctaaagacttaatgtttcagtaatacctataaagcaatagaaaataaaacagcagcattttgtcattgttaaatatacaacttaaatattttaaatacaatattcttgtcacattaatagtgaataattaaaaagaaggacctacccaggacatttttaataatctgtaaatagattagagatactgtcccagtagcttccttcctaccattcagaagaattattcatgtataccacatagtaagccttcaatgacattctttggttatgaaatgaacaatctttaaatatatttgatataacatttagaaattttgagttctatcttgtttttaaatttatgtgtattttttaacagtgcttaagaaaagatgcagagtctcgtagaagagaacttcatattcgaacatatgcagttattccactaaatgatgaatgtgggattattgaatgggtgaacaacactgctggtttgagacctattctgaccaaactatataaagaaaagggtactaaaattaattcttatacatatacagtgtgggtactaagttatataatatgggtataattggtattaatatatgctagcatatgttttttgatataagctatagtgaaatttctagattttatatacagaaacacttaagtgtttccatcccttccttcctttcttccttccttccttccttccattttgattccttccctgtcttcatcccaacaggatttgaggtagcttacaaaactatatatgaatatttgtttttcacagatattggttaacaattctgaaactatgtatatacagtactagtcttcagcaagtaagtaaatatgttgtataatgagagccagttttctcactattggagaaaggaaggagagaaggctagaatgaagtctgacgtttt

SEQ ID NO: 108684 - DNA, 1011 bp, Homo sapiens
ctacttttaattgataaagcttgaaaaacagagtctcaggctccgcagaaagatcctgaaaagatgtttcaaaaatcttttaaacattttgactgctttgaaggggggtgtctaaatttgaatatgtaagtacttgtattggcgatgaagtaatctttttatgtcatagctatttttaatgggtgaaaatgtttctgttcatagacagtcattcttttcataggtcatagataattaaaataaaagatttttaaaatacaaattcactacataatatagctggtaatattctttttttttttttacataactcaaggtttataatatatagacatttacacagaaatttttggccctaattcatatataactcatcatcttttaggtggaaattcttgcttctcttcagaaaccaaagaagatttctttaaaaggctcagatggaaagttctacatcatgatgtgtaagccaaaagatgacctgagaaaggattgtagactaatggaattcaattccttgattaataaggttgggagatagtttgcttttattttatttatttattttttattttaaaaaaatttttgactattataaaaccagattgcttttatttcagagttgctataattactatcaatctgatataggcattttagtatacaaacagatcactcttaaaaagcaggaatgaaatataaagtctttttcattttcacttaatttttttattgagataaaatgtacatacataaaacttaacatttgacagtttttgaagtatattgttcagtggcattaagtacattcacattgttgtacaaccatcaccaccatccctctccaaaacttttttcatcttcccaaattggaactctgtgtctatgaaacaattaacttcctatttcccttctcctcagcctccagcagccaccatttactttgtctccattaatttaaccatttgaggtacctcatataagtgcagtatttctccttttatgactggc

SEQ ID NO: 108685 - DNA, 1050 bp, Homo sapiens
agcatgataaagccagaatttcaggaatgttagtctggaatttactgaagggtagaaatatggatttagggtgaccaagttattataatttcccagaaatagaatgattggacctaacctaggcttatggccaaagaatgcaaatgaaggcacagagatcctaaggaaaaattgaaagaagtattgatagactttgattagagcagaatttgtataatgtacaaattctgtatactgtaagtggaaacatacagtatgtacatgtttttggtacagggaatgtagaactaagtgagctaaaaaggagacagaggagtcaaaaataacttctaggaagaaatattgataccataatttttgtgaaaacggtatgtggtagtttgaatctttaaattttaattcgtataatataaaaatgacagctatgctaatagtgtttcttgtctatataattgcagatctctacaatatggaaatcagttcatatatcagtcaatgccacgaatgttaactctatggcttgattatggtacaaaggcatatgaatgggaaaaaggtataactcttcacgtaaaagttttaaaggactaggaattataactttggtataaagtcagatttggctggacagtctaatttcctagaagcttggaatgaatttgataattaagatattatgtaagtgtgagtaagatactaaatgttaaaaaggaaagacaaatcatagacttttaaagtagttttaattcagggccacaaatacaaatctgattatttcttaatgaatctaacacatattaaaatgtgttagttttagccaaataatttaccctaaaaattaaaatggatagtgaaaattaatgtcccttgggtttttgaatggctctaaatattttttctggttggacagagacaactatcttttcacaaattggcaagtgacctaaccttgggcatgggaataacatactttaaagctatttttaaagcaaaatttttcttctgtgaaatgaactgatatactgatttttctctttcctttattgtttt

SEQ ID NO: 108686 - DNA, 1256 bp, Homo sapiens
tattttttatttttatttatttatttatttatttattttgaaccggagtctcactctgttgcccaggctggagtgcagtggcacgatctccgctcactacaacctctgcctcccgagttcaagtgattctcctgcctcagcctcctgagtagctgggactacgggtgtgtgccaccacacctggctaattttttgtatttttagtagagatggggtttcaccgtgttagccagggtggtctcgatctcctgacctcatgatccacctgcctcagccacccaaagtgctgggattacaggcgtgagccaccgcgcctggccaataacccagatttaatggctattacttaaatttctcctcaggctagtcaccagtttagaattagtaataggcattactaataataatagcatgttctggaattgatacttagcaactattgttggtgccatttgtggttacaccaacttgtggtggctgagaaaggacaggagaggtttcctggatgagaggggaaagcaatttattcagtgtgcattagtcagtacctggtcattttattgagctagtggtagtctatgtattataataccttaaactcaaaatgttcaaaatgcaatttattacctaatactcaatatctgtttctcctctcatgtttcctacttctctgaacaagactttattccatccttccatcaaaaacagaaatctggacatcatcttaaattccttctgcaacctcacttttcacatccagctggagactaaatctttgttcttcaaccttagaaatatctcttgaatcctctccctcttatttatttccactgctttaacttatgactttattatttacttcctctaacaatattaacaaccattttaggatctcaccatttccctgtatacgttattgcagtttgtgatctttctaaaatccacatcgaatcatgttgctccttcaaaaagattaaatcttacaaagtattcttcatacctttaggattaagcctaactctaggaactacacaaatccctttctgatcaagtcctggcctacttcctcagtgtcattcatcaccatctcaaaaaccctttaaacttcagctaaaatcagactatgtgcttttcttccaattaaaattattattccatctacctagaatgcctttcactaaattctctgccaagaagatttctactcattcttgaaaacctaattcaaattttcttcgttgataacttttcctgac

SEQ ID NO: 108687 - DNA, 1159 bp, Homo sapiens
ttatccatcattctccagtttaattaggaatttgggattcactgcaaatccctaaatatttattttaaaagtttaatgtaattaattttatttatttatttatttatttatttattattttaagggacggggtcttgctatgtcacctgagctggagtgcagtggctattcacaggcataatcatagctcactgcaaccttgaactcctgagttcaagtgatccacctgcctcagtctcctgagtagctggagtacaggtgcacgctaccatgcctggctaaagcaccaaatgtataaaccagcataaattggtgtttacattcagtttgaaaagatataaatgtaattatttacttagcaaggatatattaaagttctaccaaagacaactgtgtattttaaattctttatttctgatttaaagtacttgctttatatatgagattaataaggctgaatatgataacattttaacataggctctatctatcttcagattgcacatgttatgtgagttggagcatagcatcaaaccacttttccagcattctccaggtgacagttctcaagaagattctctaaactgggtagctcgactagaaatgacccagaattcctacagagccaaggagcctatcctggctctccggagggctttactaagcctcaacaaaaggtttctcacactactttttttaaaaatgtcacttatcttgaatttggtatttggatattatttgggggtgtttgtatttcttaattttctgtctgaatctacatttttctatttttaatgatcagggctacactatctggttgaaaggaacctagaacttaagaatcacttttagacaccatttctttctcttttttaagatgttaaaaacatatctgggggatatgttttttactgataaaaatcaagaataaggttcataataggtaaaacagaacactgtaagaaaagttaagtcaaggctttttaaacaaattaataattaattcctttgaaatagtatatgaagaaggttctgtattgggaacagaggctttcaaaacattggaactacttgcaaagtttatgacctagatttaaattgttttaagttaagttgttgtgtacacttaccaatggtctctctcaccaatgtgttgtta

SEQ ID NO: 108688 - DNA, 1066 bp, Homo sapiens
tttatctttagcttgaatatctcctttgagcccagattgctgtcttggttttcttgaagtcatctcaataacaatatattaaaatggttatttacatttttaaaaatttaaaaattcaataaaactcttataagctatactcaacagaatatgttatcatttggatctagacagttttaggatcctgaggttctttataaaccttatgatcaataacagctattgatatagatttgtatttaaaaggagtaagaatgttgagggaatagaatgcctggaaataagtttataattttactgtgactttgccatgaaacaaatgcttactattactttgaggaaaaatttctcaaaaaattgctgtttcaatataaacaggtggttttatagttttatttccagttgtgtttttttcttgtttttgattgttttttaatcattgaacaaagaaattgtatgctgctatgcatgaacctgatggagtggccggagtcagtgcaattagaaaggcagaaccatctctaaaagaacagatccttgaacatgaaagccttggcttgctgagggatgccactgcttgttatgacagggctattcagctagaaccagaccaggtaagataataattgaaaggcaactgtaatgaaaatagccctgaataggaactctggaaaccttagttttttttgttttgttttgttttgtttttgagacagagtctcgctctgttggccaggctggagtgcagtggcatgatcttggctcactgcaacctctgtctcccgggctcaagcaattctgcctcagcctcccgagtagctgggattacaggcgtgtgccaccacaccacatccagccgaaaccttagttttaatactgtttctgtcagtgtcactgagtgtctggaaaatatttaaccctctctaagcttgagtttcctaacagataaaattagagactttactagatgattttaaaaattccttccaggccggatgcggcggctcatgcctgtaatcccagcactttgggagaccaagacgggtggattccccgaggtcaggag

SEQ ID NO: 108689 - DNA, 1020 bp, Homo sapiens
ggatttttacaggtctgaagttaatatagtgaatttaataatgaaaattaatgtggccagtcttttatgtttatgttgttcattttattgaatgttttatatgctatgcttagaagcttatagattagtggggagagataaacatcaatttggtataatattttaagtacagtaacacacatgtaccctgaggaaggacacttaactcatccatgtggaatagggtgggagatggaagcggatgagccagaggtcaggaatggcttcttggagatggtgtcttaaaaaatgagcagtatagggaggcaagacattataatcagaggcatctctgtggagtgtttgaaaagagcatggtatatgccaaagagtaaagtgtcggttttggaatggtagaggaaagatcacaaataatagaagactttttaagttgcccaaacttcttggagggtgcgaactagggaagtgttatggtcacaatggaattttagctaaatgcctgtggcagttgtggaggaggagtttggaagggctatgattcaaggaattactcttctccttgtgagagttgtggtcctgaatttgggagtgagttagtgggggcaagtgccggttatgtcaggtatcaagcatgaaaatgctggtgaaataatgatttaggcgatgttatgattgtgtagggaagaaaagaaagtaagagcaggtgaggcgaatacagtggaattaaataagagctcaagattggtgggcttttcaaatcaaaaagcaaagtgtgataaaataactagaaaattagtaacttgcagtcttaagatgaatattagccccttcctatctttgtgttcctccttgtccagctttaagtctatggttcatggttaaaatcgttcccttagagtgatgctcaacttcttgtctttttcccactgtgttgtactccgtttgtcaaactccaaccatgtaagcagctggagaaaaattacacagtgggtgttataactggtttcagtttaagttcat

SEQ ID NO: 108690 - DNA, 1736 bp, Homo sapiens
tgtgtgttttttttgtagagactgggtttcaccatgttggccaggatggtctcgatctcttgacctcgtgatcctcccaccttggcctcccaaagtgctgggattacaggcgtgagccaccatgcccggctgacattttctttttttaatgaatatactgaaaatataatgtgtgaaatgtggaatactgttaactattttcagctctggaatattatgggtttttttttgttttttggctttgtatttgaagaaaaaatctctttaaaattttatgagttcaacagtgttagcaaatcaaaagttaagtcataacaaaatttgactttaaccccaaataatttaattaaaaaattaattaaaaaactttttaaatttaaaaatgaatactcgtttgtgataaattatctcacatgctactctttgacatttaatcaatatgtgaaagtgtgttactgtctacacattttgcatttacaggttcgacatgatcttgccagtaaaattttcacctgctgtagcattatgatgaagcatgatttcaaagtgaccatctatcttcttccacatattctggtgtatgtcttactgggttgtaatcaagaagatcagcaggaggtgagataaatcatcttacttggtttttgaacatgtgaaacttactttctccaatgtaattagtattagaaaggctacctattagtaggaaatgtagacctatgtatggctatgtatgttcatttacatatctttgcctgtttggtgtgtgtatccctttaattgatagacgttctatgtatattctagctaccaatttgttgccagtcatattttcaaaaattattccaacttagtcattttctttttaaccttttcacattttgccacgcagaaattttaaatgtaaatgcaaaatttatacatcttttatagattattaattttaaaccttttatgtgatgcctcatctaatgtcatgaacttatttgctatattttcttttaatccttctgtttttatatttagtcttcaattactctgaacttaattttgcatatagtgtgaaatattactgtaagtttttttcactgttaacaaagtttcattatcatttattgaataatctagaatattttaaaatttttaaaattttctttagtcgttaacatattttctttttagactaatatttggattgatttaattatagataagaacaatagaggaatgtattattgatcaattgtgttttccttttctttttttgagacagagcctccctttgttgcccaggttggggtgcagtgatgctcttggctcactgcaacctccacctcccaggttcaagtgattctcctgcctcagccttctgagtagctgggattacacacatgtgccaccatgcctggctaatttttttgtatttttagtatagacagggtttcaccatgttgaccaggctggtcttgacctcaggcaattgggctgcctcagcctcccaaagtgctgggattacaggccaacatgcctggccaattgtgttttttcttttgaaaatttttgccttagaatggttagctttagatgtcatataatagttaaatggtattatatagatattattattaattataaatgattctcataggtttatgcagaaattatggcagttctaaagcatgacgatcagcataccataaatacccaagacattgcatctgatctgtgtcaactca

SEQ ID NO: 108691 - DNA, 1067 bp, Homo sapiens
gggtagaggatattaccaagagaatgctagaagtgaaggaccatacagactaagatggttgtggaaagaggcaaagagacaggggtgtcatagatcaggagagcttagcagggtcacggaacagaagatctcaacaagagagaatgggtgtgctggaataactgggtgaaaaaactggaaatttaggaaactatgaccatacaatgagatgtctaaataattgatttcaaagtgaagaaattctttgaattagcatgggagccctgataattcctgagccctgataagtagagaagaaagtcattggaaacttctgagcttgattaagtgctccagctagacactgaagtcacccaggatgataataacactgggaagaaagaaaaccctgagcagtgttctaaagttatcaatgagtttggtaatcagtgtgttgcatagttacccataatgaggagtagaaaatggtagtatacctgggtggcttgaacttcaaaggaacaggtttttcttatataagaagagagttggaaggatctgaggaagaggagggggcagactcaaatccttagaagtactttaggtgtccaagaatgacctacttcacccctaagaaggatactggaaaaaggtaagcagattgcagtaaaggcaaggcagtactgaggtagtcaactgaaggagttgctgtaatttactaaaattctaaacaggtggatttatctttttaataaacaaattttcaaaattacagatacaagagttctcagaagtcaaccgattggtctggagtaaagaagccaatttacttaagtaaattgggtagtaactttgcagaatggtcagcatcttgggcaggttatcttattacaaaggtaagaaaccctgttcagtttgttaactgaatggaaattctaaaggaaaccagaacatctatctgaatgcctagcacacacaataatcattgaagtatttgtgctgataatcatagaaatttttgaagaaaatgttaactaatagagaataataatttctctgtagttactaataatagcttctgagtgaaa

SEQ ID NO: 108692 - DNA, 1033 bp, Homo sapiens
agccacataaaattaagaggttgatagagtgcgttttcaatagcgttgattcccttttgtatgaaaaactaaaataccaggttagcctgtagctcaattttatagcttggactgcttgatatttactccagaggacctagggaaatatggaatttcttaaaagcatattcatatttttgctgcctttaagttatactccctactttatgttttttttttttttaatttgggctctttatatataatcactaaatctggattaaaggatggctgtatttgggagactgaaatttagaaccagatagaacaactgcagttcaaaatcaccatagaaataactttaggagaaaacatcaggttatgactaggcagagcctggcttgtatcccagtatcagtagttttctagctaagtttactataaatttgataaaaatcatccagagaactatacgcgtgatgattcaaaatagggatttgaattttttctcctggtttagtgtgatggttaactgagagattattggatttttcaactgttagaaacttggaatacagtgaaatatgtatatatatatatatatatatattatttgggtataagactttgggtatagggcatttgttatttcctaagcttttattggtgatttgaaagaaacccatgccattcaaaaaaatcctacacacaggtagccgtaagatgagagctgtgtgaacatgtttaaatgttaatgctgaggaacaaatagaaagggtcatgttgaagtaatgtgagagagaagtgatagttggtgtagtaaggaccccaaggagcatccggaatgggagagccgtggcccttatagggaattatacttagaaggaatagatctctttttttgcaatagggaaagataaaataatggatggaacacagctaagtttacagatttcattgcgggaagcaatgattttgtttttactctgtgaagtaggaggtataggagatgacctcattggctgaaagtggcaatggagttggtgtaggtgac

SEQ ID NO: 108693 - DNA, 1016 bp, Homo sapiens
cctttcatatgtatacttagaggccactgtagggtcattaattggcctaatttcaatattcttatgtctttggaaatatgaagtcccaaagagagtgagggggatggaacggctggtcagaacacacaccacatttatcgattaggttcactgtcttatatgggcacagtttgtggagccccaaagcaattacaacagtaacatcaaagatcactgatcatatatcactataacagatatagtaataatgaaaaagtttgaaatattttgagaattaccgaaatgcgacatagagacatgaagtgagcatatgttgttgggaaaatggcactgatagatttactgcatgcatagtggccacaaaccttctatttctaaaaaaacaaacagacaaaaaaaacagcatccatgaagcataaataaagcgaagtgcaataaaatgagttatggctgtatttttataactaagatatgtagaacattgacgaatataaagcgttatctgcttcactgtggacttacaaatgtaaaatatgtatttgtaggagttgctttctatttatgactgtagagagatggagaccaacggcccaggtcaccaattgtggaggagatttcctgagcatgttcgggaaatactagaacctcatctaaataccaggtatgtaggcttatttaatgtattttcataaaattgtttttaattatataaaaataatgcgatttttttggccgggtgcagtggctcacgcctgtaatcccagcactttgggaggctgaggcgggcggatcacgaggtcaggagttcgagatcagcctgaccaacatggtgaaacgccatctctactaaaaatacaaaaattagccgggcgtggtggtgcacatctgtaatcccagctacttgggaggctggggcaggagaatcacttgaacccaggaggcagaggttgcagtgagccgagattgtgccattgcactacagcctgggtgacagagcgagactttgtttggaaaaa

SEQ ID NO: 108694 - DNA, 1026 bp, Homo sapiens
acaaaagagttctctgtcctattgaggtttatatatttcatttacaaagaactattcagcttatccttaataaaagcttcacctagaaccagacaatcagttaacttctgagtttatttcttttactattgcagaaacctttagccaaaagcaataaagtttgaaccccatctagggtgttatattcttgtaaataaagcttcctaatataataatgacaatacttaaagcctaatcaattatttaaatattactttttaaacattattgctagtgtttccatggataactagtttccaggatattacagtagtaatgttttgtagtcaaatgagtttgggaactccatatagaacaaaattaaatgtgaccttttaaaaaaaatgtgacttttaatgtatctgtgtgcattgtgaatctctaagactatatctccaagagttatactatatgcgtatattaaaattattccttagaggttctcagatgactcttgggctctacagaatgcaacgtaggagatgctatgtatacattttgtgtttttttttggacggagtctcgctctgtcacccaggctggagtgcagtggtgcgatcttggcttactgcaacctctgcctcctggattcaagcgattgtcctgcctcagcctcccgagtagctgggattacaggcgtgcaccaccacgcctggctaatttttgtatttttagtagagatgggctttcaccatattggccagtctggtcttgaactcctgacctcatgatccgctctccttggcctcccagaatgctggaattagagccattagccaccatgcctggcctacattttgctttttaagggttaaaaaacaaacaatgcaaattgtcagagatatgcaaaagttgaataattttttgtacaccttagaaatagcctaaaaagctttacattttggctttttagctacagattatattgtagtcttgataccaaacttagtttgaacctcactgtcttttcctttgtctaagttaaat

SEQ ID NO: 108695 - DNA, 1106 bp, Homo sapiens
tccaagaaagctttctggaaataaaagacctaatctacatattgaaaagacttgtatcctggagaaaattgacccaggataattaactctgagacatatcctagactttaataataaaaagtcttcaaagcttcctggccaaaaaattttttttcaaaaaattacttgcaaggagaaaaaaaagtagattggtatcagaattctcagtaggaatgtacagagtgggcctagaaaatagcagcatttttttaaaatgtcaaaaaatgtcataaagtatgagtcaagaaagagtcaagctgtccttagagtatcatgtatgagaacacggttttaaacctacaagaattgaagtaatatggttttcacaagtgatcccttcctaagagatgtattagaggatgagcttcattaagtcaagagatgactgggcagactttggcaaaaggtctgatggttactgtttatgtatttaacgaaatatataagactaaaacaacaatagggcaagtgtgggataattatatgtaaatgttatattctaataaactagaaataatgcaatttttttaaatgagagaagggggagagtaaggagtaagtaagataagctcagtaattgttgcataggcaataactggaagtcaaaatataccattttacaccggcaaactagttatagaaagtcaaataaggaaaagagggagtgtaggtatttcaaaaaattaccttaatttttattttacctttaaggtaaataatatttcacctttaattaatattaaaggtattaatatattggataggctgggcacggtagctcacgcctgtaatcccagcactttgggaggccaaggcaggcagatcacgaggtcaggagttcaagaccagcctgaccaacatggtgaaacgctgtctctactaaaaatacaaaaattaaccaggcatgatggcgcacctgtaatcccagctgctcaggaggctgaagcaggagaatcgcttgaacccgggaggcagaggttgcagtgagccgagattgcgccactgcactccagcctgggtgacacagtgagactctgcctcaaaaaaaaaaaaaaaaaaaaaatata

SEQ ID NO: 108696 - DNA, 1030 bp, Homo sapiens
actaaattcaggacatcttgaatttaatatcattaggacaaaaatttccttaactactgattactaggaagtattccatttactacaaaaattgttatatggtctcaaatttaaatgattttaattcagtttgttttatatatgtgtatggcagtttgggatagatatgaaagaaattaaacaatatgcattatacctttaataaattagaaattgtactgttctagatgaatactgggctaaaataacaaatcaccttcaagggaaaaaacaaaaaagaactcaacttgtatttttcaaatttataattaccacataagacataagcaattggacaaaacaaactggccaacatttattcaatcttttgtattatctgagaatagatgacaccctgatactgggtgggaagcacttgtccttagggctcatctgcttctggcagcatgtttataagctttactctgaagcactacttaactctataggccttgaacagtttgatgtctttgatgaagttaatgggacccaaacatgtcagttctgtgagggtgaagatgatgaccacactgagaactggccttcgattcaaggatgattttcctgaattgtgttgcaggtaaatgactgcctgagtttattaattttttttttttttgcattttccagtagcactaacttgaattcttatctctttgagggaaattgggttcaaataataaataaggtagaaagactatttatttgtatttaaaatagaacatatttacttcttttaaaacattttactatggaagtcttttaacatactgggaaatagaagagttatcaatgaacctacatacctatttcccaactttagcagttatcaacattgctagttttttttaatccacttctacctttttgattgttggttggggtattttagagaagatcccagaatcttatcattgtgcttgtaaatactttagatgtatctaacggatgaggacatttaaaaaataaccttcatgaattattatactta

SEQ ID NO: 108697 - DNA, 1130 bp, Homo sapiens
ccttcattatctgaaggtaattgaatatttctatatattttacttttttatataaattagcattataggaaagatgtaacattcttctaggaaagagggtgagtaaattatagcctatcctagaagaatgtaagtttaaatgttgttatgttaaataatctttgtcctgagagcatattaaatagaattctccttttgttttctttgatcatttcaccataatgggatatgataggcatcctttcatgggagaggttctcagcctatttcattatagtacttttcagttgattggagttataagttgactgatgatacacacttaattatatccataggaagaggcaatcaccttcaaatgtagtataatgtctatattttagttacttggtgttctgattacaatttggtccaggtttttggtagtttttacatttaaaattataacctgtgcttcttttttttggtgtcatattaacaaaatatctctgaggaatatgaaactacatgggaacaggaaaactatgagaaatatgcatataactttactgttttctctgatgttaatttacttaatttgtttcataatatatgccagcagcacatctctttccacgagagttagtgaatatcaaatgtatttattcatcttgagaaagtattattcgactgtatattgtggagatagaatgatagtaataagtatttatggagtatttaatacatgtcagaaattgagctaaacaattgatatggatcatttcatgcaatcctcacagttacccaatgagataaaggtactcttaattttttttttttttttttgtgatgggagttttgctctgtagcccaggctggagtgcagtggcacgatctcggctcactgcaacctccacctcctgggttcaagcgattctcctgccttagcctcctgagtagctgggattacaggtgtctgccaccaggcctggctaatttttgtatttttagtagaggtggggtttcaccatgttggccaggctggtgtccaactcctggctgcaagtgatccacctgccttggcctcccaaagtgctggaattacaggtgtgaaccaacacgcccagccaaaggtactatttttttgtttt

SEQ ID NO: 108698 - DNA, 2197 bp, Homo sapiens
actattttttataaagtggctaagttgccatatttcagttacttctgaacattgttttaattgttttaaatcttagtataaatttcaggctgggcgcggtggctcacgcctgtaatcccagcactttgggaggccgaggcgggcagatcacgaggtcagaagatcgagatcatcctggctaacacggtgaaaccctgtctctactaaaaatacaaaaaattagccaagcgtggtggttggcgcctgtagtcccagctactcgggaggctgaggcaggagaatggcgtgaacccgggaggcggagcttgcagtgagccgagatggcgccactgcactccagcctgggagacagagtgagactctgtctcacaaaaaaaaaaaatttttttgaatagttgatattacatagtatgttttattctaaatatgtttcatgttttaaccaaatttatattgcatatgaatatctctctactatattcataattatagaattaaacatgtggacatgaaccaaaagagcatattatggagtgcactgaaacagaaagctgaatcccttcagatttcccttgaatacagtggcctaaagaatcctgttattgagatgttagaaggaattgctgttgtcttacaactgactgctctgtgtactgttcattgttctcatcaaaacatgaactggtaaaacaaacttcttgtttcttggggttgggtttcctgtaatgaacttggatttactgtttactcattattcacttgactcatgtaaccttagaacacaaacttttcactgaagtagttaataaatttattttctattgagtcaaatgctaggtacggtgctaagcactgtatatatcttagttaatatttacaatagtcctgtaaggtaaaggctattatgcctattttaaaaattagaaactgacactcagagaaactgaggctcttttttgtctgaagccaaaactgactttcctggggacacatgattagaaagtaccagaacacatttgtgtacaactcaaaacccagtgtttggctgttgaagacagggtctcgctttgtctcccaggctggtgcacagtggcatgatcatggctcactacagccttgatctctatccggggctcaagtgagcctcccatgtagctggaactataggcatgtgccgccacaccctaatttagaaaaaattttttttgtagagatgggtttccctatattggcccggctggtctcaaactcctgggctcaagtgatcctcccacctcaggctcccaaagtcatttggttcccaaatcctaagggtgatttaagctgacataaatagattcaacttaaaatagtaataacatattacttgatttgcatgtttactttaaattgttatagataaatttcgtactcacaatttcttttggctttactacaattttatgtttgactataacaaaattcatcttaattccaatgtttttaacaaaatgtacttactgcagccgtactttcaaggactgtcaacataaatccaagaagaaaccttctgtagtgataacttggatgtcattggatttttacacaaaagtgcttaagagctgtagaagtttgttagaatctgttcagaaactggacctggaggcaaccattgataaggtggtgaaaatttatgatgctttgatttatatgcaaggtgagtacaaattagcaacagatcagaataacctttaaagataatcagtatagaaatatgctttcttttttgcctgaagcctaagtgcgtgtttggaatactcagaagttttttcctgatttcagttctattaaatttgtcaataatagaagttctgagttgccaatttatgtgcataatattttgattctttagtcaatagaaattatttataacttcaaagttttttaatttgggagtttgaggaatgccgtgattcttctttaaaacaggcatagataacatgtttttataaagtcacatttaatttctttgggttcacagacctcagaccatcgtttatagatctctgtgttaagaatttctgcttatccaatgatcattatgatagtatttcaaatgtctttatttttatttaaaagagatatgattaaggaaaagttataattaatgacttattttgtgcttctgtagtaaacagttcatttgaagatcatatcc

SEQ ID NO: 108699 - DNA, 2520 bp, Homo sapiens
gtgggtcagaacacatacatttatccattaagtttgccaccttatatcggtgtggttcatgacagctccaaacaattacaatagtaacatcaaacgtcactgatcacagatcaccataacagatacgataataatgaaaatgtttgaaatattttgagaattaccaaaatgtgatacagagacatgaagtgaccacatgctattggaaaaatggcactgatacacttgcttgatgcagagttaccacaaccttcaatttgtgacaaatgcagtatctgcaacgtgcaataaaactgggtatgcctgtgttctaaactattatgtttccattgtgaagagaatgttttacactcttgttagtgaagtttattctttaaaagtcaatcgtcaaggatttagcaaatgaattagcacttcggatatacttgtttatttaatatcttttttgtttatttcaaagaattcagtaattggatcataacgagacttctgcggattgcagcaactccctcctgtcatttgttacacaagaaaatctgtgaagtcatctgttcattattatttctttttaaaagcaagagtcctgctatttttggggtactcacaaaagaattattacaactttttgaagacttggtttacctccatagaagaaatgtgatgggtcatgctgtggaatggccagtggtcatgagccgatttttaagtcaattagatgaacacatgggatatttacaatcagctcctttgcagttgatgagtatgcaaaatttagaatttattgaagtcactttattaatggttcttactcgtattattgcaattgtgttttttagaaggcaagaactcttactttggcagataggttgtgttctgctagagtatggtagtccaaaaattaaatccctagcaattagctttttaacagaactttttcagcttggaggactaccagcacaaccagctagcacttttttcagctcatttttggaattattaaaacaccttgtagaaatggatactgaccaattgaaactctatgaagagccattatcaaagctgataaagacactatttccctttgaagcagaagcttatagaaatattgaacctgtctatttaaatatgctgctggaaaaactctgtgtcatgtttgaagacggtgtgctcatgcggcttaagtctgatttgctaaaagcagctttgtgccatttactgcagtatttccttaaatttgtgccagctgggtatgaatctgctttacaagtcaggaaggtctatgtgagaaatatttgtaaagctcttttggatgtgcttggaattgaggtagatgcagaggtaagtaatttttcaggttactagttaagtatgtattttgttcatcatttaattgtatacatatgtgcaaaatgtaataataagaaaatagaatatctttaatagtaatttatatttggaacataatgattttcatagtgtagtctggctcactattatggacttttactttgatttcagaaggatttgttcattaagttggtaatgaactgccaatggagtagaatgtttctaagtagaatctgtgaagtgtaaatgtatttgttgcattattaattaaaagggggcagttaccaacttaattgcagaagctttggtcaatcagattatgtgtctgacaagttataatcaatcacttttagaaaacctatgaatgattaatcatgccaaattatgcgcttttttctatttggactgtgggagtcaggtaatacaataaaatcatcagagatgcagtaacttgattaaatattttagtttattaatcttgctggattaaagttacatgaagaaagttggtaattcccttacagaattttttataagggaattaaaatttatagcattttggtaagaggaaaaacaggatgtagagagaaggatttgtttaaaccttctaagactatagaaccatagtctatatatagacttaaataatatagatcaatttagatgtttattttgctttatgagactctaaaagtagtttcactagaaaacacctaacatctaatacattcttgctgcctatgaataatataaatatattttctaaggaatatttctggaaattattttttattttctcagtacttgttgggcccactttatgcagctttgaaaatggaaagtatggaaatcattgaggagattcaatgccaaactcaacaggaaaacctcagcagtaatagtgatggaatatcacccaaaaggcgtcgtctcagctcgtctctaaacccttctaaaagagcaccaaaacagactgaggagtatgatgaccttcattcagtttgtatttagccattaaataaaactttgttcacttttaaaaatcagctttagttaagtgctttgatttaaatacacaaagaacatctttctaaatgtagccaagggagtgcttaaaatatttttataattattgtagacggttagtagtataaaacatttcatggttaaata

SEQ ID NO: 108700 - DNA, 1007 bp, Homo sapiens
aaagctaggcctgggatccaggttttctcattttctggggtctttttaccactccctgcagatactcttctttacctccattattaaacttcctttttctcttctacttataccatgaagtctggcttaagcagaaaattagttgtttctcttactaagcttcctagtacctcataaattcctttcaaaaagtgccctttcactgaagccccacctaacaatttgctggtcctgaaaacgccctccttccttccctcagtcacctgggccctttgcccaaaatgcctgtttgcctccctctttccgtattgaagtcctgctcatgctgcaaggtgtagctcaggtgtgacctctttttggaagccttccttgattgccttagcatgaagtagctctccctcttctgaaccctatagcacttactactgttgtttgtgctgttagtatccccattgtatatagtatcctgagtattttagcacctcccaacttcccgaccaggaagttggcaggttgtgtaagctcttggaggttaaagcctatgacttaaacatcccacccagcactaagcacaaagtatattcttagcccctgtttgtgggagggagtgggggaaggaagtgcagtatgtatagttttgtaaagagatttcatgtgtgttctataatatggggaaggccatgttagagctgtatcaagacagcagccaagtccatttctgattcctcatattttgataacagatcacagattagttagggggattacaggagacaggcgtaaaaacacgggtcagttggtccaggccctggattaagcctgtgactcaaagtggagaaaagagggcacagaattaagaaatgtaaaggaagaagcatgtggtgaaagactaaatgcagagaaggaaagacatgttgaaaatgaatttcagggttggggtgttagtaatgggtttataatgttctttttatcttaaaagtacctccaattggctgggtgtggtggct

SEQ ID NO: 108701 - DNA, 1072 bp, Homo sapiens
ttaccatggccctttgtaaaatgacaaatatctttcttaaaataataatagtaatattagtaactagtattacagaatatcttccatgaaccaggcactatactaaatacaagtaatatatcatttcatctttataaaccatcctgtgagataggtgcaacaattactcatttatttttaatttttattttttaaaaacagggtttcagtctgtcacccaatctggagtggaatggcacagtcataactcactgtaaccttgaactcctgggctcaagcagtcctcccgcctcagcctcccaggtgtggaccaacgtgcccggcttattaaaaaaaatttttttatagtgataaggtcttgctatgttgtctaggctgatctcaaacttttagcctcaagcaatcctcccacctcagcttcccgaagccctgagattacaggcatgaaccactgcacctgacctaccctcattttctagatgagaaaattgaggcttagagagatagataaaagcatttatctgaggtcatatagtttacaagtggctgagctgagatttgaccccaggcctatctgactttatacactgagcgctcaaataacttaatcaaatatcttaacaaaaatgcaaagctctttctgaggtaactctaacagatgcttagaatagccacaggtttcagctggtggaaccaccaacattctttgagccacatttaaaaaaaccaaaacaacagtggtaaatcgttccggttttttttttttttcattccacttagtctttatctccttttctcttgaagcattcctagagaaagggacagcagctttttctctgggtacaccattaaagccacttctgatctgctcccaccctcttttggggtggagctgtgattggggagtgagttggtggtcatccagggcgtgtctgtggagttggcaatgggaaactgggaagctcaccttgtgtaggagcctaagaactctggagtgaccaggtataaggatttctttccctggggtgtcaggatccactgctggaagctcctggaatatctatggatcatg

SEQ ID NO: 108702 - DNA, 1848 bp, Homo sapiens
ttaagagaatgttgttttgcttgtaataaaacataaagttaatagaaattcacattaacttttagaattccatagtactatggcagcaagcatccaatgtatattgagtacttccacctacatcaatcccagtaattctcaaaatgctttgtgaagggagtaggaactgaggctcaaagaggctgtgtcatttggtctgagactcacatagcttgtcagtagaagagatgagatttgaactcagggctgtggaagcctatactctgctgcctgccagactccagagtttccagtggttttaaatcatgaatgtatcaaaggacacaggcttgagtccttatcttactggatatttttactgccagccaaaggagatagtatgtctctgtgtttaaggccccactgaaattggttggtccggttaacagcatacctgttgactgctaacaaagggaaactaagccagctttgcctggggcactaattcctgccacatgtcttctgaaaatgcagcctgagggtcataaagcaggcaatgagctatgtgggagaacaacattagctgagtatgtttgccagcagttacattgctcaatgtatgtcttagttacttctcaagttttttcaataagtgagtgtcagagaggatttaattttaaatatttatctttaaattggagtagatgtggtaatactgtgtgaatgcacttgaaatggaataataaagttgcatagatagttgtctgaggaaggtttggaaaatttccctgcttattcagctaatttttgtaaactgcccaagatgattgatcacagattaatacaaagtttctttctatactaccaaaatatcagactttatgtattagtcaggatagagtagtctgtgctgcagtaacaaattaactgtgacatctccattactgtcttgctcatgtaaatgtcagtgtttattggctgttctccagggcagctcacctatatgcaatgactcagaaatccaggctgctgtgatttttgtgactttgctttcctaacatggggctttcaagtggtcccaccagaggaaggggaactggatgatcacgtacagctctgaaatgctttggcctagagtgacaaatatcactttgactcacagcctgttggctagaactaagctcatcaccctgcttaatagcaagggcctagaaataagagggagcacataggtattcagtgaacaataaatgtcttttgcatccctggttttagagcaacagaagcagttaaatcgtttgccaaagtctcttctgtagagatagaaaagtggactgaatatttagtgataattacttgataaaaaattgtaagtgaattttgccgtaaactattaacatttgcaataatttatgtatagctgatttagcaacctgatttccatttgtggatatggttataccttctaagggtataacaataaagttagcttcttttacattataatacttcagctgatggtgctgatgatcaaagcttgtatgtatgtatgtatttattttgagatggagtcttgctctttcgcgcaggctggagtgcagtggtgccatcttgtctcactgcaatctccacctccctggttcaaacgattctcctgcctcagcctcgcgagtagctgggattacaggcacaggccaccatacccagctaatttttgtatttttagtagagctggggtttcaccatgttggccaagctgatctcgaattcctgacctcagttgatccatccgcctcggcctcccacaaagcttgtatttattaagtatctcctatgtgccaggtactctaagtgttttatatgaattac

SEQ ID NO: 108703 - DNA, 1045 bp, Homo sapiens
atgtcagacttcaggaatggaaaaataccttttatttcatctaccaccacccaattacctccagatttattcctttttttctatctaggtttcactggattctttctttctgaaagataagctacgactagcttgaatttctaggtgaattggactttgaattctttgatcatttctttgcagagagtaatccaggttaatgaatgacaatgtaactgaatacactttacacggtatccttattacagagaaaaaaatataaaaatacttccttgtgtataaactgaactctggccttcacatctttgcactaacaataacactttctgacttcatgcagaatatttttaaaatctcagtattgtttttaaatgccatatgtcttattttccttctcccacatgcataatttagaaagtcttagtattgtttttaaaggccgtatgccttatttttcttctttcactttttatagccatttagtgttttgtctttatgacattatcattttgacagttttgtatttttcttccaaaaaattttcctcatactctgttggatctcaattcttctgcaatttgctcttaggaaacccatggtaaacaggagaatataaatacctttttttttttttgctttagtttgcaaatgcatgcaagtgaaaggtgaacccagtgaaaggtgagcacagtgaatagacattgggataatgacaccactatgtttgccccttactcatcaagctcattctctagtgtaatagagccctccatgaaaaacagtcatatggtagatcagggaggagaaaatgatcaccgctggtcttgtgcttagatttctcacaaacctaataacgactaaaattaatgtgagtaaaatatcatgcaacatgagttttattgaccaatacaaagaaaaacgatatgtttaaaaaaaaaaagcactccaaaaaaaaaaaaaaccaaaaaactgtgaaactcaggaagctcatgttttacaaatcattactgtgaaataaagtaaactaaattctacaaatctctgg

SEQ ID NO: 108704 - DNA, 1032 bp, Homo sapiens
aaataaagattatattttctatgtagatacgtaactgagagggaaaatagacaaaaaatgtagatttttcagcgaagagaaatttagggtgagagattagaacttgaaaaaaaataagcaaaagcaacactgttaggttttatcagtctggaaaatttcaaaatccctctgtcagtagaaggcattgtttagagtggcatattaaaaatgatctgctttttatagtcactgaattcttgctaggtatcttttccaacttgctcgctttcttatttttcatgtttgaattctttttgctagtgttcagcatgcttttggaatttttcagtgtgaataggattgctaaatatttccattattatttactgtctattaagataacatgggaaatatttatcagtcatctttattatgtatgtcctcatacatctgccaaaaatgtatttgactttgactgtcattggattattttcctctgtaaatttgtgttttaatatatccttatgaaatttgaagcttgatcatatcacatcccaaattcatatgttagtatgtcctcattggcagagaattttctctctagggaattaaataaaacacaattaaatattaaacgctcacatcaaattgaaccagatatgtgggctacgtacagaaagatcatctcagaattcatttatgattacagaaggtacacaggccataaactatcagactttgttcaaatcatagttccactatttaatctgaatgacctctgtgagccttggtttttttcatatataaaacaagactaataaacttaatttgaagagttacagagcaagctaaatgtgatcatgaatggaagaatacagtatgtgtttattaatggtcagggagggaggaggaaagcacttcatatgtcacagcacatttgagtgttaaatatatgttaactcctcttttccctcttagtaacctacttctaagatatttgttatttttattactattttttattatttgtagacgtcaaattgagcctgcaaa

SEQ ID NO: 108705 - DNA, 1095 bp, Homo sapiens
cagttctatttgcaaaataataataataataataataataataataataataataccatactagacaggaatgagaatgaattcatttaaagtaaaaaagaaaaatacatgaaacataagattccagaacctatagaaatacttcagtgatttttttttatacagaatgtttcatgtgcctaaagataatctattcagatcttaattaccttcatatcagactttctccctctatcacccagtactgggcccagctcccttcactgccatatggtttgtgctcagagaatgcaaagtaatttaatatgaaccttagcgaaacataacttattggacaagctgttggaggagaaaagccatataatatatcacaaagctagcaatttaaaaaatcaattgctattgctttatgtccttagcatacagcattgaaaatagactaaacagccatacgttaaccttctcaggagaacatatttttctgaatccaaagtagtaatatttttactttgagaattcctacttgttcataagttccttcctcttaaccctcattcccgaacacaaacagctgcctactgagtagctattgtgattttcctgtaattatgttttaagttaaaaaataatgtataaataatacaggaacttattcttactgtacaagttttaggaagtatgtaagtatatggaataaaataaaacattccacccttactctctcatactccccttttcctgacctctttctttacctaatagaggtaattgctattaactgtccttagcatatataggtacataaatacatttgactctaaatttttttaaataaatgagatcaaattgtatgaagtgttctgccattttctttttaaaatttgatatgtcttgcaaagcttttcatatcaatacatagagatctaccttatgtccaatggtggccaaggagtttatagtatagtttacttaacagctccctactgccaggcacttaagttgtttccaaatttataaatattgtggcaatgaatgtccttggatgtatacctttgtaaatatttatgtaaacattttggacagattcttagactg

SEQ ID NO: 108706 - DNA, 1015 bp, Homo sapiens
ttcctggaaaaggtgatgagttcagttttaagcttgaatttgaggtaattttaggaaaatgggggtggtgaaaggagatactaaaactggaaagacagacttggtgatcagttgaataaaagggttgagaaatgggagtgcataaaccttttaagggagagcaaccctagagaacagccgacctgagagtttggctctacttagaactgaggtggcagaaacatcgcgaaagtgcttggcattttgcatatgcttaatgataaaatctttaaagagagtgcaaatggttaagaaatgaggcagtgaatgctaaaacatagttgaggtgagggaggtatttttccaactacagaaggcattatgtttgaaggctataataagtggcactagcagaaaaattttaattataaacaaggtagcactataggaatttcagaaaagacaaatttaccctttttagccataaatttcccttgctaagaagacagagaaggtggtagatcagcaaataataatcataattaccatttattgagtccttcgtgtcactatgttaagcactttacacattgtttaattttctaaatactctgagcaaaaaggtgagcattagagaagttaagtaactgtctactgtcatacagcttttaagcagaacagctgggtttcatatccaggtctgtctacacacaaggtgaaagccaagctttggagttgtatggccctgggttgacttttggctgagctactgattagctgtgtagcatactgctcatttattccataaatattcaaagcttgccctgtgtcaggtgccttgctagtcgctgtggctacatagtgccctcaaagagctcactattcagggaaggtggcaaataagaaaacaagaatcacagtatggggtgtcagcaatactatataaatcagctaaggggggagtgtgggaccacatgagaagggcatctgttttacagaaaccttagcggtttaaactaacagcagggctacatct

SEQ ID NO: 108707 - DNA, 1050 bp, Homo sapiens
ttcagttatatgatcagaagagtctgaaaataatgaaaattaaaggtcagatgtttatgaatgttcatctatgctttattttctaggataaatctataagcacaagtttacctgtcctagatttaatagatgccattgcaccaaatgcagttcgtcaagaaatgatcaggagagaaaacttatctgatgaggacaagctgaacaatgctaagtaagcctttatggtttatattacaatacatggccctttaattctctaaaatccttataggaaaagttactatgcccttaaaattcatatttttaaatataacttatatgtgagtcttagatttaagactcacaaacttaaccttttcgtaaaactaatcttgtcaaaatatttcactcttttgttaaaatatgttaagtgaaaacacagtggataacaccaagatatttttcttgtctcttcaagatacgccatttcagttgctcgaaagatcggtgcccggatatatgcattacctgatgacctcgtagaagtgaaaccaaagatggttatgacggtgtttgcatgcttaatgggaaaaggactgaacagaataaaataatcatttcatatgattttctgccacattaaacatattgtatgcctcacagtttacaggattctgaaatgtagtgggtgtaaaaccagagattatttgtatgctcaaaatagttatatattcattaatgaattcaatatcctgttcatactagttagagctggtcagcctttttgggtaacacagttaatttaccaactgatacagataatagaatatattcataatcaagctgatacttcatgattaaattatttttgttgcttaaaagtcgtattagacaagactaaatcattcttttttatggttcaaaaaagatgaatacaaacgtttttgcaggttctgctgtgaaatgtggtttgatttttttggtgtgttaattttgatcataaatgcattcatactcataatccagtttaatccttttatttgcttcctccaactatttaaagtggtccaa

SEQ ID NO: 108708 - DNA, 1052 bp, Homo sapiens
atatctgcctgttctgtgaggtcttggagctaaaactggttttttacattttatatttcaaatggttaaaaaaaatttcgtaacacatgaaaagtctataaaattcaaatttcagtgtccataaacaaaattttcttagaacacatccactatcatttgtttacatatggtctgtggctgcttttgtgttgaaagggcagagttgagtagctgtgactgagagtgcatggcccacaaagcttaaaatatttactctctaaccctttttcagaaaactttgttgacccctgtgctacagtataaagtattagtaagtaatataagttgcaatagggaaaagagtaaacaaggaagggggtgagtgtgggctcagtggagtcagggaagtgaaaaattacaaaatacggggcttggggagttggtccatgtgaatcccacctgagtttgctaaaggcacttaaggagttaggctcctaccctccctggaggctgagagataggggccctgtcttcaggtgttggctggaacaaaagtaaatttttatgtcagctttgagttttctcgggcaggcattttaagaggggctagggtcatcctagggatccggccttcagctgttagaaacacttaagtgttttgttcaagtttatatgggccaaggtggaggccttgtggagaagggctcagaaaagcctgactagagtttggttaaggagagaatcttggtcagcagctgtgttagttaagaggctattgcagagtccaggaggaagatcatgggggtttggactgtgggtagcagtatacatggagacaagtagatgattatgggagatattttagagagggggctaagaagacgtgctgttgaattggtatactccctgtggaattgattgaaaatggtttctttttccttgactgaaaaagactaccatctagccaaaaaagtaaacagattatgttgcacttccttctatgtgttatattttaaaagacaaaagatgtaactcttgaaagcaacttcgttataaaatgaatggcatttata

SEQ ID NO: 108709 - DNA, 1047 bp, Homo sapiens
ctttatttaaatacactcaatgacagcaagatcataccttcttttattttattttatttttttgagacttagtttcgctcttgttttgttgtccaggctgcagtgcaatggcgtgatctcaggtcactgcaacctccacttcccgggttcaagtgattctcctgcttcagcctccggagtaactgggattacaggcacgtcccaccatgcccagctaattttgtatttttaatagagatggggtttcaccatgttggccagtctggtctggaactcttgacctaaggtgatctacccttctcggcctcccaaagtgctgggattacaggcccagccaagatcatatcttgatagcccttttacttctagagaggcaatattaaatatttttatatattttaaataactgagggaatataaactggctataagcagaagaaaaatattgtttcttttagcgtttcagtaatggtaatattcttttagcatttcaatgaattcattctgtattcttggcttgccagattgtctttttggcaattgactttcaaatttaggttttttatttaatagtatacagattatattatgaacaatggaattatgaactttaatcttatgcatatctagtgatgtttttcatacagttaagtatgtttcataagaaacatgaggaccacttttctcttaagggattaaatatattttattcttctttataaccagtaatgcaatgataagatggaaaagggctagttttaggtttctctgtaattttaaataaagtcattaatttgaagtcctcaataaataaataagtatataaacaaattagtcataaaagaggaggaaaatcagataagtatatcagaaaatattaaaacttaccagtgatcaaaggaaattaaattacaatttcatgatagtatttttcactataaattgggagtgatcatgcctaagacgggtgagtaaaactttagtgtgaaatgggtacctccttatattattggtaatataaactattaaaaggactttaacaatatg

SEQ ID NO: 108710 - DNA, 1042 bp, Homo sapiens
cttccaaatattgttgatccatggttggtttaatccacagatgtaggacacagagatacagagggccaactctacagtatactagaaattttcttgaaagcacaataaacaacaaaactctgtccaattctttttttcactacagtgttaattctacaaattatattctgttttgggataaatcattttaaaacagaaggttgaccaaatattattgtggattacctgaataatgtcattttataataatttcaaacctgatcacatgagtatatatagaattatcaggacccttaagttatacttcacaacatgagcattatattggaaaaatattgcctatgaaatttgtcaactaagaagatttgtaaactttggtaaattagtttctgtacctgaactaaaatttttctcatatttgggaatatttttcctttcttctcacatgaaattcagttttaatcaggcttaagagtgtctttaataccttttaagaaatccgcagtgctttcttggagcaagaataggtctaatatttagctttttattgtttttgctatcttgacttcttggcttctggtaactaaaatcaatagtttctctagactgaagatgtccaacattagttagtggtatctttttctatggattgtgcatgataactttgaaatttcataaatattattatgagtttttatatattaaacatgaaaaaatggctaagtaagctaataataatagttaatacttatagagtgcatgctatgaaccaggcgctattctgagggctttacctttaatcttcacaactttattagtagatactattattattcccattttacagatggggaagttgaggcttagagaaatttaaaaacttgttaaaggtcatttaccaagtagcagagcccagatttgaatctaggtaatctggctccatagtctatcctcttaacctctacatgcttttattgttagaaaaagggaaaaaacaaaactatgttgaatgtatagaattgatttttaaactcttattcag

SEQ ID NO: 108711 - DNA, 1050 bp, Homo sapiens
taaataatagaaaaaaggaaagccaaatgttggttctttaaaatgactaatataattgacaaaactctgaccaaattaagaaaagctaatttttgtatttttagtagagatggggttttgccatgttgttcaggctgatcttgaactcctgatctcaggtgatccatctgccttggcctcccaaagtgctgggattataggcgtgagccacagcactgggccacgaatagcctctttttgacaaaggctctctggatgtacaagtgtgggattgcccatggatgcatggaatcgggtgttctgggtgagtagctctgggatatacataaaaatttgttctgaagtattctaaagttattattaaaaatcctggttttgatttttttgtcatttgcttctcccttttaaaaacaaaatcaacaattgagtttaaaaggctaaaatttgattagatataaatgaaacatctttgcctgaatgatgtccctgtagcattctaatactaagattgggttagatttcaacgagatgaagcttttaagtatagaaacctatgaagaaaatttacaagctgaaagtaagacttcatatatctgattaattcatctcacaaaaaaactgatattaatagtaacataatgcaggtaagagcctcccagctgaaaaggaaaaagacttggattctcattcacagtgtggcaatgggagaactttagtttccttatctgtaacatgaagttgaattggatactttctgagatcccttatggtcttaagtggtttctggatccttgaatatgtactttttttttttttttgagatggagtttcactctgttgaccaggctggagtgcagtgacgtgattttggctcactacaacctctgcctcccaggttcaaactattctcctgcctcagcttcctgagtagctgggattacagccgcacaccaccatgcccagctaatgtttcactatgttggccaggctggtctcaaactcctgacctcaggtgatccacctgccttggcctcctaaagtgctgagatt

SEQ ID NO: 108712 - DNA, 1021 bp, Homo sapiens
ttgaatttggctttttgccgatgagagtcttaaaacagattttatcatccaggcacaatggcgtgtgcctgtagtcccagctactttggagtctgaggcaggagaatcgcttaagttcagtagtttaagaccagcctggggaacatggcaagacccccatctctaaaaagcaaaaacaagaaacccagattttatcgtggatggaatacatgtataatcttaccatttgcagaagagaacatttatctagaggtaacttacagtctaagttgtttcacacatgatacatagagaaaaagattaatttctgtattctctttctttaggtctaaattacattattatgggccaagtaggtgaagatgggcgaggcaaaatcatgccaaacagctttatcatgatgttcaagaccaagaatcagaagctcctggatgccttaaaaaataagcaatgttaacagtgaactgtgtccatttaagctgtattctgccattgcctttgaaagatctatgttctctcagtagaaaaaaaaatacttataaaattacatattctgaaagaggattccgaaagatgggactggttgactcttcacatgatggaggtatgaggcctccgagatagctgagggaagttctttgcctgctgtcagaggagcagctatctgattggaaacctgccgacttagtgcggtgataggaagctaaaagtgtcaagcgttgacagcttggaagcgtttatttatacatctctgtaaaaggatattttagaattgagttgtgtgaagatgtcaaaaaaagattttagaagtgcaatatttatagtgttatttgtttcaccttcaagcctttgccctgaggtgttacaatcttgtcttgcgttttctaaatcaatgcttaataaaatatttttaaaggattacagaacaaccactaaacttctttttatagatagtgggacattgtagaaggaatattcccttttagcaataagaatagtgtgatttatgcataagattgcc

SEQ ID NO: 108713 - DNA, 1003 bp, Homo sapiens
ctgtgttttgtctatttggtatacttttaaatttgtctacttcttagttcttaagattcttatagccagtgccaggctcaaaataaatatttagtgatgggttgcatctaattacagatgtaacacactttacacatgaacagtatttctaaaaacctatgctactcatgtttaggcaattgcatattttaaggatgtcctcaggggaacaccctatgattccttttgtaaagtgagggattaacctacattctgtgagttccaatttgttgttctgggtttttctaaacagggcacacactcagagtacgcctgtattttcttatagtgtttgttttatataaaggaagaagagaacagggctacatttgtgctatctttgaactcaggtttaaaattcaatagagggtattgagttgtcctggtgaaattagagcagtagttggtagcatggagaatttattttgcgtggttttaaattttttctttgtagtgatagattggtggctcagggaaataaatgataattttaaatgggtagattcagaactaaagaccaattatgcttgaattcatttttcgtgaaacttatgtcttctttgaattaaggtttaaaacccaccgtggccttgtgtcaacaaaagtgtagacggacggggactctggagggcaattattgttcaagtgactttggtaagaaataaaagccagtctttttctctttaaccagaaacttgaggctgcatgcttaatctcaaaggaattcctatgaatttatggtgaagggtcaataacgctgctcatttatccaagaaaatacttgcctatacaccagaatggtcaaattgttagatttcaccactgagaaaaatatggatttagaaaatatacttttttcatataagcttaataatttgactcttggtacatgatactgccacattgtgtgttctggctgactattcctgcaaaaaacctatgtacttttttccttatatatttt

SEQ ID NO: 108714 - DNA, 1002 bp, Homo sapiens
ttgtgtactcagttgtctgagggcaggcacaggaaaaacagatttctctgaagattcatacagggctgaagggcagaggggaagggaccttaaggcattgtgtagaaaatgattgaaataatggaccatggaaatgaaatagaattgctaaggaagtaaagacaggccagggctgacgggttgggaaaaatgagagcagccaatatattgaaccatcaaagatggaagaaaacatagtcatagagtgattaaataaataagcttggaggggagaacgctgtcctggttgccagcaggtctaaatttgatagactggcaatgaacagccatagcatgaagacatccgagcctggaactgagtgtctaggaaagtccctggtgaagatgaggccacggggactgcgggatcagacatgggagggtggacccatagaaacgatcgcgggaacacagccagggagggctgagaaccgggaccagctttgtgagtgaagggcaaggagacagatgacagttaagatgaggaggggaaggagagagccagtgacttgcaggccagacagcaggccccaccaaagcaggagaagggcatgttggacacccaccccacttccagactgaccttcggaggctgagaagcagccggttcccaatgggcccgggaaagggcgctcaccatcagacacaccacaactttttgactcagttaactgagtaaatttaattccataaatttacagctgaagtgaggttcccaacttctggaacaatggtatgtctctcccttccaaacatcttctgagctctttctctcccttttttaaaaatgcatatttaagctattatatgtattttaacattaaattacatatgttttaatattgccatctgcttcagattctttctggagttaactagggggtacagattaagagtatataaataggctgggcgcggtggcttacacctgtaatcccagcactttcagaggccgagacaggc

SEQ ID NO: 108715 - DNA, 1015 bp, Homo sapiens
gtgcagaaaatgagaaaacctgtttggggagcttttccctgttaaaaaatgaacaggaggagcactggggataggtagacagcaccccatcatacttggtttgattcagtgtagatcaatgccattgaattctgttcagaaacattgattcctccccggctgtgtgctgggcacctggaatacaaagataaattaaaactgcaaagaaaagtactgggagggaacagaataaggcagataagtaaattggctaatgaatgtcctgggtgggtttttgagttctttggcccagtctggacaagtgatcagggaaagcttttgaaaggagattgtgcctctcgaagatgagtcttgaaggaagagttggagttagagacagcagggaggacaagctcatcccaagcagaggtaactccattaataaagatacgcgggagagatgtgtgttatttctgcagccaaaaccttgagttggggcctctatacagatgaggcaggagggttgagttggcttccgtgtgctgcagagatggtaacgctcaactgaatttaggccaggcgtgacaggaccagaggctctagaacccccgtcctagagaaggtgagcagggagcctagttcagagactgttgcaatggtccaggtaaagtcgaggaggtggagaagggtggtagaaatgaagaggagggtgtggatcaagaaatacttaggaggcaaaaatggcaggacatggtgtttggttggctgtagtgactgaaggacaggaagactatggaatgataactagagacagctaacagtaactggctctataccacatgaaacagcatctcagtccgttcttgggatttgccaatgcagagtggatctaagtgaaatttcctcttgtctgcctagtgatttataacaatttgcagatgtaacatggcccccagtacatttgtggcactgtgattctgtcacatttatcctaaagctcagttgcagcagaacaaaaatatgtctttgttcctaa

SEQ ID NO: 108716 - DNA, 1063 bp, Homo sapiens
aagagtgaaactctgtctcaaaaaaaaaaaaaatttactctcagcaattttgaagtttattatatgttattattaactatagttaccatgctgtacaatagatctccaaaaccaattatagtcttaaagtaggttgctagtgttacataatgttcccatacttttgtagctgtaagtgaacagagttcttaagttgaatatcctaactagagttgatctgagtttgagatgatcttttggaaagattacaattaaaagcaaaagaataccacagttttttttttaactaaataagaaatatgcaacaaaaagcacttaatgcatactttttttacaaaggaaaatcgtagtatcctccaaatctggggagaggaagaattccatttgaggttattcaacaatgctattaatatttgacacttctattgtgctttctctaaagcttatagaattaaagtttgagaagtttgatgtggagcgagataactactgccgatatgattatgtggctgtgtttaatggcggggaagtcaacgatgctagaagaattggaaagtattgtggtgatagtccacctgcgtaagtagcacctatttatgtctttaatagttttatggctctaaacttgtttcttgttcagtttcccaatcacatttgttttctggaagattttatgttgttgttgttttgttaaattattgggtcctctattagttctcgcactgctgtaaagaaatacctgagactgggtaatttatttaaaaaaagaggtttaattggctcagggttctgcatgttgtacaggaagcatgaggcttctgcttctggggaggactcaggaaatgtacaatcatggtggaaaggaaagagggagcacacacatcacatggccagagtagaagcaaggtcgaggggaggtgccacatgcttttaaatgaccagagagcagagagctcactgtcgccaaggtggatggtgtttaaaccatgagaaaccgccctgatgatccagtcatctcccaccacgcttctcctcaacattggggattatattacatttgggc

SEQ ID NO: 108717 - DNA, 1054 bp, Homo sapiens
gaagagatgcacaaatttagtgggaaatggattctatatcatcataggagtgtggtttacacaggtatatccatttttcagatttgtacagctaagatttgtgcatttcagagtatgtgaatttctctccccaaaacctgtaaaataataataataaaaacaatgaagcaggtcgtggggattgggtggcaatatagatagaataatagaatgatgactattattgtaactgggtaatggatatgtaggaggtcattatattattctacttactttgtatatacttgaaatttttcattaaatggagatttagaaattattccaacctccatttttataatacattatcttaaatttagaagtttgatttaagaatggttggatatattctgtgtcaaagaaatattccattgaagtataattattttagtttcagttcagtttttatttgttatttacattcaagtaaaattaaatttagaacttcgtattaaaataattcttacattatttctgccaacctacaggtacatatgcaacttatgagtacagatgcctgaaatgatatttgtcacctattaattttgatgagtttttggtggctaaaactggggatttgggggtatatttttgcttccttccttgtgcctttctgtattgctgaaaatttgtaaatattatttttacaaacaaaatttattcttaaaacatatatatattatatacatattatatatatatcatgggaagttttctagtaatgagagctgtctatatcaactaattcaaattttgtccctgggtgtttactaaataccaatgccttgaggagccttaacatctctatgattttttgagcctgcaagctttctgagtgagtgcatattcaaatgttttgtcttccttgtctaaggaaaaaaaaagaaaagaggccctgagtccacttctcccctctctcgtgttgctatgctatgtcaggtaacaaagatcattcattgtgtgtgttggggggttatgtatgtaaccatatgtttaagagaaaatgtaagcgctt

SEQ ID NO: 108718 - DNA, 2114 bp, Homo sapiens
aggatggtctcgatctcctgaccttgtgatccgcccacctcggcctcccaaagtgctgggattacagatgtgagccactgtgcctggccaagaaatgatatttttaaatgtttctttgctaagcaatatctctaggtattagaatatgcaaatatatgctaaggtccaatcaggactggtattcattctaagcaatgactcatctattaataatactgacctaatattttgcagctttgttgaggtaagttcttaaggaataagattgtgaatcctggagaattgcagaatttgtcaaaagaaaataagtacttaaattttttaggaatgcaatatgctagaaaacttcccttgggttagttcagatatgagagaggaaaaagcattatcttggatattatactttacacacttaagtaagtgactagatgtcaaagcctcagatattgttttcatgacagttttctaattggcgcttttcttggcaggttcccgaaggaaaagtagtcgttctcaatttccgattcatagacctcgagagtgacaacctgtgccgctatgactttgtggatgtgtacaatggccatgccaatggccagcgcattggccgcttctgtggcactttccggcctggagcccttgtgtccagtggcaacaagatgatggtgcagatgatttctgatgccaacacagctggcaatggcttcatggccatgttctccgctgctgaaccaaacgaaagaggtactgtttccacataatggcaataacaacagtaatgttggttcactgttcttggcacttgatgtttatttactcctttaaagcttaagagtggttctcaaagagctagtgaatgccatcaaaccatgatgagaccaatacaaaaaatcagccttttaatttaagtccacatgcattcttgtaaatcaagtatagaaattcatagagtaaaaatgtggagcttacatacataagcacacatgcaaatatgcaaacacaccccttcaccactccatagtccattctccagaaatagccatggccagtggttcccatacctttctatgtgtgcttgcttttatttgagtacttatacaatagcttttaaaaaataaaagtggagcccaggcatggtggctcatgcctgtaatcccaacactgggggaccaagggcaggtggatctcttgagctcagaaattcaagaccagcctgggcaaaatggtgaaaccccatctctacaaaaaatacaaaaattatctgggtgtggtggcacacacctgttgtcccagctacttgggaggctgaggtaggagaatcacctgagcccagggaggtcactgctgcagtgaccgtgatcatgccactgtgctgcagcctgggtgttgttgagaccctgtctcaaacaacaacaaatatatatatacacacacacagatatatgagatatagtgagctcccaagcgtagaaatctctacttttgaaagatcactgcagtgggcaatatttgtatgttttcagccttttacccaagagcagtccataatctgcttttggattggactgtagtgcaacatttttacttgaaaggtcagaggacagaatctggggctgaaagagcagccagaatgttggggaggaaatccaggcagggagttacagaattgaggcacaaaatattcgtataaaatctactgaaatctttgtctgacagctaaactctacatatgtggaggagagcccagttggcctggcacaaaagcatcagctgaaaaatgaaagaactgaaaagagattacagctgctgcctgctgccagggaaacagactttaagtttgagtctagccaagttaaatgcctgctagaacaaaattatttttatcagaacacaacagaatctagagtataatgtatcatgcataatgtccagtctgtagttatgtaatgaaacaggaaaagtgtgtccctattcaaggacaaaagcagtcaataagaactgatctcaaggtaactcacatgttgcaattagcaaacaagtactttaaagctgctattacatgtttgtttcaggatttataaagggaaatatgtgcataataaataaacaaattg

SEQ ID NO: 108719 - DNA, 1051 bp, Homo sapiens
cgggggttatctccactggtgtcttcaggctgggcccaaggtggatgggagtttccacgccccttctagacatccaggggtaaagtttttttagtgaaatccccaaaaacaaaagaaaatgttcaaaacatctcgttatttctacaatcaaaatatgttttattttttaaacatgtataagatttacctttacaagagtagtattgaaatatacccagaatatagatgaataagatcttgtaagcttctgatttatccccctctagaaagactgccaaatatttttacataatttgtctatagatctttctggactacctttggaggtccatgggagaggtgacactgagtggtcacctcgagctttacgtagatcaactgtgcctcgagctttacgtagatcaactgtggtctgcattttagaatgcacgttcccaaaggtttgtttgtggaagagggaaatcgtagaagattagaatgatggcttaaaaaaaaatcacgtgctgcaaaaacagttctttttgatcaaagtagtaaatgatgtgtttagggaggaaaagctgcagacacaaaggagcattcccatttctgcagaaatgcactcctccacacagaagaagctggcctcctgtttgcattttgctcatagtatcctaaaaatgcaaaccatcagcttaaaatgcagttcctctgtcctctggcaggagccccggcatcgagagctttggcacgtttgcttgtgacagtgaggacatcccaggagctgtggggtgagttgaggtcactgtggaagctctacgctttggcccacacgggactttgctgttgataggaaaaaacacaaacgtcgaattgtttttctgcaggcagataatgaatccccaaatcaatataatctcacaaaacagtagcttcatctatttgccaccaaaaaagcaccttgagtttctgcattaagtgttagcatttacaggagatttgaaatataaagtttccaaaaagatatgcatctgctttttgcaaagaatggcttagaaaagagagtggcctt

SEQ ID NO: 108720 - DNA, 1056 bp, Homo sapiens
caggcactcaataaatggtagtgttgctttatttatttattttttaacctcccttccaggtctgtaataaggaatagaagtgtggtgtttgtgcagaacttgtctacaagccaacttgtttcaagctggttggtaatccatttggagcatggggagttcccattggaaatacccattcctactcactatgtcctttcttcatttaaaatatgatctttcataagatcatggactttgtccacagaattgcttccaaaccctccctacttcaaccagccactgcctaccccatcatcaaccaagggcattccataaccgttaagacttttcaaagtagagaaaagattgtcagttaaaaattgcaaataattttctctgtttatagatggagactttaatttacctttggagtcccaaatcatcagaataggccccactaattacataaattaagtaaagactgtattcatttattcctaatagagacacaacatgatatggtggttaagagtgtattttctaagagtgtaatttctggagccagacagcctggttcaaatgctagttccactgttgtgctggtgagtctccaaagatgacctccccaatcaccacacctcctggtattcatgcctttttctggcatcccccagcattgaatctgggcttgcttttggaacaaattggatggagcagaggtgacattgcatgacttctggggcaagaacataagaagctgccatataaggcccaccatgctgtgaggatgcccaacatagccatgtagagaggctttgtggagagagagaggcccagaaagctcctagtagttccagtcttctcagctgaggtgccaaccatgtgagtgaagtcatgttgaagggctagcccagtgagccttcagatgactcaagcccaagctcctaactggtagtaaatgcatgagagaattcaagctagaaccatccagctgagaccagtgacccacagaaccataacaaataagagtacattattattttaagccactaaatttgggggtggtttgttgtgcag

SEQ ID NO: 108721 - DNA, 1264 bp, Homo sapiens
ttatacaatctaggtttgtataaatgcactctgtgatatttgcacaacagtcacctaatgatgcatttttcagaatatatctccatcattaaacaatgcatgactgtatacttgtgatagaaatcatggaactaaaaataataatagtatatatagtttttggtataccttcaaatatattgaattattttatttgcatctgattctctggggttggggtgacagaccttagtatgaccatttcataaatggggaaattgaagtctaaagaacttgtgtcttaactaatgtcatacttgtaaatggtatacaaagggtagcacacaactttctgactcagggataccattatactctcatgcacttatttatcaaatattcaccaagagtttttgagcacttcctgtgtagtaggcattgcactggactgtgggggtagaaagacaaggcataatttctgtcctcagggagtttataatcttgtggggagcagttagacaagagaattggtaacagttatgtgtgtaaattattataatgcccactgtaagcagttttaagtgttgataatttggagtaaagcttattttcacttttaaaaattattgaagatcttaagattagttaagataaaaataattattgcttcgtgcaaagagtatgacccgttttacttgtgtgctactctaagactggataagttgttactgtatcctttgtaaggatttgtttgacttcccagggttattttacatgtgccttgatatttccaaagatgcctaataaacaattacgtgaagccattcctgtaacattgccttgagggcaattttataacttacatatgttaaagtcatcatacttaatccatcctccagatgcctgatcaattttaaatggcattcctatttagttgaaggaactagtagattaaaaatgtgattgggatttatgtcttcccgataacttttatatggcttcatgagaagaaagtcagcagtggtgagcaaagggtttgtgaaaattgagacatagtgatagtctagtaagatcagtgctgggtgtataatttgagaaaacaaatagtgaatttaggcaggaactcaactttgaagtcacttaattatacctaagggtatggcaaggggttctaaaattactgtaactattatttgcctggtataaccacagcaggacagataggggaatggaattttgactttaaacacatatttcttggctttaaactgcacgtaggatttag

SEQ ID NO: 108722 - DNA, 1048 bp, Homo sapiens
ccaatggcgagtgattttcagaaagggggaggagaactgggcatctctccaaatatgggaacgacaaactttttttatattaaccaattgcttgcctgtctttctttaaaaccatgcttctcattcagcctggctcttaccttctctcccactcccccagttaaattgatgtatttaccattttcctacaagactttgccacaatgccgaggacttgattatacatatatataatcttgtgttattatgatggagacagatggcgctggactgaatgctttgtcaggctataatttaaatattctaggagctagcaaattttcagatcccttatatggtgcaagcattgattaatcaacattaacttttatttatattaataggctacacctttctgaaggtaacatcagattgttagaccatgtttcaaattacattatcttttcttcttttatgttcccagacctgttttcacatgtggtggcattcttactggagagtctggatttattggcagtgaaggttttcctggagtgtaccctccaaatagcaaatgtacttggaaaatcacagtaagcattttttaaaaaggtattctcctggaagtgggtgttggcaacagtgtgaggctgctgcctttttcctctggtgttaggatttgagtaagaggcaaatgcctgaaatagtgaaatgttggatttaccccaactattgggaagatttttattaatataatagatctagtcgtgtcctgcattagtgattacaaagggcacaagataatgcttgaaggaataaattctcagagcagatgtgtttctgaaagcccagtgtgactcagttgagttttatagattcataattaaagctgttttcagtcaaaggcctgttgtaatgaccttcataagttttttgttgctcgtgccttcataaattcccagtgggaaatggaagatcaaagatagtgctttgactactctatgctcattaggaaaggaaaaagaaaaaaaataaaaaaagcccacttaatgttcctgggttgaaacca

SEQ ID NO: 108723 - DNA, 1385 bp, Homo sapiens
aggagaataaatggttgttgattttgcacgcatttcaagaatatgctatctaatagcataagtgtttttagataattgtttatttgaaagtcatagttttaaattataaagggaaatattgctcaattcactttctggtaatgatttgcagtcctcgtaaaccagaaaatacttcattcaggactaagctaagttttcaaaatttaaaataaataacaaagtattaaatgtgcctaaataggaaactatttgaactaaaatacacagccatttcttaatttatagattgatgactgtgttcatatgctcactaaagagttaggattttaacaccaatcattctgttgttgacactcataagacattgattttaccatgtgattttagaatttactaaaacccatattattggctcttaaaaacacatatttgacttggaactacagttctgaccaaaattataaaccttaaatgtcctgagaagttgatgtgttaaaattgagagacttttattagtttgttctcacgccgctatgaagaaatacccgagactgggtaatttataaagaaaagaagtttaattgactcacagtttcacatggctggggagtcctcaggaaacttataatcatggcagaaggcacctcctcacagggtgataggagaaggggaaaagccccttacaaaaccatcagctctcatgagcattcactcaccaccaggagaacagcatgggggaaaccattcccacgattcaattacctccacctggtcccacccttgacacctggggattattacaattcaaggtgagatttgggtggagacacagccaaaccatatcaagactcaagtgcactttgaaggtatatgtaaggtccatctctgtgagaccagtttctggacttgtgtgataacagaattagtataatggacaaggagctacccccacaggcagtagaaaagtggagagagaaaaagaacaaaagccctgtgggtagattctttaaaacaaaaagtggagtggtgggtgaactgatccttattatccagcctctgctgttaccaggttgcacagagaatcagcatcatgggaatatgaaaatattcaccaatgaactgaccacttataaaattaggccccactcaaacattccttgctacacaatgctagtatctagctgggcccaatatgtcaacattgtcagctaatctctgattcactcatcaaccttgtaaacgtctgaaaatgtcgtgtaaatccattgcacatttattccatagtgcggtactcatcttgtaaaaaatccggaatgttcataagttagttcacactgggcacggtggctcaggcctgtaatcccagcactttgggaggcagaggt

SEQ ID NO: 108724 - DNA, 1058 bp, Homo sapiens
ggctggcacttctaaaacaattgctggttttgtttatgcttttaatcacttctctgtaaacagagaagctcagcacaattccctggaggaaccggtatccttgtgtgtgttactttgcacatagaagttaaatttatatatgtctatatttaatttagaatctcttactgagattgtaaatacactttgcacagttgttgacgagtgtcagtgtctcatcctttgtgaagtgcaaggagattcctgttaggttacagaggctaatttgtacttacaacagatgttattcctcagctgtaacttaattcaatagatgcattcaaggacaactgtggaaatcaggatatttccacatgcaaatttatttgcatgtcattgttgttttttctagagccccaaagaacattggtttggaagctagagaaacagggtgaagcgtattatgtagtttctttgtaaaatgggacctcaatttcagaaggaactttcaggaggaagacttctagcaaggattaatgagtttgagaacaataactaaaacaccaaatttgtcattttaattttttgttgttcttccaggtccacagacagaattctcttcttgtcctttgtctttgaccttaaggagaggccacttaaggataaaattatacccatatcatttttcaggtgattatgctgcatgagtacagtgagatgacacactttttgccacacaggtttcagcacccagtatgtcccagagagaatgaggattcactttcctcttccctttgccttttccttcgtccactgttctttcctattccatcttagattttgtagaccacatataataatgacaagaggacattctagttgaaaactggtttggcttcacttcatgtttgcaaataggtaccatatacactagtcaaagccagggatgatttgttaaactatacagtttatttgctgaatttattaaatttcttgatgttttagaagtgaatatttactttgaatctccccatttgcacggaactatccaggtttattacacatttcaaggtaatgtg

SEQ ID NO: 108725 - DNA, 1056 bp, Homo sapiens
ctgtcataatgactgcccagatagctgctttttatttattttatttcttttttttttttttttttttttttgtgaaagagtttcgctctgtcgcccaggctggagtgctggagtgcagtggcacaatctcggctcattgcaacctccgcctcccgggttcaagtgattctcctgcctcagcctccctagtagctgggactacaggcgcccgccagtacgcccggctaattttttgtattttagtagagacggggtttcaccatgttggccaggatggtctcgatctcttgacctcgtgatccacccgcctcagcctcccaaagtgatgggattacaggcgtgagccaccgtgccccgccctgcttccctgctttttatttctaacacataatttattagagaaattgtaagatcattttggctaatactacagtatttagaatttctagcctttgatatctggtttgatttcctttcctctggaaagaacagatgagtggcttatattttacaatacagatggagtgaacagatacttctgtttcatgattcgtcgttttctttggtagttacattcccgttaatatggatagggatgcttattatatttctagacattgggaaaatgttaattttaaatgtacaatatggcaaaattattaacatttcttaattataaaaagattaaattagataacctctacaggtcttctagttggggtgttttttttttttttttttttttttttttgagagggagtcttgccttgtcgcccaggctggagtgcagtggtgcaatctcagctcactgcaacctctgcctcctgggttcaagcaattcttctgcctcagcctcccgagtagctgggactacaggcgcctggccaatttttgtatttttagtagagatggggtttcatctgttggcctcttgaccttgtgaccccccccccccgcctcggcctcccaaagtgcggggattataggcgtgagccaccgtgcctggcttctagttttaaaatgatactttatgtatgtgtatgtacttgaatgact

SEQ ID NO: 108726 - DNA, 2357 bp, Homo sapiens
cacttgtttaaacttttgaagttgaaaccaaagagactgaatgatggcaaaacgattttctttctattttgagaaaatttattttgaatcctctcctgaaacccaatattgacttttaggttataaactgctttatttttctcaaagggattttaatataaatttaaaatagttagcagcaatgttactcttctattctgcatctcccaaaggcaagcctatttaatgactagggaatttaaagtcttgattttgtaattggttagcttctcattttagtaggagagagaaaccttcagatttcagtattttaggttgtatttaataaacatttcctaccttttaagtttataaatcaaatgagtaactgactgaacaaaaaggtctacagacaatgtattcaggctatatttcagaaggaagttgcttctaagttacataaatgaagacttcattaaaatagtgttttcttatatttaaaattgatatagttttacttgagctgaaactttaaatattgtaggtgatattttaatcccagcaaagaatgaaattatgttcataaatatcagtattattgacgaagaatgaggtagtttaccaaattataaaaaataagtgatttataatatgtaaaatgagtgttgtaggtggtaaattcctgccccaggaccatggaaatgtttgcctccatttgcttatttgaggatctgttttctgtcattgcaacttttccccagaaacatctgtactttccccctcaaatgcttttattcttgttctaagcattagtgtcagtctcttctatttttaccttttttttttaacatgacttttgcatgtttttgaccttgagctagtaaatgaagacattctttgatgaatacttaacatcagagtcaagtaagataggcacctgatgtgtagagtagccccaacttttctttacaatgaaatttaaaaaaaaacggcagtctattctgaagacttagttatcagttgatgtgtattaaagttttagatagcattaagaatctatatgtaaaagtatgctttttatttcttagcctcttctggaaaacaaacttaaagcattcagtattggaaaaatgagtacagctaagcgaactttaagtaaaaaggaacaggaagaattaaagaaaaaggtaatgttgaaaatgtattttgaattatccttggaaatgaatgtgtctaaggggttagtaagtgtattagaggaatgtttcccgaagattcttaacctctaggatattctcaggtccgcctctgagtcaagtctgtaatacaacatatattcctaggagttgagcttctatccttgttccctcaccctgtttcttttttctttgttatagttttggctattttctaatctattctttttgtataagtaaagtgtatgtgtgtgtagacacattgtacccattccccttagattaatgatagcatgctttatacagtacacttttttcctacttgcttttttaacttaacattgtatctcagaaattacctcaagtatatagaaatactccttattcatttgctatggctgtgtagatatgcaatcatttattcaactaaaattctatcgagggcatttatgttttgttcttttgccattaaaagtaatgctgttatggataatgttatgcatatgtttggtttttttgctagtgttatctttgggatatattcttataggtgagatttgggatatattcttataagtgagattactgggttgagtgataaatgcataaatgtagtttttctatatttgtcattgtcaaattgctctctgtaggggcagtgacatgttgcacccctgtcagtagtgtatgaatgaatgtttccccatagcactgccagtagaggacttttgccaatctcctacatgaaaaatggtatctcagtgtagttttacatttggatttctctcattatgagtaaagtttaacagtttttcttgtgtttgtttctgtgaactgtctgctcatatctgaaccatttttttctataagttatattaacactttgttatacaaggtacaattttttttctcactttgttgattgtctttttattttgctgctggtgttttgctccatgcagaaactattgtacaatcagatttatcagtctttccctatgatttctggtttttcagttttttccattaccagcttataaagaaatttcctcatgttttcctctactactgaatggtttcttttttaagaatattaaatcagattattttgtagtttattctggtatgtggtgtcaagaatagattaatttttgtcttttttcaaataattattcagttatc

SEQ ID NO: 108727 - DNA, 1017 bp, Homo sapiens
agaataattgaaaatatcaagattcttctgagctttctttatatcaagattcttctgagctttccttaatgccacttgtcagtagatattgctgcttcaacttctaatactcatgtttttggtgatttgaaaaatatttatattcactgaattaaatcatcatgccttggaaacttggtaaacattactagcaaaatatgttttcatatagtcagttgtcatataatttgatgcttgagttgtctctagacaaatttactaattaatctatacttaggggttcttttctagttctgcaaattgccggtagaggagcaaagcctctcttggtttcattaattaatacttaatatcttctaaagattagacgttattacttgttaggactgcttaacctgggaagggagggttttcgtccatattattccttgatgaatttagccttgtgtacattaacaatttttgtattgtgtaatattaatattttcatgtgtatttaggaggatgaaaaggcagctgctgagatttatgaggagtttcttgctgcttttgaaggaagtgatggtaataaagtgaaaacatttgtgcgagggggtgttgttaatgcagctaaaggtaagtttataaagtataactgctaataaagcataactgtattacagtttttgagcgagccccatcttggttgaatgactgcaggtagataattatgaaaggaagtttggttgcttttgaattttacattttctatcagcaccctctagtggttattattaattagcaagataaatggccaagtgtcaattaatgagatgctgaagacagatagcttttaaacatatttagttcctttcaagttttaagacagcagagcacttgtcacaaattttaatatgtgtcatagttttgctatgaaatgattaaattagcattattgaggtgatatttgaatttaatttcatatttgttaatagtgatacatcttaatactaaaagcattttactaatttttacttg

SEQ ID NO: 108728 - DNA, 1870 bp, Homo sapiens
gttattactaaccagtttgctatgagattgttttagatattataatatttggtgggctatctttgaaaataaattagcatttagtccagcacctgggttgcttgcattacgaggattcagttcaattgatttacttaatgtccagagtcctgtttgcagtggaaacagtatactcactgggatgggagtgaggggcagttagacttagcaagaaacaaattcagtggttttagtgtttaatttcctcctcacctttaaagtaggctttgtgttccattggtagtatgatatatcagaaatttgctcgtggttgtattatagctgagggaccctctaatcttggttatcagtaccagtatttaattacagatatttctagttatttgatgatagtaatttgataagcgctattctgaaatgtgaatgaacaaattttggctcattataagtgattgtaaatattttcaacagaattcaagaggaacgtgatgagagacataaaacaaaaggcagattaagtcgatttgaacctcctcagtcagattctgatggtcagcgtcgttctagtaagtggcatttattttaatgtgtatgcttgtgattaattacagtagttcccaccttatccgtggcgggttacattccaaggatcaccagtggatgtctgaaaccatggatatatactatccttttccttacacattcatagctgtggtaaaaattaatttgtaaattaggcacagtaagagattaacaacaataagtaatagaacaattataacaatatactgaaataaaagttatgtgcaatcccaacactttgggaggccgaggcaagtggattacctaaggtcaggagttcgagaccagcctggccaacatgatgaaaccctgtctgtactaaaaatacaaaattagccgggcgtggtggtgcgtgcctgtaatcccagctactcaggaggctgaggcagaaggattgcttgaacctgagaggcagaggttgcagtgagccgagaacgtgccattgcactccagcctgggcgacagagcaagagtctgtctcaaaaaacaacaacaacaacaacagagttgtgtgaagtggtctctctttttgtctctcagaaataccttactgtaacaaactgggggaaacaaaggtgagggtaaggggggactactgtattataaaaactaataattgtcttcttttctcccctttaagtggacgcgccttcaagaagaaatagatcatctggtggtaatacagttttttgctcttttaatcgataaattttccaaactttatgttttgcaggttataattctttttttctttctgccctagttcttgatgattacgcacctggctcacatgatgtaggagatccaagcactactaatttataccttggaaacattaatccacaggtaatattaagtaagatgaatgttgattgatatgctttatgcttttggaagaaagctttgttagtcaaaaaaaatcaagattctgaagctgacaaatctgatggaattggatagtctttagagttgtcttactggtatggcccaggttgtcttgccacatattcttgtttcctctttcagtaactagattgaactctggatttgaaatgttttactaggtgctgattttattattaaatcagggtgtgaccattgatgaataatattattttgagactgtccacttctgatgcatacttgtttccttgtggagtccctttttcttctcatagtagtaaactactctttgtggtttgtcttttatattttaattcttttcctgcattggtgctgttaattatgatatggggaatgtagtaacggtagtatataatatgctatt

SEQ ID NO: 108729 - DNA, 3028 bp, Homo sapiens
tctgcatttgattacatgggtagttgattgttagaacagatgattagatactttttttcttcattgtcaatacatatttcctctttaatttaaatgtactaaccatgcctgcttgaaaaatgttactaaatgcctaaacaaaccatcactataaaacatcttacttagatccaggaccttaaaacaaaggaagatagagagtaaaaatgattttgatttcttcatccactgaacttccccaccctggcatcttaaataaaccagaatatttatagtatgaaatgatttatgaatgccccacgcgggattttacttgtgtggcgttcctggtacttaaatggaaaattgaagcacgttgctatgttgctttttattttgtaaaaactactttgttttctgaaaataattttttcttttcccttttttgcataataaaaatcttttaccctttttaatagatgaatgaagaaatgctgtgccaagaatttggaagatttggaccgttagccagtgtgaaaatcatgtggcctagaactgatgaagaaagagccagagagagaaattgcggctttgtggcctttatgaatagaagagatgctgaaagagctttaaaaaatttgaatggtaagaacatttttattatccatttatacaattcagatatttctttggtttggaaaagtatttataaaaactaggaaggattggacctgaaatggagaggttaaaatgaaaattatttcaactcaccagaaaaattttgtttggaaacttttgagagttaacaaaatgacctttcatttctttcttgtaggaaaaatgattatgtcttttgaaatgaagttaggttggggtaaagctgtacctattcctccacatccaatatacattccgccttctatgatggaacatacgcttcccccacctccatccggactgccttttaatgcgcagcctagagagcggttaaaaaaccctaatgctcctatgttaccgccacctaaaaacaaagaggattttgagaaggtaatttaaaaaatggacataaggccgcatctaatttgtaaatactaaagctgtggtagtatttcttttcaacaattttatagaaaatgtgtgtgtaattctgtttggcaacttttaaagaaataagtagatgtgttccctgccttagcccatggaaaccctatatttgaaatactaggtcatatttttatttgtggctaccattccttttttgaccacttgttaagttttttttcctttgtccagtgttgtatccagatttgcttaagtgtattaactaaatttactttgttctgagaaagtgatactttgtatttggttaagtgacatttcaattagaaagacctcctaagtagttattgtttggatggcagctagatctgaggtattagaatatttgagaagatttatgtggtttgtaaaaaatagttaatctagtaaaagcaaagggtgagtattttctttttagtaaataaaaccaacttaatttcaagttataagaattcgttggttctattatgaattaattacacttaaaatgacagggctggttttaaaggcttgggaacaaagtagcgaactgtatggtcagaggcaaacagttaattatttcacaaattaaaatctttatctgataattctcagtgtagtacctatttcagtgcattgatgtgcattctggcaggaatgttctgattctttgcatttggtgaacgtttattgttcactgaacacatccatttgcatttatgtaattgcttagtgtataatgacttcaaatgcagtgattgcctgcaaaacttgtgattagatatgtagtattttcaatgcatatgtatatttttgcttgttacttgttaacaatactcacatattctatgtttattatctgatgtgacttcatatacagactctgtcgcaagccatagtcaaagtggttatcccaacagaaaggtacatgtttttctttattattactgatctaaatatagacaatatccccttctgaatttaaaaagaaatggtgttgaggaaaaggtagtatcttgactgagcaatggttccttcccagtactttttgcggggggatgtgtgaaatttaactaacttttgtatactttgcaattttatgtcagtatctttttttgtttttattgttatcactgtagggaatgtttatagtttgactagttagagtgtatttattagctctgatttggagtcagacaatagactattgtcatgggaaaatagatgttttaagtgtgtcgtaaatttcagataacgttacagtttgacccaatctgttgttatttttttcttgttttctgaattatctgcatttaatatataaccttggtttgagttctccttactgaaggcatagctttgttttttgttttttcaattgattttaagaagaaattcctattattgtcatgaacactggacatactagaaactttcttttcatggtaacaaaggtatttggaattcttttattttcctttcttcctttttttctctttcaacacactattaaagcagaagaattcatgctgtaggtatgctcttgctcagtcaagctaagccttttcccaaacacaggaacacaacactggttgaataataaatgaacacaaaagaataccaaattctctttgacattggccttggtgagcaacaccagctgaactgtctgcggcagcgggggaccaggaaaacatcatgggatggattgggaaagtatacagtttttgaccagacattggtacgatcgactccaataaatgtggttttattataactgagagacaattttttgtttttgttttttttttggttattgttgcccagaataagataattaccattttaaaattaaataatgcactttaaatatatcatctttttgtactacactgttttattctaatagaaaagtcaccatttttaaaataaacacaatccttaaggaagaagaatgtgattacagttcttt

SEQ ID NO: 108730 - DNA, 2344 bp, Homo sapiens
ttcactcaccattaggatgaatcctttgtttttaaacttgctaaacaattttcctctatcttaaatgctaaagtcaagttgcttttgacttaattcacacaagtttctggatgtataacatttgtccacctagtaattagtcttatacataaaatttcccttagctttaatttggctcctatcagtggggagttttggaattgaatcataactttacattatcgcccttccttcaaaataatgtcattaaccatatgaatgctgaagaactgcatatttgcagagcaattacttctgtgaaagagaaataatttttaaatagaaaattaagcaatgtttttagttttttgttttgacaatttgaggttgaattagtagttttaaatgcatgatttcccctttgtaaagatttaaactgtgatgcaattttttttacttcctttaggcttaaatttttttcactatggagagatttcattttaagtaggtttgtttgaaagctatgagaaaataattatagtcaccttgagatagattattttattgttcatgtactctgaaatagggcattatagagccacaaaagtctgtcttgttctataactatatatttatttacattctagcagttatatgaacgtaatttgagctgggaatgctaaaggtgtaatttagtgtgtgctttgtaccaagagccaatatccttttgcttttcccaattgttatttgccagctgtgtatggatggggactggtgaaatgaggaatcaaaagcagcttataaataacctgagtcatttttgcccgacaccataatcaatgtccaaaattgtgtttggagtctaataaaatatcacatgattttaggacccagcttcagataaagacttcctgtgagttcagtcaataaaatgactgtactaaaaaattactcacatatgtttatttttggtaaaatattggaaaataattgttacagaaaatgggaagggcatctcaccgtgtaccccattttgcaatattttggaaagagtagtactccattcacttaaggctttggcaacataatttcttcattgattgatagtgtacaggcatatcaatctcttgttttggagggaaaaaagatatataaaggcagaattatctatttcatgaattgtgaactagtttgaagtgtggtccaaagggatgttgcctcattaaaggtcagatttaataaaaaatgcatctggtgtgtgtaccagaaaaacacaggagttggatggattttttattaaatcaggccttaaacttgttaaatagttttgcatttttataaattatagtcatggttataacatttcagtagcaccataaaagtgcttggtttaggaattttttttttttaaactgagatagtgtgtaaatttctagatggctgtaataacatgcaggctctaagttactgattttatatatcaatatttgcagctttctaattagttgtgatttataatttaatgttttacttttggaaaataagtgacatttagaaaattaaatattactatgaggctgtattgtggtttcctaccctccctcacctttccatcccctcccacttccctactcccactgccccacaccctcttaatgcacaaggcattaacatatgctccaggttacttttttggtattaaattcggtgttagtcagcagaataatcattttctgcacaattatagtaacttaggtcaagtgtagttttatatagtggtaggtctgaatccattttctttaactgtgttgttgttgtaggaatttgctcgccctgatacatcgaatgatagagtttgttgtacgtgaagggccaatgtttgaagctatgattatgaacagagaaatcaacaatcctatgttcaggtgtgcattttttaaaaattgtgaaatatatgtaacataaaatttcccattttaactatttttaagtatacagttcagtgtcattaagtacattcacattgttgtacaaccatcaccaccatccatctccagaacttttttcatcttccaaaatggaaattctttacctgtgtagcagtaactcctcagtcttctagcccgttagccccggcaactgccattctactttctgtctcttagtaatttcattactcagggtaaactcacatgagtataatcatacaatatttgtccttttgtgactagcttatttcatttagcataatgtcctcaggattcatctgtattatagcatgtatcgggatttccttttttaaggccaaataatattccattatatgtatttactatattttatcttcaggcatgcagtttaaaac

SEQ ID NO: 108731 - DNA, 1416 bp, Homo sapiens
aacgatcataagactcatgatgcatgccttctgagtattaatgtcagtcactaaggcagtctagggctgcagtaaaggaatggggataggtagcgggtggtagtgggtgagattctcttcagggatctttgtttttgttttatttagaactaaataggcaaataatatttctcatttatttatatttaattgaagatagctctttgttaaagaatatgatgtttaatgtttgtttgttttgtgtaggttcttatttgaaaaccagacaccagcccatgtttactataggtggaagctttattctattctgcaggcaagtagaatcaattactttgttaattttgactctgagtaattagacctttataataactctaaatgtttgttagggagattctccaactaaatggcggacggaagattttcgtatgttcaaaaatggatctttttggaggccaccaccattaaatccgtacttgcatggaatgtcagaagagcaagaaacagaagcttttgtagaggaacctagtaaaaagggagcacttaaggaagagtaagatatttttcctttctattatatattcagaaaagtaactgtaatggttgctttaattaatggtcttattaagatgttaaccctaaaataaatttttttcacttgtgaatgtttaaaatagtaacatctttcatcatgtgctttataattttaaacatcctaacaagtataggtgtgtgtcctgttgtccttgagttttctcctggtaaaattagtgatgatctcttaaacatgattgacttatttctttagcattggagtacttcagattcttacagaaattattggaggatccctagaattcttgcttctctgaatgcaacataaagaagaaaaactattgtgtggctagtgggatcagattgtggctatgcaaagccgctacatgataactttcacacttgatttgcagtgtgtggtgagctgtgagatggccaccatggaagtatgtgttgttattagtctcacttaacaattgtacagtgcagctagctggtttaagaagcaaaaacatacttattaaatgttcagaggacatcctgtatacctcatgggaaaacattggctaaaagcatttttagaatatagaattaagtacagacatacttagttttattgcgctttgacttactgtgctctgcagatacagtgtgttttataaattgaaggtttgtggcaaccctaagtcaaacaaatctgttgtcattatttttcgaacagcatgtgcttacttcatgtctgtcacattttcataattctcacaatagctcaaactttttcattattattgtatctgttatggtgatcagtgatctttgattgttttggggcaccacaaactatggtcatataagaagatg

SEQ ID NO: 108732 - DNA, 1395 bp, Homo sapiens
tcttgatctcttgaccttgtgatccgcctaccttggcctcccagagtgctgggattacaggcatgagccaccgcacccagccagtcttttcctttacagaaaaaattagcctgtcgtaatcccaggcagaagtgttaaagtaatagacttccttcaaagaaggggagtaaagaacatgaaagttcttcagtatcatgggatggtaagactggggtgctcttaaagacgcttgaagaaatgcgtatgattttaaatttacttaatttgtaagctgaaaacataattggaatcttattctacagagtattcttatataaattcttcaaaaaattgtaacaattttgggggacacaacacaaatcagactgaatgtattacagtcttcagaattattttatgtgagtaggttttaaagaaattagtttgtgagcaaaagctacaatggcatttgaaattgtatctaaatatttataagttaaaacaatttatgttcagacagagggataaattggaagaaatcttgcggggattaactccaaggaaaaatgatattggagatgcaatggttttctgtcttaataatgctgaagctgctgaagaaatagtggattgcattactgagtcgttgtccatcttaaagacaccccttcctaaaaaggtatgggaatgaattttaagaaaaggggagatagttgacgtcttttgggattagaattggtttcctttttgcacaaagcacttgactgatgagatttttcccatgcagtcttatgttatttctgcttggaaatttaggttcattaacatacaagttaacaaacaagttgaaatgtaaatgggttaacaaatttcatctctgccagagtcatagttgtggtgatactgagcttcatataactcttctaattagtagccataattaaattatagctaaacattagccttatattaacctattttgtgttatcttttgatattatagattgccagattatatttggtttctgatgttttgtacaactcttcagccaaagttgctaatgcttcatattatagaaaattgtaagtataatgatataactgatattcctgaaataaagtatttaagggtaaggagttcagaaaagaggattgttttgttaacatcctgcaagaataagaagtacagtcagccctccatgtctgtgggttccttatccatgaattcaaccaaccatgaattgaaaatatttgagaagaaaaattgtatctgtaccgaacctgtacagacttttttccttgtcattttctaaacaatatagtatgaaaactctacatagcatttacattgtattaggtattgtaagtaacctagagatgatttaacagatgggaggatgaggataggttacaggt

SEQ ID NO: 108733 - DNA, 4333 bp, Homo sapiens
gttttaaaattctgtcgtttttgtttttatcaaatcaaaaatttaaaagatactattttgtcaggtttaattttagttttaaatattgtttaaaaattataaatgttagtcttttttcataaaacatacagaagaatcacttgttttgtaatggtatatactatttggctggattaaagacatacattttaatcatgtttagaaagtctattctgttaccaatttttttataacctcttaagctctagaccagtgttaagaaaagccaagtgtagtacttcacttataattgaataagtaaatatgctttcatgggaagaagacttttttaagaaaaatttttagtttcggaagatgcccagtgacgccaccatttagggcattcagacaactcccattttaaaagtttttgaccttaaattttgaccataagttagaatttaaagacaagtttcaggaagatacagagtaaagtattagccagaattaggaagtactttattggaccataagggattcaggtcaaaacttggctactttggtttccagttttagtaagtttctatgtaagtgtttctggaatgtggctcatgggtagtactaatggtatgggagctgaccttaggtggtaaagagcaaatagttactgtttatttttcattatatttatttttaggggtttttttccttttaattagaaggtgacattgatttttttaaaaaatatggtaatgatatatagttattttctttaaagtttaaaaaaacatcagtttaaaggcaaatttagcaaatcttgatgatcattctcatgaactgaaatttgagacatatagcccaaaataaaagtttgttgtctgtttcctgtttctttagcaacgggtaatgacttgcttcagagcatgggaagattgggcaatttatccagaaccatttttgatcaaactacaaaatattttcttaggacttgtaaatattattgaagaaaaggaaacagaggtaggcagtctgtatttgtctggttgtttttaaaattcgtttctggggtggaggtttcttggagttgttctgtgttacatatgtgaggtacatttctttgtgaaaaatatctattgcttaccattaagtagtggatttttattgctggaacccagaagtcaaaattacatgtaacaggaattctctgtcttgtgtccttatgtgaaaattggtgagtgttttttttatttaatgatataagagttatgatatattgttaatagtagaaaataagcaagtaatagagcaatatgtatagcatgactttattttgttaaagatagctatataagtaaaatatgtgcatgaaaagatgcatcacatgatagcagatatacatcaccattctgttgttttttttcttttttacctcctaaataattactgaatccttaatgtttaattctgccatgctagtcaagctattatgttttcactttcactcctgcaggatcttcctaattggccttactgttgcaacccacgtggtccttgtttcagtttcttaaatgtgtgtttccacctaccattggactttgtacatgtccttccctctttctgggacttatcttcacctgagatccttcagatctcagctcaaacataaccttagccttctctgacctctttaagtgaaacttagtatgctaatagtatgatacgcccttttgctgtagcagttaccatagttacagataagtatatattgttgtgatgatctgatttcctggttcccccacccctgcaaaacaacagcaaaaacctttaccaggctctataacagggggaccaaacttgtttttgctcatcattgcctcacaaggtacctggcaccagtgagcacttggtaaatattagataaatgcacaactgactgcttctttagcaaactggatgatagaatatgttcttacattgtacctcagattgtgggtatccagttatgttggcttgtactggattacaaattaatcttacaagcaatgtgacttcagcaagcaaaggaaaatgttataatagtacacatttccataggatgttccagatgaccttgatggtgcccccatcgaggaagagcttgatggtgcacctctggaagatgtagatggaattcctattgatgctactcccatcgatgatcttgatggagtccctataaaaagtcttgatgatgatcttgatggagtgccttgtaagttcagatttcaaactgattaaatctagctaatacatttggtgaccaaaactctaatttccatacatgctgatatggaaaaaggttatagtttctcatgaacgtatcaagttattaacttttctatttctgatttttttcaaaattcatatacccagtaatacatttatttgtatgctatgtatataaaaggccaagaagaagcatttttttctggtcacatttctttgctgggacaatcagcctcctataatattagcaagtttctctttttgtcttgtcaggaaattataggcaaaatcttgtgctcagttatgcatgatcctaggtacctggttttatcagtttttattagtttttctaacttacaacttcagttttcctagctgcctaaaatcattttgaaaataggaactgtagacagctctttggtacatttgaattatatgtttaaatattgaataatgtatgcagttttatatttcagagattaggtaaagatattaaagatttgttttacttctcaacttcttcacttgcttaatatattactaacctgtattttctgaattgatatatatactgttaaaaatattgccctcagatgcagagaattggtttagtcatagtccttgttcttagtattactatttgtccatctgtgtccttattttactttgctttttaataatatggtgaatacccatgaatgtaatacttcgggtcatccactagtagtcagggttaatggcttatctttccctaatagtggatgcaactgaagactcaaaaaagaatgagcctatatttaaagttgccccatcaaaatgggaagctgtggatgaatctgaattggaagcacagggtgagtaaaagtaaaataaatattttttaaattaagtacttgtacgttaattattggtgtgcttgtatatatgttttccttttatgttttataacacgttttaaccttaatgctcaatgttgtcatattttgtgtctaatgtatgcttttattgtggttggtgttgctgttacaattttcttaggtccttcagtttggaagctttgagagtaatgagatatcactgaaaacctttcaggttaaggcattttagtagcaaatgtagattggaagctgtacctacgtagaaatctacatagaggtcagtttcatagaaaccaagctttgaccctcccataatgctagactgattagatgcaatttagacctgtctttcacacttacttagacctgtatcctagtgctaataatctaattgttgctatttgtaggttctaatgaaataaatcttaatattcaacacagaaataaggatgacattattcgtcacttcatgaatttgaattatattgtaggtgtgaggaaagagatttggcatatagaaataactatttagagaattgataaacatagattaaaaaaacttctgtaatataaacttttcaattctaaagcttgagcttccactgtactactgaaaaaatgctagtttacctcgtggaattacatcctccttttcctttcattcagctgttacaacttctaaatgggaattatttgaccagcatgaagaatcagaagaagaagaaaatcaaaagtaagaatctaagttttgaatatactgtttcttgttcatatacactccccttttcattaagagatatagttgaaataatagtgaagtggaaaacttcactcttaaaaaattttgggagaggatcatttttagttctccattggttttccagtgaataaagagcttttgttttctggtcttgatggatctggtttcattttgcttttgagttttttacgctaggttatattctcactttgtagttactaattggtcaactgcatttttttcaaacctttgccatcaaatactgttttgggctccataaaaagtggtttttaaaatgtgaataggaaaggttatactcctttcttttggattgtacattctaagaaaaagattgcattatggccattgtgttatttaaatataaacctttcagaagaactaagaatgaatacaaaggaaaaaatcttttcttttgaaatatagagaaata

SEQ ID NO: 108734 - DNA, 1010 bp, Homo sapiens
tttagggggaaggaagggtagaaaagccgttgaactgaaaaaagtattgttctattagttttatttctaaaggtattagttttttggcataaaactgatatttgtgttaatgtttggaatatgaatacattttagcattgatgttggaatacgcatacattaatggaagcctggatcactagaagtataattttagatttttcatttttcttaggaatttcaggtaaatcatgataatgtaaaaataacaaagtacaaagcaaggaaaaaaagcttttgtgcagcttgtgatccttgaaatgttctcatgcctcactactactctctagtggctgaatcctaaatgtctttttacttaaggctgattttgtaactagtaattattatattttgtggcaatattgtgattcgtggcagaaatgtgatttttaaagcatgttttggagaaaagttacaaaaagcagtttcatttgtattgaatactgtatggatttagaatcttgaatttgcatgtctttttaaaaaaagaagaggaagaagctgtgataagatttgaacctcgaattgtggctaaaagctaaggccaaaaccagtttagaaaaactgcttaagccttgaaaaaattataatagcaatttaaaatatttacatattttaaatcatgaatagagctcatttaaaaagtcttaagtaatatggttaaatgtttaatgttcagccatctagaccctttctgtgtgtataaaaacatgcataactattgacataaatgatgtaatattactgtacatgctattctgtgacacgtttttcattcaatgtcattggtattatgccattttaatctgtttacctgttctgtattcatctatgattgaaagcaaacattttggtaaacatacaaggatgtttaccaaagaatatttgaaattgcaaaaaaaaattagaaaaaattttacaggctagaattggttaagtaatcaatatctgctgtattattgtttcatagt

SEQ ID NO: 108735 - DNA, 1642 bp, Homo sapiens
atataagtatattacatgtatttgtttgtgtggaggtgtattagccagaaatctctgggtaaagatgtaggtggtctgtttttacaaacaatgctgcaatgaatatcttgtaaaatacctttgtgcacttatataggtaataagagatggaagtttttctggtctggtttttttttttattttagacggagttttgctgttgtttcccaggcatggagtacaatggtgccatctcggctcaccgcaacctccgcccaccgggttcaagcgattctcctgcctcagtctcccgagtagctgggattataggcatgtgccaccatgcctggctaattttgtatttttagtagagatggggtttctccatgttggtcaggctggtcttgaactcctgacctcaggtgatccgcccacctcggcctcccaaagtgctgggattacaggcgtgagccactgcgcccggcctggtctgttttaatcagtatttgctcttactgtctcataaagtaccctccaaatgtgatttaaccttttctttgtgttttgatatctggtgattgcactgtgagtgaaaccttcagactgtgtgcagctttgtgtttggtcttacatgagctgaaccagaatgccacagccttcccacctcccatccccgcctcttttttaaagatgtttaatctgcattctgactgtcatatcatgctggcagtgtgcgtgtctttagcaaccttgcttttctaatttggggaaccagataccaaatttgttataattgtgttgagagaataagtgagttcttacagccatgaagcacggttcacggtttttgagtcctctcatgaccagagagggttcccatctggtcagctgatttttgcctagttggacttgtctgacaagtggccttcaggtgaggttatattttgactgagtactaattagttactactttgctatagaaaagaagcaaaacagtgcttgagaatctagaatgatgaaaatgcttatttttaaaatattttatttcacagctcaaagttatgaagtttcaggatgaattggaatctgggaaaagacctaaaaaaccaggccagagttttcaggagcaagtagaacactacagagataaacttcttcaacgagtaaggaataagtatacccaataatacacatattttgaagttatttatttgacttcctagaatactggtatacctaaagatgatttcaaattatatcctttgtataaattttgaatactagtagggcaatcagaaacatttgaaatttgatattttaaaagtattttgattggaaaggagcttaaaggcagcagcacactattttattctgagtattacctgtggacaagaagattaattctgctaagagcatgctttcaaaactggaaaacccttcaggacaagtcacattttgtgacagtgagacgccaacaaccctgagaggtagtacagaaagaaaaagatggaggcagggtttgggaagttctggtgttgagaagtttattttcatttctcatggtttccagggagggacagcaagtggtagaatacctcattggtgagctctgagtgtttgagggactttatattctcgtgcatcacaaaatttataggcatgt

SEQ ID NO: 108736 - DNA, 5847 bp, Homo sapiens
tgtaacttatggaaagggcagtacattgttagctttttctgattggaatttttcggcaggtgggacagtgggggaagagctctgactctagagcttggtctcaaattctgacctgactctcctgtgtgaccatgcacatggtacttaatctttctgagtctcaattttcatctctagaatgaggataatagtaattttcttagggatgctttaaatgattacatgaaatggtctgtggaaagctgtttagtatattgtttggcctgtggtaagcactcagtaaatgtatagctgctgttgctaggattagttttattcagtataagcaaaagaaatgactagtttccctgaaggggtagatttttttttttttaatagtattgtaccttaagtagtaatttaaaaaattatttcctgtaagagaagatattgttctataaatgagattaacccacattgatatttttaaacaacttaatattttctataaaaaataacaggagaaagagaaagagttagaaagagaacgagaaagagacaagaaagataaagaaaaattggaatctcgctccaaagacaagaaggaaaaagatgagtgtactccgacaaggaaggaaaggtataacatttctcatatttaattgcatatactggtttcaagatttgcagtggtgttttataatactttcatcattgatgcccgcaaactggaagtgtttgttcatgataaacttgtttgggtcctgcttgcagaaggcagaaatagcggagaaatggggcatttagttggcacttgacttagttaaccagggcatcatcccttcacatggtttatatggtatccttagccttagttcagtgcaaggattcaattacagtattagatatcaaacctgaggtttaagtaacaaaacaacttgctagattttccttgttgcatccaatttaagcatattttccagtatctgtgctgaggctgctacttgtaaacttgagtcttagtcttatcttgaaaggaggttgtatacataggccaaagctcaccttaagtcttcattctaatcaaaagcatttctctttcagtttttatgtcttactctcacggttcctaaatctctgattgagtaaagaaaattgtttcccttaactgaactgaggttttcctaataaaaagaccaagccattgcaaataaaagtctagcttagtcacgctacagatagttacaaataacaagttatgccaattggttaaaagtctgtcacttttttgacttttattactattttgacatagttttagatttataggaaagttgcaagaatagtataattgatagttacccttcacccacattacccaaatgttaaagtatttctacttttgctttattcttcctcttctgtcccacctccaaccatttaagaataatttgccaacatgatgccccattctcttaaccacattcaacattttaaaaaactgatatttaatccagagaccttaattagattttgccagttgtttcaataacctcttattgcaaagagaaaatccaatttagttgaattcagttgttgtctcttgacaacctatctttaacacttatttgttcttgttacaaaggactttgagtattgttaaaagtaacattacatggttagaataaaagagtaagctggtagcaattaatagctaatttagtaaaggaaaatgaatacccgatcctttgctcatttatggaatgttttgggggctttgttccataggaagaggcgacacagtacatcccccagcccatctcgcagtagcagtggtagacgagtgaaatccccatcaccaaaatcggagcgatcagagcgttcagaaagatctcataaagagagctcacggtccaggtcatctcacaaagattctcctagagatgttagcaaaaaagccaaaaggtaaatgcaagtcatttttgctaatatttcagataccagtttccttgtcatttcatcagcttttgaaaataatttggttggcatacatttttttttttttttaaggattttagaaaaccaaagagatacactttcatttttggttattcctccccacctcctcatcccaatctctttcatgactgaagtgaaggcttccaacaagtgaggaccagccaagaattttaaacatcatatccaatgttttctgtggaatagggttagctgctttacttttcgttctgttctttagtttctatagaatattatttgatttttgtcaaagctgaaagaaacacacatttttcccccatagcaatattattagcaagttcttgggtagatatttttggaaatacatatcatgaataccattttttcagtatgtattttagtattttgtatacttttttttcctttagttccagaaaaatggttcagaaatgttttatttatctggtgatacatagaggaattttcctgagagctaaaactgctttgtatgctaatactttattattgtaactatttttagtaaaatctttacagaatagatacctttctccttttctaaatggcacctgtatatatatgtatgtatgtgttatatatgtatgtatatgtacatgtatctttattggtttaagtaatccttcatgaacagcacttacaaaattatgtcttaaatgatgcccttgaatgatactgcagtagttgtttgcttcaggatgataaacttcaaagctgctgtgttttttaaattttgtgcatgatcttaggtgcaactttgaactttatcttgtagattaaaggttcaaatttgggggttatcagtcacttatggagcttgttaaaaatgcaaattcttagttccatcctccagagattttgattcagtagagcagtgataaggcacagaaatctgtctttataaacaagcgctctactgatgatcattgatgcagtgcatagtaagtacaaaataatctgtgtgtgtgtgtgtacaatagagtttaaattttagaagttcatagtcttattgcagtgatttttcactgtgccctgttaaagatcattttcgatcgtttaaggataaacagttttgatcacatgagtactttatcaattgggatttttttgtttgtttccttagatcaccatctggttcaaggacacctaaaaggtctaggcgatcacggtctagatctcctaaaaaatcaggaaagaagtccagatcccagtccagatctccacacaggtctcataaaaagtcaaagaaaaacaaacactgacgtaaatttttaagatgctgtcacttattggaaatgcgatttgttttgtgcctgaacggtctgttttttaaaaaaacaaaaaatcaaatgaaagagcattcctggggttttttgtttgtttgtgtatgcatgtgtaaactcatgagcaactgcatctgtagatctgtcattgttttatattgtgtaaattactttcattgtggctatttctcaagatgaaatttttattgttctaatggatttcatcagaaatgtgtataatggatctgctgacagtagtagtattttgttttaggatgttgtgacttagcaaaaataatacagatgtcttccccccttttgtagctttgacaatttgaattagatttcaaataaaatctgaacagaaaactataatgttgtttttttgccccaccggtgatattaagtcccttaaagtcctactgagtttcacactactgttgtgcttcttatacctgatgcactttataagccccagtgttcaagtagcttaagttttatatttactaagatgactatccaaattaagggacctgagactcctatttggtggtttgctaaccatttgcttttgataagtttctcttgggtaatactaatacccagatatcaaagactaggtagatatggcatggcgttttgttagtggaatgcctggctaaaacatttttttcacagaagcaatatgatttccatacatccaacccatgttctgagcaactacttacttttagggggaaattaaatatcttttcatttcctcttctattatgaaagaagtttatttgtaaaacaaattttctaacaaggtttggccatagaattctcttgtatgatcgttgaccttttataatcttctgtaggctatctttcaaacactggcatcagaatattttttataagtttgtgtttaaacagcttagttggtccccccccactcccaagagacttgggtttagttatagctttaagtaaaatttaaaaataaaatgtttttcaggaaacttcgtatctaatggtttgtaaattcaaggtgcaaaaagttgatttaaaccatttgcagagttgaactctattatgaaaataaatttgctacggtatgaggaagaaataaaacttgtgtaatgttggtcataatactgctataaatataataaagggttatgtagaattgaactgacactattatttgtgaatcttgatttcagttttttatgtaggcacttcatacactggtttgatgggttttttttttcctccctaaaagagaaagtagaaaactattctaacaatggattattttgatttagcttgctttttaaaaaaatcttttcaacttgttttacttaatcttgcctagtcacaaaataagatgtgcacccatggtttggagagttcctatattagctgagcagtgagatacactatttccaaacggtgcacacctacagtagctttggaaatgagccaatcactgttttacttaatggttcttatcagcatgcaaatattgcttgaaagttatttccttattcactgttttgttagtccattttgttaggaaacattaattcctaaaaatttgttcagaataattaaaagtgaacatttggtgctgatactcaaaaacctacaaatgtagccatttaaaaagtaacatgtttttctcccctgctcattgcctgggagaatggaattttatataactacctttctttgcaaaaataacggtcgtgtcgagttggtggtgattttggcattccatcttgcactggtttctagtataggcttagaaataattggtcaggtaataatctttccagtcaagttgcaagggatgcttatttctcttcaaaaaaagacatcctgcgggattgagtagaaaattttaggtcagttttgggtgcttatttgtaatatttttcctactacattggagtttagcagttctttttttctggatccagatacaagtgtcatggtttatcttacagtgggtgaaactgactttcttttggttgggtgggtgaggatttcttaggcctgatagaatatatattctgtgaagtttgttaatgtacatattagattgtattggatttttttttcttgaattgcaaatggtattattagataggttatttccagttttacttcatgacaaattacctagagtaaacctacttaatactcccatggattctatgaaagtttaatgggatcagaaattggtgacttataagggggaagatattctaccatatttttataatagcttattattcatgtttcttgtctgaaggacactcaagttacagagcaaaatttctataggttgactagaatgttcataagcatggtcttccagttgcaggaaagatcatgttctatctgtggacacttactgtcctctaccacagctacgtgccagagttgttttccacagttcttataaagggcatgacttaggctctttaccctccaacttaatgtttatacacagggattgtttactaggttaatgacatttaactcccctctcttctgtagg

SEQ ID NO: 108737 - DNA, 1170 bp, Homo sapiens
gtgcagatactagtgaagatactagtataagtttaaaggaacacgtgactgtaaaatctcacatttacaaagtgcttgatctcttcatatttcacacgcatgttttagaatagattttagggagtgtttaattcattatccttttgacttaaaatttttgttaccaacttcctaggacttagataatatataaataagtacaaatcccaggggaagtgttgtgatgctagactaaaaggtgggaatgtgctgctgttccgtgagccttgttccattgttgaaaatttgatgcctcagtgtttattcagtaccacctcatggagcttcaatgtaaatggattatatgtataattggtaatttgtatagttttgtagattgtagattaaatgcactcatcatgtcacatgtaattgtgcttggagtatttgtgttttattcttttacttcaacgggttcttgtctgttacatctctggtgatttgaaatatcaggaaagacagtttgtcagaaatgagaataatatagttgaaatcagttgggctaaaatattctacagcaagacaatttcttttgggtgaactgattctataatttacttacttttaatgtaaggattagatttattgttgagctgctttccagatcagactgtcactttatagtttttctacataaagattatatagttgcaaacaaaggttgtgaaatttcccttttgttgtttttgacttttaattaataaaagtacattgttttcatagcaaacttagactgtccatgtaattttctccatattgtttttccgatgcaagcccagttaataattagttttttagcagctttctctcaagtgaaataagtgatgtgacatgtttatcagttatggctaaaatgttacactttacatgtttaaactataatcatatgttttcatgctagatggttctcttggttaggaaagttcatttccttattggtttccttttttaaaagttattttattctgtttaattgaggaaaattttaaacattctacaaaagtaaaatagtacagtgaaccttacataccataaacatgcagataacaacttacatgtatctctaaatactttgtttttaaaacatacctgcagtgtcattgtcacattaacaaatcattgggtcctttt

SEQ ID NO: 108738 - DNA, 3575 bp, Homo sapiens
gaagatgctcataacaaaatttacctcttaacaaagtggtgttaggtatactcatatgattacgcaatttccagaactttttttgtgttgcaaaattgaaactctgtacccattaaacaactcatttccctcttcctcccctgtctctcagtatcatcattctactttctgtttctgaatttgactactctagatacaacatataagtgaaatcatacagtatttgtctttttttgcgactgttttatttcacttggcataatatcctcgaggttcatccatattatagcatgtatattgtttcctttacaaagcccactttttctttaagtttccatattatggaatttgaaaatgatttagcccaaatggttcattagtattttctattttgagtaaaaacttcaaaagagaacatgtaataccaagtgtatatgccaactactccactttctttattttttaaccgtcttcactactttttgtgctctctgttctctttaatggttacatatgatgtactttgatatcaacacttcatagcatggggtaaaaaatacacttttgaagcaaactgattttgatattttagtggattagtactattgatgaccatacttgaatgcttttttagttttatgtattgcccgatgaaaagaaaacttaaaattttgacatgtagtaaactcactgattattcattttgtcacagagaaaggaaaaatagctttttaaattttttttcaagttattttctctcatccttaggaaacatagtgtgtcgaactgttttagaataaataacttacttttgattttcaaacgagatgtggcatggcacaatggtgaaggaagaggaaaggcctgggccgtgaagtcatatttggatttgtgtatcagctattcccttttatcacctagaaggaggggatattaaccttgaatggttattgaaaggatgaaatcacatgtatatcactggcacagggttgtcatacagtggtgcttagataaatattcattattcctgagaactaatggtgggaacatcttataactaaaacaagataaagaataacagtataattccatagcactgatacctttacaagatttccttatacttgatttgtattcagttaacagattttataaataaagttggtgatatgttggcatatttattgcatatggaataccacttcataatctgctttcccagtgttttagatgacatttaattcttgatctcctatgagaaaaactattaaatagattttaaaatatactttttattagttgtcatttattattgtgaattcccctaaccaaagttcctggaaggaggaatcccataaaggaaaatctaaatgtaaacagctgaaataggggatatgtggaaaaagcctggagaatagtataaagtgtgatgaagcactggattctttgtcaaagttcaaagtaaaagaaaaacctgtacaattatcagagcagagcagcagtatgcagttttcacaaaatgggtggacagaaaacaatcctgtaagaattaagaagagggctagtattatgagtacaactgaactcctgtgttttgtgtatgtttgcaagttacagtttgtattttcagattattcaagaataagaaatgtaccctaaaattacttttagagtagagttcaaaccatacggaatttggaaaggaaattacagtttaaattcaattcagaaattaaccgctttgtagtaacgtcctcaggacacatcaagttctttggagttctcacaactgcacaaatgtaaatctggaagagcacaactttgattagaaatactctttcgtcctccaaatagctgaaacattgtctttggaaagaataagcaccttgctatatagtttggctacctaggccactaaatattcttattacatgagggtggtattagatgattgatatggtttcgatgtttattccctccaaatctcatgttgaaatgtaatattcccagtgttggaggtggggcctggtgggaggtgtttggatcattgaggcagatccctcatgattggcttggtgtggtagttcacatgagatctggggggagcgtagcacctcccccatctctcttgttcctgctgttcccatgcaatatgcctgttctccctttaccttccaccatgactaagcttcctgaggccctcaccagaagcagatgtcagcaccatgcttcccatacagcatgcaaaaccgtgaaccaaaataaacctctttgtttataatttgcccagccttgggtatttctttagagcaatgcaaaatgacctaattgtttttgtttcagcatattttgttttattgcactgtgcaatagctactggatgtgaggggtttattaaaaacttctagaaaaatgcttttcagatggcttttggccgtgctaacattttaataaaggatctgtcatatccttctagaaacgtaagcagtctctctcacaggatgtagaaaggtatcaaaagccaaaaaacattctatgtagctattttatattttctaatcacaataacatttagctaacatgaacttaaactgtaaatttcaaagttacatattatgtatagcttacatatttcataggatgcttatcctcaactttggatacatcttatctgaagaatgtgttctccccagaaaaatacgtagcatgtctaattctgtgccaaatactatatatgtgtaagttccacaaagcaaaaatatcaagtatttctcaagagacatttacatctaaaaatactgttttaattctgaattgattgccctgaaagcatgtgtaatttgccttaaatattaggtaggttagagaaagtctttaagcagggactgatctttgtgcttgtttgttctcatgactgacatgacctggaacttgtaaaaactcagaatattctttatttgcatgtattttgtaataaaagtattatttatcttgcctattatgtaataaaaccatgactaataatgtatgaagaatgagagaacagtttggtgttaaggtaaagaattactgtccactgtatatttcagagcctataatgccattcataagttgcagaactcaactgtctaggtgagtttagtgtatttctagaatagtttatcttaaaatattcttcatggtgaacaatcagcatatatactgatattgtcctcccagtgagtgattctcttcaagtgccatagtgaaattcaaaatattagctacacaatcaccacttcgtagctttccttgtatctcacatgtccatatataacttagattatagggaaaaagccttcaagctattttagtgcccaagtgtactcatacatacccttctttattccacacttgggccctttgtcaagagtccttgcatagcacccacttgatatgtccttgcatagcacccactggacatccaaggacccttgagggccttgcaaagcttatgacttatgactgtatggaacatggtttacctctggtgaaacagaccgttttgatgaaaatagaggaggatgtaataaact

SEQ ID NO: 108739 - DNA, 1023 bp, Homo sapiens
acctgatgtatatatattttcttttaattatggaaaattcaaacatatacaaaagtagaaagactagtataacatgacatgcacagccactttaatttgtactaaaattccatacataattttaattgtacatatttttgtatgtttctgtataagacatggactttagtggctacttaatatcatgaaaaatcctgatattctgaaatctacaattgtcttacaaggtttttttgtttgtttttgtttttgttttcagtttgcttgaagtctttcaaatgaagttcatgcattatgattagttaatatatctcttaagtgacttttaagctattgatgtccctcagtttcattttttcccctttaaacttgttacagagacttggtggtttgtccacgagactttcccacagtctggattctgctgaacaccacaaccaccgcccgcctccccaagtttattttctgtagatcagtaatttaatctagaggtttgatcagatttagttcaaaaattgtggcacgtctacttcatagatgaaagcacttctttcagggccacataatgtctgcttgtgtctctttgtgacatttgcagccattgatcatcattgcctgagttctccaattcattagggtcacaactggtgattcctaaatttatcatttctttttcacttataacttgagataatatagagaaacttcctcacctactattgacttactccacagtacagttcatataagaaaggcagcctcaatgcttgattttttcctttattttccagttttcaatgtcactttcatgctgggatattattaccattctctaaagtgaccactaaagttttattattatttttagtattattacaacctcatggattttatactgatgtgctttatccatcacaattttttttttttttttttgagacggagtttctcttttgttgcccaggctggaaggcagtggtgcaatcttggctcactgcaacctccgcctcccgagttcaagcg

SEQ ID NO: 108740 - DNA, 1015 bp, Homo sapiens
tcatcaccactccctaatctcaagtacccagggacccaaacactgcggaaggccgcagtgtcctctgcctaggaaaaccagagacctttgttcacttgtttatctgctgaccttccctccactattgtcctatgaccctgccaaatccccctctgagagaaacacccaagaatgatcaattaaaaaaaaaaaaaaatatttaaaatgtagagtgcataaactgtaaagtgaaaattcccagtggcgatggctaacaattttttgttcaagtttcctgaattgtttttctgttcatgtactcatacacgcatgcccacccgcctcaacgttttcaacttgcctttgatacttatgagatcttgggtatacttcctgatcattacctataaatctgcctcattctttaattactattgagagacatttaagctgttgttatttttattttttcttattacaagcaccgtaagagtgaataggctttgagcactgggagagctcctcggggaatctatccactgaagaataaatctcttggagtgaaattgctgcatcaaagagtaggaacattttacaactttaacagccatttaacatttcctctaaaactctcataccaatgcccctttcttgaggggcagaagttgtagagtcaaggaggggcttggagcagagggaggatggattcttgtttgaaaacctgagggagacaggaggctggggcccagaaagaatcagaactcactgctctgaattgcaggggcccaggggccaagccctggggagaagggccatgcttgatctaatgctccactgtcactgtattgaaattcttaattttttaaagagaggccccacgttttcattttacactgggtctctggaggaaaaccggggcggggccagtgagtacttgtccttgtggtgagggaggagctgcatggaccgcagttggcttgaagtcttgggaaagttggactcctaaggaggaggcgctcagtgcacccagctgggg

SEQ ID NO: 108741 - DNA, 1054 bp, Homo sapiens
gcatggtggcgggcgcctgtagtcccagctactcgggaggctgagtcaggagaatggcgtgaacccggaaggcggagcttgcagtgagccaagatcacgccactgcactccagcctgggcgacagagcaagactccatctcaaacaaaataaaacaaaacaaaaaaaaacagtcataataaaagattattctccagatacactgcatttatttctttttaaaattttcccttttacgtgaccttttctttcaagaacgggcctctgatgttgggtttccttgtgtctgctgcttttcctccttctgagatcattctttgtgacatgatcaccatgtccctcacctctacctcagatgctgtgattggtggttgcaggtggtgagaagaaaacaacttgcacggatgaattcttgagacctgggccctgtatttatctcagtggcttcaatacagggcagggaagctcacagaagttgtgacacacaggtgtaattatggctaagtggaatgcttttcaaaactttagatggcattgttgggtttgtgaataaactcttttctgctcccaggtggctcccaggagcagagaaattcaagcaggctgttgtgtaggctgaattcccacctactgcatggagaaactggaacatggacatggaatagcatttctgcatggaatctgttttttttttcttctctggctttgaaatttgcatttcttttagtaaaataagctggttcaaaaacgtgtacacacccttgttttgtccatgtcacttaacaattccaaaggattttgcatttttacaggttttttttttctttcaagaattcagtgaaatagagctagtgttagcagctccatattttagttgggaaactgaggcacattctaggcctggcatcttatctaagcacagtctctctccactgtgtgaatcacagtttagtgctgtccaaatcagggttcttcgttgcatgcaacagaaactgactcatgatgactgagagaaagagaattgctgggcagatctgggaattgctaggaaggca

SEQ ID NO: 108742 - DNA, 1032 bp, Homo sapiens
tgcaaaaaataaaaaacaagtatggatacataaaattggaataaggctaaaaaccacacacttaacatcagtgggccaaaatttggttctgagcttttgagtcaaaccaggaggagtccaactggtcttagaatgtgagccagagggatatttttggagttcaggtaatcagtagattgtgatgatgacagcatttctcatgtatttaaattgaatttgcttttaaaagctagacaattataatgctattaatttcctctattgctcacccttccttctaaaaagctccaacattaaataaatgaacataaaaatccccccaaaaaaaccaaatctgcccaagacacaaaattatttccaccttacatgtgaagttgtgaactatcctacccatgaacattgttacagaggccattttcagtaaagaggaaacaagagtcctctcgtggtgaacagcagttttttgattgtgcagtatccattccataatcgcacccaaggggtgggcacgggatccaagcaggctgatgggaattccctcgctggaatttgaatcgcagagtgatgtagagacagaaaacgcccagctgtcattcatccagtttctgcacctcggtgggctggagtccagtctctgaggccccccacccctggctagacctactgaccctgtcctttgtgagcttggaccttcttccttcttccctctcctgtgagactaccagcctctccctgcccccctcagcctcctataacatctttttttacttacgataatcagagactcagttcctgtttcttgcaacccaagtgttctgactggtatgctttcaatacggtttcagagtgaaatacagtcagtgggatggttttaggtggcacacaaggaacatttacatttttcagttatgtaattattttaatgcacattgcgaaaaactataaacagcacatcaaacccacaatgtcatgggtattattgcttagaatgacttcaatacatttatttaagtcgaaaagtgagtcatttaa

SEQ ID NO: 108743 - DNA, 1067 bp, Homo sapiens
cctgaagagcttaccactcagaaaagagaaagaggattaagcactgcacatgtttttccttagtagtggcatgaactatcgggggcaacagtcattcttttggagacttatgcctgtagtcgaactgtgctaattgtgtatatattttagagttctcacacagctactctttttttttctcttaagaaaaaaaaaaagaaatatctgagactttattttgatctttcacatccatctgaagaaggttctttaaagataagtgggttttgtaatctggtgaaggccatgaatctattcaattcagtgagttcctatcaactgcatctgaaaagcactggtgaagaccacagtacttaaaacccatttttttaattttaaaaaattccataagaaacatgtacttatggtaaaatgataagtttcaaacatataaaaacatgaaaaatggaaattaaaaatctctgctctcaactattatagcagggcctccagaggcagccactgatcatagattttgtcctgaatttttctggtgcttgctgtcctaaatcgaggtaacatgcttgtacctctacttcatgatttatcaactttaagtggaacccttttacttttctctatcaagaaagatgttagctcacttcatactactgctctgttgcctgttattttgcctaattcttctggggactgtcagccaggggaattcctgtagattaccaacccactcttcctttcatctcttctgtctctctttttgacctcttctcccctcctcagtttatagttggtatatttacaatgccatggtttaccacaactgcattctgtttatgtaattataactaaggcagtcatcttgtctttaggttaattctaaaagctgaaaacctgttaacagtatttgcaatgatgtcattatgtaggtattggccactgtggacccaactatgatttgagccttgtagtagagatgtaatcctttttttaaaaaatttttttgcttgttaaagagaaatttttcaagcatgacagcctaatgcattttcccttaaattctcccggtt

SEQ ID NO: 108744 - DNA, 1093 bp, Homo sapiens
cttccagcagatcaaacaggtggaggagttttgctaccagcccatggccgtcctgggctatgagcgggtcaacagccctgaggaggtcaaagacctcagcaagaccctgcttcggaagccccgtctctaaaaggggttcccaggagacctgattccctgtggtgatacctataaagaggatcgtagtgtgtttaaataaacacagtccagactcaaacggaggaagcccacatattctattatagatatataaataatcacacacacacttgctgtcaatgttttgagtcagtgcatttcaaggaacagccacaaaatacacacccctaagaaaaggcaagacttgaacgttctgaccaggtgcccctcttcttctttgccttctcttgtcctctttctcctatttcttaccctgtcctccacctgccttccattttgaagtgggatgttaatgaaatcaagttccagtaacccaaatcttgtttacaaaatattcgtggtatctgtgaacatgttaagagtaatttggatgtgggggtgggggtggagaaaggggaagtggtccagaaacaaaaagccccattgggcatgataagccgaggaggcattcttctaaagcagacttttgtgtaaaaagcaaaggttacatgtgagtattaataaagaagataataaataatattctttttaatatttgcctccattactttggattcacctgtgttacttgtcctcagcttcagatagaatctccttcccctccctcgtttccatttttccagtctctttcctgaaaggcagctaaactgggtgggagcaatttttgcctccttggtaataacctgggggatgttttctcacatgtaaatctcagcctgttaggtgtccaggagtgaaacacatctttgtattctaaaggcagaaaccaaacagggcagtggaagaaaaagcacactactctcttcaactttgaacacaggaagaagcaactccttcaggacttgaaggcatttggtttttcattcctcttcagttaaaatggggaaccttgaagcagagaccaatgttttggtgctgaggctggttcagaaaa

SEQ ID NO: 108745 - DNA, 1133 bp, Homo sapiens
ttacctgtgtggggaaaatgccagcctgttcagtaaagtttgctgaaggaaataagccataggctctatttagatgtggggagtgagcaataggaatatcttcaagatttccagggcaactgtttatagactatttcccagcgatgaattagagaaaaaatgcacaatttctaaatgtggagaggtaaatgtttcaaagtaaggaatttgattgttactgttttcccacttgcatgaacaccataagggcggggatcagaacaaacctgcagagcagatgttgtccaggggtctcagggagggctaaaaagctatttatttttgcagaagtcatgtggcacttattgttttgagtgctgcaaatgtgtagtttgatggactgtgatggagcaaatgttgtccaggggtctaagggagggctaaaaagctgcttttttttttttttttttttttttgcagaagtcatgtggcacttattgttttgagtgctgtgaatgtgtagtttgatggactgtgatgtgttaggttggtgcaagcgtgattgtggtttttgtcattgaaagtaatggtaaaaaactgcaattacatttgcacccacctaatagattttctgcaggtgtagggatggttactttcaggaagtttgtcctattgtggatgctgagcgagacaatggctgcctgttcccatacattccctgcttggccacagccagttttgtccaggatttctgttgtacacagtacagttgcagctggattatgtgattggtttgaaattaatgtgaatttgggggaggctattaaatattccctaggtcttgaaacgcagactctagagatgactctaggaagagcaagagggaaatgaaaagcgtgtctcatcatgtaggcatggtaaataaggacaaggtgtcactttaccatcctcctccaactttctttcttccctacacacaacacacatgcacacacacatacaattgagtttctgcatcgtcttgaagagatctggatgagagaatgttctaatcccagctaacagatgcgtggtgaggcacacttttgatctcaggcttctggagagtgagtggtcggccaattgttatattagaaagcttgacagttctgcgt

SEQ ID NO: 108746 - DNA, 1052 bp, Homo sapiens
tgccccaagcgccgcgaagaagccgggaagagtttgccaggcttgcctctgctgcccgccggctgccctagcccgtccccggagccctgcggttcctctccgcaaagctgatttcccggtgccgcccctgagggtccctgaggagcgggccgcgaagcgttgccctggcggtagccatggggacccggggctgcttggtgctccgcacggtcacgttgactcagtcaccccagactgcaaaagtaaggcgcagatgccgcacgaaagcactgtgtttagggataagtttcaggggacccggactgtttagcagtagcgctagtagatacattattatgctattcacttttagtgctagagtagttaaaatgagaagtgatttttagtctgagggacaggtggttcctgatacgttattaaacaactgagtcttaactgagttaattttagggcttgaacagtgcttttagaagaccatggtaactggcatgtgtagatcaactctacagcgggttaataagaaacatctataccaggttatcaaaagtaacaatactttcagtattgtttaattgtaacaggtatttgttacaaattcttataagaactcagattttgaaaaaaaaactttgagaaatttaataaattcaaaatagacgtgattttgtaacgatttgcattgaatacggacagacaaattgaaataatattcaaagctttctagaaattgacttactgtacttaagtttggctacttctgcctagtgccttatgccgcctttggtgggaattttatttaacttgctttcaaatatccccaaactccatataatatagagttaaaagctcaagtgagattttcttaggaaaaggagtttggtgtgatggttctggagacctgtgctgtagttcagctgtgaggctgctgctgctgctgaattgtaaacaaagcaagttattacttaactacaaatttcttctttctgacatcttttctatatgcctcataaatttgttcgattaatagtagacaatctatttagaattggttt

SEQ ID NO: 108747 - DNA, 1608 bp, Homo sapiens
tgaccgaccggcgcttcctgcagctcaataagtgcccggcgtgcttcggcacgagctggtgccgccgcttcctcaacgggcaggtggtattcgaggcgtggggccgcttgcgcctgctggacttcctcaacgtgaagaacgtgtacttcgcgcagtacggcgagccccgcgagggcggccgccgccgagtggtgctcaagcgcctcggctcgcagcgcgagctggcgcagctcgaccagagcatctgcaagcgggccaccggccggccccgctgcgacctgctgcaggccatgccccggaccgagttcgcgcgcctcaacggcgacgtgcgtctgctcacgcccgaggcggtggagggctggtcggacctggtgcactgcccctcgcagcgccttctcgaccgcctggtgcgccgctacgcggagaccaaggactcgggcagcttcctgcttcgcaacctcaaggactcggagcgcatgcagctgctgctgaccctggccttcaaccccgagccgctggtgctacaggtaggcgcggagccagggcagggggcgtcctgggaggggccgcgcgtgggaatcagagtcgggagaagtggctcagccagcgcttgccgccagttcggactcggccgggctgggccaggctgcaggcgtgggaaggggcgtctccgggggagccccggggctgtgcagggaggccgagggcgaccccgctgatggagagtctgctcttgttacctagattcgggcgcatttcggatttgactgtggatctttcaacgccagagggagtgcgtctcttaacactccccaaaatgtctctactgcgagtttccttccgctctctaccctgcctttctgcttttatctgccggggcttgcaggtccgcggcgcagactgttcacgagcccttggacctttcctagttcttctgaagtgttctacaccgcgttcgctcttccttttctggcgctggtggctggcctaacttcggtctcagagtctttgttttcgctcatttacctggcagtcatttggacacctaattcgaggacaagttggggaggatgaagtcggagaacgggacagtggtcggggtgggtttaatctgtgagccgagctttgggtgggattagaatcagaaacaggaaaagtaaggcagcgttggacttggggctgggagggcttaaggccagacagacgttttcatcctgatcctgtgacctgccctattcatctggtaatctagttgaagggagatgaaatattaggccagggcgagtatcagggaaggagattcttgcctttcgccagttgcgttgtttgctctcgtctgactgttttgaaaagtaatgtgccttttaggggaataggatggaatctttactggtgacatcaaaaagagaacaaaaaacaaaaacactgtttactttcggagtatttgcttgtttctgcacattcccacccagcttcagtgcggtgtccttgaacagtgattacaactgtggggttgtggtttctccttctgtctgcaggaaaagttaccgtgctcctttccatgacaagagaaaaaaatgacttaaaagttcacaagtaattttggta

SEQ ID NO: 108748 - DNA, 1050 bp, Homo sapiens
gttagcattttgctgaagtagatacccggacaaattctctgagacccagaaatttagcaaggagctgtcttagtaatatacatttactgtacttaaaatgctggcgtccctaccgaaagattttttttttttaggtaattttgaatagtgatgtattagtaacaactaacagtagaattgatattttaagaacattatgtggccagttctttttaagtgtagtcatagcattgaatttgagaaactttggcatctgatttacactaaggtaaatttgtgctttgtgcaggaaggttttatatttttttaagtttgaacttctcatggcattctcagtttactttgtagttgagatagtcaagtgtgcgtgtatcttgttttctgtttaacttttccctcaaacttactctttatctgttctcatctttagtgatgaaacagccttttttgaaaaagcacaattattttcttatatatgacacataatgacacagctactttgagtgggtaaacacatgggccataggataagaatttgtttttagtatgtgatgaaacatgtctccacgttttagagtgaggtttgtaaattacatttttaatttacacaacccagttcccaggaatagtactaatactaatatatgtattataattatagctgagtacatactgtgtaatataattttggggtctttagtaccagccagtcatataggcatgtaatttttttaaaacctgattaacaagcaagtagaggaagaagatatttttaagtaagagttttcagagagccgctgctttctttgtagaatcacttgatctttggaaaaagctagtgaatttacaagtctgaacaatatacttgaggtttgatgattgtataaaaccaccaaaatgaaaggtatctcaacattctgtgatcaagtacaaaagttgctgtacagtaagtcaaaccatgatgttcattacctttgttagctaggaaactacatttttagtatttatacaggtttttataaaactgtttatagctgtttacagtaatac

SEQ ID NO: 108749 - DNA, 1253 bp, Homo sapiens
gaactatgttgacttttatattgtgtaaataggaatcttgaagtattcaaaaattgagttgttgaagtaattggcaagatcacaagttattgttgataaattttccatcgtatttgtatttaacctattgaatttacagaaagggagagtgtgtgtgtgtgtgtgtgtgtgtgagagagagagagagagagagagagagagatgctgtctggatttgttgaagttcagacagaatctctgactttataacctggaagtagtgaagatggtcttgtttgtaggaaatggagaaagctctttgttgtttagggggacgagctgggaatgttactatttgtggaacttcatttgccttaaattttctgaatcatggttttaataggatttactttatttttatagtatatgactatcattaagctatggtttttaagcttgcttttctattcttataaatgatataatacatgcaaagcacttcacgtagtatctggtaaattgtaagcattcaataaatgttagatattgaataaagtaaaggtaactttaactgcctggtgcatttgatcagctgttttgaagctcatttggggtatggatcaccttaaaaataatggtgattttgaatatcaaccatactttagttatactgatttttttccattattactttgatataattttttgtagaaaactttcagtgaatgttgtttttgcctttaaaagtaatttatatagggaacaacatattttttaagttcactggtgaaaatgtagtttttgaagtaaacaaaagattatttagctaacggtactttagaaaagttgatagatttttactattggactcacttccttctttataaaatgaagctattggattagatccttttcagctccaacattctggggctttcaaactcttgagaaatttggtttttattgttgttgttgttgttgttgttttcttttgaactttaacgagtgggtttaattaagctcttctgaaaggggattgggagtgggatgctctctttcaagcctttcttcctacccccaaatttttacacacatgaaataaaacaaaaaccaaaaccttcctttaaggggaaatatgtggagttaagggtagccaaggatcttgtgaggcaatagtgtgcaaaacgatgttccagactttgtttcaggagtttcttttcaaacaacagtttaaggaaccacctacttctcctttactggctgtttctttagta

SEQ ID NO: 108750 - DNA, 1039 bp, Homo sapiens
tagtttagtaattctatttagtacattggtaaatggtagtacaaaaaaacaggttaagtctagaccttagactctgagacagaatcttaaaagatttgtaatctgaagtaagtatgatgcttcagtgtcttcgtattttttctttctaatgcttttttgggggttaactctgaaatgaaaagatctgacagtaattatgtggaattggtcaatagtgccaggaactgatctgtatatacccctgggacacagtaagggtcagttgagactagtaaacttatgcatatttaaaacttgtgaacaagtgaagtgttttttgttttgtgtttttttttggtgggggcagcatttcttaagcaatttattctaaaagataatctatttctattaaatttagtttttaaaatgtgttttgacatcagtttccaattttagatacagctgttggacatgatattcagtaaaataacacaaccttactattttcaaggcattgtttaatattgttggaatttgaggtgggtggaaaatggcattcagaaaattatttcatgaaataaatgggacatatgctaggacttaaaaatcttgaaattgttaagcttctacagtatttgcaatggattttggctgctatttagcagtataaattaagaagctaagatcttagagaaattttagcaaaaattcagtaaccattaaatcatccccgtaattttactatatctcccctccagacagttcaccaaactgtgaacacattagtctgtcaccagtacagttgactaatctttatgaacagctgttataacatgcgttactacaatgggatttcattcaaatttgggctttaaaaaataattttaaaacttaagttagctctttctttcttttctttcttatgtgtctgtctgtctttattttgatggagtctctgtcatccaggccggagtgcagtggcgtgatctcagttcactgtaacctctgcctcccgggttcaagcaattctcctgcctcagcctcccgagtagctgggatt

SEQ ID NO: 108751 - DNA, 1023 bp, Homo sapiens
actgcatgctcttctaaaataaaagcccatggctaaatggagactgtttggttcacccttaattgccaccgtaacacagtgcctgttgcctggtaaataactgctggttaataggctgcagtgctatcagtttaaataaaaggattggttgattacatttacacaagtgaagaagataagggaaagcataaatacttttagatttggtaataaagacagtgtcttccctcttattgatcattttggttcttagattttgataagcaagacttgtcatcctattttagctttataatgtaaagttctctatttaaatttttttcaggtccatagtactggtatgagttaggaaaaaatgaagttaatctctaataaactgttgaatgtaataagaaaatccaaagtcattcctagtagcaatctctactgaaaggatctgaggatagacctaggatattttcatcagaatctcttgtaatattaagataattcttttgtagagttttccgtctgatgaaggttggccatttgcaaagtatcttggagcttgtggaagaatggtggctgtaaattatgttggagaagaactgtggagttactttaatgcgccatgggaaaaacgagttgacctcgcttggcaattaatggaaatagcagaacagcttacaaacaatgactttgaatttgcactctacctcctggacgtcagctttgacaattttgcagttggtcctagagatgggaaggtaatcattgtggatgctgaaaatgttttggttgctgacaaaagattaattagacaaagtaagtatataattttagatttttttctactcattttttcctatgtcaaaataatgtttatacttgtatgaaatgagccttgaatttcctccttagatggcaactttaagcgtctttctttgctttatatgaccactgtcaataaacaaatacagatactctttgacttactgggggttacatcttgataaacccggtgtcagttgaaaatattgttat

SEQ ID NO: 108752 - DNA, 1007 bp, Homo sapiens
cctagaatgctattttttcctagtttcttttcagatttgttttcttttaagacctaaatcagatgttctcctttttgcagccttctacagccccagggacaagtgctaatttaattccccactattcctgtagcattgtgtcatatttctttatggcactttctgtgtatgatggaaagtcgctagactaaacctgtaagtggtagagacctttctgaatctttctgcctagcgttagtgggctcccagtgaatgtttgtatgaatttatatatttaaatgtttatggttataatatacttttacctaaaagtgtagaacaaatactattaattagtgaaatattctatttttggaagcaatgaaaactatttaaaaaatttttttctacttctgcttttcctcctttcacagataaacctgaaaattgggatgtatggtatgaaagcaagtttgatgactgtgataaggaggcttgcttatcattttcaaaagaaattctttgtgctcgtgccactgtggaccacaattactatgctgtttgtcagaacctcttatccagacatgccacctggcgtggcacttctggaggactccttcatgatccaccaagtgaaattgccaaagatggccggctcgaggccttgctggatgagtgtgccaacccaaagaagcgctatggcagattccaggctgcaaaagaactgcgtgaatacctagcacaattaagtaacaacgtgaggtagtctatggtgaacttttctttttttctccatttaaacagcactggctaaaactaaaccaccaaaaaacgatctgaaaaaatgaaatttggaagtgttacattcagaggatgataaacttgcactgatagatcttaatgttaacatccatcaaaataagacattacttcaaaaatcacatgatgcttctgcaaataagtatgttcttatactttggaggcttgagctgtcatcagctgctccccactaccccggaatgcttgag

SEQ ID NO: 108753 - DNA, 1842 bp, Homo sapiens
ttaatcgggcatcataacttttcatttattgaggaactaatcattattactataaagcatacaaattagccagtcagcacactttggtcttctttacctaagggttaaacatcagaacatcaaatttaattatttgcatagaaatgtgtgggctctttatataagttgactatcactaacaggtaatatttttctgtttgaagttgttacttttgtttacagcaaagtttgatgtagtgtgcagtagtgagctctagactgatctttttctaaatcagaaagtgattaaagtatgcacaaccaaaggcaggtttttctttttcatttattcagcaactatttattaagcatcaactctgtgccaggcacgttactagctgctacatactgtctgaacatgacatacggttaagtaactttacaattattatcaaatacttcaatgtagatatttcttaagttgaaatagcattaactaggataatgctttcatgttattttattgtcttgtgatagaaattcaacttgtaccatctaaaactaggttgctataaaaataggaggatgaagtcaataaagtttatgccagtttaaaaactggaaggaaaaggtaagagctctccattataaaatagttgcattcggttaatttttacacattagtgcattgcgtatatcaactggccctcaatgaagcatttaagtgcttggaattttactaaactgacttttttgcaactttgggagatttttgaggggagtgttgaaaattgccaaacactcacctcttactcaaaacttcaaataaaatacacattttcaagagggagcaccttttatatttgataagttttcattataaaccttataataccagtcacaaagaggttgtctgtctatggtttagcaaacatttgcttttctttttggaagtgtgattgcaattgcagaacagaaagtgagaaaacactgccagcggtgattgctacttgaggtagttttttacaactaccatttcccctccatgaaattatgtgaaatttattttatctttgggaaaagttgagaagatagtaaaagaattaggaatttaaaattacagggaaaaatatgtaagtgaaaagcaataaatattttgttcactttgctatcaagatgttcactatcagatatttattatatggcagcaatttatatttttaatcattgcccattaatagacgcagtaaaatatttttgaatcagacatttggggtttgtatgtgcattaaaattgtcttttgtactgtaagttactgttaatttgaatattttattgaactgtctccctgtgcctttataatataaagttgtttctacaacttttaatgatcttaataaagaatactttaagaatcacacttttcagactatttcttaacttcagatatccacatttttcttgagtggaaagtgagtttgagtagataagttactagtttcctcttgcatgcactttaattagaattttgagggaactatctgattgggtgtgcaccaggctttaaggttatgtgtgttttctttttctgtagtagtgagtttttaaaaaacttttaccactaaaatggaattaaaagaaaaacttcattatggaaattttcaaatgtatgcaagagaataacataatgaacagtagtatatcattacactaacttcaaaagttaacaacatgtggcaaaactagtttcatctctaaactacttgcttccagcttattttgaagcaaatctgagatgtatcattacatctcagatttatattacgcattttctcctagtaaaacacaatactttttttttt

SEQ ID NO: 108754 - DNA, 2161 bp, Homo sapiens
ataatgaaaagcaatcattcaaaaacttttgagtgttacaaatagaagtgaggaagggcggggaaagcttgtttttagtgtttggtaatacagacagcagatatgctaagtgtatgctcatcaagcagctgagactgcctaaagggtcactgtaaaaaaagactcatttttaagaaaggatgtgagggcttaggaagtcaattttatttactttatagctaaacttcacatatacatttaagaagtaggaaaggagtctactgaccttacattactttgtttcgtcattgtatcattgacaaagctgttacctaagttattttgataattttacagttaaagcagatgatataccacattggaacaactgttatttttattgtctattatgatctgtggttgaaaaaaaatactataatataaatgggaattgcacgtggagtacagcttattatgtcattaatgttgtttctaggatagccgtatatctggtggttatgaaaatgtcccaactgatgatatccacatgaagcaagttgatctggagaatgtatggcttcattttatccgggagttcattgcaccagttacactgaaggtctttgcaggctattatacgaaggtagttatcctctcacccctccagcctatttcttacccatttttacacaggtgttctttttaatgtttttattaataagcaaatccactggcttactttgctttttcagggatttgcactactgaattttgtagtaaaatactcccctgaacgacagcgttctcttcgtcctcatcatgatgcttctacatttaccataaacattgcacttaataacgtgggagaagactttcaggtaattatgactcttgtgtttttagatttttcaaaagaaatatatcattatgaaaaggactttgccttaggccttagtttcttttttaaattttgctcaaatgacataatttgaattttgccactggttaaatataatctgatgtatttcttcattttaacttttttagggaggtggttgcaaatttctaaggtacaattgctctattgagtcaccacgaaaaggctggagcttcatgcatcctgggagactcacacatttgcatgaaggacttcctgttaaaaatggaacaagatacattgcagtgtcatttatagatccctaagttatttacttttcattgaattgaaatttattttggatgaatgactggcatgaacacgtctttgaagttgtggctgagaagatgagaggaatatttaaataacatcaacagaacaacttcactttgggccaaacatttgaaaaactttttataaaaaattgtttgatatttcttaatgtctgctctgagccttaaaacacagattgaagaagaaaagaaagaaaaaacttaaatatttatttctatgctttgttgcctctgagaataatgacaatttatgaatttgtgtttcaaattgataaaatatttaggtacaaataacaagactaataatattttcttatttaaaaaaagcatgggaagatttttatttatcaaaatatagaggaaatgtagacaaaatggatataaatgaaaattaccatgttgtaaaaccttgaaaatcagattctaactggatttgtatgcaactaagtatttttctgaacacctatgcaggtcttatttacagtagttactaagggaacacacaaagaattacacaacgttttcctcaagaaaatggtacaaaacacaaccgaggagcgtatacagttgaaaacatttttgttttgattggaaggcagattattttatattagtattaaaaatcaaaccctatgtttctttcagatgaatcttccaaagtggattatattaagcaggtattagatttaggaaaacctttccatttcttaaagtattatcaagtgtcaagatcagcaagtgtccttaagtcaaacaggttttttttgttgttgtttttgctttgtttccttttttagaaagttctagaaaataggaaaacgaaaaatttcattgagatgagtagtgcatttaattattttttaaaaaactttttaagtacttgaattttatatcaggaaaacaaagttgttgagccttgcttcttccgttttgccctttgtctcgctcctta

SEQ ID NO: 108755 - DNA, 2142 bp, Homo sapiens
tattgatatgatttttggttttagaaatgatggggctattttatttccgatttccaaatttatataagcaattgtgatttgatgaaaagtcagaaaagttggcaagtatttttttcttagtttaacaaagcatgtattgtttgaatatgtttgttttctctacaaacctgtgtgcattattattgaatatcctcagtacttgtgatagtattttgtgctcatgtttggctaatttgactcaacagcgcatcatggaatggcctctcttactcattttttccgttgtcttatgtgtctaatgaaagttctgctaaggaatgagcttagacttatgtttgaccccaccacacctcccaaaaagaaaagaaaagaagggctgaaagagctggagatgtttctttgtgtgtgctataagctttgcttgttctgcatgttgtctatgaaggacatttcagaatgttagcttttgatcaacagctgctattatttttatttaccaaagaatacctgagagagcgggtgtacaggtcaacttacccaatgcttctcttcattttagactttacaaagggaaaaagactcccctactccggaaacattccaaatgctcagccccccaaaggtgttatttttacttattttatttatttttgtttatttaatatttgatatagtatattgcctagtagtaaagtttctttaagggccttatttgcatttagcttggtaaaatgttgattttcatcagtcatctgtgtgtttgcgtgttttgtgtgacttgggcatgggtcttgtgtgatagtcaactcttggttctttgagctgatttatattttatggctgacaggtgacaaagttaaacctaagtccctttcattctttttttaggtttttatttctttttaaagggagagaagagggtagaagtaggtataaaatagaatttgattacagtaaggtttaggtgcaccttattgagttattaatcactaactcttttactattaaaacaggtccaaaaagaaacacattacctagtggtgtttgccacatttgtctggtttggggcaagaatatgagactggttttctttatctgcctttataatgtatgactcatttgcgtgttagcctttaaacattagaaaaagaaaggaatgaaacagactggtgaaatataactggcagtgaattcttgattaaaaatgtgatgctttctttgaaagagaaagaagccaaaagaggtataattcattgcactgtgtctcaaaaatatttctgctttcaaacaggaattttttccccgatgtctacatctaggatcaatgagaaagggacaaaaacagtccattcttctttttttcagttgagtgtcagtgctatctactagttttgtgtggtgtctgaattcataatcaaaatttgagttttttattttaaactatgcacattttatatgaatactaaaaatgcatgttcataaatgaaatataaagatagaaattaatatcttctatatatttttcctatgattaaatttacttttgtacctacctctaagattaatactgttattttctggcatatagggtgtatttatgtacatttctaatagacatgaatttggaaggctattatccactgctaattacaatacttcccattataacaatgacctctggcagatttttgaaaatcctgtggtatgtatttcatactcaactttattatttttctataactgtaagtggttataaatcagttggttaataatatgaaatgtggttagaggctttttaaaatgacataaggtgaaatgcacatcaaaaccacaatgagatactgtctcacaccagtcagaatggctattattaaaaagtcaaaaacaacagatatgggtgaggctacggagaaaagggaatgcttgtacgttgttggtcggaatgaatttggaaagcagtttgaagatttctcaaagatcttaaaacagagctaccatttgacccagcaattccattactgggtatatagccaaaagaaagtaagtcatttgaccaaaaacacacatgaacctgtatctgttcgttgcagcactattcacagtagcaaagacatggacttaaactaggtgttcattaatggt

SEQ ID NO: 108756 - DNA, 1013 bp, Homo sapiens
cttgcccatttgtttggtgtaaatacttctaccatggctgatttcaagtttccaatgtgaaattactgaacatggacttggcagaaaaagttaactttggggagccagtatgagctgggtctagtgcaccactggttgtatgttatgattcatgctatcaaattctttaattttaaatagaaacaccgtctatacaatagattataatagtctaattgtaacaactgattgagatatgatagctataatacaaatgccaaacagataccaacccaaaattgaaatgtatccaaaggggcagtggtttatctcctaaatctcattaaatatagtgtatacaatgtaatcttatatatatatcattgaatatatttgtatgttgattcaataatttatgtatacaaaatctaaacacaaagcatttattttaaaaaggtaaaaatgaaacttaaaattgtttgtatttgtggtatataagaatgtcttctctttactttcagaggagtatggaatgtcccatatatggctaatgtgtacttaattaaaggaaagacactccgatcagagatgaatgaaaggaactattttgttcgtgataaactggatcctgatatggctctttgccgaaatgctagagaaatggtaagatatgcagtgatggcttgcttgaatgttcttataagatggcttgctttaccagttggtgtgtcactgtgttttgatgccctttgtcttgctaatttgtaagtactagccaatttttttggttctgtgttaaaaaatttgggagtaattttggagataatttaacatttacttatagaaatggtatgaaaaatgttagtttttgtgctcgggctaattcataggcaaccgagttggatttcagtaataaagatgtatttgttacaaatcagctttgctcttttaagaatacatctttaatttgaaattctatagtgaaaacttgacctaattaaaattaattagataagcttcgatgaaacaatatt

SEQ ID NO: 108757 - DNA, 1007 bp, Homo sapiens
tatttggtttcatttaatataggttccgaaatactttagttaaacttaaatataattaaataactaaagtagtttccctctgttggatgtaagcaaggcatttttaaaagtcatttttatgtattcattagcattttcaattactttttccttctttgttactctttttaagaaatatgattgaaaattagcaatatacttacttaagaaaagatgttgggaaagaagatccttattttatttttattaactacaggtttgttgaatgagctttcttgtgttatatgtcatactaagcccaaaatacataattctgtggtaatttaaaaataaataattatataggtttctctctctcacacacactctctctgtctttagaaagatcattgctcctcttgtaactcgtcatggaaagctgtggtccaatttctggggagcattgagtcctgatggatactatgcacgatctgaagattatgtggatattgttcaagggaatagagtgtaagttacttggtttaatattttaatgtgaaataccataatctaaagatgtagtcttgttagtattacttgaaattttttttgcattcatctcttttctttatagttaatgggaatttgagaacccaagaccacttggaatcctgaaatactagtataaaactaatatcttaaaaaaatgtttttaaagtcccaaatcttcaaaggaacaagctcattgctgtggggaatactaagagataatatatgtttaccatactcacattatggttgatagaagagtaatactctttatttaaaagcttggaaaggggatttagtttactaactttttaatggttataattaagggttgttttgataggttttaaaatttataattaagccaacagtaacactaacagccagaacattccagtattcctgattgcatgagtttttttgtgtgaaatagctattattctgctttaaatacaagttttttttaccaatattagatt

SEQ ID NO: 108758 - DNA, 1241 bp, Homo sapiens
cttgtaagtctttcaagccaggaactttcattccttttgccaaatattgcccatcttgtggattggaatgtataatggctatttcagaattgtttgtgcaattaatgaaggataaactccacaccaaaacatatctaaagagaacttaagaaaatatattaaaatatatacattaagataagatatattaacattaatgaaagaaaatagctctccttatacataatataataatgaaaggaaataaaaggataaagtctcaggtctcccatgattgctttttatgtgctcaaaattaagccctgaactttaagccgaggaaacaaaaagagaaacacaattagtatttggtttcttagacgaaactttcaaaatagctttcagatgtgaagaagtttctgcaagggctattttaaaggaagcactgactagtagtgtaggcagtaccatgaattacattcatgtaataaataggataatttcatctttaaacctaactcataaccaagatgggattcagtaaaatcactttgattgggggggccacaaaaatttgtttcaagtgttagagaactgccatggagcaattcaaatttagcagattatgttgaattgatattctagtattttttatgtcatgctgattaacatttgaataaaatttaaaacaaaaccatactaatgataattttatttttatgtttggtgtaaaacaaaggtccatccaaacgtatcaataggtgtttttattgagcaaccaaccccttttctacctcggtttctggacatattgttgacactggattacccaaaagaagcacttaaactttttattcataacaaagtaagtatttgagaaatgaatattttatgtcaaaactatttttggtcttttttggaactatttgttatttatgtcaaataaaattcattgggttaagttcagtggaggatttttggagtaattacagccctgcctttttaggacctaaggattttagattctagagactagcaccacaatattgatatgagccacatgaaactgccagtttctgtagatcaaaaatggctgaatattagccatcatcatatagcttaaattaatatataatcaaggagattcaaagggccttaaatccctttgcctttgggttagttctggtactttcttctatagaattggtcattaaattgtttgtgatttaagacaataacatataagaacttgaaacagtttc

SEQ ID NO: 108759 - DNA, 1039 bp, Homo sapiens
actactgccccatttactgtaggtgtctgtgctcagcctttaaacaggtttatcttattactaaattactattcatgtgactcttatttgtatttttcctaataagtctcactatcccatttaaaactctatttcattgtttgctttttcttttttgatcatcctttccggtattatatctaatataatatgaaataaaatgacctttatgatttataagactttttttttgacatttctagacatactttgtcctgctttacaattcatattctggagaagactattcagtgtgcacctacagatgatatattagtagaattactaaaggaatatacctgctgcagaaaacatgcttttaaattagatgattatagaatgaaaccacaccgatgagaggcctgctttcattaataaccttttccttcatttacaagattctcctgaattattttggaaactatgtacccaattcatggacacaggataatggctgcactctttgtgaattcgatacagtcgacttgtctgcagtagatgtaagtggaattgattatgtgtgaaatgtagtaatagaaagtacattgtcatgaaatactgtgatttataggaaaaaaggcaaattattttatagttttgattttatgatagataatggggatatagtgttaaaacatgatgattcagccatttgctagatttgtgtttcagaactgttttttgacagaaaaaccagctaataattgaacctaatgaaagagtcctgtggttaatatttaatagcttactacgattgagtgctcttgtgtttattctgttagcttagtcaaagcattgagaaaaaatcattacaaggcttcagcatttttattgactaattttatctgtgctggattttcaaagttgatatgtaaaaattaatactacctgattatataacaaacgactgttttaactactttacatataataactcatttaaacttcacaaaactcctaaaataggtagtacaattgactcagttttacagacgagaaa

SEQ ID NO: 108760 - DNA, 1049 bp, Homo sapiens
agtttgaagtcaggtagcatgatgcctccagctttgttctttttacttaggattgtcttggctatacgggctcttttttggttccatatgaaatttaaagtagttttttctagttttgtgaataaagtcaatggtagcttgatgggaataacattgaatctataaattactttggacagtttggccattttcacgttattatgagcatggaatgtttttccattcgtttgtgttctctcttatttccttgagcagtggtttgtaattctccttgaagagatccttcacgtccctcgtatgttgtattcctaggtattttattttctttgtagcagttgtgaatggaagttcactcataatttggctctctgtctattattggtgtataggaatgcttgcaatttttgcacactgattacaaaagataaacaggggaagagctaatcacctgatctacacatgaacataactcatttctgaaactaatttgatttgtaataaaaatagagatgtgaattttgtgcataaaagctgtagtacttgggtcactgtgaccttgaataattggatatgatttttaaaaggaagaaagaggaaaggatttgggcggaaaagtttctctgtcaatgaaaatgacatcatacttggaaacattttgatattgtgaaagaagaatcaggaaaatactatcacctagtagcccaggagtgcccagagcagcctaactgcataaacagccttctgcaccgtctagagctgccagcaaaaatgtctctagttttcatgaggaaaacagatgtaaatggggggtggtgatggtggataacctctgcctgtgtggtgagaggtccaaaagagggaagtttctagtcaaaagtaatgtttctaaaatatcttagttatctaggaaacaaattgagataaaaagcagagggtaggaaagtgacaagtttaattccgaaaactaaaagtgctgtcttttatgctctaacattttaaaactagtgatcattttaatattcatatagggattctagtagactgatcaa

SEQ ID NO: 108761 - DNA, 1320 bp, Homo sapiens
cacattttgttaagtcattgtgattctgtgaatgaaccatgaggaagaaagtcatcagaaaaatcaatgaaattatattatattaattaaattatagtgtcagtttttacaaaaattaaattatagtgtcagtttttacaaaaattttctcccaagtgtattgagctttaaaaacctgcagttgtctgaacgcacttattttaagattccatgctaaacagtcattcagatattaaacatacattgatgacatttagcagttaaacacattttgtcaaaaataattcttcagaaactaatggactggtacaaatttacttgaaatattaggcagttatggcaacttccgtaaatgattctatctgtattataaagttatacaacaagtaactgtatttctaacattttaatgctgtttcagaatttcaatttgggaataagtgattcctgaaaaaaaaattaaggctaacactaaaaaagctgacttttatttggacttcatttgctaatgtaaactaataattcaatacaattcatataatttaagttgagagaaattttgtttggtgttctgtgtaaatagttggcacaggtattaatcttgcattgtattcttgattctgacttttgttagagaacttttcatggtttatgtgcctagattctgacaagtgtattttaaaacacattttttcctcattgaacagctttgatgtcatatttgctggtggtccagaagaagttctaaaaaaattccaaaaggcaaaccacaaagtggtctttgcagcagatggaattttgtggccagataaaagactagcagacaagtatcctgttgtgcacattgggaaacgctatctgaattcaggaggtgagttagatactggaagaaaagtttaatgcaagttataaagactaatgaaacaaccatttttgtagatgtagtaactttagatatgaagttttaaataacccttattttattattagtatattgacaaagcattttcccatgtattatgtgagttggtgttcctaaaaacactaggtaatataaatgttataattaccaaattataagtgaggaaactcatgtttttcaaatttaagtgacttctagagatattctgttgttaaaggaagaaaagtatggatccagttcctttaattatgacacattgagaattttcttgctctaggataataagtttagtaagcttccttacttgaaaaaaaattattctcagtccgcaatcaagtagcttttaagaataggtattacttaatattatctgattttaaacattatgggattaaata

SEQ ID NO: 108762 - DNA, 1050 bp, Homo sapiens
tcttttttatgggtgaataatattccattatgtgtgtactccgtatttcctttatccattcatctgttgatacatacttagatttgttccatatatttactattataagtagtgttgcagtaaacatggaagtataggtatcccattgatatacttattttctttccaacagcacaacaaaaatatcccccatgatcaagtgggatttatcccaggaatgccaggatggttcaatatttatctgttaaaattgtatttgttttatgccaactaactccctttccctccctccaaaatttataaaataattttaatcattttattgtgattttatcataatctgttgtgcaaagtcaactgggtacgtgggtgtttttaactgtgtgtgtgcgtgtgtgtgtctgtgtgtctgtgtctgtgtgtctgtgtctgtgtgttttgagggtgggtggttaggagtggatccatagtattggtttgtgatgttaattatctctggaaatatagacatatgcttcaggtgaagatatgatgaaagaattatcaggtgtgaagctacttctgtgctgctaatagtttggatgattataatttttgctgaagtttatgccaataatgataaaggattggggctaaatgacaaggttagggaacacttctgttgctttcttttttggctatatgggagcttttgcttcttgttgagactcaagatgatggattctgtggcttgtaccactgcctgtttttgtaaaaagttttattgaaatgcagctgtgctcatttgtttacatattgtctgtggtggcttttgcaacacagtgacagagttcagtcactgtgacagacaatatggtcatcaggacctaaaatattttctgtaaaaggccagagagtaaatatttactgactcccgctttaggccatagttgagaaccattgatacagtctgggaactggcacagaatcatttttaaaatagtttgtcagacagtcttatttatgagtgaggaagagatgggtaatgtagaggtctctagggttttaaaa

SEQ ID NO: 108763 - DNA, 1049 bp, Homo sapiens
ttaagatgtataaggtaaagaaggtgatttttttcttgatgccctctgcaattccctgaaaaacccattttggttcagtaggaaaattgcttaaaggcccctcatcaaggagtcactgagcttcaatgttgatcataaagatttcctgccagattgaaaaaaaagtgatatgggaaatttattcatttttcttctttatggtctaaacaaataggaataaaatgatgtaatgtgagaaatactttctgggtctacttccttggattagactcacaacttttgagatggtaaaaattgagaagggcattttggggatggataacattgaagaattatgatctgatttaggcatctagatttttttttctagaatcatgattccatgaaacattagaagagtggttacggtacagtactgttcaagttgatgatgtctttaagtttttcatagtactttcataatttgagttttgctcaggaatgaaatgttgattttgtttataggtccttggtcaaggagaagaatggagaggtggtgatggaattaatagtattggagggggccagaaagtgagattaatgaaagaagtcatggaacactatgctgatcaagatgatctggttgtcatgtttactgaatggtaggagaaacaccctgtggattttaaaatctatattcaattactttttaaagagctgagatttatatttgtagatgatgtattaaaatatggttgggcacggtggctcacgcctgtaatcctagcactttgggaggcctaggcagctggatcacaaggtcaggagttcaagaccagcctggccaagatggtgaaaccctgtctctactaaaaatacaaaaaattagccgggcgtggtggcaggtgcctgtaatcacagctacttgggaggctgaggcagagaattgcttgaacccaggagcaaggttgcagtgagccgagattgcgccactctactccatcctggcaacagagcaagactccatttcaaaaaaaaattattgacaaggaattattgttttaaaaagt

SEQ ID NO: 108764 - DNA, 1039 bp, Homo sapiens
aaaatgtgacactgaattcttccctgaacagaaatttggtttgggtagtttcatccttgggatttatttctgtggattatgcttattgtggttgtagcatttcatattaaccgtaacaaatggaatatcccagccattctttgcatgctatgactttcagcctatggtccagtgtgcatggaccctcttgcaacatatacactgagacagtgtatagtgctgaatttgttttttatttggtttcaggaagtcagctggttacttcagtaatcagcagagattcagaaatatagatgttgtaatattatgcaaccatggatgtgttttatatcacttggtatttctgataaattgaggtacaagtctgttgtgctttgaattattggagagttgtgttatttcctcttttattatgattaagtgtattacaaagaatttgaggatgatgtttttaaaatactagggtaaatgcagaaacagtacagaggagtgtttgctttcttgatatagccagagggcgctcactatacaaggagactagagacctctaactttgaacttcaaaactttgaagtcatttttttctcattcctctgatttattcttcgtatttaggtatagtgctttgctcattattttgtctctgtctttttttgtttgtttcatctgtagtgaaaagtgtgtgtgtgtgtgtgtgtgtgtgtgtgtgcgtgcctgcctgcctgcctgcctgtataaataattagatatctattagatatttgaaacgggtaaagattatttttaacatgatcttaatattgttattgcattcaacagtgattccttaatgttatttaatacctatccaaattcacctttgcctctttttctcaagtatgtctttttatagttggtttgtttgatccggatccataaatttatcttcctaaacaccttccaagctgtcacttaccttagtctacactgcaggactctggtagcttcagggtcaaatctagcctaaatattgtttttcaaaagcctcaaattaagttct

SEQ ID NO: 108765 - DNA, 1072 bp, Homo sapiens
cgggggtttcaccatattggtcaggctggtcttaaactcctgacctcagatgatccacctgcctcagcctcccaaagtgctgggattacaggcatgagccactgcacctggccaataggtagaaaatttttatgctgttgcccatgactatttttgtattgctttaattcttgattttagtagcagtttgtgtatgcttttataaacctatataatttagtaaatctacattagtttatttagctaagctttacaaattccctcataatacaacttttttagaggtaactaacagcattgtaaatttttagatgcaaatgtatgccaacaataattcccattgtgtaatactgtgaaattttggtaattaatattttaaaaaataattggagtatttattgactggctagtctgtgttctgttgctttgtgtgaaggaaaaacagaaaaaacaaaccagaatgaacaaacaaaaaccacacaaggctcagttcctgttctgtattgaaattctaagattcttacagggaaaataatgtatgtataaaacggagcaaatctgagaagcacttacgggtaagcaacctgggctgcagggaagaacacacacatctggcatcaggaaacctacatctaagttctcatccttccactcaccaaccttgagccgattcttgagcctcgtcagattttacttgtaatttgtgatccttacagtgctgtgatttgatgtctcttgacttttttttttttgaaacggagtttcgttcttcttgtccaggctggagtgcaatggcgcgatcttggctcactgcaacctccgcctctcgggttcaagcgattcttctgcctcagcctcctcagttgctgggattacaggcatgcgctactatgccctgctaattttgtatttttagaagagaccgggtttctctatttttgtcaggctggtcttgaactcccaacctcaggtgatccgcccacctcagcctcttgaagtgctgggattacaggcgtgagccaccgtgcttggccaatgtctcttgacttttaagtgtcagaatggtggtaga

SEQ ID NO: 108766 - DNA, 1048 bp, Homo sapiens
tcatgtttacaatttcttttccgctataagaaattaggtttaaagtttagtttgtataggtttgtaattaaattttaaccaggaaaaaatctataaatagcaactggataacctttgctcttcatttcaagagcaattaacactaacttttttttttttttgctgttcttttttattattagtcttctcacaagggagtatcagtttctgtgcaagttcatgagtgatggggatactccccaggcattatcaatacagaagtgacaaggtatactacattggagtgtcctttccttttttggttgaagaactactgtatttataataaaaatctacaccagaagtttaaagaaaaaaccgtatttcaagtttgaatacaataaagaacatgattattactgtaaatatactcaatagacttttaatacaaataaaagtcttggtgaacatatggctaaaatgaggggctacttgaggcaggaaagtggtcaggaaaagtgtttcatataaacattggtgaattttcaaaaatgggccagagttgaaattaaatatcatttgttacactgatagtttattgattttaatattgcttttattatcttgtgtgcataagacatcctggtgcattaactaatcatctgctcatttaatttggggttatattctcaaatttttacaaagaactttctcatttgctttctagttactgctaacctattttagggttccttccaaacggtaggtgagagataggactttcctctgatttaaatgctgtttttcttatctttttttttttttttgtgctgtggacaggtaaaaattctttatggaacaaaggaattttcaagtacacataatttttattgttcttgacagtactcctggtcagtctcggacactcaagtgcagtaaggagatactgaatatgcatcatgctccacagcttgaccctcccacaggcacagcaacaagcgaaatagatatgtggattttggcaaccttggctttgtgatgctagggcatcgatctggcctgggagaag

SEQ ID NO: 108767 - DNA, 1048 bp, Homo sapiens
agtctgagatattgactagctggtcctgtacagaaaaactttgccgaaccttgccttaggagatgacattcccacttaagttgtggctcatgccgatctgctgctctgtgggaaggagctggcttctggacagtagcagctggctctgggcatttcagagacctgtttttcattttagaatttgccggtgattcctgtggtgttttgcgttcaaacatagagtttctctgttacatctttttaaacacagcacttgaagctatcaagacatgttctttggtgtaagtagtgttctcatgatcaaaaatgaattaaaaacactgatggctagttggaaaggagatgcatatttcttcttcagagcttgagtatattctagaaatttgttctagaaacctggttatgaatttgtggctgagctcctgggaggaaataattagcacgtttatcaatgagtatttttatttttctttaatcattgctataaattaggctaaactgagaatttggtggcttttaaaatgacatattctttttaatttacatcttactcatttgcatttgttgtagaatgcttgcctccccaaactgaactgaacagaactaattttctttcttttttcttttttttttttttttttgagacagagtctcgttctgtcgcccaggctggagtgcagtggcgtgatctcggctcactgcaacctctgcctcccgggttcaagcaattgtctgcctcagcctcctgagaagctgggattacaggtgcccgccaccatgcccagctaatttttgtattttttttttagtagagatggggtttcaccatcttggctaggctggtcttgaactcctgacctcgtgatccaaccccctcggcttcccaaactgctgggattgcaggtgtgagccaccgcgcctggccaatgaaactaattttcaaagctattgagattgcagttaaaaatagttatctagaatagtagaattatagagactgttatttaattaattaattaattaatttatttatagacagggtctcact

SEQ ID NO: 108768 - DNA, 1004 bp, Homo sapiens
agttcgtcctgcagtagtgagcctcctctatgcacctgcctgttcttgtccgtttgcctgtaaaacctttccccatcatggagatgctggctaggtctagtgtgttagcatctatatcgtagtataccttctctgcataggttaggtacccctcctgtctaatcccttaacatgctatgcatctacctatgattatgtcaattacttgcttcgtgacaaccattcaccttttcttatacatctttgtagcctccacagaacttgctgcccttggagacaggcatgcatttgaatgtctttctgtcttatatttctagcagcaagcacagaagctggtccttgaaatgggcttgaggaatatttcatagataaaagaatctttgatttatctcatggccttgttttcagatagtattaggagaatttcatgattcatgactattatgagtggcatttttatgagtaaccaaaatgtcttagacttcatcaccttcaaaggcgactggcttttgcattattggttgaccccagaccactgcattgtcccatgatgtcccatggaggtgaaagggtagaacttaaggacttaaaaatagctgctagctagagatgccaatccagtgtataggcccaaagccctccatagaatcacgcctggggtgctcttcttccttgtctctgatctagggggagtattagcatgatgtatttaaggacgtttctgcagtcagaatgctggaattctaattctactcctgatacgtcagctaatgactttcaccaagttacttaacctccttatgcctcagttttattctctataaattaaggataataatagtatctactatatatggttgatgtaaagattacaaggtttagtacttgtaacgttgttagagtaagggctggaatatgatgagagctcaataagttttagttattatctttctttttatttttttttaatcaacatagctttctctaacaggactttcttccag

SEQ ID NO: 108769 - DNA, 1026 bp, Homo sapiens
ggttatttattttcattttctcagatattaaagcatattttccttctgagttttgaatggtaagggtaaggctattcaccgcatactatcatccaaatagaagtggatgtgcaaccacagatatttcattgaaaaatctcagaaagagaaaagcgtattaaacatcacagatacagatgtctacgctgaaatgtcaacttatagatagatggcataaccctaaaaaggttgacaattccatttttggtgcagttacaaatcatttcacttgtttgtatttcaggacctccaggatatagtggctaccctgggccccaggtcagctacccacccccaccagccggccattcaggtcctggcccagctggctttcctgtcccaaatcagccagtgtataatcagccagtatataatcagccagttggagctgcaggggtaccatggatgccagcgccacagcctccattaaactgtccacctggattagaatatttaagtcaggtaatttcaaagacacaaaatactcataaaaaacagaactgtgcttccagcttgcttaaccagattagcaaatgaataattcaccaaagtctgaaatagcaaaactgtattttctgctaacagattactctaattcttctaggtctggttcaattttaaagcaaaatacaaatgccttagaaaattgtattttctgttatcttaaatacaatctatgataatggccaatagcaaacatttaattagcactgtttcctgcctttgttgtatgcctgatacatgtattaactcatttaatccttattgaaagtctgtgatgtataggtgctacatttttcaaaagaagaaactgaggtccagagaggttatatagctcactctggggtgagaacctaaagagtcaagactgtttttttaatcccgaaactttggtactgagcgaagtgctctttagtctcaatactgaataattgccttataatttggaagaaaatttaaataaagtttattgttgagtttcaataa

SEQ ID NO: 108770 - DNA, 1090 bp, Homo sapiens
ttgcctaagtttcttctcttacattttatttaggatttgcccttagacattatttagtgcttttctgaccctgtagggacggtgagaataattgaaacactagtttcttaaaatttctgttaaaattggttaaaggccatagaattttttttttaagctaagcatgttatagagaggtatcctataagaagcaaggggcaggtaaagactttagagatgtatagtccagtgtgttaattaaaggatactacctacttctaattcggtatgtattaatcttttctgatatatctgttaaagtactcttcgcatatttttaaaaaattggcattttaaagtatagtctttgatggtagaaatgtgagattgacaaaaatcatgtcctcttatgtatgaatttagtcttacacagttcttcatatgatggaatctaaaacaaatgtagtcttgaaaacttttagtctactttggttacatgtgtttattattgctcaccttatagattaacagcagaaaagtataaattttaatatttctacctttctggcttgaggtctacagcattaatttctgaccagttaatgcaaactgagattcctattgtcctaagaaaatctgggaagttagtaacacaaacacatcttttgatttatttcaggaccacataaacccattttgaattattcaaccattgctgaacttcttgagtatgtataattaagagttgactataattggaatgttcttaagactttaagttgattataaaattttgtgcttaaagttggcaataatcaaaacaaaacaaacaaacaaaaaaaaccctttattttaaaacacagtcttgctctgtcacccaggctggaatgcagtgatgacatcatacttcattagaccgtcaatattccaggctcaagcaatcctcccacctcaacctcccgagtagttgggactacaagcgcatgccaccatgcttggctaatttttttttagtagagacagtgtctgtccatgttgcccaggctgatctcaaacttctggactcaagtgatcctcctgcctcagcttcccaaaatactggcattatagg

SEQ ID NO: 108771 - DNA, 1177 bp, Homo sapiens
tccattgcctcatctctgaaattgtgtaactattaaatgagctacagagtattaatgtaaaattcttagagcagtgcctggcgctacagaaagtactcagtgaaagttagctcttattattttaaatatttgacaaagttcctgcttctccaagctgattctctggttcccaggtggtttcattcatgcactgttattcctggaagtcttggcatggccacttcccagttccaggaacaggcagtcgttgttttttctggcttatcacattgagatacatggttactacaagtgacacttaaacgtgtcagacagtttgggggctcccttcttgaactttttctaagagcaaacctttgtcttaatgccaccctgtttacaacaatagtagggctttgaacaatgagaaaatgcggggaaatgaaaaagacatataaagggaaagagtggatttatgcaattggatagaaaagtggcatgtaaaatagctggtttatagatcaaactgcctttagatctgtaaaggagcttagagtacatacaggtggagagacatcagatgtgtgtgagcagacccttatgtacttctccatcttcatctctaagaatgtctccctcttttgctctgtaacctcactcgtcttcctttacttgaatgagggacgttcctccagctcaggaattctacctatggagttccctctatctatgatgccctccaacaccccacccaccatacctccatagactagttgatttgagacttccttcatctcctagtctgacttttcttaaaccccctaccaccatctaagttagtgccccataaccctttcttatagcaacattaattttatttatagcacttagagtatttttaataatatatttaattcttaattgtctgtctcccctagtgtctaggtattgtgctctagtgcctggtatagtgccttgcatgctctatgccttcaattaattcctttaaaaccacacaagctttatatttagtgaatatttatataggaagaatttctatgtgtatatatgtgtatctgtgtatatacacactgtattgcactgccctgaatagtgctaaattaaaaaaccaaaacactttttaatcagaacttaatagttgcactcttcaattttccatatgttcttttaagaagtg

SEQ ID NO: 108772 - DNA, 1119 bp, Homo sapiens
atagatggatgaattagacaaaacatactctctgaaagagtgagaaatacaatattcaccaattaagtgaaggaaaaatctacactatgaataaaacaataaatgtggatacatttgaaaatttgaatttcaaaccccttaagataatgtgacaaatacaacaggcctaatttaacatcttaaagagatctgtgtgacctattttgcagttttattttcttaggacaatgcttcagtatctttaactttcatatttaatcattttttttcttttttggtttctatggtatcaccatccatcaatccatattggttggagggggggaatatatatatatatatatgtatgtctcccaagagaaagtaattctgcaatcttcctcagcaattcagtctaacaattaagaacccttaagctaaatagaaaaattcatttcacaggcaagttttactcaatatgtataattagttttagttaactttattaatgaaatgtcgcaaatcaattaggtttgcaataatcagatgccgaggacccaagaggaaccattcctctcacaagaggggaaggtgatacacaatttagttgggaagcaaatgtaattagatttgatcaattgagtattcctgtcctgatgtggagtcagtcacatacccaagcctgagaatatatttgaaaagaggtagaaaaaaacccagtatgacttagaaaatgtccttgtggtcctattggccacaactggcagccaaaaagggctttgaagccacaggtagacaggttttgttcagacagggctatgttttagatttctctttcaaatctgaatggttttacgtagggcaatatataaactttcctatttgtcacagattctagcactctttaatgccttatactgggtgtttcacacagttatttaactgcccaaatcccaatggcacttcagtttgcaactatcatgacctagaagttagttattgaacagttatgaggtaacttaaagtttcttccctttgcctctagaataagaatatcaaagaaatgtcatgatgataggaatactactgaaagaggatattaaacactaggtattcctacttagggctacagtttgcagc

SEQ ID NO: 108773 - DNA, 1012 bp, Homo sapiens
attctgagtgtttccgtccgtttttttaatttttgtactttatgggctttttcttcatttacccccaattatgcgggaaaggctgtgtgcctcttttgaaagctctgatgttctcaatgaagagaccttttaaatgaccttgtttgtcccccaccgagttgcatatcacaacttcaaatgtctcactaaaatgttacccatttggcatcagtatacagaaaaggctgcactctgagataagaaagaacagtggtgttttcatagtaagagaatagagttcttaatgggaaaggggagagtataatttccactgatttagctggtctttcaaactttatgatgcttttctccttgaactagcctataagaaatttgtagggaaaataccacaggaatcaaattttgggcatagatgtctattaatattgctccttacaaagctttttcccagaattgtttctccttgcctacaaaaactactccatgcctttattagtcagaaaagcagttttgtagagaaggcaagtaacagagaatcaagctaagtaagtgaaactctgtaattgtcaaacttccagaaagtaacatttgtaactaagtatggtatctttgtcctctctctttctctcttctctccacttggtttctaatgaaagccttgattacatgttatatttaatgtactgttccacaaagaagaaaaggcctaatgtgaatgcaagctgaatttacacttaaatattgcagtcagttcagaccggaaggatacagatcgatgccctctgatcctgtcagattccccgaagtgtctatggcagtgataccacaagagggcagggtttgacttccggactaggtggcttcctcccttcagtgcagaccttggggccacgacaacagccatcaatctcttgaaaccctaatgatgaatctgagctcaaattccctcttcagccttatctgtgcagaatcctgaagttatgaaaaatgcttacagaaggtaatttctaga

SEQ ID NO: 108774 - DNA, 1046 bp, Homo sapiens
taatccaaatgaaagcttgaacaagcagagaagtttggtacctagtctcaaaccagtttaactttccttcttataatgtgataactgagtatgtgttgcggctctctagttagattctttctgaaatgtagcctgttgggtatcattttgtttaagttctcaacctttcagagcccacacagattgagaatttatcttgagacttgtgttcccttgcccatccatcttacactttctaatgaactgtttgcagctttcagacttggtctatacactggctttctcttgtggcttctgtagaaaggtatgcagaacttaaagattaaccctaattactttgttctcccaatgttttcactgagtcaagaagtcttcattttgttaggaaaaaatcatataatctatatttttgtgtcttttttgtttgtttcatgtaatacttttcagtttttgctactttgcatgatgattcatcctggcttttctgtcttcaatttattgcattctttaaaacagtttgattttcagctctcatagagtcaattatgctttcctttctaggaagatgtctcaggagccatatcacatctgtcccttggggagatcccagctatggcacagccgtttgtatcctcggaagaacggaaggaacgatgggaacagggccaggctgattatatgggagcagattcctttgacaacatcaagaggaaacttgacacttacctccagtagaaacactgcatttttctgtgaacacatccacttcacaagccttgtttctgatacttagtatctagagctgggttgagaaaagtctgttacagttgctagaggttttcattaaaacttatcagatgagaggcttttttaggataagaggtgagaactgggcaaaagttgtgaagcagcaattctgttatatggacagtgttctgctttttaatcctatttagcttgtttcagaaattctcacttttgttgactgccaacatacaaagtaagggaaactcaagatattaagatggctgtatcagttcttaaaa

SEQ ID NO: 108775 - DNA, 1799 bp, Homo sapiens
tgatttgaatattttaaattatggaactgctaaatagatatttctataaatagataatttttatttatgtagctttttttggaagtaactttataaatttttataattcagaagactactatatgtgagaggcgtgatatctggatggaagttgggctggatgatctccaaagtcgtttcaactcttaaagacatcttaatcctgaatgtaaacaattgttatgtgtttagaatcagaatttgattttgaacttgagtaattcatccttacagctatctgtagaattagtcatcttttttcttttcttttttttttacttttttgttaataagcaaacttatttgctgcagaatttgggttgactcctgagcatatttaaaacaaagaagctagaaatttagcagtcagattaggtaggtggttttatttcaaagggaaactttaatccaaagaaagattaattactctaacaaacaagagaagcttcatgtttgatgatacagatttaagaatacctgagacttaagagtgttggaagtcatttgatagaaagatgagatcggagacaatgttgtgttatagggcacacattgaaggtatatgccaaatctctcaccagataagtccttttctccctgtgccgttttcttgctcaaagggaacagtgaattagccagctagaatcttcctggtccctttttgaggcagtagcaggtaaggaaagggctgattttcatcaaaaccaagacctttctgcagggatgatagtggaataataatgtgggattagcccgctagcattaggagcagttgggaagttacctggtagatcaagcattacacacaaaaaatcaagttgatcagagtatgggttctccatatagcaatacttcagtgagattaagtataaacagtttttggcaaaaaacaacacagtctactctttctgcttacaaagacaaagccttacaaactcactatgaaggtaaagggaggacagcttgcttctttgcccagacatttacaaagttgtttttaaaacacactcataagtaagtttggcaagttgtttaaaaaatgtctctttgttttgtacagttctgttagatgttgttatattttaaaagtttaatttaaaaaatttaatttgtccttcctaagaaggataaatatataaaaaagccactggaatgaaaacttcctatatgctatgctgttgtcttattattatatagaaaaataactttagaaaaatattgaagacattgtattaccacttgtgattcaaacaattttgtggttaaaactggattttaaatttaaaaatcaataaaaatttcaaatgtttattaccttcctcggtgccataattttgactttatcttcaaataaaatccttcattaattgtgacatttctatgcaagtgttacatttttttgagagtacatgaagattactgtaacagaataatgtcctcatatcctaactaactttattttgctcaatttagctggttgaaattcttgttcagaaatcaagagtgcttatttaaaatgccttgatctaaaaacattggtcccaattaatttcttcatctggaagaaaaaaaggagttgtgataatacctatatatacacagatagcactcttaatcaatcattgtacattttgtccttaaaattacagctctagaattggaaatacaaactaaccctatgtagtttgttaccagtgagtactaatgatcttcggcagtgtgtgctttgttttggggaatggcaaagacattgctgtatt

SEQ ID NO: 108776 - DNA, 1034 bp, Homo sapiens
taatagaaataccacttaagtaagttccacagtgtttttcactttcagtaaaaggattttatataatcatattgatttggatagcaaaaaaaaaaacttaatttgttttgccagttttagtcattttatctgaaagatattcagagtcacaatagagaatacttcctggcagcacaagaatttaaagattaagtcctgaatttatcagaaaatgactgactcagtgcctagcatattaataagtgttcaataaacatttgttaaaataaatgagtgaaagaatttattgaagagatttgtagttacttaactttgttttatttttataataatagtgtttgttacttgtctcttttcttcccccctttagagcctctggatttgtgtttactcgtttggatggttccatggcccaaaagaaaagagttgaatcaattcagtgttttcaaaacactgaagcaggatctccaactataatgcttctgtccttaaaagcaggtggagttggtttgaatctgtctgcagcttctcgagtgtttttaatggatccagtaagtagttctgtaaattttttcagaatcttagtacttctttcaaaaaaataagacaaaaaactatttggtaaataccttcatagttataattaactgtgaaaattcttaggcaaactttagaaataaataacaaaaacttagtaaatgtggattaagagctttctcttaagcactttactgaaatcctcacaacatccttatgaggtagataccattattaaatgctctgttttggccaggtgctgtggcacatgcctgtaatcccagcactttgggaggccaaggtgaatggattgcctgagctcaggagtttgagagcagcctaggcaacatggcaaaaccccatctctacaaaaaaaagtaccagaaaagttactctggtgtagtggtttgtgcttgtagtcccagctacttgcagggctaagtcggaaagattgattgcttgggcccaggaggttgaagtttcagtgagccatgctc

SEQ ID NO: 108777 - DNA, 1101 bp, Homo sapiens
ctagaaggtaaggaaaagaatgtaaacttaaactagttgctttttccttctgctagtgctgctgctttaaaaactaaataagcagatgtacttgataaggagaaagttgaattttccagtctttttcttggctagtgtgtcatgtgagagctaaaaattagagcaaaactgtatcttgagatgtgtatatttttaataaatgattatagtcaacacttgatagtttaatttaattgataatgatgagcctggtacagagtgcccattttcaattgttgtcttctctgattgggccaaatagatactcttactggatactctggttaaagagttataacagtttcctgttatttctaggtactccaatccagaattctttaaaggacttgtggtctcttctttcctttttaaaacttaaaccatttattgatagagaatggtggcatagaacaatacagcgtcctgtcacaatgggagatgaaggaggacttaggtaagtactttcagacagtgattaatattagttacaaataactgttagtagcttgaaccagttggcactttctttactattttaacttgactcttaacttttccttctaaaaagtgtttatggctcagtacctttgtctttcagaacctagtgatgcttgtttggaaagacaaagatttctaattgtcgataactacccttcccctgttgtggctaaactgaaaggaaagacataactgttttttgtgtgttgctaagccccaaagccccaaaaccagcattaacagatttagcaggaaacatcgtatatcctttgaggatctaatatgcattaagttttcatatcttatatagctttatttatttatttatgtatttatttatttgagatggagtcttgctctgtcgtccatgctggagggcagtggcgcgatcttggctcactgcaacctccgcctcctgggttcaagcgattctcctgtctcagcctcccaagtagctgagattacaggtctgcgccagcatgccccgctaatttttgtatttttagtagagatggggtttcgccatgttggccaggctagtctcaaacttctgacctcaggtta

SEQ ID NO: 108778 - DNA, 1049 bp, Homo sapiens
tgatggatcttgtatatagtctccaacattttgaatctagagcctgtccttttaacactacccatcagaaattttttttttccagattgcttttctgttctgaaacattgacattggaatggaacctcttgattaattgtttatttgcagcctggatatgttttcttcctagtttgagcttcaaacttcttgttatgatgaaataatgactctcttggaatccctgtgaatataaggaccactcaccgttcttgccacttccaagttatctgtttatctctcatcgccattcttcttatgtcagaggaggaagagatcctactctttttaagaccagtatttagtctctacattggattctctcttttcccacattgctcatctgttcttttttcccttgtttatttagtctcttcccactggctcttcctgatacatactcaggttttttcattttaaaatacattctcttgatatgcatctttaaaagttgctactcttctgctttccttcactgtcatactcttggaggttaatttctactttgtgcttttacttactaattccttaattcattgtaatctggcttgtaccattagttctctaaattgcattggaaaagactacttgtgatagtttaattgtcaaatttagtggcctcttcttggctttatagtctttttttccgtgacatgaattatctttttttatataagtttttggtttatttatttattttttaaattacaccttgtcctgataagtgtatcatttttcctcttaggaccagaagaatgaatgttaatggtctgttgctatttttttattccaacgaaactgttctttctttaatttgttgtttgttatgggaaggatagtacatgggtacttgaatggcagttttgggatgaggtttagagtattaatggaggtataaactatctaactgattatttgagggcttggggtatagagatgtatttttaaaatgggtaatcagtatttaattataattttatatttaggaaagttcaagtaatgtaaagttc

SEQ ID NO: 108779 - DNA, 1056 bp, Homo sapiens
aaaccatattacaagaagtttagaaaatagagactattttttaaagtatataacccattaaaagaacaaagctacctcataatttgttttccttttggtgcattttcctactgtatttgttttagttagggccaaaatgtgatgggggcccttactcctctgaatagcagagatatttcttctagtgatggcacaaagcaatttgtggctgctttaaagcttaatttaattttggttaatttaagttaaaggtttaattttttggtattagaatttgcttttcattttaaaatgttagtgatctttgttatgattttatattttgtaattcataggaaaacaacactgcttaagagactaaatatttgagatgggaagagattgaactaaggttgagaagatctgagacaaattatatctctgccccttggtctccattattttacatgttggggatatagcaggctatctgttttcatatagcatatgatgtaatgatgagagaaatatacaataagcaagtcaatataattttaaataatgagaagtaatgtgaagaaaaaggaggataatgaagtaaagattgacctgaaggggcttgtttatgaagctaacatagactcatgagaaagagccgacttttggtccaagaatcagataattaggaatagaaaatataggcatgttgggtggattattctttaccctaattttagaaatttaaagaaatgtggaaatttcggttgagatagaattaaattacacattagaaaccactttcagttgcagatgcatagctgtgatacaagagagaacattttcaaagtcacagctgtgtgtcattttggttttaaccaaactaagtatatctttgaaagagaagcagaatagaaacaaaactctgtgaatggagacagaagccataatcctgattgtccttgtggtagatagtgatctctttagtaagacacaaaaggtcataaggaaaagattgattaaatgccactacattttaaatttccatgcatcaaaaggtgccataaacaaagtaaaaaa

SEQ ID NO: 108780 - DNA, 1185 bp, Homo sapiens
gaaactccgtctcctggcttcacgtcattctcctgcctcagcctcccgagtagctgggactacaggcacccaccaccacgcccggctatcaaatttattttaataatagtgaaattcgctgggtgtagtggcacgcacctgtagtcctaggtactcccgaggctaaggcgggatgatcacttgagcccaggagtatgaggttgcagtgacttctgattgtgtcactgtactccatcctgggcaaaagagtgagaccctgtctcaaaaaacaataacggtggtactccattttgtatagttaatgcatctatctggttatgaaagcagaatgcttttagcagatctgactttcatttgtcaaaatctttaaaaaatttttcaaaaaataaatgagtaggacaaaagttttttattgcatttattaaacatgtttgtatatcttattttgctttgggttggtccaaaaatttctttgtgtatacttaattttagaagaaaaactgctgtccagtacatagaaagcagtgattcagaggaaattgaaacaagtgaattgccgcagaaaatgaaaggtaacatgtaatagatttgatttgataatgtgtcctatattctaatgtcctgttttgcccatttttatgtttatttttgttttatttttaggcaaactgaaaaatgtacagtctgaaactaaaggcagggcgaaaggtatgtgtatactatatacccataatctagacttcaagattattaaagtacagctccattgatttgtatctcgctaggttggaatgttttagtaatagctcttaaacttggctgatgtttacatttgaactcttcatggagctaaccatgggttttaaattaattttgtaaaggaggaaaagtgaataaatagttgcaaattaaaatctaagggataataatatttaaactatacttaaaacaattttctactacctataaaatgacttcaataaaacctatgtgtgtagtatgaatagtaattacaaaattaggttgagaatgtcttcctggcaatactattattgtttacattattatacagatgtgaaaataatcaaattttttctttttctttaaaatatgttttattttcctgtaattcacatcatactatatttctcattcgttgagaaattgtattgcatttggaaaata

SEQ ID NO: 108781 - DNA, 1182 bp, Homo sapiens
agttaggtagatgagttagcagtagaaggaaagaagtaaggttgaaggaaagtatagataaatgagtggattaaaagataggaaaattgagatttttatggaagataccttctcattttctttgtaaagtgaaataggtcatcttggaataaaaggagttataatctaggcaaaggggtcaatgtagtatggatcattctggtatggatcattctgataaatgggtaggggagccgaacagtgtttagtaaaaagagttaccaagtgacacaaggtgacatctgagatttgaacatgtaaatttataacagcacctatttgtggttctgttgatttttttttccaatagctcttagctgccttggtacagcaagacattcagctagtgtggggatgggctggatgagtacaaagaaaagactgggtcataaaaatttgaaggtactttctaattagaaatgaggaaatactagattaggaaaaaagtagagaaaatagagtaatgaaaggaatgaagatcttaagaaaactgaaaatcagtaattagaaaaccaaggttttaagagggataatactagtttctaagacaccttactaatactttatatttgcatttttctttgaaatagacgcatctagatgtagtgaacaacccagtatttcagatatcaaggagaagagtaagtttcgcatgtcagaattgtctagctcccgccccaaaaggtaaactattatggtttgattatgtcatatgtttatttagactctgttttcttatgtgtaaaagagatagaggctgggcacggtggctcacacctgtaatcccagcactttgggaggccgaggcgggcggatcatgaggtcaggagattgagaccatcctggctaacacagtgaaaccccgtctctactaaaaatagacaaaaattagccaggcgtggtcgtgggcgcctgtagtcccagttacccaggaggctgaggcaggagaatggcgtgaacccgggaggcagagcttgcagtgagttaagatcgcaccactgcactgcagcctgggtgacagagtgagactccgtctcaaaaaaaaaagaaaaagagagagatagagatgaccatgacccttatatttgttaagtagttctttcaaatacattcttttatttgaaactaccaagatcactatga

SEQ ID NO: 108782 - DNA, 1050 bp, Homo sapiens
cataagaaatatatcttttatgctttatggagaagttatgacttttaagcttggtattatctttaagtcaaattttaataaaatgattatatgcatactggaattactaatcactttagctccgaacttcatggcaaatgagtagttataaatagttgcatgataaaaatcaagagttcaggattaaatgtagaattgtagaatagcagtcattcaataaaatgacacttctcagagatacttgtagtattttatagtgtaaatcatttaataattccctaataatgcagtgggggaaagcattttctaactaaatgaaatactcatttttcattaatatacagtacacttttgtgaccttgaatgatatttgatattcgattacttgattttaaaatgggaacgtttttctggtgaactgggtttcacaatctgaccatttatctttttaaaacatttttaagggtaaaactcttacggccattgcagtaatccttaccaacttccatgatggcagacctcttcctattgaaagagttaaaaagaatctactgaagaaggtaaagtagtagtaagtgcgctttatgtgaaacctccagtttattgtgaaatctttaaatttcatcattaaaaaaaactaccaagaaattgtgttttcagaaatgcgatgaatggtctctctgtcttttatgtgttgctgataagaatgaaagttcgtgtcacattctttttacgttttcagacaaggtgtggctctgttgcccaggctggagtgcagtggcgcaatctcagctcactgtaacctctgcttcccaggctcaagtcgtgggatttcgccatgttgtccaggctggtctcgaactcatgagctcaagccatctacctgcctcagcctcccaaagtgctggggctataggtgtgagccaccagcaggtatcacattcttgagaacaattgataatttgtatcaggagtcttaaaattgtttataatctttgaacaattttgccagtcaataatgccatttctaagaaactatctgaaaggagt

SEQ ID NO: 108783 - DNA, 1312 bp, Homo sapiens
gagtagtgtaattctagagttgatttatgtgcctttttggcgtttgactagtttgtggtttttaaatttaatttaatttcaatttcttaattttttgggacagggtctcactttcttgcccaggctggagtgcagtggcataatcatggttcactctatcctctacctactaggctgaagtgatcctcccatctcagcatccctaggagccagaactacaggcatgcacccccatgcctggctaattttttaaaaatttttttgtagagatgggatctctcactatgttatccaggctggtctcaaactcctgagctcaagtgatcctcccaccttggtctcccaaagtgctgagattattggcatgagccaccactcctggcccgtttgacattaacgccagttaattaaatgatttcaaatctgacttaaatgcaagtattattttaattagtttgttttacattgtttcttgttgctgtttattgtagcttaaaacagaatttgacaaattgtttgaagatttaaaagaagatgataaaacccatgaaatggaaccagctgaggtattgaaccaatattttttatttaagactactcagaatgtttaaatatacttagaatctactttttgtttaatcacaggatctgcatgtgaaaaaggaatggcttaatgtatttcgctttatgactttttatttataggctattgaaacaccactgcttccacatcaaaaacaagctctagcttggatggtgtcacgggaaaatagcaaagaacttccaccattctgggaacagcgaaatgacttatactataacacaataacaaatttttctgagaaggaccgaccagaaaatgtccatggaggaattttagctgatgatatgggtttggtaattatttttttctttagttaataaaatctaattttgtgattatgattttctagaaagtaattttgaagtaaaaagagataggaatatgttggtaccagtttgggactagatcttactatctttgtagaacacagtttttcctgtagtttttagttaaaatagtggtataaagatgtgttcctcagttttcttttttttttttttgagatggagtcttgctctgtcacccaggctggagtgcagtgacgcgatcttggctcactgcagcctccgcctcccaggttcaagcagttctcctgtctcagacttccaaatagctgggattacaggcatgtgccaccatgcccagctaatttttgtatttttagtagagacagggttttaccacgttggccaggctggttttgaactc

SEQ ID NO: 108784 - DNA, 1473 bp, Homo sapiens
cataatgtctcactttgttttctcctttttcagtttatcaggtttttcagttattgagaataacttagtgaatcacaagttcttgcatttcccattttccaagcagaatgagttactaccctcagtggttccgttagccaaactctaccctttgatttaacttattttacttatattacaatcttgtttacaggccatccttgcatttttaaaactgctttattccattttctcaattttttctggcactctgtttctaaaaatcacccttctgattgtttatggttctatttcttttcctttttttctttcaagtctgcccaactagttccttattactttacttcaatgtaaaatgtaaatgatacacttaaaatattgaactaattcttagtggggataaaaagtaatgcttctgatttccctttctttttctcccaaatataatagggtagttccttttggtgcaaacaatgcttttaccatgcctctgcatatgactttttggggaaaagaagaaaatagaaaagcggtttcagatcagttgaagaaacatggatttaaattgggtcctgcaccaaaaagtaagtttagggtttcacttaatattattctgatattgtaagatgcagggattatgaaacatttattctctcttggagtttgttggctaatttgtgctcaaggctccaaggtacaactttttttcaggagtctttttgaggaaatctctgatttttccttttgcctctattgaaatagattcacacataaaaatatacacagtaagagtgaggggatattaaaaaaattaaagaaaaagtatatatgcaatgaagtctcatatataccctcccctaattttccctaatggtaacatctggaaacccctgactttaaacattctttttgataaattttaggcaaaaataatcttctgatagcgaatgaaaaggattgcttggcaagagtttgttcaaataatgtggaattacttgtttttttagtgatttagtatttagcttttaaaatacctctaaaatacaaggcttttaatgcagtttgttatgcacgttttatttatttatttgtgtatatattttgagacagagtcttgctctgtcacccaggctagagtacagtggccacgatcagtggctgagtgcaaccttgacctcctgggctccagcagtccttccacctgagcctcctgagtagctgggactacaggcgcacaccatcacgctctgctaatttttgtattttttgtagagacagaatctcaccatgttgcccaggctagtctcaaactactggactcaggcaaaccacctgccttggcctcccaaagtgcttgggttacaggcatgagccacagcacccagccctgttaatgcatattttaaaagctacttaataaaagataaaaacctactttatttgatggctttattctttttattttgtaaatta

SEQ ID NO: 108785 - DNA, 1027 bp, Homo sapiens
gttgggattacaggaatgagccaatatgcttggcctcagtgcgttatgtttggttattatgggtagcaccccacccccacaccccagcgccttgttcatgtcatcgatttgttgcaaaaaggagatcgttttgtggaatcttctggattttattctttcatttctccgtatgtttcttatgtttaagcttctcaatagggtgtctgaagcatgttcgacaggagattccttaggagtttcatgttctggatttgtttttctcctgtatttcctttacattggaacgtttcaaattgttttttgattgtctgaaatgtgttgtctaggagattccttaggaagagacaatatttcctaagtttttatattttcatacttgtggcattttatgaatgacagtttcataaaatgaaagttatgaaggacttaatgacagttgggctgaatttaaaatctttgtaatatatctttgtaataaaatctttgtaataaaatctccatatcctaatgttgcatagaattctcaggccagtgtgattttctttcacttaagtgaattggatttttttttttttctttttttttgagaccaagtttcgttttgttgcccaggctggagtgcagtggcctgatctggcctcactgcaatctctgcctcccagactcaagcaattctcccaattcagcctcctgagtagctgggactgctggcgttcaccaccatacccagctaatttttgtattttttttttttgtatttttttttaggttttggcatgttgtccaggctgatctggaactcctgggctcaagtgatccgtccgccttggcctctccaagtgctgggatgctgcacccggcctctaattttttctaatagattcttgaactctatcagttcttatttcacatctatatattctctggctctcatatgcatttctgagcttttctgtttcagatttgtgctaatttttcaaaacttacattgctttcgataattattttataccaccatgaaatacta

SEQ ID NO: 108786 - DNA, 1030 bp, Homo sapiens
aaagagttcgtttttacttctcccactttctagtttttttaaaaagggagggagaaggaaggaataaaaatatcaatttctgtcccgtcacataatggaacagaaatatacatcattgtgtagcaatttctaagttaattaactgtttttaatgtcaatattcgagggttgacctagataacaaccacagatgacaaccaggcatctattgtgcacttactgtggagtccctaggtcctttttgtatgcagaagcagcctggagttgtggaaagaggtagaggagtgtgaggggtcaggagacctgggatctaattggctctactctccagagaggcggtggaccagtcatgaacctttcatgccccaatctttaaaacaagctgctggactaggtaattctgaagatgccttcagatggtctctcattttcaattcgaccattggatttgagtttgcatagtctgtgttgtccagcataatccaggatggatttcatcatgaggtggttgaggaagaacaacagttaagaaatggattttactcttggttttgatagacacccatctgtaccttgggcaggtactgggggcatcatttgtctgtaaaatgaagatactgacccagatccatggttcctaactagggatgcacatcagagtcacatatggagttttgtagaaatgtacacgtccagattcagcccctagagattgcgattcactaggggtgttatggggaccagttgtatatttttaaaaacacaccacagggattctgaggcattcctcttattgagaagaagtttaacttggcaatatttgacaaatacttgactgtcacccctgcccattgccctgtttgcctgtgaaaccctccctgctgtgggtatgttggttcttggcctcactttgctcagcagcctgtgtcttcctcctcagtaacaacctgcagtgtttcactgtgcggtgcagtgcggcggcagctcgtgaggaggacccgtacatggacaccaccctgaaggtaagaac

SEQ ID NO: 108787 - DNA, 1034 bp, Homo sapiens
ctttttttattaactagcctttgaaaacatagttttgatggctgtgtaatgttccattatctgagtgtgccatatgtatttactcatcctttgttgttaaacatgtagattacttctaaattttcaatattgcgaatactcttgcggtgaacatcattggacgtaaatctttaaccacaatgttgattattctcttaggatagagtcctaaagaatgcccattggttttaatttgcagtccacacaaagcaaataaaatcatgttatttaaaaatgattgctttctattaaagagatctttaaactagaggtagtttcaagattatattatacttagatttattaaataaggaccacgtgcatgtgctctaatatggcattctttctattttatttttggcaagtgaggtttagtcttaagaaattgaattctgcatgttgtgttttagtttttgaggtgcctcatttcataacatttcacttttctgttcatagtctcttatatgtggtccttcatttgacatagcttccattattccgttcttggagccactttcagaagacactattgccggcctcagtgtccatgttctgtgtcgtacacgcttgaaagagtatgaacagtgcatagacatactgttagagagatgcccggaggcagtcattccatatgctaatcatgaactgaaagaagagaaccgggtatgctttttcagattatgtttttaggcttgatcagtgataatcagatctgataacctcatttcctttcctgcaaaatggggacaatttatgctaatccaacatcataaggctgtgtgggtccattgagcatatatgtttaatatgttacgtgttttgagtactattaaatgctgttaaaatatatggagatggtatattatcatcattaaacatcttttgtttggagatgaagtagttgattacctgaagatttgggaacagtgtatgatgggaaaatattttctctgccatacggtttttagtttagaaattagaagaattttggacct

SEQ ID NO: 108788 - DNA, 1073 bp, Homo sapiens
gaaatgagctcaggagatttgccccaggttgtaaattaaatcagcacaaaggtagaaatgaacacagagctctcagattggaagctgtccagacagctgcatggagcaggggcacagctcactgtctttcaaagcctcaaccagggctgttgcatctcggacacttggcagttactggaaagtcatgttaggctttcctgttgattctttatcttgtggaggagttgcacagtcaatgccttgttcaagattaatcattttccctgttgcctatgactgaggctgtttctcacatcctgcccctggttttgcctgtcccaaggatttcgtctgaagggcgggacattccccctgcctcttcgcaccacagccagagcctgccattaggaccaatgaaagcaaagtacctcatcccctcagtgactaagaatcgcagtatttaagaggtagcaggaatgggctgagagtggtgtttgctttctccaccagaagggcacactttcatctaatttggggtatcactgagctgaagacaaagagaagggggagaaaacctagcagaccaccatgtgctatgggaagtgtgcacgatgcatcggacattctctggtggggctcgccctcctgtgcatcgcggctaatattttgctttactttcccaatggggaaacaaagtatgcctccgaaaaccacctcagccgcttcgtgtggttcttttctggcatcgtaggaggtggcctgctggtaagtcattcaggattattactgaattctctcctgtttcctagatgttttcattatgtattttcatggaaagttttttgtaatgcatatttctaaatcaagtgacttttttgttgctgttcattcctttgaaagcagattatacaaaagcgagattggtacagtatagcgtagtaattttatgagatgttgttttacaaaatgctctttcaactaaaagtgaactgcctttttgctaaactctataggtaggaaacagatattcgcttttaaatcagatttgagagactatagagtttctactagaacgggcagtcatttaacatttg

SEQ ID NO: 108789 - DNA, 1969 bp, Homo sapiens
aaaaattgcaaaaagaattgtacattcttgctaaaaataaataaataaataaaaaattaaaaaaacaagggacctaacaaaactcagcagtgttactgtatttttaaaaaatatttttatagactcattttcaggttattaaatgtaagagaaacagatacccctcttttttaaagtaggtaaatcattgatgatttatattaccaatttttagaagtaattttctagtaagcttgtggcatcagaaaatactagaagatttttttagttaaattagttagaacatttatgaatgaatataataaatattttttcagaataaaatatggaccctttgtgtttactaatagataaagccagatataattttttgtttttaaggccacaaaatatggcctttgttaaagaacactaaagttagaaatctaaagttagagcaactttttaatggctatttcctattattgtaagtgttaaaacccctgcagaattcttgataaggtgctatttatactatatttcttattataagataactgtctttagtcttcttagtactagtctttttagtactaaatcaatcagtaaacatcatcatttcaccccaaaattttgtcacagaaaaggcgtatcaaatgaaaaataatttcagagatctttctttcaagatattttttcctgataaaatacattgtcttgaagtaaatacattgtcaaaacctaattgcaattctgttaaatctaagtaatttttagacagtgtttcaccgtattatttaggatgtgaaatgccatttctttcactgattacaccatatacaggaaacaggtaaaacagtgaaaactttattgtgctggttgatgccaacttggttgaaaagctctctgcagaagaagtgatctagactgacagaagtgttgctaattacaagttgtgttctcatgacgtaattagaaagtaacttctcaaagtacaacttttatgaaaaaaataagctgttaaaaaaaggaaatcgtaggttaatttaattgggaaaatgggcaattgacagagaccattttcctaacacatatatgtgctagtactttaactttttaaaattttacttctacgttttgtaatataaaaatttctattttaagtttagaatgttatacgtaccgaaagtatgcagccaaatcgatcagatcaaaccattttacctggagtttggtactggtttttacttctctgaatctgtataagaaaaataaagacaattgaacttccacttggagcttttgacttttcattatttgtctgtgttccttttactaggggatttgggtggtactgaagacaggcttatgtaaccctcctggcagacaatgaaagaaagaaaaatctgcaggcaaacaatttcttggctcacgtgcctggccttcaacattctaaatgttcacagaattctagtttccactttatttacaatgtccactgaggtttttaaaggtgtatatatacacctttaaaaataaaaacatatacctttaaatatatatatatcacatcattgtcctcccaacaccctcacagatttgacaagaccatcaaaaatacaggattcttgctgggcacgatggcttatgcctgtaatcctggcaatttgggaggctgaggcgggagcattgcttgagcccagcagtttgagaccagcctgggtaacattgtgagaccttgtctctacaaaaatatataaacattagccaggtatggtggtgtagaatatacaacaaactcttataaaccaatagaaaaaacaaacagcccaatagaaatatggatcaataatgtgaatggaaagtttatagaagatgaaactggctggtgactaatttaccaacctcattccaaatcagaaatttagataaataatgactgaattcccagtggctcataggcttgctggaactctttcattgacctaga

SEQ ID NO: 108790 - DNA, 1121 bp, Homo sapiens
gagttttgctcttgttgtccaggctggaatgcaatggcacaatctcggctcactgcaacctctgccttctgggttcaagcgattctcctgccttagcctcccgagtagctgggattacaggcacctgccaccacgtccggctaattttttgtattttgagtagagacggggtttcaccataatggtcaggctgttctcaaactcctgatctcaggtgatccacccatctcggcctcccaaagtgctgggattactggcgtgagccaccgcacccggccttgatgtttattttataaagcactgtaattttgtagctgatgacaaaaggcagccaaatgtttttgataaatcagtggcaactgtatttttgtcttttgaaataactctgaaaacatcaggacaacatagatttcaacctgatagcacaccacacacagtgagctgttgctttttaaattctgaagccttgtcaggtttgcttcctagatttcaagtgtttaaaataattctatctatgaaactgaaggatgaagcagatctctgactgacatgtaaaaaaaaatgccctttgagggtgtatggtggagataaatgtttctgaattcagtaaaattgattcctaagtatattatcctaatcctgtttgctacagttggtataaaaaggcatgaaatatgtattcaatacctcttatgtaaccaaaaccatttttaattagcttttaaggactgagagagcatcatgttcaactggcatgcagtctgcctgcattgccaatgaagtcctcaactgtttaatattttgaactaatattatttataatctatgaatttaatcttttttgaaagactttaataatttgagtctctgagaggatactttcaatttccatgggggacttatttgttggggatcttaaataagattccttttgatctaccggaatatacatgtacagagtacattggatcatgttggaaagaaggcaagtgaaaaggtcagagatgaagtagcaaagttatggaatatcgtggaaaggatactagttgtgaaatggaaagagacaagttatagtaccccaaaagcaaaacaagcaggagatgcaagagatgccccaaaag

SEQ ID NO: 108791 - DNA, 1023 bp, Homo sapiens
atttttgtattttttgtagagacagggtttcaccatgttgcaggctggtctcgaacttgtgggctccagtgatccgcccacctcgacctcccaaagtgctgggattatggacgtgagccaccacccctggccactgattgactttttaaagtaaactttcaactcattgttttgctttcctgtctgtaaacataaaactgccagatgcaatttaatgtagagcctggactctgtaattccacagttttactggcctgtaagtggcaaagaccagaatgtactttatagtccagaggagtctgattgctttgattgatgtagatttggtttgagaacctgagatagaaaaagccttgtctctgacaaagtgttttgagagggctttctatgatttgggtgtttaaataattgcatgggtgggatgattgcaacattaagtgcccttagatcaaataatagctgagcttcccattaactttgtgaatgtgaagtgacttatgtctgtaagactttcttcggagaaagaatactaatggttgcctggtgattttgacttgctgggagtaaatacacagtgctttgtatttggtgaaaagttttgatgtgaagtacactttgctccatgccttgtgacaatgagtgcatgactcttgcttcccattctgactgtaggaagctgccctctgtcgacagctccccatggaagctgagactcttgccccagttcaggctgctgtcaacccacccacgatgaccccagacatgagatccatcactaataatagctcagatcctttcctcaatgggtaagttaatatttgggggccacttatttttattctctttattatgtgatctagactataataggatctttgtttacattgggaagaggtggggagcttgagggttgagggtgagaataaagggaggaagtgggaggagctggcagaaaaaagaaaagcaggggaaatcatctgcctgttaaaaaatttccaaattaaaaaattggtgataggacgt

SEQ ID NO: 108792 - DNA, 1567 bp, Homo sapiens
ttaactgagaaagtatacacatgcacacacacacacacacacaaatgatctggtgaaattatctcataacttgtgataacctttgtggaatttgctttagaccactatgttctatgtaaggcttaaaatgtactctagacagggaggtgtgaaatgagattttaacagaaacaaaagccgaggctagatgagtcaggattggggccagtattcgagcctccgtgaattgaattaaggtaataattacttaaacagtaatggttaacaggaaagtactttggaaggaatctcaggaatctatactccaaagcagaaaacattctgatggtctatttttgataaggtattgtgggccctggtcattaatctgtatgttcttccctcttgcagtgatgaatcaccaacaccagcagcagatggcccccagtaccctgagccagcagaaccaccccactcagaacccacccgcagggctcatgagtatgcccaatgcgctgaccactcagcagcagcagcagcagaaactgcggcttcagagaatccagatggagagagaaaggattcgaatgcgccaagaggagctcatgaggcaggtatggctttccatggtgtctggtggaggctccctggccttggtgccaaagctgatgggtaggtagctgcttaccttcagggtaattcttctagagaagaagagacaatagggctcaaagccctactccaagcctcttgattaaaatccagtttcttctctcagtgttctgcctgccttttcagaacgaagcttaagggtacaaggacgagctgtattagcatggctgcctttggcttccactgctagtctttagaaggagagaaaggagaaagtagagagacaagagtctgttgttgtgtaacaaattatcccaaaatgtagttgcttaaatagccatttcattatatcgcacaattttgtgggtcagaatttagaaggggctcacctgggatattcttctgctctacatggcattgactgaggtcatttagtggtattcaactggtaggtgggttggtctggatagttcacaatggctttacctaagtgggtggcatgatggtgaggattgctggaagactgggctaagctggaacaaaagcctgggatctatggtgtggcgatctcagagtagtggtactcattccatagcagctgggttttcaagaaaaagcattctaagagacaggaagtagaagttgccaatttcttggggcctagctctggaaacggtcgtggagtcgcttttgccacactctcttggtcaaagtagtcacagagaaccccccgagattcaagcagatagtggagtggatgttcctcagaagaaatgacaaaggatcttggtccaccacagagcatgaaaaagagggaagctgaagggagaatgagaagggaaagtggtttgtatatggactccaacagagtgctctgcaaaactgcctgggcatcaatcaggcacttttgtaccatactccattcattcagttttcattccgtcagtcaggagtgtgttgccgtgtgccctctgtg

SEQ ID NO: 108793 - DNA, 1110 bp, Homo sapiens
ccagtgttacaggcatttctattttacacctgaaaaaggagagttgcctagatacttgcacactggtgtgtggactacattattgtttggatgggcaggcaggatagcaagtaggaaaatcatttcctggtgctaaaaattcagggtttcctgtgaagtaaacgaagcttgggttacaagtctaaaactagacaggcttggggcatctggaggaccggaggcccatctggcaagctttggggcacctggaagtggttttaaggcttgaaacagtgaagctgggaaagtgtggctgaatcaacatatattccagagctctgtgccttatcaactgagccggctgagaaatttccttgcagttattctcacccagaattggaataaagggctcagtgtgaagttgggatagtacaacttctcggtttaatactttacagatttttggaaccaaatgcaccctgaagtgaaaagctgctttttttttgctgaccttgttggatggctaatactgtttctgggaaataagagaaacaagcggctcattgttggcaggagctgagagagacacaaggagggcgagagacgcgtctgcagccctttttttcccttcattgtatcgtgactgagtcaaggctggattgtggctgggtttttcttcctacctctgtagacatatgttttccatcagacagggctgcgtgacacctgacgttggccagttcacatgagttaagccatggacggcgcataaacagaggaaaagacccgcagctgcacccagacactcttgatgctgaaatatttttcaaagcttgatgtggctgggtctgcacataagtcagaaacgatttacacctgtatgttttggcttgcttctttcagttgcatatcattattcccacaaagcctctatggccagaaggtctaccattggctgatggcagcacctctccttcccatatataagcctttctaaattatgaaatgtgagttttcaaagtttatttgatttttgtcttttttttttggaggattgaagaacaaaatgctctaccatttctataaagtgaggtcacacaaatggtgtcatcaaaacatgcgattcacgtt

SEQ ID NO: 108794 - DNA, 1089 bp, Homo sapiens
ccaagtaaacttcaaaaatgaggaggaaaattatagcttgggatccagattcttgaaatgtattgtttaatccactgggtaaatgtacaagtctgcttcagttttgcttgcagagagtgggcctgagaatccatcaggccttcgtaagcctaaaccgtgacgaattccagagaagcacccccacacctggggaagagggaggccttttaggaaggtgaaggctaggtcaaacttgttttcttttttagtcctttctttgtttgcaccacattaattaattagttaattaattaatttgtaatggagtctaatttcttcaccgagctgtagacctctgttgagagttttaaaaataattttgacaattttcatcctgtttgctggctgacttccaaaagtttgccctcaggagcttccttgctatggagaatttcacccagttaagggtgaaaggcaggcagtgggattcgaggtggtttgtcattcagccacttgttccaaattgataagtgctgagtgatattttgacacttctctttgatctcctctttggcgtccctggtaatattgctcccgcctgtgtgtgatcatcacctctcccacccaggtaccaactgattgatttcttcttcctttctggaagtctaaatttattccctgggtgttttgcagttgctggtggtcaagaacagctgttcttccatgctttattctgaatagttctccaggatgaagtcagcaaaacaatatcatttaagtgaagcctcaggaaaacaaaagccttgattgtctttctccttaagtgctaaaaagaagatcacccctccccctttgtgtgtgtgtgtgtgtgtgtgtgtgtgtgtgtgtgtgtgtgtgtgtctgtattttaaggcagaaaaaaaaaaggttctaaacatttttgaagcagcaagattcaagaatgttatttttttccatattacataattgctatttggtcactgtagaaaatgctgattggcaaaacatgagaaaataaaaagccatggtaccattcaaaatgacactagtgtgttttcatatattttcttgactttcttcaatgcaaac

SEQ ID NO: 108795 - DNA, 1011 bp, Homo sapiens
tttgtgcctctctctagttcagagcacctttaggctaagcactcatgggagtattatggtggcgccttttccaactcacagttaaggcagagacaagattttcagtcctgcactatagctgtggaattattttcagaggctgtaatgagcaggtataggttcaaatgtggaatgcagcatcattttttaagcaggaaatgggttcattttggggggaggatagctttctcattttttttctgattagaaaaataatgcttattgtacaaaaagaacaaagaaatgtaaagatatgaataaagcctacttcccccttgttcatatgtgttctatttaccaaaacgggattatgttcactcccacaatatattttagcaaatacagatccatgtaatttatcatgtctgttcagtcttccactgtctgactgtaccataatttgtttaaccattctatcatcatacactaaagatagaaacaaaaccgctgtggacatccttaagcatacattctgcatacttgtattggtttggagtcatgtttgtgatttacagggatgcgaaatgagatcatttatttctctaacattaaggaaatctgaattaaggaactcaagagctggtttgctggctccgctgcacctttctgcttagttgttcttactgagtggcttccattcctcataattccagctgtctgctgcagctccagccatcacgttcatatgccaggctggagaaaagatggaagggtgggaagcagaaacgtatgtctattgcttccgtttaaaaacctttcccagaagcccacacagcacttctgttcattgtctagaacttagtctcttggcaatacttagcacctaaaaagggagagcagatattccaaagcaacaaccatctctgtcattcccatctaattgttttctgggaataaaagctttgtgcaaatggacttactggatcaaagcttttcccaggtttttgttgcatattgatatactgctcttca

SEQ ID NO: 108796 - DNA, 1045 bp, Homo sapiens
aggcggagtgtgtattgcccatcactctattctcagcacttggtttgaatgagcctataagtggtattttacccacccctcacaaaagaagctatatcaatataagctattattcgtgtaatttagtgagaaatactgatgtttcctcaccccatagttttgtgtatcttttgtagacctcagtgtttcatgacctatatattataatgtttactgactagatttggtcagttactatttgaggaaatgctgggatttcttagaaattttaatgataaaagaatgcatagggccagaatgtttgaaaccaagactgccttagagaaacccagggcatatagcagacacatttttgacctgaaacgcttaaagcggaatgggacaggaaaatacatatgcatgaaataattagtatgtttctcagtctgtccaggctactataacaaaaataccataaactaggtggctcaggaaacaacaaacatttatttctcacagttctggtagctaggaagtacaagatcaagacaccagcagatgtggtgtcttatgagggcctattcctcatagatcatgccttctacccgagtcatcatatggtagaagggataaacaagctctctctggcctctttcatgagggccttaatcccattccatgtgggctctgcccccatgatctaactaccttccaaaggccccatgttgggaggttatatttcaacatatgaatttggtggggacacagacattcacaccatagcagtatgccacctgtgacagtacctgtttgtctttatagctgtgttctcttgtttctccagtatctcagtggtattggacaggatattagattcaggagaggacttcagaatgttaactagtggtaagaaagcagcttcatggggtggctggggcttgagggagtctgtaactcgggaccacattttagtaactagagaaaatgtttcagcaactgtatggtgataagtccctagtctaaatctctagcacaaatctttcttttgagtgctggataccctatt

SEQ ID NO: 108797 - DNA, 1226 bp, Homo sapiens
cactttaagcttctagtttgtgctgggactgcgggatgtagtaatgaataagtacatggcctttgtcctaaataacttaggttcagttttagaaagaaatctgaaaatgacttctcataatacctggcagaatgaaagaaatttattaaaagagaggacagcaggccaggtgcaatggctcatgcctgtaatcccagcactttgggaggctgaggcgggcagatcacctgaggttgggagttggagaccagcctgaccaacatggagaaaccttgtctctactaaaaatacaaaattagccaggtgtggtggcacgtccctgtaatcccagctactcaggaggctgaggcaggagaattgcttgaacctgggaggcagaggttgcggtgagccgagatcatgccattgcactccagcctgggcaacaagagtgaaactccacctcggaaaaaaaaaaaaagagagagagagagaggacagccattttattaggaaagtacagaggaagaaatacgtagttctagccaggggatttcattacatgggattacagagaagggtgttccctgaactgaatttttaaagatagggtcaaattttcataggcagaaagaaagggtgggaagcggacattctcaattaaggggaaaaatgagatcttatggaagctttaaagcctgagacatttgagggaacagaatttgagaattgagtctgcgatgagacaggaaaagcccacaggcagtaaaaaatgccggtggctgagtgcagtgtagcttccactgaactctgtggatgtttatgcttatttgaaccttgttggaatattcctggtttgttttatgaagggatgtctctcactgaggatattgactcagggacgtttcctctttcagtcaggatggcctccatcagaccaatattgttctcaggccatttttttgttttgttatcttggataaacagagagaggctgattcatttttctagaaaaacaggatgcactaaaatactgcaagtgacaatgaaacagacatgctcacgtacaataatatttataaagggaccaaacaatatatgtagcagacacctctgtggtgtggccgctacccctcctccatctcacttgccttgagtccttggccaagtgggttgtttctttcgatctgtttcctcagatatcaaatgagaccaataataccaactgaacaggcatgtctcaagga

SEQ ID NO: 108798 - DNA, 1021 bp, Homo sapiens
tggtgtgatcatagcttactgtaacctggaactcctaggctcaagtgatactcccgcctcagcctcctgagtagctgggactgcaggagcatgccactatgcctggctaatttttaaattcttttggtagagataggatttcactatgttgcccaggctggtcttgaactcctggcctcaagcaatcctctcaccttggcgtctcaaagtgttgtgattacaggtgtgagtcactaatctggcctggttccttttttaataatactactgacaaacactgcctcgtagaaactcctgtcagcgtgaagagttggaaggggaggggaacagtgctatttttcttcttcaagaagtttcagggggctcctcataggattgccttcaggagtgtccatactccctgcctctctggctgtttcttatcagctaaatggtacaacctccaagaggtgtgactgatggtgaatttcatctctttctgaaaggtgccatgaaaacatgcaaggctattcctctctgccattgtttctgtctgtctctcagcaggataaggtcatgacagaatggcacgtttatcttggatttccttgtttggcaagcagcctggatatctctgggttgaacgtctctgggtatctcacagacgtcaatgggttgaaggagatgttggctcttgcactgattctttcagaagcccaggaggtggtggggaggggggaggagaagaggggacaggattgtacttgtcgtgtcactgccctctcagttggagcttcctttacctttccaggctcctacagcgtggagaggcagcctagtataatgcaaggcacagagactttatgtctaaatagagctgtgttcaagtctcgactctgcctattttaaggtttttctcctatatactcctcaaaacccctgtacttattcttcgatgatattttttcacatctgacattacatctttctctctctctttttctgcatttgtctgtaagctttagatatgtggggaccacat

SEQ ID NO: 108799 - DNA, 1057 bp, Homo sapiens
catcccaaacgagcagcctctaaagggacaagagggcttccctctacccgccctcacccgcccacttcaatgtatgccagtatctgttcatttgacctcctgtgagctcagcagagaagggtactggattgttcatcattcaggaatcacagagttagaatggagaaagatttagttcctcaatggaagtggtcatggtagtggtggggagggatgtggccggacgaagggaagtgattctgggcagacgataaccacatactttctccacagagagtgatgcaagccacatgggagatagggaccctagccttaaccctgtagcctggctggagagctaagcatatatgcaagagagcacaacattgccaaaactacatgaaggtaacgaggagatgcagaattaagtgcagccatgaagcatggcccttcagaaaggactgtgaggttctggcattgtatataaattcccatttgccataaatagtagccctctagtttgcttatcaggattgtatcttctctacacggtcacatagtggatgattagccctgaaagcaattacataatttccacttatacagatttacatttacccatagaaagtatttctctcctattcaaataaggatgtcagaatgcaagttcgtagaagtgatgtcattcaatggacaaaaaatggattaattcatcagaaagaaagacaacatatattgcaaacttaaatgatgtgggatgcctttcacagctaatggcatcatagcatggcctttgggactgcccagaattccattttatagctgtaccctactttgttcatctagcccctcttactgagcatttaggttctttcccattttcacactttaaatggccatatgataaacattcttttttttgagatgtagttttgctcttgttgcccaggctggagtgcagtggcacaatctcggctcactgcaacctccacttcccaggttcaagtgattctcctgcctcagcctcctgagtagctgggattacaggcgtgcaccacaacactcaaataattttgta

SEQ ID NO: 108800 - DNA, 1060 bp, Homo sapiens
tacttggtttcctcacccttaaatgaagaacttaaaggagataatggccaagtttccttttaatttgcttaaccaattacacttgcatatatattttattttttagagacaagttctcacttgtcacccagagtgtaatgcattggcacaatcatagctcactataacctcaaactcgtgggctcaagagatcctcccacctcagcctcctaagtagctaggactacaggtgtgcgtcaccatgcctggctggcttattttatttttgtagcgatggggtcttcctatgttgcccaggctgtccttgaactcttggcctcaagccatggtcccacctcagcctcccaaagtgctgggattacagacgtgagccactgtgcctggccatacttattttttaacagcttcattgatatataatttacacagcacataattcactcattttaagtgtgtaattcaatagtttttaatagattcaggtatgtacaaccatcatcacagtcaggtttagaacattttcatcaccaaaaagagaagccccaactaactagatagctattagccatgcccctctcctccacattctcatcttcaccagtcttaagaaattactaatccactttatgtctctgtagctttgtttattctggaaattgtatgtaaattgaatcatatgatatgtagtcttttatgagtggcttattgcacttggcataatgttttcaaggctcctctatgttgtagcatacatcagaacttcatcctttttatggcttaatagtattgcattgtatggatataccacattttgtttatccattcatttgttggtggacttttgggttgtctccacctttttgaaaattacatccatttttgagtggaaaatgatcttcctttagtggcttctacagttgccaacagcagtttccctctactgctttaaaggtagggatctgggcttaatggctttgtttgcgttgtgtggatggacaggttggatgcttggtcatcaatgtcagagagcagtcatagagagtactcatgagctttgtaa

SEQ ID NO: 108801 - DNA, 1068 bp, Homo sapiens
cctcaccaagcatgtcattcaaccatttattgtgcatggaccttggtagggaataggcattgctctgttttctgatttatttctccttgaaagcccattctcaagggcagggaacatgttttattcttcccagaaccttaggataaataaacgggaaaaaatgagtgaaaaaggaaactttggtgggagataatgaggcttttccttactgctcttatctttagaagctgggtcacagacatcttaatatgcatttacgtgtatttatttaacaaacgtgtacctagcacttactttgtgccaggcattgttctcacactgttcacatttaattatgccaagaactctgacagaaacactatttttatccccactttgctcagaaaactgatgtacagggcatttaaggaacttgaccaaagccgcacactagtaaggacttaaacttgggcagtctgggcccagagccaccctggctctccttttccctctcaccggtcttgacatggttgggtcttcattatttttccctttctggacctctcatctttccttcctctttctccattcctgttgcctccaccctactgtgtgatgtgatcatttatttgtagactgcagcacactagcctctgacttcagtcctttgcacaccacagccaggctaatcttccttcatgatggctctcatcacccttttcctgctacagaactcttcttggtgtcctgtcctgtcagggctgatctcctgcctggttcctaaacctctagaatctgacagtgtgaccctgctcatcgagcctcacttcccttgcaacccatttgctgccacccacagctcctggcagtgcttgtaccccttccctggagcaccctcactcacctcttccctgaccctccatcagttcattctgccatggatttccttctaggtctcacctcctgcctgactacacagctcttagtgtccgctccacccctgaacccagtctacaggctgttggatttcattgttcctggcttcaaaaagcctgattaggtttaaactctttgggggtctaccattat

SEQ ID NO: 108802 - DNA, 1023 bp, Homo sapiens
ttttttttttttttttttttttttcacttgagacagtcttgctctgtcgcccaggctggagtgcagtggcatgatcccagctcactgcaacctctgccccctgggttcaagtgattctgcctcagcctcccgagtagctggggttacaggcacctgccaccacacccagctaattttttgtgcataatacttctctaatgcctggcccaaagcatggcatgcatagtagggattcatttaacttttgctgaaagaaatataaatgatttttttcttttaaatttctacattatttagattttctggtgactctttcctatgcaataagccaatacatatttatggagcacatactgtgtgccacatactggtactgtgcttagcataaaggatacatataatgtatattttactttagaatatattctattctttgtatttaattcttagcccgactataaattctaaaaaatcagtttttcaagcaaaaacaatgaagatccaagaaaggaaaatttcctggtattaattcaatatattcatctattcccagattatttccacattccacttgatggtggaaatttactaccccctccttgcctttcaaatgatcctaagatcgtaacctttcccaatggagctgaagaggtagagtaggctgtttgggtttcaaaggacttttcaggacacaaagtaaataggggaattggagatatcaacaaaactaattaagtggattgactgtgtcagtagtgagtacagagatgtcagaaaagctagttgtagcaagtatttaaacacagcctcaagttcattttcagtggtgttgccatcatccacaaacttcaaagaaagtttagccagattaatccaggaaaattcattctcctgggaacatcacattctaaattacttattcattgttaatatcttcatttaaaattttgacttgaacttttttattctttacttgtcctttaagatcacacagacccaagatttgataaggttatcatcttt

SEQ ID NO: 108803 - DNA, 1017 bp, Homo sapiens
atatatatatttttttccaagataattttagtcttagtctactctgaataacaaagaagaatgatttattcatttagaggcattttaagagcagtctttgtagaccattgctagatctttttggaatgggctgccttgaaagcagagagaatgtaaccatgtgtctttaagtggcattgtttagtggttcttcacggcagcccaaagagaaagtatctggcatcagatttgctggatgtgcagagatgccagtatctctcgtttgagctagcctctgcggtgtttttgctctcaaacctggtggtagagtgacggctttgatttgcttcctgcctgaagcctgctttggatgaatttaaaaacctgtttgtttccccatcggccggctgagccttacccataattcctgaactttgattatgggggttattacaggacaagagcttctttgtaaaagagcatgtttaatactctggggtctagcgtgactagcggatataaattgtatggaagcaattaaatgcgaaggaaatgtcatgtgggctgaatttaaacataacttgcggcattgattttttttttttaacttacactaagaaggatggagagagaaaaaagaaagagaatggaaacaggccaagcgagtcagagaagcacacgcagagacaagagaaaaggagtcatttttaacatttggttaaaagtccaaagcccagagctagcattatgtgaattatactagtattatgccattgccctttaaatgaactctttaaaaacacaaatgtcagggaagtatactgtacttggggcttgtatctctttccagttgctcctctttatcttaaggcatatatgtacatacagcagtgattttttttggaatatgttaataaacaggcctgaaggaagctccgtaaacgattaaagtgcttctttccctagttttctctccttttatgctcacggccactgcatgcctcttttcttttcttttctttctttttttgacaaagt

SEQ ID NO: 108804 - DNA, 1057 bp, Homo sapiens
cacaaatgacatcatgttttagtgatagcttaggaattgttttttttattatgatagaccaaaagtagtttattggctataaataatatatttattatctgccagtttctaagagtagcatgatatctctgatccaaactgtattgattctggtcgggctcggtggctcatgcctgtaataccagcactttgggaggccgaggtgggtggattacttgaggccaggagtttgagaccagcctggccaacatggtgaaaccctgtctctactaaaaatacaaaaattagctgggtgtggtggcacatgcttgttatcccagctactcaggaggctgaggcaggagattcactagaaccagggaggcagaggttgcagtgagccaagattggggcactgcatttcagctttgggggcagagcgaaactctgtttcaaaaaaacaaaaacaaaaccaatctatattggttctaacctttatctatagacaaaagcattggtttatgaaaaccatcagagatgcaagccatagaaactttcaaaaagttctttaagatgcaactgtctggatctgataaatagtttcaattgttttgctcttgatctggatgggttttgagcagaggagattgggtgaaattaaaggtttcttaaaattgttgacactggtagagaggcatttatctgaatacagtggggaagaccagagatgttgcttaaagagattttgtaagaaaagtaggcacaattcttgtgaaaagtgggctacgtgaataagggcaatccaagaaatcatgttagtgcccctgtgtagttgtatgacttctgtactttttctttctttctttctttctttctttcttttttttttttttttttttgagacggagtctcgctgtgtagcccaggctggagtgcagtggcacaatctcggctcactgcaagctccacctcccaggttcacaacgttctcttgcctcagcctcccaagtagctgggactacaagtgcccaccaccacgcctgggtatttttttgtattttttagtagagatgggatt

SEQ ID NO: 108805 - DNA, 1001 bp, Homo sapiens
tgatccacgtcacgcaggacctagacacagacctcgaagccctcttcaactctgtcatgaatccgaagcctagctcgtggcggaagaagatcctgccggagtctttctttaaggagcctgattcgggctcgcactcgcgccagtccagcaccgactcgtcgggcggccacccggggcctcgactggctgggggtgcccagcatgtccgctcgcactcgtcgcccgcgtccctgcagctgggcaccggcgcgggtgctgcgggtagccccgcgcagcagcacgcgcacctccgccagcagtcctacgacgtgaccgacgagctgccactgcccccgggctgggagatgaccttcacggccactggccagaggtacttcctcaagtaagtcagcctggagccgaagaaggcaccaagtcacagtgcccaacgcgcgcgtgtgttcgtgtgtgtgtgtgtgtgtgtgtgagagagagagagagagagagagagagaaagagagagatggtgcgtgtccttccacggttatttcacagatatggagagctggaagcagggagtgagtctctgagtgttggaattgtaagggatcagaagcagggatcagaagcagtggtgaagttcatccaccataaaacacacaggtgactttgccttgaatctgcaggactgaagccaactcttgggcacagacccttagtcccttccttggccactctaagtcagatagtccagagccaggccctttgggatgtgacaccgagataaatcagagaaaagctgtgaagcttggggaacagagggacttttggtgaagtaggtggtctgcagtttctatcttcttgggaaaagcaagctggaaaagtgaacagtggttggtaggccatagtgctcccagctgggtgacataatgaccacacagcacagtgatgttattagcaactgtgtggtggagtagttgtgggctggacaaatcaatcgtgtggaaattgttaggagtttt

SEQ ID NO: 108806 - DNA, 1050 bp, Homo sapiens
gccttaaaaaggaagaaaattcaggccaggcatggtgcctcacatctgtaatcccagccctatgggaggccaagtcaggcagatcacttgaggtcaggagttcaagaccagcctggccaacatagtgaaatcccatctctaccaaaaatacaaaaattagccaggcgtggtgacaagcaccagtaatcccagctcctcaggaggctgaggcaggagaaccgcttgaacctgggaggcagacgttgcactgaaccgagatcataccactgcactccagcctgggcaacagaatgagaccctgccacaagaaaaaaaaaatgaagaagaagaagaaagaaaattctgaggcatgctacaacatggatgaaccttgaggacattaggctaagtgaaataagccagtcacaaaacaacaaatactatatgatcccacttttatgaagtacttaaagtagtcaaaatcatagagacagaaagtagaatgatggttgccaggggtagcaggaagggagcaatgagttgttgtttaacgggcatagagtttcaattttgcaagatgaaaagagatctggagatggatgctggtgatgtttgcacaaccatatgaatatactgaatgccactcagctgtgcacttaaaaatgattaagatagtaaattttgttacatatattttaccataataaactttgggtaaaaaattaaaatgaaaagaaccaaagtgagatagcagaggaccctgtgagctgttgagcctgtgtgaacagagactagtggccctcatggcatgtggctgaatgagtggttggtaacgatctcctgctttctactatctgtttccttttcttcctcagtttttttcttaatctgcttccttgagaaaacaatcctgcttctttgagatacaaaattccaagtttgatgtggtgattatggggaaaaaaagaacgtaaggtcacaatgagaagatgggacactatggaaggccctttaattttctaatagtcacatagactttaaaaaatagtctctggggtctggtaacttggt

SEQ ID NO: 108807 - DNA, 1059 bp, Homo sapiens
gctcatgccagttatcccagcactttgggaggccgaggtgggcaaatcatgaggtcaggagattgagaccttcctggctaacatggtgaaaccccatctctactaaaaatataaaaaattagccaggtgtggtggcacgcatctatcagagtcccagctactcaggaggctgaggcaggagaatcgcttgaacctgggaggtggaggttgcagtgagctgagattgtgccactgcactccagcctgggtgacagagtgagactccatctcaaaaataataataataataataaagtaaaaataaaaataaaaaagtaatcagaagctaaagtaaagttcctttcctggtgctaactgtggtcttcttgacacattaagatgtattttgtattttaagagtctcatgctctaccgttggaactagccagatggccattattttgtattttaaatacataaataggattgaatcaactagaaatgaatctatatgttctgtatatatgaatgactatcttgtttttgctacttcttttgactgcttaattttattattttcatctttattgatcaaatttgaaaataaaattcacaatgtaatactactactatgcagaattttctaaacagttcagtatttttgacttttaaaaacaccccacagtgttaatagccacagaatattgaacatcaataggatttttaatgctatattgttataggcagtttattcatttttctttgtatatgaagatgataagtatcatattgcctaagtttgagtgatcatggttaattaattggcttaaatagtactcaaatttgtgtggtcgtatattgtattttatcaaggactaattcttccaccatacccaaagcatctaggagacactctgtcatttacatttacaaataatggatgcagagaaatataatcaattcttgattgtcctggatacaaattatagtcactttttataatttgaataaactatgatgagggaaggaaggccatgtttattacattataggcaactatcccttctcaaaacataactt

SEQ ID NO: 108808 - DNA, 1462 bp, Homo sapiens
ttttggaaacattacttggatcctactacttaggggtttttctgtagcatttattcactcaaatatttgttgagtaccttctttgtcaggcactgttctaaagagaaaaatccttgcctgcatggagcttatctgctaatgggagaaataaggtgcattttcataatagacggtaattagatttttctcgtactatgtatttgtacctatttaagcagatggtaataatgaatactataccagattgtaactaattttgcagagcatttgaaggaagggaccatgtctttcttattcgcatttgtctctcccttttccccttcctcccagtggaatggcttagatgtgtttaatgctcaacaaacgtaggtactcatcaaatgtttattacagggagaaggtgttaaggcagaggctacatcttaaagattaaaggagtcagttaaatgtggcatgtattaaggacccatataccccctagattgagggtgagaagaagagaatccggctgggcactgtggctcatgtctgtaatcccagcactttgggaggctgaggtgggcagatcacttgagaccagagttcgaggccagcctgggcaacatggtaaaaccccatttgtactaaaatacagaaattagccagatgtggtggcgtgctcatgtaatcccagttacttgagaggctgaggcaggagaattgcttgtacctgggaggcggaggttgcagtgagccaagaccgcggcactgtactccagcctgggtgacagagcgtgactctgtctcaaaaaaataaaataagataaaaataaaaagagaatcccctggcttatctatgaggttggaataggaataaagttatattgtagctgaaagcatcaacattatgggagtctgggtgtcacccaacattcccactaattagctgggtgattttgcataaatatcttaacctctcagttcatttcctcacctgtaaatgaagtagttggaattgtccagttaaaatctgtttttacgacttcttgtaaaatatctcttgcactaatgtttcacttcactaacgtagataatatagagccaagcatgagcttccattgaataagcatcaagctaaatatatactcttagttaataaactaatgtttaagaaaagatgtctacaaaatttgttgatgctatttaccggtaagattacattgtaattttttaaaatagagcaaaatattacctaatatatagtttcccccattgccattatgtaaaggaaaaataagccatagtattttagaccttaataatggatcataatactcactttcatactttaatttatacaacagtcacttgcctctgatattgtgctagatgctaggtattgtatacagaattagaaaatgtatagctcctaactttaaggagcttaaggaataatgggagtgacagaccatttagttgtgtt

SEQ ID NO: 108809 - DNA, 1047 bp, Homo sapiens
ttacatgtgaatttatattgaaccagaagtaaaaattttttaagttgtagaaaattttcaattttaaagcaaagatgcttgtgtgtatgtttttaaccattattttggttgaaatctagtttctctgaaatttgggttagtaagacaagctgtactataaactgagcactgtgggaggatgtttgttttgtgattaaaacagaactttgtcatcatgagttacataggtattgactaaacatgggtgtttacctaaatgtccaaatctgtgtaagttcttatgcttttgaaataaaagctttacttttaatgttaatacatgtttataattaaaagggatatttttggacattgggaattaatatatcaaatgatctattccctgggacaaagcaccagctctcagttactcacatccttgtcttccaggtgattttacaacgagatgctgctctccatagggatgctcatgctgtcagccacacaagtctacaccatcttgactgtccagctctttgcattcttaaacctactgcctgtagaagcagacattttagcagtaagtacagtaaaatttattcatgtctagaaacatcccttaaagaaaagcttaaaaaaagcctggaatgatatttataagacattgttataagacatttttatctaaaaacataccccaacacatatacacagttacttgacattgaggtaccttattcatttgtttatttattttttgagacggaatttcattctcgttgcccaggctggagtacattgttgcggtcctggctcactgaaacctccacctcccgggttcaagcagttctcctgactcaccctcctgagtagctggaattacaggcgtgtgccaccatgcccgactaatttttttgtatttttaatagagacagggtttcaccatgttggccaggctggtcttgaactcctgaacctaaggtgatcttcccgccttggcctcccaaagtgttgggattacaggtgtgagccaccacgcccagccccttattcattttctattgcttc

SEQ ID NO: 108810 - DNA, 1086 bp, Homo sapiens
aatgggaataaattagagcttgaagtcaaagtagtagacttcctgctcctcagagttgtttatgatagtttaaatttaactgttttatccagaactaaactataataattacaggttgcttcagttaaaattaaatgttattgtaatgtttcattaatttcttgctgctaagaaattaaaagtaaactaattctattgatcccaaggtttactacactattatgctatgtaatttctggactcggtacagtctgataattagaaactagaatacttttttgctgttgttataactttcctttataggcagggatggcagatggtacactttgaaaattagggaaatactgttattgaatatctgtttttgaagatgaaaccacagctcaggaatgaatacagtaggcttgttagccttcttgtccctttagtggatcctcatcatgagtctgagtacttctaaaggagtttaatgatttagtcattactccagctcatctcttttcactgcttgccttgaattttatgttgcagccatactgcctacctgaactctctcaactggctgtgccatgctgatcatacatttgtgcctttacatgtactattttctctgtccaagatctctgtctccagtgatctttaccacccatttatctgtctcatcggttacatgctagctgaggatgttacctcctcagggagccttacttttctttctacttcctctgttgcagtgcagaccattccagctcaatgtgccacccttccactttgtaaatacttccttcattgctttttatcacattgttgttactttttattgaatatatatatctcacttatttgtgaattgatggtgtttagaattcatgttttagtcatatttatgtatccaatttgtattatagtgtgtggtaatcaataaagacttattaaatgaagctgtgtaatagtcttttgcttatgtgtctaatatattcttgaaaaacatgtacatatgaaaaacatggaagaagttttcagttgagccattctaatgttagacagggaaatgttaaaaaaattctcattgtactttaccat

SEQ ID NO: 108811 - DNA, 1070 bp, Homo sapiens
tattagtgtcagtattataaatttgttcaggctagaaataagatgaattattgtgttgttcccagggttccttttagaacctgtcttattgaagacttttctattagcagtctgctatcttctgacagactggctatttataataacaagccaacagttccattatttctttaaacctcttggttaggtgccacctggtctatgtaatttagttgcatgtaatttgtttattggatgtaaaatactcagtgcatttaccacaatttgggctaatagctctgatcagtctccttaaaaaggcagattgccaatacaatttagaaggctttataatgtagttttcagttttggtggctgttttggatttagatttgttcactgtgcatgctttgtttcatgaatctttaagttctttgcttccatctgacaccatgtgtttgaggttgcattttatgaatgggaaactttgcaaatgcttactaaatgatttaacatttatttctgcctcatgtgttcttaaaaataccagctgctgcttagttgaaaatgtaatttaatttgactgacacatgagttttatagttcataaacatggatgtattttccttgtttgtattcataagcctgttagtccatatgttaatgtgttctttgatttaatttcatttctttattttaaaaatcgataaaaacaacaacaaaaaccttgggaaagccttcatacttgctacatttttgaaaacatgcatctattttttggagatcacacttatgcctacagaatttcttcccattttagtggtttcctaaggtttctattttaggagttttattattatgttaacagagaacagcttttgatattgatataattttgtagtgtatttatagaaacaagtgcattttggatgtgtgaaagacatatttctcctaagttgcttggtacagttttaaaagcctaatggttagatttagttaaacatggtggactgttataaatccattcatgtatatagatgattcttaataatttgagagtgagaaagcctcttgaaagattattactttgt

SEQ ID NO: 108812 - DNA, 1043 bp, Homo sapiens
gcaggtatttttaagtttttaaaaagctttgtaaaggaattttacagaatattttggatgatcaagctagtgatatgaattggttttatctgactcatttctgtgtgttaggcatggtattaagcatttttaaaatattattttacatatgacaagaatattgtcattctcatttcagaggttaggaaactgagggttacaaaagaagtaatttgctcaagttcatcccactaattcatggcagaggtgggaattgaatgctcaaggtctggtaactcctaagcctgattacagcaagtttctacctctttagagcaaaacagattaatgctttgagtccttttaatgttttagcttgtatcctcatcttttatttacttcagtaagtttttataatcaattgtaaaagacaaaccactgtcttccttataacataattttttttttttttttttgctttgcaggttttaaatgcacagagagcaggatacaaggcagccatagttcacaatgttgattctgatgacctcattagcatgggatccaacgacagtaagtacaggtatcacttttcttctctcctgtttgacagatcatttgtaactaaaaattaacaggattttccttctctcattttctttttaaaaagcaaaatttcttctctatcagataatccctcattcttaactctggatgattttattcatagtagagatgaaaatgactttcttttctgaacagtttttttttaaacatatatgttttatttattgatattttgttaaaaaccaaaatgggggaaacagctttaatagggataaacatgctgagttaagaatgccatagagggtgttttgtaatttatttagagattcacagcattattttagggtatgcacatacactaagtagctgctataatctgctggagttccaaagccacatacttgtgcttccttataccagttggttattagcccttcgtcatacattggtatgttcatagtttttcatttcagatgggaatgtctttctttactctc

SEQ ID NO: 108813 - DNA, 1090 bp, Homo sapiens
aacttatttttttccgagactatttttaaatctttatgctattatttcttatacacacacacaaggggctctatcaagcttcaacaaacaaaaaataccaggaatttaccccaataatttaaactttccaaaaattgctacgattgctagaatacaagtagctttttacttcactttccagcagaatgggggatgacaaaggatttcacacacatttgtatagctttgcacaaaatactaaagtaactaatatatcatcagtgtaaaaaagaaaatcagcagcagcagggcctaagctgctctatttgataccatctcttccagcacgaggccagccagctccgcaattaatatccctgttcccggcacataccctctgaaactgccctgagccagtggtaccacttttaagtataagagcctttccatgagacgctaatcctctataacctccctaccccacagccactaacctgctataaataaacactatcagggtttagaagccagactattgcatatcctaaattcaacccattgtaacttagtatctcagcagtaggaaggcttacaactctcatattctgtttttttttttcttctctttttatgtttatgacttcctaaggcacactcagccttgatgagataaataaatcctgtcctatgagacaagccccagggttgctcagaaataaacagagcttctaggtgagaaggagcaagctaaaagaacaaatcaggaagtcccagtgaactaggaacttcgtgtgtgtttgtaacggcagaaatggaatcaatttcagaatttcccaggaagcattatgctaagattcatacgcccgggttctaaatctaatattctacatatcctattaatgctttccattataaactaaataccattttagtttaccgtcaagatatattgtggggattttaaagggtcaacaattgataaaagattttgagcatcttgcctgtaatcccagcactttgggaggccacggtgggtggatcacttgaggccacaggagtttgagactagcctggccaacatggcaaaaccccatctctactaaaaatacaa

SEQ ID NO: 108814 - DNA, 1046 bp, Homo sapiens
caactagctttttttttaaagtatttctaatgcattcaacctagctttcaaataaaaccagaagtcttttacactcacagtttatggactgctgaatatttaactaaattacataattaccctaagtaaaacaaacaggttcaatgaccactgccactagccttttgtaagcatgcagctgatcatctgttgggacaaaagcataaggttggttagagaatagcctcctagccagtcttctaccatgtgataagtaagtatgcctatcggctagttttactaggtaaaaattggttaagaggtattgtatgtgcgaaacaccatgtaaattactctacttgcattatctcttttaatcttcacaacaaccctaatacataattatgttaatgtttgtgttttgcctttgagaaaacaaacataaagataagtgttttacataaagttacatagctaataaaaggaccaggatgggaacctcaggcattctaatatgtgctttaccatttcatcacaagtccaaggccataaaggttaatttgctacagagcactaagctccagtttggtccatgatcacaaactgtaccttggaatcttgacctgtcatcttcaaactaagtgctacggcaataaaatatgggatattaatataaatctactacttggaacaattcaaaggattgataagaaagctcagtgattccaaatcatcaagtctatacatttaaagataacccaaatatacctgtattagtttcctatttatttgataacaaatcaacaaaagcttaatgccctaaaacaacaaaaatatattatctataggttagaagtttgacacaggtctcacagggccaaaaccaaggtgtcagcaggactgtgttcctttctggaggttccagggaagaatccatttccttaccttttctggcttctggagggcactcaattccttgacttgtgacccttcttccccctatcttcaaagccagtagttgcatctccctgaccattcatctgtagccacatcgccccgactctgaa

SEQ ID NO: 108815 - DNA, 2227 bp, Homo sapiens
taaaaataaaaataaaaaataaactttcttcccgtccctacatgatacatacagaacactgaataaatatggcaagagattaaatataaaagtatcaaccgcagcatactaactaaagatgtatattttgcttcaacagcttatcactgcaagtgtgtagacccttggctaactaaaaccaaaaaaacctgtccagtgtgcaagcaaaaagttgttccttctcaaggcgattcagactctgacacagacagtagtcaagaagaaaatgaagtgacagaacatacccctttactgagacctttagcttctgtcagtgcccagtcatttggggctttatcggaatcccgctcacatcagaacatgacagaatcttcagactatgaggaagacgacaatgaagatactgacagtagtgatgcagaaaatgaaattaatgaacatgatgtcgtggtccagttgcagcctaatggtgaacgggattacaacatagcaaatactgtttgactttcagaagatgattggtttatttccctttaaaatgattaggtatatactgtaatttgattttttgctcccttcaaagatttctgtagaaataacttattttttagtattctacagtttaatcaaattactgaaacaggacttttgatctggtatttatctgccaagaatatacttcattcactaataatagactggtgctgtaactcaagcatcaattcagctcttcttttggaatgaaagtatagccaaaacataaaaaaaaaaaaatcctcagtatagcttgcaattaagacctagatcacagtatttaagtgttttgcgttttatacatgaggtcagtgctacagccacctagcatgaactaacccagcttccacctccataaagttacctagagttgttgagttggaatatgttctggcatttacctgacctgccaatcattagggagaggcaacaaggtaattcagcctttcctcctatcagcacaaagaaactcaaagctgttttttccctttctgttccaaagcagtcttatcctgacaggagcggtctatactagtgcagatttcaacacttttttttaacgttttaattactatagtgttatgtagagatttgattgagcagctaatgtttctgaactttacttactaattttcagtgtccttaagggttctgtagtgttatcaaagcaaaaagaaaatgctgcataaaaataccaaacttcagcaactgttaatactcagatcatatacctcttaataaatagcatcttatgctaattagccctgctaaactatgtacagaggaaactgttcaagtattggatttgaaagtaagtgacttatgtttaacagaactaatgatgtattgaaacactgtattatgaaaagctaaattatacatcattgtaactatgtagaaagtgtagactaatgtataatcaaaatgctaaggatttttatatggccttgtatgaggggagtttgaatgttaataaacatgttttccactttaagatccagtaaatgtctgttctactgtagtattacttaccatattagccttatttatatatatcctataaagtgataatgattgaggtcagagaaatcacatcaccttaggactttatacaaggtaactgaccattcacatgcagttaggtaatatcccaaaaagtttagactgctgccaaaattattccaaaaataaacagtgtacattttggtaccctgttgtaaattatggtatatcgagggaaaatttcactttccaaattgccttttaaaaaataatgttcataatcaggaaaaaaataaataggtatttctactttggaaaataaacggttgaattcaacatcagctatctgatacctcatccctcttccccttttttataaaaaattaaagaaccacaggcctgagaaacaggacatcaaaggttaccacggtagttaagcagagtttggaatttgacataattgtatggccctaacctttttaaacctgcttggtcatttgcataattttcatttaacctaagagggtgtgaggagaaaacattgagctcagtatctggcacatcaatgcgcaataagtaatagccttcaaaataattattattaaataaaaacaaacctaaaacaatattttaaaataggaaaagggaaaaaagtaaaaagtcacggtaatggttaagtatgtattagatg

SEQ ID NO: 108816 - DNA, 1095 bp, Homo sapiens
ctggagtgtgtccagtttgttcttcataggaccaatttttatttgcagcttgagtttttatatgaagttgcattattgtggacttggctgtcttgtgatgaatttttttcatatgtattctgtgccatactattgttaaaatgaactgttgctattgtgagatggattttaactgacctattaagggtttctttcgaatggcactactttagggacattctagtatttgcttctattgtttgggccttgtggataatgtacagatttaaaaacaaatcttgttgctgatttgtccatttctttccctgcactttgttacatctgggatacagtctaactcatctgatttaatatgcatttaaaaaaatgccataactattaaacaccttgtttacagacagatgaaataaatttattccaaccaaatactctaggctcctgttgtttatatacattgtttatataaactgttaaaagttgatttttgacaaagtgggaatacacagaataggccaaagtctgctgcaagcataaaacttcagcaatattaggtgatggcctacttcaagtaatattacagataaaattagtgcctgggaatttctttttaatggactctgatctgttacacatagcttttagtcatttcaggctcatcttcaggagtatgtgagaagcaactgacttatctgctagaaaataagtattttcctcttcttgctggtttctagatgtgaaatctaatagtaaagggagtaccaagaagggtttctgcactattgtggatttttctgtattgaaatgtcatatgactttagatttggaagctgtgttggcaggctgaagtcagccagctggggccctcccacataagagcagaagacattccttaggcagcatataagataattgggatgcttttgcattttttggctttgtagtgacatgttgaccatggctgtgtaataggtttaaatccagaggccataaaatccctgatatatattgaagtttgataaatatgtaaatttagggctatttacataaatcattattaccaacaactgtcaagcggacgcttagagccaggggtgc

SEQ ID NO: 108817 - DNA, 1080 bp, Homo sapiens
ccgccggcccgaggtccgaagctcggcccgccaccgctcccggccggcgcctcccgcacgtggcggccgtgattgtcccggggcggtatccctccgcgcccccgcctcagtctccccccgcccttcccgggaccctccgtgcccgggcgccgcggaaggatcgcacgcacgcgcgcgcgcacgcccagccgtgtccgcggaaaacggagggcgctgcggtaaggagcagccgccacaggcacagccgcttcgcagcctcccgccgctggtttgtcagccccgcggctgcgggcggccgggcggccgagcgcgctctgaggttcgtccctcatcgctgaacccgcgtcctcccgccgcagctcctcggggaggggggcggtcggtgcctgcgcagagccgcctcctccccgcccccgccccgcctccccccgcgccgccgccgcccgctaccgccgccgccgccgctgcgcctgctgctcctcgccgtccgcgctgcagtgcgaagggctcgaagatggccggttggcagagctacgtggataacctgatgtgcgatggctgctgccaggaggccgccattgtcggctactgcgacgccaaatacgtctgggcagccacggccgggggcgtctttcagagcattacggtgaggaccagtggcggccggtaccctggtccctgcaccggagcggggtggccggccgcgggggcaccgcagcgcggggctggaacactgagggccgagcccgcaggtgtgctaggcagcgggcgccgaggatgcggctgccgggcgggcggggaggccgaggcccggggacgccccctcacccggggctgcgctgacaggctgggggcggcggccggactccttgctggccctggccgggcgcccccggcgttcccagcgtcggtccaggtgcccgggttgggggagggggcacgcaccggccagggcaaggggaggggttccttttttcctcctagtgcggttcccctaggttctcttgaagccctgaggtttgctatgcacgttctggggtggaagcgggggtcggggatccgggctggggcgcgcgggcc

SEQ ID NO: 108818 - DNA, 1006 bp, Homo sapiens
tttttgaacttgaagttgaattcccacattggttcctgtctgttcccaacaatctttctgcaccagaaaagtaagcatttggaattctttaatgtgctgggggtgctttctggaatggctggattcttggagattcgagcagcaaatggctcatacatatggtacagagatcggatcacacaagcccggagacagtgcagcttctccattgactctggtcgcagacgcaaaggcagggaagcatccagcgtgtagtgccttcggtacaacctggtccaaaaggcagcagtgcaagtgacagtccaggcattcttacaaatcagggaaaaattcacaatgtcctcaggacggatataggaggccagcaatagccaaatatccatgggatactcttctcctccagccccgtccagttcttctttgtgtctcttgcttttcttttttctggagacagttctctcatggatgttttcctcctgggcatccatctcatcactgctgtcgatgatgtcatagggctcaccagccccagaaagagcttcctctgcaggaacctgagaggcttccaagccacaaagagattttacttcctgccgaacagcgttggctacggctttcttgactcgtccagacctcacgaccgccagatccgagtcggcgtaatccgccacggtcactcggccggagcaggcgtcgtgggcccggaacttgagtcgctttcctctcttgggcatggcgaccgtatcggggcgaggcctgcctagcgggccgggcccccgggccatgtctccggccagagagccggccccggtagccgcaagccagctccgcccggctccgcggccatcccacaccctatcatggaactttaaatcacatgtttacacaaacacttggacaaaaatggttttagcagctttatttgtaataaccccaaactggtaaaaaactaaatgtccatcagcagaggtatggattagaaaattgtgatgtattcatataatgg

SEQ ID NO: 108819 - DNA, 1012 bp, Homo sapiens
tgtttcagttttggcaaataatgacatctgatatgaaaccatactctgagggtggcagaaaactcagtaaatatcctacctcctaaccctggaagaagaaatagacttcattagggggtggggtagaaagagagcattagattaaatttaactgtagatttgtttccctgccatctaattttaaacttcccaactcctagatttttctagaaggtactttacaaactagttcttggcctattagtgggttctgaaatcaatttagtggggcatgaccaataattttcttttgttttaaatttattattattaaagatatcaaatatataaaatattggaatagtataacaaactcccacgtgcctatcacccagtttgatatgatcaactcatgaccaatcttgtttcaccagtcgtctcacagattttgaagcaagctccagacctcatatcatttcatcagtaaatattttggtatgtatcactaaaagatgattagtaccattttgaaatgacatacagagaatagaaaatatcagagtgaaggttaagtaatattaaccttttgcttcagatgtgtgtgtgtacacatatgtgcacttgggtgagatgtgaaatgtatttcttacagtgagtcgcaaaagaaaagtgtgaaagtcacttttctaggagaaagtctagaggacttggtcctcaccagcaacctcagtagtgccctctaccccacccccacaaggcctatgtcagagcagaacctggctgaatccaataggagaaaaggattgggggaagtatgctggggtgtctggaaggtgacccagagagtatgatgtcctcatttcagagaacagaaaagttttccctagagagaatttgtgactgggtgaaaaagaaacagaataatataacaaatgtttgcaacctccccctttctttctaaggaggtcttacagcctggctttgtgttgctgcttggaataaaaaatgaattgaaggagacctagaaagctaa

SEQ ID NO: 108820 - DNA, 1083 bp, Homo sapiens
tacttaaaaaacaaagcaggagagttagttactcatttgaccagaatagtttgggtgcaaatctgttatactagagccatttcagaataagcacctaccttcttgacctgatggcttagaatttcactcagttctcacactgggtgactttaaattatctacgtcactgttgaccacggtggataattgtcattttcctaaatgtacatttgctctggtggtcaactactgcatattaaatccctagagaaaaggcgtgcactacagtcagagttgcttgaacatttaagatgataaagattgagcaaacccagtgactcaccttcgccgcgctaactcttcgctagctctccccctcaatacacgctcacaccctcctcaagatggcggcggcggcggcgggggactccgactcttgagacgcggatgcattctccgtggaagacccagtgcagaaggtgtggggcggcggcactgctggcggggagcgctgggaaggcgaggactaagacgagggcgtcaacgataactgggatgacgatcaagacttaaaaaaagaagaagcagaagtaaaaccggaggtaaaaagttcagaaaagaaaaaaacagcagagaagataaaagagaaagaacggcaacagaagaaaagcaagaagaaattaaaaagaggttaaaagaacctgaagaacctaaagtgctaacaccagaagaacaattagcagataaactggggctaaataaattacaggaagagtcagacctcgaattagcaaaggaaacttttggtgttaatagtacagtttatggaatagatgctatgaacccatcttcaagagatgattttacagagtttggaaagttactaaaagataaaattacacaaaatgaaaagtcactatatgatgtctttttttttttggaaatcttagttcgagatgtgtgtatttcattggaaattgataacttgaaaaagattaccaattcactgactgtactttgccgtaaaaacagaagcaagaaaaaccaaaaagaagaagaaaggtgtggttcctggagagggataaaagccaccatgaaagatga

SEQ ID NO: 108821 - DNA, 1051 bp, Homo sapiens
cactccggccagttcagaagttgccaaccagctgctgcctcatctccctatggcagccacctgacaccactttgggctttatgcctgtaccactggaactcagtggcaaaatcagatccaactcagcattatcatgggcactgcagaagtggtctgttctcaagttttagatgttcctttgtgtttggcgttccttcctcctggctgtctccctgacctactctctgagccggcctgtatcttctaacctattcattgaatacctaccacaacaaactagactctctgtgggggctctaagatgcacagggcatggttcctaccctcagggacttgaaaaaccagctggagagagagaggaatatgcacagcaatactaagcagcaacaacattctcttaaaggcacacattttttttttcaatgttctctggtctctccatgtgtctgtgtggatatgagtgccaaatcagaggtatgatgtgaaaaaatggtatttatctgtggaggttacagatcattgcttgtgaggttcatgggaaaagcgtggacaaatttggatagtgtatacatggctgggtgtatcaggaatacaaaacccccacaggctgggacagaatacctttcactacccagattcgtttcattcatataaattttacctgaggttagtttttaattttttgggtagctagactgtgggatcatgaaaggaatttccaggaaactaggtaaatgtaggtgagatatgaaacaaatgttttacttcagtgtaaacctaaacaatagagtcctaataaactctgtttttaggtttttgtccctcccctgcaaggtagcaaaggagtgaaaccaggaaaaggatgagtggaacccccacggcatcttccaggcctctggtttttcttcatccactgatctctccacagagaagaaattatatttaaggtcccagtgaaacttgaccctaactaaagcattctgttcagaagtttcaacccctaagggagaaaaagctgttccaaagggccgatcttactttttgttggaag

SEQ ID NO: 108822 - DNA, 1001 bp, Homo sapiens
gaccaggaacaacctttgttcgtcgttccatcacatggttcaataataaatattactactcatccagtgtacacataggatgtggtgaggcaaaaccctctcccagaggtcagagttcactcccttttccaggcagatcccttaatcaaatttattgtctttactttggggaaacacaattttcccatcaagtagaaggcaatcttggaacagcagattggggcctatttattacagtcgctttcaagttctcctttttttcttctgagtcccaaacagttcatggtcccctggtcttgattaaaccagtcttgtattttgaagttttgctttctctcttatctagcctcccctaagttccaaatgatctcactttgtagtttcattggctagagataccacaaaagtccgaagtcactgataatgtacttggaggcacaggcccattttatgagattctatcgttttggttcttcatgagaacacagtcttctttcaacacagggttgtagatccattactaggtgttagcagaattataaaatagtattgtgcaatacacaatataatcaatttaacacaaaatattgtattattttaaaaacacaatatactgtggttttgacttttttctttagaaaaataaaatagcccctttttttttttttagaaattcaaagtatatagaaaacatcacactctatgccttcgtatgcagaaaaaccataaagaaagaaaactggcctggcatggtggctcatgcctgtaatccctacactttgggaggccaaggtcggcagatcacctgaggttgggagttcaagaccagcctgaccaacatggagaaaccccatctctactaaagacacaaaattagccaggtgtggtggtgcatgcctgtaatcccagctagttgagagaccaaggcagaagaatcacttgaacagaggttgccccaagctgagattgtgccattgcactccagcctgggcaacaagagc

SEQ ID NO: 108823 - DNA, 1017 bp, Homo sapiens
aaattaacaaaaagattgaggtggtttaggttgatacattgaaaactcttatcttgagattttggttccattacctaatgcaaagttctatattggcttaattttgagatcatttataattaaagaaccgggccttatagtaatacatcttaatattatcacacctttaaaaggctgatggttgtatatgcaaaaagttctcaattagcattgcctattgactctacattattaattaccataaagtttatctttctggccattttcattagaaaggtttatggtcagttgttgagactcttcagattgattttgtgtaaactcgtggatgtgatggttgaaaatacagtccttaaatatgtagctacttttatagtgaactttacaaaacttgtttaaactacgtacacacttaacagtctcctgtaaatgagaggaggtgcaaaatattactggcccttttggaaaaggaacacagtacagatcactttccatagatagccaaccaatgtgaactctgtaggccgcattccaggaactcttatgaatggctgcaattgtgagctgtcatctgtggccaaaagactgttgaaaacctgattctaaggatcctttggtggcagatatttctatgtcttgttaatggttttatttgtgtggtttgctaatgatcactgataaaatattatacattgtgaatgttaagtggtgtgtcctggtatgtgccataaatacacattttgtttgtacatttatatatattttaaaccaaattctgctgctttttttacttgaagtttaagtgagaggattaagtaaatgtataccaggaggcagaactgtctcagtcttcgacctctgttgtatgaaagtctcactgaattgaagtctctaaagatggaaatttcttacttgaatctctgtttcttggaagctgacatttatctgttaaattgtgaaggtaattttgctcttgtaggtttacagttgatgtctgaatcacatactagatactat

SEQ ID NO: 108824 - DNA, 2358 bp, Homo sapiens
cctatctacacgtttaagagtgttcttactgaggagttagtagtaaaaatgtaaattcgtatatatgtgtcattattgtttagcataaaaactgatactgatgtattcatcagggattactgatggataccacatggattactaaaacatactttattcataaacgtggcttgaaataaaagaaatgacagatttccaaaaaggcttacgattttccaaactacccgaaattcctaaaccatgagctatatctgtaggagtgtggccttttatattcacagtgacacatactgtataaaattttatgtgcactaaatcatataggccaaacattggtaaatttttttagaaaacatgatggcttatatgtgtgtgaataatacagatttccagctgactattttagtaacacttgttttttctttttaggagatcacaacccctgaactaaatcacctttatgagaagtcattttatataggactggtggtaggggtatatatgtcctctacttcctgagaataaatataatgccaattcatttgttatttaagaatcctgggccaggagcggtagctcatgccttgtaatcctggcactttgagagaccaaggtcagaggattgcttgatgccaggagttggagaccagcctgggcaacatagcgaggctttgtctctacaaaacatttaaaaattagccaggtctggaggccaacacctatagtcttagctacttggggaggctgtaggaggaggattgcttgagcccaggagctggaggctacagtgagctatattataatattgcactgaagcctgggccacacagcaaggacctgtctgtaaaaagaaaaaaaataattctgatagcactaatttggaaatagtgaaatatggtactggatctatgaatctggtacttcctaattaggaatgggagtctatctttctctgcaccagaaaagatcagaagcagttatgaacaaatagcagccccaccaatcaagtagtagagaaacccaaataaatctgtttcctaataaaggaatggtagttaggaaagtataaaaggaatctgaccttcctttcctaaaatggcaggagttggggaaggggaagtgtagaatgatagcagataatcaaaatggaagaaagtacagtggagtggcatgaaatatagtctcaaaagaaataggaacacttgtgaatactgaggaatggtgttctaattctttctttgaagaattgttttagtccagtgtgtatttccttttctgaagattctgtttatttcttaattgcattactcgttaaatacttaaagtatgaggaaggagaggccttacaaaagcaggtctgtctggttaaacatagcctgaatgatattccgtaagtaattccttaaattggaaaagcagatttttggtaagaaatattaatcatatttaaggagtatgtgtagcaaaactcctaaattagaataaattatttaagtgtatggtttttctttatactaaaccagtgggcttgtgatttgaggctactgttttcgatggtattgtattgagtccacagagaatatgtatacctgaatcattggtataatgtctttcccacagcaattcttgaacatatcaaattactcgatatttgttatattcttaatctggcattgcttagggcaaaaactgggtgtccctcataaaaaggtaggaacagtagccagtttgcaccattcctatacattattccatgactttaggaagtatactttgaggtatactcttcagatttggtttaataatattaaaggtatattgatggattgtttcctgtatgaaagtattgcatgatttctgctcttaaatcaggtgaattaaatttcatctggattgcttatctcaaatttaaagcctcaaatcagacttaaataattagtatttagtatttagtttgattcctttgtacccaagctaatttttgtttaaaaagaaaaagtgcttccatccttttaagtagtacatttatttgtgatgttagtgaaagttctgcaggtaactgagttaattttattagtgtttgcctgggacatatacctattattagggtaggcaggacaaataagtaaagtctaaatgttaaattacttaaagcttcttttcccataagcctttcctaaaatttgtctaaagaatattgctttgtagaagatggagtttgtgattaatgtgtcaattattgtaaataatgatggcatagttttaaatgttagttttaggctgttcatcttattacacaagtatataatttaatctgaataaaggattcccaaaggtaagtgtaaagcctctagtttc

SEQ ID NO: 108825 - DNA, 1046 bp, Homo sapiens
ttggaaaatggtattgttaatttgacaagaaccagagtgaaggactttaaatgtcatggtaagaaatttcgatttttatagtaagttgctgttaaaggtatttctggaagcttttattgttaaaataatatatatcttgaaacgatttcagtatccttttagtgattattgcattttaaattataatcttatgataaagctgtgttaagggaataccttcagagcgctgagtcccaaaaatcagaattcttacctaatgaaatgtgctaaatattttggtacccctggctctaagtttaagtattctgtttccctcaatattaccttgataatgtcagaacatttggtacatgttgagatactctaccaaaatttgatttataggtagcataatttggaaactaaccttatattaaacacaaagcaagcttacttgtgtcaggtcctatgtatatagactttcatttgatctttccaacaatttgtaagaaagtggtttcttcccttccccctttcttatggattaaggaaactgagactcttaaaatttgagtcacctaggtattgggtgacaaagcctagactcatattcagacctttaacctaaagccagtgcttttgaatattcccagagttagaagtttgttttattacttggcacacaataagttaggaagaaggaagaactaccatagccactgatttgttgtattgtaaccctttacctaaaggatttttttaatcatttaaattccccagataataatactggagatggtgcttgttgatgttcttcatattgtatgtccctggtttctatttagagatctctgaagtcgaattttggcatagattaagagaaagaggtgtttgttgagtgctcaagtaccttatgctttaagctttgacaatttttgtagcttagttttgaggtatggaatgtttgtttttttctccctgttgtacttagttaccctacaaagatagtgtcttgcaaaaacaggtagacatgccacatgctttgagtcattttctgatgtagtatt

SEQ ID NO: 108826 - DNA, 2277 bp, Homo sapiens
ggctaagaattttaaaagttatgtggcaaagtttttttggcttccagatgtacaggttgaaggtgggggagactatggaagttgctgaggaggagggaacaggtttgtcaaaagtttaaatccccgtggaaccagtccctagatttgaggtgaatcatacttactgggagatagtccagaagagcccatcagttaagagtctatggtgaaagccctagggaatggtagaaatgaaagataattatgataaataggcttttacccctaaagtaacattgtaccaatgctagaatcagaaagctgccaaacaattgcagcgccattttttgccctagacgaggaaaaaacacatataaataaatggattttgaaggtggaaatgtgtcaagtccaacccaggaaagaattcttcattgttaatcaaacctttgctacttttaacagagcctaagaaaagtttttatattgtgaagatatagcttaacttagtttatatgaatacctaagaacagccttgttaaactgctaaacaagatagatatttgtaaaggcatttgatatagaagagtgttgattaggctatgaatttgtcacatttatatgcacgcacacaaaattggatgctacttagtatttagtttcatctgccttacctctttattttataactgtgatcctgaattattgttgaagtctgctggattttgtccagtttttaatttcttctaaagtgttgttttaagcaaacttatgtggttttaaaatctttttattattaaaagttacactgtattagaaatctaaaatcttccatcttcttttgaaaagtagtgattatactgtacgttctcaacctcatttccatttgattctcggatctcacaggaatccttcaactgctttctaccaagcgttccatttgaacacgttaaaggaatcaaagagcctctgggataggtatgaatacttacatatggaatgcatacatgcaaaactgtatgcatgaattgctttgcactgtactggtttctcattaaaactgatctttgttattttaggggggaaatcacatggtatctagcatgggacaaagcagcaaaataaaccaaaaggacaatctctattttatatagaaaataaacatacttttctgcatcctgtgtactttaagtatatctatatttttgaagggttcatactgtgttgaatttttcttatgaaatagtcacttccccagtgtattttaatgcaaatgcatattctataaaataaactatattttaatttttgtgctattttatgttttttttctgtaaaagccatagtgattcaaagcaaaatgttatttcaaattatgaaattggaggaggaacaagaccaaggtatcaaagtaatcattgtttaatttttggcaagaaactttaacttcaagtttgtttgctagaattcactaggtctgcattactgatttgtaagcccctaaaacagtttgctttcttacagaaatgttgtatagattttactgttaacttttaaaaatacagaatgaagtcttggagttcttttatggcaaaagatactttggtttatctttctgcttaacacacattttaagtagtgtatgctctgttcaatcgttttgctgaatatttattagcattccatcactttgtgtttaattaatagaagttgagttcaaacaatgtttttaaaattcacacaaagctcgttagattcttttaactctgcctggcaacgcatttgtgtcttctggcatagttttggataacactcatgaactcaactccatctctttcattagaaaagagtattgctaagtgcatgtacatgtcatattaagacatgatacacattgcctagaaatgctaaaacagtcttaattcttcggcttgatttgcttgtgtgtgtcactctagggaaattttctaacagtatctttttgatggtgtgttccagaaatctttttaaatagttacttttagaacaggaagttttaaaatttgtagtaccatgtttataaaataaatttttaaatagttctgtagccatttaaattaatacataaatgtaaattgtgagatgagataaacatgaaggtttaatctttcaaatagttttccaaatgtagccagaatgtgagtactttggggtatgctttatagtttctcttagaaaaaggaaaaatagcactctgtttagaaatgtaataagagtagctttcaaaagtatgatgatttatttcaaatagctaacttt

SEQ ID NO: 108827 - DNA, 1029 bp, Homo sapiens
tccctttttctgtaggtgccatcatggtttctgtcttctctgtttgccatttgcagagccctcagggaatcaatcagctgaaccatcttcaaatgtagggacagtagatactgataacgcaaaaataatccaaccctttctgcagtagcccaaactgttttgagttgactctttattaaaataaatactataacttacatagttagctttctgggagattatcttactatggaggagttaatttttcctgagatcctaagcctactggcatttgagaatagtaactttaaaatttgacttcctattttctaaagaacagttttccaaagttaatacttggcattgctttgttaaattggcagaattagtttagaaacctatcctgatgatcactggggagcggcaagcaggttctcattgggagtcctttgtttacaaaagctcagcgtaagggtttatagcaaacaattttaccctcttctaaataccaggtcactaaagtaaaggagtactaaggggaagaaacttcagctagactaaaggaagaaatcaggtagcttgtaaggctttaacctcatcgataagcacttgcagggcttttgtcttcattaagaaatgcataaatgtacttaaaacaagtgagagaacagttgctaggtgtacatccccttgagtctgcttgtctgtccttatgatagcaccagtatttagagagaagttaataaggaaagtagtagacatgggttattaacttaaaatgaaagtctagtaagtttatcctaaatttttttactagataattgatgatctctcaaattgttttctacagtgattattcacttattacctctaattttaaaattattggataaaaaaagtcttcttatttaaatagcctcaagtattttgtgtagggaacgccttccagtatttcctatcattgtttcctatgagatttttttttgaagctaggaataaattagaactaagctgtttatgtcataaataccattggtaccatatgagaca

SEQ ID NO: 108828 - DNA, 1107 bp, Homo sapiens
taacaatacgtgtttgtccccaattatagttacttgctatttaaggcattttcctgttaccatcttcagtggtcttagatcaccttttccaaccaaaagattctaaagccttaaaaatctcacttttttagagtaactcagaatgaagctgagggaaaataccaggaacgtttgcaattacctgactcagcaaaagtttgttctcctataattaaatactagaagaaacaataagatttagtaactgctttcagtgagcttggtcttaatatggaaaatggtaaatacattatcacatgattgaaagtaataactcatataaaatgtaagcacttcatatctctcaagtacagctggagggattggtcaaagcttcttcaggaggtggcttttgagttggaaactgaaaggtgggtagaatttggtcaagcagaattaaagaactgaggggaagggaacattccagttagaggaaatattgtgcaccactatggaagtactggccttatatgataaggataaagttaaatttggtaggtgtataacatttgaagacaggagaggagagcagttagattagagacagagattctagaaaggtactgaagcctgaattaggcaatggggatgagataggaattacaggattttacaactgattggtcatgataggggagcagtcaaacttgactccaaagtgccaaacctaattgactgagggaatgctggtactgttagaaagtattagtgaaagaattagtttgggaaggagaaagtagtgatgaggtttttgtttttagctgttttttggatgagttgataagctggtacaaagtcaaggtgaaaatatttggggtgcagctgaggctgcagacttgcaggttggtatagaaattaaagctagttgagatttaagaatgttttattagagttcaagctttaggaaaggccaagattgccaaggattagagtagggtaaagggtcaagccaggaccttaggcaataccacctgcatttagataacagaaggaagtctgaagaggatgattggttttagagattagaccattctgaggatattattttctaatcaaaaagaagagaaa

SEQ ID NO: 108829 - DNA, 2140 bp, Homo sapiens
ttcttgccattatgttgtctattttcaaaattgggggtagtagagacagatgaagatttagatatagaaatggaattctgtcttaagcacttaaatgatcggtatggattgttactgatccagccacccatgctataagtctagaaactcagccaggcatggtggctcatgcctgtaatcccagcattttgggaggccgaggtaggcagatcacgaggtcagagatcgagaccatcctggctaacacagtgaaaccccgtctctactaaaaatacaaaaaaaaaaaaattagccaggcgtggtggcacgtgcctgtaatcccacctactcgggaggctgaggcaggagaattgcttgaacccaggaggtggaggttgtagtgagctgagatcgcaccactgcactccagcctgggcggcagagcgggactccgtctcaaaataaataaataaataaataaaataaaataaaataagaaactcatatacatggatgtggaccaaacaatataactcaaatgcctttctacaggactacaaagctgtctgtatcaggttatggtgttaaatcataatttctggatcatgatcttaaacctttaattggttccatttctactttactctttactaacaagtatcctgatggcctgaaaatccatgttgaaatttgaagtttgaattttccagatcaaatatgaaatttattttcattttttaaagtacaaaatatcagttgtataatcatggtaaaacataaaattttgctataaaagatttttaaaggctatttgattaaaacatttatttacttaaactctttgctagaattttttttagaattcagcatcggaggaggaatgtgacataataatgatcgaaagccgaaagtttaaaagttgtgatgccctcacatggttggagggttattctagcttctaaggactgaatgttgtccacaagagtgtcatcaggtcataaattggtaagacttaatggcttagattttatgtattatacctgatgttattgtattgagatgaatatttatgaacaaaatgagcacattgtgtaagagtatagtattaaatataagttaaaacttggaattttaaatacttggagtatgtaagcctttcgaagtctcttgaggctgaaggccgtatctttgcagtggtgtttagtaaatacatcagtttaaaaaaagaaagtgaaatcctgtattatagtaagattattaaaatattgctattgcatctgctgtagatgcctacaatatagtgaagaacccaaatactttttaggtgttataccaggagatatttgagaaataatatattcatcttttctttaaaaaaaatccattttcttaataacatacagcttaattttattgctttggagattttatttcttaataaaagacatgtttcctctaaatgtctaaaataaagccaagaaaattttttcaattcttacattgagaatacctaagatgccaatatcatatgaaaatgatatattagaagtcattgcacattttttatattccccgaaaattaattttctctcagtattctgcttagaaaaaaactactttgttttgtgcagtttcttattttgctttgttttacacagctgtattttgtagggggaccattggaaggatagagtttagctcaggataagaccttatatcttttaatctcaagattatagtattttgcagatgaagaaaaggagtctggattatttgtccaaggtgatataattgtagaattcatattttcattaaagtgtggtatgcatatcctgcatgtcagtcaagaattatttgaaattatttattttccaaaaaagccagaaggcatgggttgatatcagctaaacaggccactatatatattccaactttatccttaaccagagatatgttattttatcctttgcccattctgccttttgaataatattctaaattgtttctgatatagtattccatgacttcattacattctgtaagcttaagtcccttaagccagtaattgcaatcaatagtagtctggaaggaaatacaacaaactaattaagttatctcttattccgtatacttttctattttctttattttctataatcta

SEQ ID NO: 108830 - DNA, 1642 bp, Homo sapiens
taacctggaaattcatagagcctagcccttttctgttactcaaacttgaacccgtttttctatttacatcagttgcctatattacatagaaactggcgcactttccttctttctcagtaggtaacaaccagatgcaaggaacatcaaaaacctacctttattggggagaaaaaaattctcgaggtctgcccatattttactgtgttccagcgatacccttaattagtttctaatagtttaaatagttggttaatttcttagatctttgtcctggcatgatgagctcaatataacatctgtttataccaaacttataaaatataattagataatatattgtaagttgtattctgtctttttcttcaagtaatatgtttactatcaattatatgcagagtagtgttgtaataagtagaccctggagatggacagtttctgcttttaaggtttaattcaagagaaaggaacatttgataaagacaaaaaaattatggacgaatcagagaagtggagcctgttggcaagaaaggaagaaggctaaggaaaatgtaggtggagcattccatctcaagtgacagtcttatctctggaatctaaatcgatttaacaaatttcaggtcatgatgtaagtgtagaattcatcataaaagatttcacacaaactattgtaaaattctgtcattcaccatgtctaaattattagaattattacctaaaagaattcaaggacatgaatctagactgaaatgataaaaacttagatgttaaactttttgtctctgaaaatgtgcctacttgagtgcagttttgcttgagtgaaaaaaacctaatgaccctttagattttatagtagtgctattttttactttatgtcagaatccctttgaataaggtaattctaaagcagtgattctcagctagggtaataatttgtttaaaagcaaacaacacgttataccacttttcttatttgcttttagtaatatttattgttgaattttcatataacactactaaaggaagacctgggatatttttaaatactctttttggaaatttttatttgaattaaattagttatatttcagtgggctttggaaaaatttcccacagtaagttaagattattttactctaaataatgaaacatcgagatcccaaagaagatccgtaagaatgttattaatgtccagtccacgggaatcctgtgtttaatatgccttgtacaggagaatcgcttgaacccaggaggcggaggttgcactgagcagagatcgcgccattgcactccagcctgggtgacaagagcaagactctgtctcaaaaataataataataataataataataataataataataataataagccttgtaaatgtaaatctcaagtcaaacaatttttattaacatatactttgtggctgcattaaatctttaacatttaattgaatacaaaaaatcaattaaggaataactaggattttattttgggtgaaacataaatataaaacctgtttcttaatactaatcataattgatttttattcatgtttcactgccttgggagattaactcttatttaattttcccaagatacactgggaaagtagaccttataaagtgtcaaagtccaaattgat

SEQ ID NO: 108831 - DNA, 1326 bp, Homo sapiens
ttgttgaatatagtaccttatcttgcagaatgaaatagttgctagagaaaatagagttggcacctcttccctcctttctccctttcctattttctgtcattgcttttcctgtctgccatttgttcatgtctggagtttacactgtaaaagataactccttcatgagtcattttcattttggaacatgtttttcattgttcttcaaaatgtagtagaagtactcttgcttctatctctgtcctgcatctgcctgccttcccaaacagccactttcttaatgtgtgtatatccttctttatgtgtatataagcaaatcaatgtatattatcttctttaatgtaaattataatgtattgtgcacacatctgtacctttacttttaaagatctccagaatacattgttcccatctcagtactagaaaagtatctttgtggttttttaatagatgcatactatttaattgaatggatggctacaccatgattcatttaaccagaagcattgctgttataaacagtgttgtaatgagtagccttgttaacattatttgctatgtatataaaatatctagaggataaattccaagatgaatgattgctggctcagagagtgaataattaaggggaggtcgggagaggagagaaaaggagagaaatctgttttggaaaatagtattacattatagttttaatttgtatttttattttatgattcagatgttgagtattttttcatgtctttcttgttaatgttcagtgtgaattctccccatttttctattgggcatctggtcttaacagattttaggaaaatttattagagactttttaactttaaaaaaaaattagacatgcagttacatagtcctttcccaccaaagtattaaagaaattctaattaaatgtgtttatttaaagttcttagtacagatgataagactgactctagacaaagggggtctaaggtaggagatggacttcatatagattgcatgctctttaatctacgctttactggctagccatttgactgaaattaacaagataaatataaaatatgctgagggcattggtgaacaaggtttttgtagaagatgctgacaataaatatcaatatataaatatttaactgagtttttaatagttccttggtaaaggcattcatcacaccattgcgggactggctacttgagaaaaagtaacacttaagttttgtaagtagaaattttacctgcttgctcaggatgaataatagctttaaaataacttattttgtgttactgctaataataatctctatggggcattttgggtttttttttaat

SEQ ID NO: 108832 - DNA, 1055 bp, Homo sapiens
ttgctttcttttctcttttctttcttttctttcatgggttctcactatgttgcccaggctgaatttttttattttaaataagtagtcaccatgtctctgtccacattactacagataaagaaaaaagttggtttctcatagttttttaaaaatagagatcaaggctgggcgtggtggctcacgcctgtaatcccagcactttgggaggcgaaggcaggcagatcatctgaggtcgggagttcgagaccagcctgaccaacatagagaaaccccgtctccactaaaaatacaaaattagcagggcatggtggcacatacctgtaatcccagctactcgggaggccgaggcaggagactcgcttgaacccgggaggaagaagttgcggtgagctgagatcgcgccatttcaccccagcctgggcaacgagagtgaaactctgtctcaaaaaaaaaaaagagagagagattaaattagattacctttttctttagtgattttaacttgtgacagagttggaaattcttcatccatcctcttgctttctcagtaatgttgcaagtaatctcatggtaagagtaaggaaacctaggaggaaaagctgtggtggagagccagttaggatcaattaaaagatgaacagcatggaaagccaacctgccttactgtagcattgatactctgagttatactttttctgtgagtgtaagtataattagctttaaacactgaattcaagctcatttagttattttggagcagcaattccagtaaataaatattttcttgtaggtctttcttactttccacagctctatatttctgttcattctctccatatccacaatttttaatgcatctgtaaatgctaataaatgtttgatttttattctaagaatgattcatagtaaatagaaagtttatttttaaaaattatcttttgactttatttagcatttccagtttaccataatagtttaaaaaagaaaattctgaactcatttttccctcatgcttctgtagcagtaattgtaacacttgatttaaaattgactta

SEQ ID NO: 108833 - DNA, 1136 bp, Homo sapiens
acaggattgcatttaatagataaaacgtttaggcaataattgaacaaaagaatcctggcatatttctaacactaatggcaatttacttatggtatttattttcagtagtaaagacccagcttgaatgtaaattttgtatagtgtaagtatgaagaacatagtgcaactgtacaggtagtcaccagttattgtgatatgataaataattgggctattttgatgaagaaaactttgttcatttgtttctactttctaagagaaattgccacgattcctctgcttttcaacatttcgtatgacttttttttcgggtgggaataaaaagctgtgaaattgttcaacctactttgtaaccaaagaagcaaagctgtgtaatggagtttggtttttttttgttgtttttttttttttgtctttttttttttttataatgcacattctttatgtatttttatttagtgttttctcagtcacaattttctttactgtctagcatgatctgcatgacctataatctttgaaccactttcgtacctcatgtttttatccagcactcttattgtaatatgtactagtctgtgaacaatgtcaaataaaagagaacgaacaggtagtttggtggagctgagctagtgtacaatacactagttgtaaaaaaaaaaaaaaaaaaaagtgagccatcttttgttcatttaaaatggtgttttgaatttcgtatgcagaaaacgttttgttacattgcagattttaatgtatttaataaatgcaacatgcagattaagtgcagtgtatactgagtatttaaattaaaatgtacatttcataaatacagtttcaaaagaaagcatcattttgtgtatactaacacattaagtgtatgtcagaaattgatgtataaatatatattttaacattttctgaaattaaactgcagttttgttgaaatatttggctctatatgtgttcaaaatttgactagatttgtattttcacagttcaaaatactccttaaagacctgttaataatgacttactgatagttcttaaattttcaaagtaaaacaatttaaagaatgcaaaaatagtgagcaatatttgtactcaatattcatattatgttagtgatacttaagtag

SEQ ID NO: 108834 - DNA, 2098 bp, Homo sapiens
tagattttgttaacccaaatgtataactgcagttagcttaaattacaatttgaagtcttgtggtttttatatagctaggcactttattactcttttgaactgaaagcacactcccttataggttcatgtaactgtcctgtaataaggtgcttataaatggaacaactacacagcctagttttgccacaacctttagcatctaaaaagttttaaaagcttctaaatgtctaatataaagggagatgcttatagccacaacatctattttaccaatattgtttccattacactaccttggattttgcatgagtgagtatagtaacccaagatgccataaaaaaaaaacttgatcgttttctgacttaatcagttactgtggtttcactaaaagctaccgtggtggagtgaagtcagtcagggaaggtttgtttatgttacatttatttcaccagaactattttaatatatcaaaggggtttactatgccaaacaaaattctagggaaaaatactgctaaaaatggatgcctcatcagaacatgctgttgagtccaatgtgccataagacattttagcatgttaaatagcacttttaatagcaaaaaaaggcacatcaactgcgaagttatccttagtttgcaaatgctttttctagattaatgatttttcaatcattagggtactagacacatcagcctaaagtggcatctggaattgaatggatttactgataatgatcagtctttagtcttccctttgttatatgactttataggttatgattgatcaaatttacgttttactaatggtaagggtgagggtcatagggcaggttttgggttttctagtactgttgaaaactgcaagtattggctatttgtatacttagccataacttggtgaaaaaaaacctgagcagtgtctatgtattaatgcgttggaaagaaagctgcttgtgtttgctttgttaattgcctcaggatatttcttttaaaataagctgttttaagaggaacagaagggaaatctgctacctagtctatacacagcgtgaacctcacagggggcttctgataccctcaaacatggagaacagtaagggagcagagtggttaaggactttcaggaacttaactattctggaataaggaatgaatcaactgaccttgggccagcaggtttttaactaaattgttacttgcctttctcacccagttaatcagtctctgtacttgtttccctttttgaaacaagtgtcttggttaactaattctgttttatggttgtgctaaattcatagcaggtgccttattctttgcttttagtcaaaccattccatatcagaattttccttggtttactatagatatttggctttaagttgttgtttgtgttttttaatgtacaatgttctgataaatttgactgttaaattgctatagctagcaatcattttacatatgtaaaattgcattccctttgtatttcatgtgtaattcaccaattaagtgcagtttatattcaggttggattatgcatgtttaggtaaacgaaagctgtgtcttacttgatttattctttaaaaataaagttccctgaatatttgatgcttttcttctaaacggaaatgattttacagttatctgagtgtaccttttatagttagtagaaaatgattttaaagaatgtttagtattgtacttaaatggtatgcagaggcacagatgtaaggtttataactggaaataggtggtaagaaaaatatatagaaagcacaatgatttgaatatttttccacttaggatttcctaatctccttgtcatccaattcaagctcaagatgaagcacaattctttgatctccctttgccagttgaattttatagatcatctaatgttgagcacagtatgagaataaatattggggttgtcaacattactcagttactctttgtggtttaactctaacatttcaacaagttgtcaattaattgtatctgttgggttgtatataatgttgctcaaaataattaagtggacttccaaaaataagatttccattgtaacaggatgcattgtgatgggctttgacttacatt

SEQ ID NO: 108835 - DNA, 1039 bp, Homo sapiens
accctggttattggctctcttcatttttgttgtctgtggttctggtaagtggcttgggggctcccatcaggtagagtcttgggttgaaaggatttgggatgacgtggtgaccggtcagtagtgagtcctacctgcgtagttctcaacccacctgccgaggactccacataattctgtttcgtctgaaccaaattacttgttccacatatgcacagagggtggtgctccagaaacttctcccagcttaatttgtactcacaggagatcaaaaaggaggtcaggtcttggtaatgatccagttggaataaatgttaagaccggacaaaacctaacgaaatgagaatttagaatgttttgtaactccattatcagtctttgcaaagaaaattataaatatgtactatagatgttagaacttgatttaacatataccagaatctaatgtcttaatgtcaaaattgagtatattttataaaataaagcttgtgcaaagaattgattcactatagaggaaattacctgattggcattttaatgtgtgagtcaaatgtttttaggttaataaaagaaacgtttgatacatggtttaaaaaaaaagtgtcggggtagcctgctgtcccctaagagtaacagacacttgcctttgcaaatagattacaaaaaaaaggtctttcctctcttcatttatcattttaatatgcaagctgttaatattgaagtagatgtttgttttccacattctaaaattactgagatttctgtttaacgtttcactttgcctttcttcttcacttaccaattggaagctttcctgataaatggatgagagccaagcagtttatataacctgaagatgattgaatttcagctttgtgagaatgaggaaacatgcatgtgttacaggccaggccttaaaaggatgcttataaaccaaaataattctatgctggaaaaacctgttggctttggtgctttaagttctttgtaaaatgattacttatctgcaagttctcttggatacttagacataaagttcagc

SEQ ID NO: 108836 - DNA, 1068 bp, Homo sapiens
tgtctcattccacttgttctcttagtttgataaattgtgaatatattaatattgccttatatttctaaaaactttaaacatatactttttttattactttatataaagcatacagctatcctgtgttctgatatttccattttacagattaggtcacagattcagaggtggtaacgtatccaaggttccacaggcagttataaacttaggtcaggctctgaattcatgtcctctttaccacaagacagctgcctttctttcagtggtgacaaagtttcgagttttatttaaaaagttacgtatttctcagcaattatatgattttatgtaacagagtaagaaaatatgcccttttgttgctaatattctatagttcaatgaaatatttaatgatttcattaatattttgactaaagctgcttttttaaaaaacacatttgtgttaactgagtctttattaacaaagtaattgtggttctttttattttacttctttagtccgaggatcagaaggactgtacatggtgaatggaccaccacattttacagaaagcacagtgtttccaaggtatgatttattttgttaagtaatgttatagggaacatacagtacaatctaaaatggttttgttggtggtgtattttgaacaagaaaggaaaagaacagatgaactcatttttattgtataatatttaccgaagatgaaaagaatacatattctctatcaaggaaaatgatcttcagatctgaaaatagtaacttaagcctatttataaggtagggggaacaatactaagaaaaagtgtagacactagtgtaattgaatacaagcctttattttacaagagttgtatcttaaggaatgagaaaaacttgcaaatttgatagccaaatcatggccagtaatcttagtgaaatcataatgaaaaagatattaaaaagggaggacatatatatgcacatagtatatagctagctagattaatttttttttccccaaagaaacaatggacaagtaaaccaaaaactagttaaaaatgcttatctatagggggagagagttacag

SEQ ID NO: 108837 - DNA, 1026 bp, Homo sapiens
agttctcatctcatgttgtgactacactaatgtacatctacatgtgcacagatacaagtttctatttgggtattcattatcactgggtgatgtattcatagtaaacatcttcacttcggagatacagtacttagagttttgaatacttgatagaatattcccaagtagttaggtgaagagcctcttatttttgttatactttctatctctacacatgagaaattgatggaaggcctaccacacaaacttattcacccaaaagggctctatttttttcttaaaatccatctgttagtatgaaatcattttccagcttactttacagtgatagcattgcattttaaagtattttggcagatgaaagcattttggaattttctgaaatttgtgcaagttcttagttattaaattgatagtgaaatggttgactttataatcagatttttttgaaaagtattaatgcttattcatttaaaccttttttttttgtcattttcagggaatctgggaagaattgcaaagtctgtatctttagtaaggatgggaccttgtttgcctggggcaatggagaaaagttagtgttcatttacataacatattttgtgtgtcacgaatataaacacaactggcattatttgaataacagatatttgagtgtcattaataaaatccgtcttttaatgtcatgatgtagtgagatattacctctcgttacacaaaataccttcaaagttgttcatttctatgtatatgccatgacttgtttatctagttacttagaattaaaaattaatatatgaaaaatataatttaatgctaaagaagttgagttgttttaaacagtgctctaagttattggttggagtttcctaaatctgcagtaacactgagaaaataattctctttactcatttaatcctagatgtagatacttttttacctttgctgttaaattactaacaactgcctgcagttattattattagtcttatgtatataaaagtgtatgttattcaaaagaacgtt

SEQ ID NO: 108838 - DNA, 1006 bp, Homo sapiens
ctagatttcatgtattgattgtggtctttgttcagtttctggttaactaagtcagaaaccgttactgattcttccttaaatatgttttttcttaattaaaataaacatccttcattaaactaagaataactcttaaagaccatcaattctgagtaggctccagttgcaaagcaaagaaaaaaataaaggttaacaacagcaacaagaagaaaacaagaaagcgtcttgtaattctaaaataggttatttgcagcaagttgtaaagatttccatgttaggtgtgtgtgtttaaatactatgtggtaatttttcattcttttcagtgactgcttatcttaacctcagttatcttcctcaaacctgagtagaacaaagttacttacagcaacttctggaataagatggagagtcttttttttttttttttttttgttaaacaccccagagtgtttagtacataacagtaagtcaggccaaactgatttcaaagcttggctgtggcatttatcaatagtatgatcttgagcaaatcgtcaaatcattttatttttctaagcctaaatttcagcacttgtaaaacagaaatgatgacatttgtaagattgttgtaaggattaaatgagaaaatgtacataaagtggttaggtacatagaaaacatcccaaaatggaactgcttttatcatacaattattgtcatttttgtcattgtaccataataattcttagaatcatatcttttagagattgctcttgagattgtagtagacatcaaatgtctccttactgatttccctagctgctatagcttctatttatttaaaaaaaattttttttttaattgagatgggatcttgctatgttgcccgggctggttttgaactcctgggctcaagcagtcctcccacctcagcctcccaacatgctgggattacaggtgtgagccactgcacctggcccatttattcaaatttaaaagtatacttttgcgggccggacacggtggc

SEQ ID NO: 108839 - DNA, 1026 bp, Homo sapiens
gggatgtgtatggtagagtcgaaaatgttgtgccattttccaaaatatttaaagagatacttaatgataatacattatatgaacatttcatataactgtgtttcatgtaataaaatagttataggggcttattttaagaaacattttctaataatgttgatatttttgaataagtaaatgataataggtcattattggcttacaaacctcctgagtttttgttctttcaagaggtatgaactctcatgaatctaatttttccaagtaaatgaaagagatactgagaatcagttgagaatcatgagtgggttatgtaacctttcatttatttatttatttattttggtaacacagaggcaagctttcatgatttaacccatttgatagtaatccatatcaaacttaataaataagaaaaataatccctttacaaatgttacaaggcaattactgaaaaaaagaaattttattgcagcttctaaagatggcacagctgggatacccaacctacaactttatgatgtgaaaactgggacatgtttgaaatctttcatccagaaaaaaatgcaaaattggtaaataaatggcttaaaatactaattttttacatagtatttttaatgtcatcactgtataatatttgttttcctgatattgatttaaaaaataacttatcagacaaaaatctacatttttaaggattttgtatgtaggaatgtaatagagcaaaaacttgatccttctttcctttagtattaagtggaaaggaacaatgttttcttttttttgtttgtttgagagggagtctcgctctgtcacccaggctggagtgcaatggcctgatcttggctcacggcaacctctgccttctaggttcaagcaatttcacctgcctcagcctcccaagtagctgggactacaggcacgtgccaccatgcctggctaatttttgtatttttagtagagatggggtttcaccatgttggccaggctggtcttgaactcctgacctcaggtgatccacct

SEQ ID NO: 108840 - DNA, 1460 bp, Homo sapiens
catctttgatcaattaatccttagtgacttctttgctatatggtaagacaagtcattctaggattaatttgtacatttctaaccattacacctagaactggctaatttttcaggaaaccctgtcgcctttttggtgtgctacttttgaatagctattgatctctgaaattgaacaaagaaaaagtattagctcttgatctcattgaaggaaacattaaaaggtaatagggtttcttgaaaaattggctgagtctagcaaaaaaaaaggtatttaggttctagagattcttatttgctgttgcattgatcattgtttctaggccttttttttctatttaaaagatgtaacaatcataattttatttaaattaaagttttatacgtatagttttatttaaattgaagactacaaggtttttatttaacttctatcttatttgtattgccttctgtcaccaccaagaatcttgttactctggaataccagggatgataatttgagaatatcacattcacataagtattcatttggtttgttccacattatccacaaggtattcttacaatcttaataccaaaaagtaacactgttactgaaaataattttttaaaaagggtttgcagttcttttgtctttagagcatcccattactgattgtacagttttgagtatatcatagttagaataggaattggtaactttgttcacacgtaccaaagatggcatgtaggctgattttgagcagcatccaatcagtatagttatgcattttattttcctgtgtttgaggcgcactgtcacctcactgtttctgggttagcttgctttcttgtcttattctcctctttgtgagcatgtcaaatgaagagggatcaccactttgacagtttggtgtgctgcttttgaaaagccattgatctctgaaattgaacaaagaaagtatattagctcttgatctaattaactagagtggcagttttattaataatagcatggctcagactgcctggaatagagtaagctcttaatatcagccattgttactgtggttgtgatcatcattatcatgcatctgtttatcacattaagttacagaatttccatatccacattctgcagtagcaggccaaggttgatcttttccttctaataggctctaagaccactttatttcagcgattgaagagaggataactgacatttatcaaatacctaccatgtgcctggcactcttctcttaaaaccaattactgagagttgggtggtataatcccattacttgcctaagctcacactgcaagtaaatgactgagtagaaattgaagcctacatttgtcttgctcctaccccatgctttttccactgtgttactgtatctcaccaggaggagactacagtgagtagtattggtgtgtagttatagtgatctttgataatgtattcagagtttaacatgttc

SEQ ID NO: 108841 - DNA, 1001 bp, Homo sapiens
tagtttgtattttgattaccatctgcacgtattaccccttccaaaaacaaatttattaatagtaacaaactattactataaggccatattaccaaaatgtttaaaagaaattaagattcaataggggttcttaaataaatttatgattatacattaatccccctagtatataatgtaagagtattttaatgttaacattccttgaaatttttttatctgtttgatgtgtttgtgagtactatatgatggtaacttttgctaacaaatatttatatagttctttattgctaatttgggctttatattctttttctagcaaaaaatggccccatttatgatgtagtttggaattctagttctactgagttttgtgctgtatatggttttatgcctgccaaagcgacaattttcaacttgaaatgtgatcctgtatttgactttggaactggtcctcgtaatgcagcctactatagccctcatggacatatattagtattagctggatttggaaatctgaggggacaaatggaagtgtgggatgtgaaaaactacaaacttatttctaaaccggtggcttctgattctacatattttgcttggtgcccggatggtgagcatattttaacagctacatgtgctcccaggttacgggttaataatggatacaaaatttggcattatactggctctatcttgcacaagtatgatgtgccatcaaatgcagaattatggcaggtttcttggcagccatttttggatggaatatttccagcaaaaacaataacttaccaagcagttccaagtgaagtacccaatgaggaacctaaagttgcaacagcttatagacccccagctttaagaaataaaccaatcaccaattccaaattggtaagtaaagttttactacttttatagaaaaaagtttattttgggccaggagtggtggttcacatccgtaatcccagcacttcgggaggccgaggcgggaggatcacttgagg

SEQ ID NO: 108842 - DNA, 1225 bp, Homo sapiens
accatatgccatattctttttaatgtttttacttttaaatagctttactcttaaatagaagagatatggtattgatcatgtgaatgaaaaagtcaatattcctaagaggcatactatgttattactgctgaaaataatagcaatttgttatattagacaaatataagattctctcaagttgtactgccctgtttgccttttccctcctcctgtcaacatgtttaagcccgaatatagaattgaaaatttttggggcccaaagggatgcagtaagacagtgtctgttcttttcaccctcgattcataccagataacaaattagaatttgtttctaacctgtattttaaaatctgtgtttactagtgaacataataaattgtcagaaataccattttttctgtattattttggttacatatccagtaattatttcataataacttcattgtttcaaacttttctagttggagaaaattcagaaagaaacagcccttctccaggagctggaagatttggaattgggtatttaaagattcacggaaagcaagttgatgaccagaaatcagtgcaaacacatcttctgttaaacccattggtatacacagaatattcctgtgcccacacttaatgtcaatctataattttaaccatttatccaagattctactaagtgtaaaattatttaataatgtctattaaattgatatttatatcttgcatcctatatcatgtcaatatgtgatatagaaaagagatacgtgaattttttagctaagcttgacagattgaaagacaagtgtcatttttttttgtagagggtgatatataccatgtaaatgaacaaagacattttaaatttaatcactgtttttattataagttccttagttcagatatcctttattaatttataagatgtgtaaaactacttaattctcacaagactctatgaagtaattcttttaatctctattttataaatgaaaaaactaaggccataaatttaagaaatttgtcagtgtctcaaagctaggaaatggccatctaatcccagagcctatgctttaggtcactatgatatatactactcctgtatcctcaagtaatgtatcatttagtaacactaagcaccctgcttagttttcatggatactgccaaattgccctatctcaagctttatacttgcaccatttaaagttttccacactgttggcaatatcagaa

SEQ ID NO: 108843 - DNA, 1056 bp, Homo sapiens
ggctcaagagattctcatgcctcagcctcctgagtagctgggactgcaggtgtgcaccaccacgcctggctaatttttgtatttttagtagagacggggtttcaccatgttggccaggctgattttgaactcctgacctcaaagtgacctacccaccttggcgtcccaaagtgctaggattacaggtttgagccactgcccccggctgaaattccctttttgtgttttccttttattgatttttataaatttgtattgatagttactcttaggcatgatgtttgtcatacatactttctccgtatatgcgatttaacatgtaatcagatctacagcatttaattagttgcagtttaaagagattattggctacaaccctttacagttaatatttacttgaacatttgacaactgaattgctgagaatagtagattaaatgaaattgagatttcaaaacataagtagaatatggcgggattttcaaagttttgttagtttgagaatctactgctgtaattttaggacagccaacttctaaatgtagttttaagaggtaaatgaaacaactgtaccaaaacagatttttatttaaatttacaactattcagccttggctttcatagtgtgacagcaagaaaataaagacctaaggttgatttggatgttgatactcatcaagattagtagtaaaatgctgaattggagaaattgtgagttacagagatcatgttggttactgtagacttgatatttgcatattcaacagatattggagcacttactctgtgcaggcactttgcttcctgcggagaattcaattcagtgctctcgtggacttcacaggcaagagcagatgcagacattaatccatggactgaccacacagataaaattcaattggtgttaagtgctgtgaagaaagattatgtggtggtatgagagatgcctagtcgggatcagggaaggtttccatgaggaaatgaactttgaactgagattcgaaggataagatttatttggcgagaactttccaggcaatgggaataacatgttca

SEQ ID NO: 108844 - DNA, 1017 bp, Homo sapiens
gtagagacagggtttcggcatgtttatcaggctggtctcaaactcctgaccctaagtgattggccctcctcggcctcccaaagtgctgggattacaggtgtgagccaccatgcccggctatatatatatatttttaatgttggtcattctttctaatgttaagacatatcctttgaggataattagattttggtgtcatgtaatttgggtggtatcacataatttcgttcatattctggatctgccacctattagttatatgactaaaacaagttaacctatctgagtctatttgctcaattataaagtgggcatgatagaacttcacaggattgtcttgagggtttaataagaatatagctagctagctagtttgttcaaggacataagtatctgataaatcttaatgtttcccctgttggtgagtcagaacagaaataagagttgaaactgctggtaagcctattttatccatcttcttattttgcccatagttaaaaagccacttttgttatattctgcactaacttccaaagttcattttgttttagcttttattcttttaattagacatattgtctaaaaccaaaaagtcatgtttctgaagcagagtttttaaaagatactttatatttctcattaagattgtgactagacagaatccttccccacacacaaactccagcttatctatttttcaatatctaagttagagttcttggcactattcacatttttactgtaccttcttgaagatgaaagagtccgaaagatttaaagatttttgagcagaattagacataaaaaactgtcatagtttggtgttgctataatagaatatcacagacaaggtaatttataaagaaaaatttctttctcatagttctggaggctgggaagtccactgtcaaggtgctggcatttggtgagggccttcttgctgagtcagctcatggtggaaggtcaaagagagggcaagcgaaagcaggtgattgaacttgcagcctcacctcccat

SEQ ID NO: 108845 - DNA, 1953 bp, Homo sapiens
cccccaaaaaggccaaatctgtgtgagagctcaaagtatgctgaatgtgaataggtatttgctgttgtccaacagtaacccaaatctataaagtttaatgttcttttttttttttaaacaaaaaaatcaggccgcattactggcatatataaagtttaatgtcttaatggaaggatttgagggggtggtaactgaaatatgtgaaatgtatttaaaaaactcaatgtatttgtcatcctggttcaattattatgaatttgtgactgattttgagaaaaatttgtaatcttgataatttttaggctttaactaactacaaaataaatctagatgtatgctaaatgacttaatggaaacacttatttttctgcagtgtttcctgaggttataggcgggtgtttgaggagtacatgcgggttattagccagcggtacccagacatccgcattgaaggagagaattacctccctcaaccaatatataggtaagaaattttaataacttaaaaggaaaacaatgtatttgactttataagtgtttgtgaattggtttaattagctgtccttagttattgtaattacttagttggttataataatatacagagaatgctgttttatatataacaagtttatttgacccaatatagaaggctttttctgtaagaaggaagagggtcgtttcagagatggcaacccttctaaagatgtgttttcatatgtatttttaattgtggaaatagaataacaatcctaaatttttatagaaagtggtattaaattctgtatttcataaaataatagtatttttaaagaccaattctgtataaatttgtaggttaatttttcaggtgattttaaatatattaaacatttttgttttaacactgcacaataaactttaattgctttttctataagtaacttttagatttggtgtctagaaaatctttacatacacttgaattactaaattttaaagtagattggaaattgtggcttctgatgattttctttcttttcttttgatagacacatagcatctttcctgtcagtcttcaaactagtattaataggcttaataattgttggcaaggatccttttgctttctttggcatgcaagctcctagcatctggcagtggggccaagaaaataaggtatgtaacttaatagctttggtaactgtaggtttttatgttgtcagtgaaatattctaatagattttcttattttgaatacttgttattgattcacctgttaacatgtattattttaatttataccagttttatctctggggaagtcacttagcctcccttcaccttcatttccatattgatatattaagaatgattaggtcttaatctttttattttggggggatagggaggtgttaatttagtataacctgggcacaaaataatttgttatctgattttgattatattacttaggtcaaatcatatccagcaaaacataatatatacataatgcaggccttttaaaccaattaatgtcatattagtgggttgattcacattaaaaaggggattcccattaacttgttcttatcaaaactcctctctctttttaaattatttgtcctttgcctcttctgtttatggatctgtttgactaattgcctgaaagaaacaatgtaaatatacttaagaactttgtgctgtttctcttttccttttgtagggtcttattgccacatacattctttctagattactctgattttaatttattttacttttaagtaaaatattttaatattaaaaatgattttaatcattgtttctggagggcttactgtcctgtctaaaatgggtctaatttttatttttctcatggattagatttttctaggcttccttttatgaagtcttcctttttggagtcttctatctgatcttgtcctttaattctaggctgaatacctttag

SEQ ID NO: 108846 - DNA, 1634 bp, Homo sapiens
attcctataaaaacaaaccccacctagctcctgtggggcagtagggaaagctctttctcatctgctgtgaacatttgatttatttttctgaaacagcttgctgtgaattggcattctcactgcatcctacttttagtcctgtgattttgttaaagtaaaattttctgtccaacaagaaacacttagccgcttttgggagagagtatagatttgcctttgaaaggtgaatgaatgtactttaatatgcctatgctttctaacctacttctttcttagtttgacttaaaatgatttgtttgaaacatatacaggttgtattgaatattatatggagttactaattttgcatcacaagtctcttatgaattcatatattataaaaatggtaaagtgaactcttatgcttgtattcttttgtttaacttattaaggctattatgaaatctctcaaattctgtgtacattatgaatatcatctataagtgcttcagcatgtatggagctgcaaattaatattggtttacttttgctctatgtatgttatctgaacatatggaatagcagtaatagtttttatgggaacttttaaagtagattaaaaagagcatttaccaaacatgactttgcctgttgtgcttaattatattttcttttaggtttatgcatgtatgatggttttcttcttgagcaacatgattgagaaccagtgtatgtcaacaggtgcatttgagataactttaaatggtaggttctgaatagtttgcattttgtgattgattttaaatgatttataatgagtatcaagcttttatcttttataataagataaacttctttagtgtttgtataaaagtaagtttatttgaaagaaattgaaaattcaggagatagaagaatttagaaaattttaacttttttttttttaatttgctccctcaacttaatctctttatctctgcttgaacttcacaccttcgaattccttgaggagttggccctattcttttatcagattgtctctgtgaactttatctactcccatggctttaaaataacatctgtatgatgatccctgaatgtatatctctcgatctctctcctaaaatgctatgctgaagaatcttaaacataacctactctaaaataaactcttgcttacttctccttcctataatgtctgtaaactcttttgctcctcctttgacatttctcatttatttagtgataccatcatttgtctactcagttgcccatgccagaaacctatgataatatcaccgtcttccctagtccccctattttatggattaccaagtcttctcagttccacctcctaaatttcaaaaatctaccttctgttcatcttaactgccaccaccctagtccaggacacaattaacttgttaccctcttctgcattctctaaaccaagggttggcaaatacggcctatgagctaataatgttttttacactttttggttaaaaaaaaaactaatgttttatgacacatggaaactatatgaaattccaacttctgtgcttataactaaagttttgctttgcatcagtgaaaaatttgtagaaatttatctttatattatataagtacctacataatgttcttgattttta

SEQ ID NO: 108847 - DNA, 2734 bp, Homo sapiens
atctcctgaccctgtgatccgcccgcctccacctccgcctcccaaagtgctggaattacaggcgtgagccacctcgcccagcctaaacaataacttttttaatgcaaattttatcttgctgcttgagtgttcccaattcattaaatgacttgactttgttctcaagataaagaccagaacatttaatctggccaaaaggctctgcatgatctatttcagtggttagcaagctgtggtcctatggaccatatcctctgctgcttgttttgtaagtaaagctttattagaacacaaccatgtccatttgcttgtgtattgttacagctgcatttaggctacaagagttgaatagctgtggcagagactatgtatcttccctagcccaaaatgtttactttctgtccctttacagtttattgaccccagtctaatcctttccaccttcccatcctcccttatatcactcctcttctatatttccctcagctatgctgattttctcttattttcagtgccaagctactttctggtctttacatttctgttctctccctcaaaggttttctactctcatgaatccccactctgtcttggtaatttttctttatcttttagatctcaatttaaatgatactatttctctgactagacagggagagccttgtgtatatgtccctcctagtacagtagtgccttttagttttagttctaagtacacaattgtaattttgtagccatttgtgtagttcttttgacatttcccctactggaatgtaaagtccctgagagcaagcagtgtacttttttgcctacttttgtatcccagttgtgtacatagatgataaatattagtgggatgaatgcatattataaaatcatctttaattttttggggggcggtgccatttatttttatagatgtacctgtgtggtctaagctggaatctggtcaccttccatccatgcaacaacttgttcaaattcttgacaatgaaatgaagctcaatgtgcatatggattcaatcccacaccatcgatcatagcaccacctatcagcactgaaaactcttttgtaagttgtttaaaatatagctaatgtataggtttctgttgattcttatgactcagcaagttagtaaatattacatatattatcacttgagtttccaatttaagattaaacagagggatgtattcttcattaaaatgttgaagtgtatgaagagagttcggccctgccaaaataaagtcaggttgttagtaattttatcttcaaggcttaatgattgggtctgtaaccttattttctttactctaaattcctaatggccagagttgatatattatgctagaggtgtgtatacttcctgtccttaccttcaagtaattagttcctgggagtatgcaaattctttgaacatactcaagataaaaaatttataggcaaatgtgtgaacacagagaggtattagttaactttttctttgtgatcaatgaattcactttctaaagagtttttatgagtgatttttgcaataaaatattcttttttctgtatatctttcaggcattaagggatcattgcaagagcagcgtgactgacattatgaaggcctgtactgaagacagcaagctgttagtacagaccagatgctttcttggcaggctcgttgtacctcttggaaaacctcaatgcaagatagtgtttcagtgctggcatattttggaattctgcacattcatggagtgcaataatactgtatagctttccccacctcccacaaaatcacccagttaatgtgtgtgtgtgttttttttttaaggtaaacattactacttgtaactttttttcttagtcatatttgaaaaagtagaaaattgagttacaatttgattttttttccaaagatgtctgttaaatctgttgtgcttttatatgaatatttgttttttatagtttaaaattgatcctttgggaatccagttgaagttcccaaatactttataagagtttatcagacatctctaatttggccatgtccagtttatacagtttacaaaatatagcagatgcaagattatgggggaaatcctatattcagagtactctataaatttttgtgtatgtgtgtatgtgcgtgtgattaccagagaactactaaaaaaaccaactgctttttaaatcctattgtgtagttaaagtgtcatgccttgaccaatctaatgaattgattaattaactgggcctttatacttaactaaataaaaaactaagcagatatgagttaaatttaaaagtttcaatttattgctcagtgtacctgttaacattatatttaacaattgcttaaatttttgtttttgatttatggataatttcttaagagtacacactttagatacacaaataatcgttcatttaccatctttaggatcattgaaactcatctcactaaagaaagttcacttgaacctctttatagcattgatactaggtgaacagaaattacctgactaataatttgtctaacatcatatatcagaattttattgtatatgatgaacaaaacttaaaattttttaaatttaatttttaaatactgtttcagagttctaaaaaggcagttttttaaaaaacttaagttgataaaaactgtaagaataatttagcagaaatagaaccagaatgtagaagagtagtcatgtaacagcagtaataacatacttcagcttc

SEQ ID NO: 108848 - DNA, 1536 bp, Homo sapiens
aaatgcttgggacaagaagtatttcagatttcataatttttttcaaagtttggaatatttgcattatacttaccagttgggcatcccaaatctgaaatctgaaatgttccatgagcatttcctttgagtgtcatgttggcactcaaaaaggttcaacattgagtccacttaacacttaggtgttagaagacctaactttctgtaacaattaaccttatactttgtttgtcatcgaatatttgttgaatgcatgtcaggtaatggtcttgattgtgatagcttcaaggtggaacatactgtaatctccagatgctaggaagttagtctaataattcactgcagaaaattgattaagtggctgtccttttaattaagagtgtggagtcataaacttaagttcttcatatagtgacaagagtccttagagattgttattcaagttccttagaaattgttatttaggtataatatcatcttgtctttgactagagcttgaaaccttgttatctgattgtgtaccactccaaattccctgccttctgcaagttgaatgtcttgctgaatgtgtctaggggttcatcttcagtaatcgacattccactagtgccatagttaacttcatgacatgtagacattcaaaacttgagccttggatgttcctgtggacctgacagttaaaaatataaagaacctaggattcaattccaactttctctgtttgccttgggttgaataacttatcttttggagaatagctttaagtggcttagacactgataaaattcagctgtgttgttgacgctcatctcttttgtcttacgcttagccatatttaaatcttgaatttaatagagtctagtgaaaaaaatgagtgggaagaatgaatataaaagtaataatataaggaaaaagggaaagtaaactatttagaatgtagttttgttatattcccagcatttcaatatttattagttacttgtaaattactgtggctgtgtagtttataaatgtctgtgcactatattaattagaagaccatagaacatgccagcaggttggctaatgctatgggggtttttaccacagttgccattgtggaagaaattatttggtacattaataaaaaaagttggtaaaacatggttttatacctcagtgtataagatgtgcaagacaaatatgcttatttccttttctagaatataagtgatattatttgcttatgacactaacactattaatgacaggagtcaatcagcctttacagctatcaaaatataatgagatcccaatgatgattcttttttactttgaatgttaattagtttgggactttgattggctggcaaacattttatcattgtcagaatttaatttagatttcaaaaatagcttacaggattttaaacatggtgtggtattctaaagccttttttttaaaaaaagagatctttttgagagaaacaaatgaggattgtaaagtttggggacttacctctgtagcattgtgaaaataaactttgattaagctgattt

SEQ ID NO: 108849 - DNA, 1042 bp, Homo sapiens
cagcacagaatacatcacagagctattgacagttcagcagcactgaagcacaagtagaccgtaaggcttgagaagtagcataaggtccaagagtatggtaagacttgagtgccagactgatagtgagtcataaacactggtcgggttaagaagccattaaaaagtaatgataataacttttataatgcaaaattttgtgagtatagttaccatataaagtgctctaatgtagatttaattccacaaagtaggagttcctttcaaatcagcttaatcaaagtttattttcacaatgctacagaggtaagtccccaaactttacaatcctcatttgtttctctcaaaaagatctctttttttaaaaaaaaggctttagaataccacaccatgtttaaaatcctgtaagctatttttgaaatctaaattaaattctgacaatgataaaatgtttgccagccaatcaaagtcccaaactaattaacattcaaagtaaaaaagaatcatcattgggatctcattatattttgatagctgtaaaggctgattgactcctgtcattaatagtgttagtgtcataagcaaataatatcacttatattctagaaaaggaaataagcatatttgtcttgcacatcttatacactgaggtataaaaccatgttttaccaactttttttattaatgtaccaaataatttcttccacaatggcaactgtggtaaaaacccccatagcattagccaacctgctggcatgttctatggtcttctaattaatatagtgcacagacatttataaactacacagccacagtaatttacaagtaactaataaatattgaaatgctgggaatataacaaaactacattctaaatagtttactttccctttttccttatattattacttttatattcattcttcccactcatttttttcactagactctattaaattcaagatttaaatatggctaagcgtaagacaaaagagatgagcgtcaacaacacagctgaattttatcagtgtctaagccacttaaa

SEQ ID NO: 108850 - DNA, 1230 bp, Homo sapiens
aacattcacactaacatccttaaatctggagagaaacaaaatgaatgtttttcctctattgactggtatagacaatttaacaatctcagaagaaagagcaaatatcagattttttttttttaattcagctggctccttttcccctaggcttcagaaaagcaaatagaaacaaatagatccacagcccaggtgcagtggctcatggctgggagaccaagatgggtggattgcttgagccgaggaattcaagaccagcctaggcaacaaggtgaaactccatctctacaaaaaaaaaattagccaggcatggtagcatgcacctgtaggcccagctacttgggatgctgagacagcaggatcgcttgagcccaggaggttgaggctgcagtgagtcaagattgcaccactgcaggtgacagggcaagaccctgcctcaaaaaaaaaaaaaaaaaaaaaaaacccagctccaaactgtatcttgaagaaaaatataaactggtttcagatacagtagaaagctgtaaagtcatccattctataagactaacagaatgttttcttttgccaatgttaagcatgagcaaaataaaaaagcatgcagacaaacagtagtggttttaaaattttaatgtgcttaaaaatcactgggacaaatttctggatcccactcctaatggttctgatttagttgatctgaaatggtaccaggtaatttgcatttcaaacaagcttcaaaataattctaatactgttagtctgtggtgtataccaggagtccccagtccttgggccatggactggtggtggtctgtggcctcttagaaaaccagccgcacaccagcaggtgagtgtcaggcaagcaagcattacctcctgagctttgcctcctgtcagaccagtgcattagattctcataggagccagaatcctattgtgaacagtgcctgcgagggatctaggttgtgcgctccttatgagaatcctaatacctgatgatctgaggtggaacctaatacctgatgatctgagtttcatcccaaaaccatccccccaaccccctgtccgtttatggaaaatttgtcttccacaaaagcagtccctggtgccagaaaaggttggggaccgctggtctacactgagtagcaccataccacagagcagaatgcagaagattcatcctagatgcatcctagatgcgtcacgtgtagaatgacttaacacaaattcagc

SEQ ID NO: 108851 - DNA, 1058 bp, Homo sapiens
tgtgtggtgcttactttggggaagggagttagaatagaagaagaaataaagggaatctcattttttaaaaaattatctttatttctgtattgtttgaatctttaaatctttaaatataaaaatatattcacaagttgcttgtaattaaaaaaaaaacctaaagggtgattatgagaacaatgagaaaagtaaaaaactttaataatgaactcttccttttgcatcaaaatgactcttttttgattaaaattaatttctaagtggggagaggaagggaggtgcaggggtgggggaaggaagtagagggagagagagaggggagaaagaagtatttttatattttgtgtaagaatgtatttactatggatgtaatgtaacaaaaggaggggatactgcagatttctaaccaagaaagaagtttgtctggagcctaaaaatttgactgcagtttccagacttactgaaaggaactggaaaagtgcttagcacattgtagaccctcgctctatgttgcctgaatttgaaatctcccctttgtttggtggtcatgagatattccttcctgtgttgaatattgagattctatttccacatacttaaaagttgaaggcacttttgaagtttggagctatgtcttcctttaaaaatcaatgaaacaggccttacatggtggtgtgcctgtagtcccagctatttgggaggctgagacaggagaatcgcttgaacccgggaggcggaggttgcagtgagccaagctcgcaccactgcactccagcctggcgacggagagagactccatctcaaaaaaaaaaaaaaaaaatcgacgaaacaggccgggagtggtggctcatgcctggaatctctgcactttcagaggttgaggcaggtggattacctgaggtcaggagttcgagaccagcctggccaacatggtgaaaccctgtctctactaaaaatacaaaaattagccgggcatggtggtgggcgcctgtagtcccagctactcaggacggtgaggcaggaagaattgcttgaacctgggaggtggaggttgcagt

SEQ ID NO: 108852 - DNA, 1038 bp, Homo sapiens
agggactccggtatccgccagcccactcgcaggcccggagaggcgggcggcatctctcatttaaaaaaaaaaaagaaaaaatgtttacacttcgtccaccctccctcaagcccactttgggtgtaggtctgggttgacatttaccgagtaataattgttaatagacaattaacagattaattggcatttgctgatcgttagaacatcgtagctcacccggcccaatgcccgcgtcctctgcagacgtgtattcgggtactctcggtagggctgggccgcaccagtaaaacttggaccgagaaactgactgtgtggggattgaggagggaggaaacgggcgagctaaacgccccctttaccagcgctgggctcggctgaattgataattggagtcctgcaccccgcgcctaccgtctgcgcacccctgacacgtgggagctctcgggattgtagctaaaaaaagggcgcctacagcctgttttcctctagctagaagaaaaccctgcaagccacgcctttttctctcctagccttccaaagactgggaaggactgaggagttgtggctgcgttgttgtactaagtggggtgaaaacagtcaatcaagaaattaacaagggcactcaagagctgttgttacagttgtttaaagctcatcacttcattttttatttaatgtaaaaagttttcaatgcccttgcgaaaaatgcaagccaccaagacaagaagtaaaatgaaagaccaagatctctcccctcctttcccaccattgttaggtttagtgtgtatctttttaaactatatatacatacaccctcgcagctaaatatagaatcatagatgtcagtgtatgtcagggaggttttttaatacccacacatagatgtaagtttttctccaaaaatggcatctgcaacttgctgttcttaaattcatattatcacacatatttctctatgcctgaaacctagtcgacttcattgtattttaaatggctgcatagtattgcattgtgtggtcatattataacatttgttta

SEQ ID NO: 108853 - DNA, 1036 bp, Homo sapiens
attcaccctcccaaagatcctgactgaacagaattccacttccttcccatatttctgtgagtcaatagttctctctgaatattgctggctttctgttttcttggcacatggttggtatgattattaattttttttttttttttgagacagagtctcactcagccacccaggcttgagtgcagtggctccatcttggctcactgcaaccactgtctcccaggttcaagcgattctcccgcctcagtctcctgaatacctgggatcacaggtgcccgccaccacgcccggctaatttttgtacttttagtagaaatggggtttcaccatgttggccaggctgatcttgaactcctgacctcaagtgatcctctggactcagcctcccaatgtgctggtattacaggtgagagccactgcacctggcccattatactattcttttaacttttctgtaagtttagaattttttaacttataagttagaaaaagaaagggtttcctgtatattagatagttttctgtgggcaaagaacttagaacaatgcttggcttaagcatgcaaataaatgttacttgttctgatcattctaagtgctttacatgtagtatcatgtttaaccctcacaatggccttgtgaagttctgatcgtaggatgctgtcagtctctcgcatcccttttaccaggcaagtgcacacctctccaagttaccataaagtattggttgctaaaggtttacagctcccttttctctggagaattgccttcagtctaacagaaaccgccccggagattataccacacaccaaccctgggggacggtcagcaaccaatgactaaggaacaaagaggcataaaaagctagccctagtggtggcctgtaatctcagcactttggaaggccgaggtgggtggatcatctgaggtcaggagttcaagaccagcctggccaacatggtgaaaccctgtctgtactaaaaatacaaaaattagctgggcgtggtggcacatgcctgtaattccagctccttgggagg

SEQ ID NO: 108854 - DNA, 1101 bp, Homo sapiens
agtacttgatatgtgtcttccactgtgttaggtgatatgggggtgtagaaaagaaatagaagcctcctatctgtctcctctagaaatgtgcttctcaaaataactgtggcgaaggatcagtttttagaaaaattaattttcaatctgttgtagattaatataaaaatgaattaccaggaaaatgaaatgctgcttgaatgtagtggtaatgtcaaattgctgtaaaagttttcaaatactcttagtttttgcacattttatgttgaggaccagtgacagtatcagaccacactcagggtggtagcaatgctctggaagttaatgtcggtttacctacccacataaaacaatttttaaaatgactaattcattagttttatttatttatttgaaaattgaagaataacattccgtagagtgtacaaagtgccacatgacattataatagccactatttattgtgtttgttgttctgagtgctttaggtgtttggtgttatgccagcctcacggtacctgtgaggtggtcattattatctcttgcttagaaatgaagaaactgaggcacagagaggtacttaacttgcccagggtcattgagtggcatagtgatggagttggactctctgagcccatgctgtaaacattctgctctatttatatagtgagtctaagaatgctgcgtgagttcagaaaagagagggctggatacatggaggatacactggctgatgtagggtcttgagaaaggcaggacctgaatgggtgggacatgctgtatcctctcataagaaaaagctggaagggaggaggaggggggcagtttttctgcagatcaggcctggtggagcgtctgctggagccccagcaggttggggggtgggggatggtggtgagctcacgtggttttgctgttagatttatctcactagctcatgcctaataaatccagtgtgggagacagtggagtcggagaggctgggagggagacgactctagtaaccaaagcgtgaagtaaaaagagcccgactgatcagggctttaaataggactggagaagaattggcagttggtgacagattggtcaaaggaaaggaagaga

SEQ ID NO: 108855 - DNA, 1039 bp, Homo sapiens
tttctcttataaatattttggctgcaatggggaattcttccccagcctcctttaaaaaacttctcaaacagctattaagtatcatgtcaagtagaggagctccaagtagaaatcagtccctattgctgtgcagtcagcggccgagatgtctgcttatccagagccttagtgaagctgcttttcttggccattgtagactctgcagtaatggtctccatgctgctgctaaatggcctggatcctggttttagggggcagtcttgccatggggaatagagcagagcctgccctcccctacctgtatgttttcatttcctagggctgctgtaatgaagtaccaaacatttggtggcttaaagcaatggacatttattctctcatggttctagaggctgcaagcttgaaatcaacatatgcagggccatcctccctctgaagcctctagtgcaggacccttctttgcctcctccagcttctgctagctccaagtattccttggttgtggcagcctaactccaatctctgcctctgtcttcacattactgtcttccccctgtgtccatcccttccatatgtggacattagctatgccagattaggacccaccctaattcagcatgactgtcttaacttggtcctatccacagaaaccctatttccaaagaatgtcccatgcacaggtacaggggttaggactttgatatatctctttgagggaccgaattctacccatcacagtgtggctccaggggctgtctccagatcctcctctgcacatcctcctgagttggtctggtactagctattgccttctagggcctgggttggcagctcattccctcctgttttctcaggagcttgaacttatctgccatctccctttcttcctgttagcttcaattgcttccttcatcgccttcttccttgtgtgattaaaacatgcaccaagctctcacatcttagatctcctaccttagaccccatgtttgcatctctcctcctttttctccagacttccagaagcatccagtgtactcac

SEQ ID NO: 108856 - DNA, 1033 bp, Homo sapiens
tttttttctttttctaacttataagtaaaaaaaaatctaaacttacaggaaagttaaaagaatagtataatgggccaggtggggtggcttacacctgtaatcccagtactttgggaggctgaggccagaggatcacttgaggtcaggagtttgagatcagcctggccaaaatggtgaaaccccatctctactaaaagtacaaaaattagccgggcatcgtggcaggcgactgtatgtaatcccagctactcgggaggctgaggaaaaggagaatggcttgaacccgagaggtggaggttgcagtaagccgagattgcgccgctgcactccaggctgggcgacagagcgagactccatctccaaaaaaaaaaaaaaaaaaaaaaagaatagtataaggaatacccatatactctgcacctagagtcaacagttaacatttgcttcatccctctacacatttatgtgtttatgtattggtgtttaaacttcaatttctgccttctctgattgttgtcctttcaagagttctcctctacagagtataacaaatttagccattacttaggatgcaatatgtgggattatgttgaagcttttacatccttctgcttaatcaataccgtctcttgaacaggatgaacttactgctgtgaatgtaaagcaaggcttcaataatcagccagccttcactggagatgaacatggctcagccagaaatattgtaattaacccatcaaaggtaatgttatttgtttgtttcctcaaactcctgaaaaagtgtgtatatgtgacacccttaataatcactgttgataaattagtgttgtttaagccacagtccatattcagatttcccccaaataccatgtataccgtcctgccccaggatccaatcagggatcatacattgcatttccttgtcacatcttttaatttagtacagtacagctctctgcctctccctcctccccattcctgcctttttttaaaaaggcttttatgactgctattctagaagagcccaggtcagttg

SEQ ID NO: 108857 - DNA, 1191 bp, Homo sapiens
tgaaaagccatggaagggtttattattactattattgttatgactctttccctcagtttcttgtctgtaaaaaaataaggataattgacagtacttatttatttatttatttttatttgagatggagtctcctctgttgctcaggctggagtgcattggtgtgatctcggctcacgccaacctccgctctcaggttcaagcaattctcccacctcagcctcccaagtagctgggattacaggcacctgccatcgtgctcctctaatttttgtagagacgaggtttcaccatgttggccaggttggtcttgaactcctgacctcaggtgatctgcccaccttggcctcccaaagggctgggattacaggcgtgagctaccacacctggcctgatagtactttttaagaatgaaatgaatcgatacctttaaagtgtttagaacagtgactggcatacagtaaatgtagaccattgataatatgcgacaactgctacttagaactgctgttaccagccagtatttattgattatcctgtgttactccgttgggaactttgcagactttatctgtaaccttgcaatgtaggtttcattattccattttgtgtatgagggacctgagtctcagagaagttaagtaacttgctggcctagatggagttggatccctgcccaggcacctgccactagagtgcctgctcctcactcctcgctgtgaggtgatagctgctggtggcctgtgtgtggtgtgggtctgggccactggaggcaacaagcatctctaggtggaaagatgctggcaggaagcaggctgcgggactggtggctctgagcagcatctgaggagtcagaactcttgttctcatgggtgctatggggaacaggaggagcaaagcaaagtccagggtgccatggcaactagagaaagaaatatgaaactgcttgcaagatgagcagccttaattctgcctaggaatttttgggtattcaatatggtgaaaagtgacaagacatatcatgcgcatgaggtcttttttgggggaacagatagattcaaagaagcttaaaatgcttcgtggttaaactgcctggggcactgctctgtttacccctagtcatttcctctgtgccacctgaggttttgtggggatttgagtcagatgagagacttttcttggttgactatactc

SEQ ID NO: 108858 - DNA, 1038 bp, Homo sapiens
taaatgctgccctacactacctctctggtggtgtaacaccgccagtgacctttgtgagcctcacttcatttggtgtgctctgtatttgcctccatggcgggtgttcctcctctgctgagcttccatttctctctttaatactgcaggtatcccaggcctgggaggagctgcttgtatgtaatgtgacacatctctgctgtcacccattatgtgtttataatttacgtgttttcatatactagagcaaggcacaatttttgtactactaaaacaaagcactcagtgtactactgttttagctatgcatcggtgaccaagatcacagtgctaataactctaaaatggtagggtggactgcatgacccctgaaaccccttccaggtcagccttctgttcctagggttaggcattaacaaggaaggaatagtggttccagaattctggatgctaggtagagtatggtccaaaaaagctgtcattcttttcaatcctgacccctcacaccactctcagtaacattcatgatcataaactttctaataatctggcttcatggacattaagttctatttaacatcaacaactacacatgtattcatatcatctgcattgcctgaatttagaactgctctactttcagagtagcttgcatagtcactttctttgtattttctacccctgaacattccccgccccttcatcttcagtataatctgtatgtatccgtttctgttttctttcttttttttttttttttttttttgagacagactcttgctctgttgcccatgctggagtgaagtggtgtgatctcggctcactgcaacctctgcctcccagcttcaagtgattctcctgcctcagcctcctgagtagctgggattaaaggcacccactaccatgtctgactaatttttgtatttttagtagagacggggtttcgccatgttggccaggctggtcttgaactcctgacctcaggtgattggcctgcctctgcctcccaaagtgctaggattacaggtgtgagctacctca

SEQ ID NO: 108859 - DNA, 1021 bp, Homo sapiens
ctgtaggtagcctgcaaagcttaaaacatttactatcaggcttcttatagaaaaagtttgacaaccccttgtccagggttactgcctgcccaccatttatgaagctactattacatgattatttgattttgtttttgtttttaaatacttctttttttttagcttttacagccttagaaattacatattataagttcatctcatgtttttaattgcatgaaaaattggtttaagtgacgatttttaagtgatgattactgcatttttattaagttccttcaggttcctgttggagtattagcttatgaattattccttaatttctcaacagctgtacttcctccctttcaacttaataatttttagttttgtcttctcaattgcgaagttgagaatggggtaagacactctcgtattttaaacttactagtaggagacaataatacagtgatgacagggtgtcgtttttactgtttagctattgttatgcttttctccttcctctgaacatccaactttatctgtttcatttccagactgtcactctctgttgcccaagtgccttggtgtggaattattccacaaatgaaaataagagcgcaaacccaggctcacccctggatctgctgcaggtggccccgtccagcctccccatgccgggtgggaacacggctttcaatcagcaggtagactttatgtttcagtgatttgatggctgttttcattcttgacaggcatcagggcacagtgggtcaagcacaggttttagtatctagatgcttgggtgctatcccagttttgcctgctaacactctgggtgaccttagagaattgtttagcctcttcagaaccactgaaattctcgaagttgctccctttcttttcactgtcttgctgaacagttcttgctgagagttctgccacccagactgtaattatggtggtggttctaatacatgaccatgactcctgtagtagttttgatatttggtaattattatatgttcttattggtactggg

SEQ ID NO: 108860 - DNA, 1770 bp, Homo sapiens
ttaaaaaaatctttttagcaacaactagactggtgtttgaccaaacaactggatacaatagcttagccaagttaatatctaaaattgataatcacagataatttttatctcacacatatctagcaatagattgtttcatgaatgaattgccccaaaactaggatattcagttgtttttttcctcagccttatttggggagaaataaaaagtttgtcttcttttcacaatgaaaactgccgatgataatatccagcctgtgctaggcactaggactgcagagttaagttttaagacaccttcaataccttagttagctgatggcaagcatctttgatatttcaactggcttttgggaatgcatatgtggaaagaaaagatgaaacagcaacaacaaccaccatcaaaaacctttccttctcttacctttatgtgagcctgatacatattccagattattattctttttggaataatttttgattgatcaccctgcttctcaaagatatggttcaagactaatggtgccagctaggatcattcagaacgttgagagcaagggactgattgagtgtgctttttaaattcatcgcgagttcagtagcaatgcctccctacttcagtggagcatgctgatataatcctctgcttactgaggcaagttagagtgctacgtgctctttttgggtggaaaccttaaagtgtgtttttagtaaagactttcttagataaaagacttcatgaatactaagatttttaatacatataggtgagttatctggaaggaaagtagggatacccaaaattcagggggatcttggattgtttagcttcttgcactaagtattgagtaaaagctacattgtttcctggtgagggttttaccaagattatcataaccaccttagttttgtggttagcctgactatataccttcagagtgtatgcactggctaacttcaggattattgccccattcacctgcagacacttaagttacagcactctcaagaaaaaaataggggtgttttttcaaaaaaattcaagggcagaaattatgttgcaatctttctgaatgaaatcacactgtgaggttctttgtaaatcacagatatctccggagtgggtgcttgcaatgagccattagggtgcaagaaggttattagaacttctgttcagattataattttcaaaagcttcttttgtctctggaaatgaatgtaattattatgatcgtataggtatagaagttataaataagtgtgtgttgaaagtttttactaaaaaaactctttgagctgagagggtgtgtgggaaatgtttggaaatcactgccggaagcttcccctacctgagtgacttctccaggattcagagaggtgcgtgccaccagagggcgacatgtgctcaggactgagagtcctggaggctctaggcacgcacatttctggaagggccatcagtgttgccccatttagcagtaattattttgaatgttgactcaacttcagaaagacttgatgaaaactacgttttcaacccataattcagattggtcaccttttcttaatagtctggcaaaaaggataacaaaatagatggatccttctgtaatacttaacattaaattattattagtatttttccaagacagtctcagtctgttgcccaggctagagtgcagtggtactgtcttggctccctgcaacctctgcctctcaggttcaaacaattttcatgcctcagcctccccagtagctgggattataggt

SEQ ID NO: 108861 - DNA, 1086 bp, Homo sapiens
tattggagtgggtcactggataacctggcttgtcagaattatttattgtatgaggcattgagtgagtggggggcctgagggtgccaacagtagagtgatgtactttgactttgtgacagctgttcttgacagtcagtggttgtttttttcccttactatttggttttgaaatttgagttctagagggtagctggggctaggttatgtccctgtgtaagtgaaggcatccacagggaagctctaattcttttggaattgtcacagattcagcataagtgatttctttccttgtataggtttattttttgtatttcaattaaaaatgttttggaagcgctttctaaagctactataataaaacatggaaaaaagctttaaagtgttagatattcccttgcttgcttcctgcctcttgctgggtgaatgtttcatttgatgtggctggtacccctctctgttggtcattaggttgcgcccaacgatgaagctgtggtgacgctgttatgtgaatgggccgtgagctgcaaacggtctggcaagcacagggccatggctgtggcaaaactcctggagaagaggcaagcagaaattgaggcagaggtaggttccattttctttctgcttgttgaatgccgtaatgtaaaaatactgttttggggaagatcattttctcttaccctcattatgttattcttttgctcttgaggaaaaaagggaggatgtaaaaattcacataaggaagattcttatagtagaatctctctaaattgatgcagccatttatattctggactaatttaaaaatggtatcttttaaaataaaactttaggctgggcacaatggctcacacctgttataatcctagttttttgggaggagaaggcaggaaaatctcttgagcccaggagtttgaggctgcagtgagcttatgatggtgccactgtactctagcctggttgatagagtgagactctgtctctaaaaaagtaaataaataaaagataaaataatacaattttagcatctgatttagaacaaagaaatttctttgctatattgaaatatgcgtacacaaaacatacaca

SEQ ID NO: 108862 - DNA, 1030 bp, Homo sapiens
ttcttttgccccagtggttgtttatctctacttctcgagcaggaaagatatttacactgtagcttcttatgtcttccagaatttccctttggatactataaaactgtaatgaaaataatctgacaggccataacatttttcataggattggaattatatactttcagttctagatgtttctaatctctagtttttctttaacattgtgtctcaaaactggacttgttttgacctttaagtgtcagctgagttttcattctaagaatcgtcttttccctaatgtatcattcattacttatatcactcttttattcataatgggaaattctttgttagtcacaacacatattttcatttcagttaattaaaagtttaatctctgtttctcaaatgttgtagaagtgtccttttcaacaaattattttatgctatgagtgtgactttataattttctgccaaattctggtattttggatattgttccagatacttactgaaattttcaaggcaaaaaagatggaggtggtgataggaagttatagaaaatgacgagaacttgagacaattgcttaaaaactgacagtttagcctgggcacggtggctgatgcctgtaatcccagcactttgggagactgaggcgggcagaccacccgaagttgggagtttgagactagcctgaccaacatggagaaaccctgtctgtaccaaaaatacaaaattagccgggcgtggtggcacatgcctgtagtcccagctactcaggaggctgaggcaggagaattgcttgaacccgggaggtggaggttgcagtgagccgagattgcgccattgcactccagcctgggcaacaagagcaaaactgtctcaaaaaaacaaacaaaaaaaaaaaaaacacctcacagtttaggcatataccattattattttttaaaacagtagctatacttacaattaaaaacctggtattagaattgcaaacatggattcatagttcatactgttaaggcttgttttcaaaatggtgtcggg

SEQ ID NO: 108863 - DNA, 1726 bp, Homo sapiens
taaaaagtttattcttggcttcactaactttttttctggatttttattttaagtacaatttcagggagtcatttttttcattgggtgttacttttacatataaaaagcataattgggccgggcgcggtggctcatgcctgtaatcccagcactttgggaggccgaggtgggcggatcacgaggtcaggagatcgagaccatcctggctaacatggtgaaaccccgtatctactaaaaatacaaaaaattagcaggcctggtggcgggcgcctgtagtcgcagcttctcaggaggctgaggcaggagaatggcgtgaaccccagaggtggaccttgcagtgagccgagatcacaccactgcactccagcctgggcgacagagggagactctgtctcaaaatagaaaaagtaattgtagatgtattacgttactttctgggtatcttctaggagtttttatcagcaaaacaaagtattctgttaagttatttatttatttatttattttggtattttggaatatctcctgaaatgactttcaaaattaccaaacccatttatttttttcttattacagttaaaagtctctttttttgtaatttttctatgtccagggccatttcaaaacttgtcaaattatcaaacccatatttttttccttattacaattaatccattttttgttaatttttctatgtccagggatatgtcaaaacttgccaaagtttgttcttatctatcactgcctgaataatatctatgcttttctactgttacctatagacattattcatttataatataatggaataatctcacagtttatttaggggagcagaaagagtagccttatattttagagatgtatcctgaagaatttatagatgagctatcatgatgtctgggatttgtttttaaaatattctgggtaaaaaagggagacaatattaacgtccggagtttatttaatagtaatataccaatgttaacttcttagtttcaccaaatgtactgtggttctcttaagtcatttacattagagaaaactggctgaatggcatatggaactctctgtactattttgcaacttctctgtaaatcggaaattactctaataaaaagtttatttaaaagaaagaattaaggggggtgataaattaagcaaagatggcaaaatgttgaaagtgtttgaaactggttgaatggttgagggttatgtgttcctttcttgggtaaacagagctttgcatgtctctctcccaggtgtctgggtgtcagagctggacactaagcctcagcttctttattctgttgttcctgtgaccttggttttacagcctttccctgcatttaacattctacttccttggaagaaagagcttaaatgattttcagtgaccacatgtcataatgaatcatgagataatttaactataacaattcatgaaagaactgctagacaattgatattgtaggatacattttttaatagccttccaccactggttgccctaaactccctgttaccatgagttcaattcagaagaagccaaaggatatgctaatataacactgactttaggaatgctactgtctgttttttttcccttaataaaaagagaaaatctgactagcttctcattgcatgtgaggagactataaaaatatggttaagaaaagtgttttccatgtccccatctgtcatatggggccctactaaatgaaga

SEQ ID NO: 108864 - DNA, 1366 bp, Homo sapiens
tgcttagaaaataaataaactggctgggcacagtggctcacgcctgtaatcccagcactttgggaggctgaggcgggtggatcacttgaggtcaagagttcgagaccagcctggccaacatggtgaaatcctgtctctactaaaaatacaaaaattagccaacgcggtggcgggcacctgtaatcccagctactcgggaggctgaggcaggagaattgtttgaacccgggatgtggaggttgaagtgagctgagatcgcaccactgcactccagcctgggtgaaaaagcgagactcctcaaaaacaaaacaaaacaaaaacaaaataaaagcttattagattttctatgggaatcacagtggaatcttcttgaaatcacctattgtaatgtttgtagaggaaagtcatcttaaggcctgttgttccctgttgtgaagatctacaacatggcctctatccacccagttataagattgagttactgaatagttatgctcgctcaggtattcagtctggtgtcaattatcctgtcttttggagacagatgaatgggttcatcagatataagaaaattatagtgtcattcacagctaggacctatttagagtttaaaaattgatgctttttttttatacagcttggctttttctacttataagccttaaatactgaaaaatcacaattttgttttccacggaaaagcatttgaatatattaagtgtttaaaaagacatacctggggctatcttctgtgagcctcagcaagccttgctgcaagtcttcagagaagcatgagctgtttggttagccgcagcagtagcaaccccattgcaggctgctggctttactaaaaatttcctttcctttttgtgtggttttaaaatgttgcatattgacgtagatgaaactgtggtttgcaagtagtttaactttatgaaagtctcctaaagaagtttttttaatgtatacaatttcatgtatgctttcttaagcaatttatttgtcatattttttagagaaaagatcttcatttagtacctagcctttttttttttttaaagtatccaaggtatgttttgtgtcataatgatttcaaagaatatcactcttcatgccttgatggggattaataattaaagatataaggtgtttaagcaaatattttttcagtatatatagtaacacagcatttcaaagttaaaatttaaaaaatagttgcagtttttattcctgctgagacacctattattaaaaaaagaagtaaacaaaaagatgtgttttacagagtcagctaatgtatacattttatttatcttattttatgttcattatagaaaaatctggaaatagaaataaaaaaggaaca

SEQ ID NO: 108865 - DNA, 1035 bp, Homo sapiens
gaggtccttggagctggcttctgcctgtgattgtcagtctctggtacctttgtgtggctgccacatgctggtctctgttaaaatgtcaccttctcagcaaggcctttcctgttcatggcatctaacatagccattccccctatgtcgcattctctagcctcttaccacgtttgttttctcttgtctccctttgttgtttaaaatattaggttggtgcaaaagtaattgtggtttttgtgatgactttcaatggcaaaaactgcaattacttttgcaccaatctaatattttttaacttattctcctctccccctattcttacatacagcccttcttaaaggtaagctttgccagaccagaatttatttctcttgttaacggcaaaattaggaggtcccagaatagagcttgctctacagttagaagctcaatgaatatttatggaatttcagaatgaacttacttatacaactttggtcaaattaaggatttccttaactgtcaaatgatgagtttgttcagcacttctagagttttaaaatgtacttttatattttgaattgccacttcaatgtgcatagtagattaacatatatagatatccttttaaatctctggatcacagaattagaataatcataattcttgattcaggaagcattcttgttatgcagcattcaagcaaggatgactttttacagatttattttgttattcttaacgatgttaataatctccttcagactcagtaaccaaaacgaaagccaagaccttgacagtaagcagctgctcttgtctaaatggtccatcctcccacccccatgccatctctctggatacttttattccacattacctgagtcatgtgttcttcaatctttcacttttcctgttttacaaatttttgtaacatctatatgtattcctaaaagtgtgtgtgaatgaagttatgattttaaaactgtatgtaatctcttcatgatttttctatatattttactgacataaatatataaaatttgatttcatatatat

SEQ ID NO: 108866 - DNA, 1028 bp, Homo sapiens
aaagccatgatgtgtaaaatgttcaggtgtcttagcacaaatcaaggcagtgcactcaactgttcattgcattttataccttactgacatacaatcttaaacaagaaaagaaaaatcagttttaccaattgcttaataaagcaatactagtttttattaaatctcaaccataaaaatatctttttaatattttgtgtgccaaaatattaattatgtataaagtacatttgctacttatgattgtctagaggaatgaacacttgtataattgagttataagctgaattagatgcatttttcatggaacaccatttttacttgatcgaatgacaaactaataattgtacttgggtgtttggcaaacattttctcaaaactgaatgaactgagagacaatttttgacaatgataaaattcaagctttcaaactgaaagcagaattttggaaagcttctgtctgctgttgtgagtttcgtagctttccggtattgacactgtgaggaggggcaatattaattagtatgattttttggtactgtagaatgaaaagtgtttatatttacaaatttctgcatgaatgtattttatctacatgaccaatgtatgatgttataaaattgggcataagtaaaacacatagacttaaaggtcaagaccaaaagatttcagtgttacaaagtataaaatattcattgacatggttttagatccaatattgcaatcatgctttaaaaaaccacctgttgagttttgtgctgtcaaagaagaaaatccagaaggccattatttatctgtatgggattggattttcttcaacatacttttaacctaaacattttgcaagagattggacatggaagtggatatgagaatccaactgtcttctctaggccagatgttaaagagatttgcaaaaatgtagaataacatgacttgttgacataaatttttttgaaaatatttttcataaaaatgttacttgtgttaacctgctatttaaaagttttataactgtcacaattttaatt

SEQ ID NO: 108867 - DNA, 1073 bp, Homo sapiens
aaggaatataaaagtaaagatgtgttgcttccttaattttctctttcaagttttacttatacttgtgtttcgtaaatgatacttctaaacatgttcataaaggccagagtgaaagtaaaaaagtaaaagttaatatgttcatttttatttttgaaggcttatgatgcatgcaaatagactgtcttttgtacatattcagtttgctatgcaggagtaggtttgttcatatgtaatctactaacttatctactaactagataagttctagaacttatctagaaaaccttgagtaaaatgtgtgtattttaaccaaaactggtatttggggttgtgtggatcaaacctagtccaattttattgatttaaagcaatgactgtagtgttaaaaggagcatgtactacattaaaatgacatagggaatgtgtatacatttaggagaatatttattttaagggaacttgcccttaaaataaatattacatgtcgtgagctaaagggagaaattatgttgccttaaactaaagtccctgtcttttgagttcaacactcttgggaaattgtaaggaaaatgtattaacagaatccactagcatgcagctaaggacttctggagatctggggtcatgacaggcaccctgtatagtgatataaatgtcagtgtctgagatttaagagcctgttccgagaaaagccaacaaatatggagagtatattcctataaatgagttaattgagaggcacgtatactgcactcaagttttgcactgtgccggaaaccattgactgtcccaggggccttccgctcttacccctcactccagtttagagtggagcaacagcagcataagatacacattttaatatggcttagatcatgttcatttccaaacacaccttctgttctccctcctctggcctttgttgggccgtttcctaagcctggcatgggccctcttaaatttcaactttagtggagctttcctttatgttcttactgagaatgaatggttttcctctctctgaattcctatagtgcttaatttaattctacttaggccacccctcaggcttt

SEQ ID NO: 108868 - DNA, 1049 bp, Homo sapiens
atttcatctagtgaccaggggaaaccttgctgtcttggtctaatgagggcaggcttccctctgggttctgcctgcccatttgcccattttcccatttataattagttgagatatgtaaacatgctatataaatgttagctgttattatttcaatattataatttgaaccaaaccttatttaatctagttcttagctatacgtgtatgtgtaagcttaaaagtacttttgtgaacagctgcatttagagagaaatgtgaagtccaagtgcatgtttatgcatatgataaaactttcgcagcatagatgcttcttagcattacaactcaacaggcagaggagattcgtgttgacaaatgtgcttgttattaataactttgtgttacatttcaccggagagacctctagcttaccagttttaggccttttgcttttggcaggttgcaattattgctgtcttataaatgtcacatacatgatatatatacacacttccaaaactgtgtttttcattcttgtcggaatagttgagacttgtctgctaccaaaagtctgagtcagattctgatactttgccttgctgctcttttttttgtagttttcccagaaactttatattatacttaacaatataaatatagtattatactcataataagcgaggcctttgcttgtattcatttaaaaatgtagagaagcgcttaaaagataggaactttcgagtcacaaataggcaggctgaagattgacttatggaattgatgaagctgttgggagaccaatttcatgtaagaaggagcaatctgaggatagaactatcagccatataacaggggatgtgagagggatacagtgacttccatttgtttgtaaaaatgctgttttgggatttatactaatgggtacccttcatgtgtgacatgcagtgtgacttaaatatctaccttagcttttgccatagttcaaaagttgggggagggagtttctagataatgagcatccagtagagtagacggaaagtccacggcagttaaattgctcagcagaaaag

SEQ ID NO: 108869 - DNA, 1090 bp, Homo sapiens
tagtaaacttaatggacacggtgtttaaaaataaagaaaagagccgcaacgtcaccttatctagcctaattaaattgtatggactttctgttaagagttgatacagccaaaatgcattatgaacttatgttaacctctcatttccttcttaatctaggtctactaatatcttttaaaagccagtttttgttgttgtttgttttttgagacagggtcttgctctgttgtccaggctggagtgaggtggcatgatagtggatcactgcagccttaaactcctgggtttaagcagtcctcccatattagcctcccaagtagctgggactgcaggcgtgtaccactgtgtccagctaatttttatatttttcatagagataggggtctcacaatgttgccgtggtcggtctcgaacttctgaactcaagtgatcctcctgccacagtctaccaacatgctggaattacagacctgaaccactgcacctggccctaaagctggtttttaatgacattttacataagtacagctcaatgctgaccggctttgtttcccagtgatcacttttctgaggtttgtaggtatttggacctagtctttaaaaggtaaataactgtattcttgtaaataactgtaatctttttttttctcttcagaatactgttcctgccttagttgtattcagactaaattatactcaaagctgagacgtttccagtaaagtcaacatttatctttatcttgacggcgtcacatccatttttctggccttccagtttccatctccccagactgatttccttgatggtgtggatgtgtatggtgtctttggttctgtgtgttgcagggcaagcatggcctgaggatccctgtgtgtttaacaatggaatgtcatcggcttttgtttttttggaggggaagcatcttgattttcagggccatgtttatttatgcatttaattctgaaataagagggggtgcaattttataaactaaattatactgttccccattctcttttggaaatgcccatgaatgagacagattagagaggtattttgcatgaacgaatgatggagagaccaaaaaaaaa

SEQ ID NO: 108870 - DNA, 1043 bp, Homo sapiens
tcttcaaacctcagagttaagcagaagtataattacagtttttaatcattgctgtgtcttatcaaccacggcttttaagaaaatgaaaaatttttcgtttacctttcattgtggtggctggctgtccattcacctcatacggtgtcttcaagttgaaacaggtttcttgtctctaattaagaataagctttgaaactaaggtcggcagggaagtggattttctggtaaagcatgaaaacgaaacatctcccctaccagacaaggtaggtatctcccttacccctttagagattgtcctttggggcaccctttcaaattctcctgccaggcgactactggaacaacttgctctcttgctaatgtaaatgactcataactaagagtaggtgagatttgtcgactggggaagagtatttcctgaacctgcaggaatcagatggtgattcacctgaaggaaacacagagggctggagcttagactgccagaagtctgcttaaggagtgggggatgaagtctcgggttggggcctactaactcatcagatccaatttttaggtcattttttttttccagcctcctattgctatctagaaaacatgtatttgcagccttcctgccaattaaattttggattaaaagaaataagaatatgctttatgacagatgaattctttgaaaatattattctacatattatttaaagagtattgttgtaattgataactttggaaacttgtagtcttatgaaactaatgaaatctgtagacatatttttacacatacacaatagacatatttttacacatacacaatgataagtattcaaaatatgttaaattattcaggggctgggttcactgactcctttgaatgctgacctttaacataaaacaatttattttattgctttaaaaaagcatccaacaatgacaaatttatataatcatatcacttttttttttttttttttttttttttttttgtgagacggagtctcacactgttgcccgggctggtatgcagtggcatgatctcagcttgc

SEQ ID NO: 108871 - DNA, 1047 bp, Homo sapiens
agatgtaatttactatttcatgccagactagaccgaactctgatttaaggaaagagcatttcttcacattcttgtctctcggctgcctgttggtcagaatcatgttaggcaaagagagtaagaacatgaatgcccagatgacaacagagagaatcttagcccccaagagatttttggggttggatgttttaaatggcctggtggtcttctggtagcgatcgatagttatcagtcccaggaatgaaatactgatatacattgtgaaataaaatatgacggaggtaacttgacacacaaaagttctcagtggtcctgttcccagtttggcatcactaagaattttgaatggaaaagtcagaatcatgagaagatcagaaatgactgtgttcttaagaaaaataataaagtttgatttactccggatttgaaagaaaatcctcatcgccaggccatttgtgataagtccaacaaaaaacaggacagtgtagagcagtgggaagaggacctgggtgattttgtagtctctggtgcacagactggtgttaccaggcgcagaggtgaggttgtcgacggcttgcatttcttgttggttacctagagaacaaaagagaggatggttattttcagcctaaggtagttattattgctgttatctctgtgtgtaacttttttggacacagcctcctctaaaagttgaggtttctcatcttcattgtagtagttagtatgaacacagaaaactgaatcccaaaatatttcattgcagcaaatattgcatctctgctgaagagaaatgatctgaagtacaatatgtgaagttatagatgcttagtatttttttatttgttgaatgtttgcctcttaaagcacattttgtcttagagctcactcatatttatatgcaaaagctggaagagaaataatggggctgtgctttactcttctctagcttcccctccatgccttttagctttttggtttctattcacagtcacttttccccccaacgtccttatttctgagcttcttttactgtagtaccgtcaa

SEQ ID NO: 108872 - DNA, 1079 bp, Homo sapiens
cagaactgcatgttttattgctttctgtaggcttaggtggaaagctcatgcaaatgtctagtgttcggaaaaaggaaagataatacagaaataaaagggaaattttagaacagtctgtgtgtctcatacatcaaagtttcgctttggagtttctgttataactgtgagagcaggggaaaggatgctttctccggtgtaacacctgtttctgattttagttcctccgaacgcaggggtgtatggttggtggcccccctcatcgccaggttgccaacttctgtgcaaggaagagtgctgaaagccgctggggaagagctggagaagggacagcacttgggttcttcttccaaaaaggaaagggacagacagaaacagaaaaggtgtggctggaagatgggcgtctgtgtgagagtttaaagaataattgagaaagtctcacttcctgtaaacctgtgtggtcactgtacccacagtccactgaaatttagtttttaaatggaactgggaatattctattaggcaaggctgtcttattcctaaaaaatttcaggttataatccttaatacattagttctcaattctgcctttatatccaaatcactgctgaactgttaaaaacagtgatttccgagacccgctttagaccaactgaatcagatctggatagctacctgatccctgtattttatttttaattatttctatttttttattatttagatatttatgtttaaaataaatataatgtataattctggcatgttggtgtctgaactagttgctcatatttttaacatttagggctcctgttctagactagacattaagactcctcggccaccacaactaatgttttcttaatttattttatgcccaagaaaaggtttcaagtaattatatttgaaaaccgtgttactgagaaagaaagaaacctcaccctaatgtgaaaatgccaagaaacctaggagtaaaggaaaaaaattgataatttcttccattaaaaaaatattttaagcacatagatttcttgtccactaatgaataatactatagtagccaccatttattgactgcttac

SEQ ID NO: 108873 - DNA, 1074 bp, Homo sapiens
gactcatgtcttccaagacatgagtgtaacagtctttacgtgatagtgtgtttgcttcagtgttcttttttttcctcttcttttttaaaaattctctgaacatatctaacagagaaaactcttgattattgttaggaatgccttactacaatttgttgattggagcaataaaatgtgtgattgcaatactaattgtgcatggtgcacatgagagttttgttataacttagtttctaccttttccacctcaaagatatttggcaaaacaggattatgatagacttttttctgttcttgtttaattagatcccttagagtgtataactgtactgtctgttgtagtagctgccagccacctgtggctgtttaaatttagactatttaaaattaaattaataatatagttcctcagtcacactagtcacatttcaagtgttcagtggtagccaaatgtggccagcaggactagcttcaatggtgtgtgacgtgcactgtgtttagaagggcctgtgtttaaaaaggcttcatgcttagtttaatgctctgcagtttctctgtggaaattcttactaagttttgatcagggagccttgtgttttcgttattcactgagaccccaaaattatgcagttcgttcttgtggctagtagttatcttattggacagcgcagagagaaaacattgcagccatcatagaaagttctgttggatagtactgtcttagcagcatcatgtaaaacgtgtccatctagtggatagcagcacagctcccatctgttaccatcaatggctgcatgacgactccaagtaatcgctctttggaaagttagcaaggttgatggtaacacatttgagaaaatagatattttggataataatttggaaaatgtgcattgtatgtacaatttttataataaatagcagcatagcatggcccacaaacttgaatttcaaagcccaaaagttctgggttcaaatcccacctgtgccatttgctttcttaataagttacctctagctctgttttttcatttttaaagtagggataacgaaactgctgaccttaaagggctc

SEQ ID NO: 108874 - DNA, 1030 bp, Homo sapiens
agccaaagctcttcattctttgtttttttctttgctagagaagagggtggtaaggtagctgttgaagataagtgaactcttcctgttttggggttctgattcatgctgtatcaaagtggtaatggtaacacattgccccccatcccctgacttgtcctgctgctatctggtgacattcacagttgaattcaataaatgcttttttcttagggtagtgcagaagtgattgcagtcgtgtgtgtggtggagaccagcaccctgccagatgttatagagcgtgccagtgaaacatcacttcctgccactagaggacttagaatcataggaagtggctcaatggcagcactgcctgtggaaagtagtttacggttgctgaatttttgacagaagagctggaggcattgtattagtttgctagaactccctaacaaagtacgcaaactagatgtcttcaacaacagaaatgtactgtctgttttggaggccagaaatccaagattaaggtgtcagcagggttgttggttccctctgagggctgtgagagagaatctgttccatgcctctcctccagcttctggtggctcgctgggactctttggcatcgctcggcccgtggaagcagcaccctgagctttgcctccaccttcgcaggcattctccctgtgcatatacgtgtctacttttttataaggataccagtccttatgcgttttcactttttataaggacaccagtcatattggtttaggtcccatcctaattatctaatttcaacttgattaccactgtaaagaccctgtttctaaataaggtcacattctgaggtactgggtgttacgactccagcatgtcttttttagggaacataattcaaccgaaataataacaggtcagaaggtgagagaagtttgggaagccttgacagaggaggctgaatgtggcagatgttgaaggcagtaggatttgattcattgctttttttttttttttttgaaaagaagaaattgaatgttaattttttttagagtta

SEQ ID NO: 108875 - DNA, 1043 bp, Homo sapiens
gagaccagcctggccaacatggtgaaaccccatctctattagaaatacaaaaattagccaggcgtggtggtgtgcacctgtaatctcagctacttgagaggctgaggcaggagaattgcttgaacccttgaggcggaggtagcagtgagtggagatcgtgccactgcactccagcctgggcgacagagtgagattctcatctcaaaaaaacaaaacaaaacataacaacaacgaaaaaattctgtttgttcttccttactcgaaggtttgttatttgagacatacactgcgtttcttgcactgtcacatggcctttttaaaaataaggtattcagctcttagtaattgtgcattaaatgtttgtttactaactgcctagcaacgtaataaggctgttggatttgacagaacttgcagaaaataagtgctgattgtttctcagagctcgcctttgtatttctgctaagtatatttatttagggtctgcccatgaaatgaaaactgaacagtggaatttgtactcaggaagttatgtaacactttatggcagggcttaaaacaatgaaaattcagccactgcatgtttcaaacaagtatttgctgtgttgccaaagtagaaagagcagaagggaaacatcatgggaagaaagactattttgtttctgattgcaggggtccttggggcatattatgtttatactcctctctcagataatattgaggaactctggtgactggtgtggatagctacacctgtgaaaatggtaacaaatttggtaagttcagaatttcattgtctctgtgaatatttaagtttaatcaggagaaaataattaccagctatattatttttaaaactttctgctgtcttggaaattttgctcttaaagtttgcttgacgattttcaaaccttaaaaaaaaaaacaaacttcattctttaacacaaatccctaacagaataagtatgaaggaagtattcaagtaattttaattttaaatattagaaaacaaaatatgctggctgagaaaaacaatcttactg

SEQ ID NO: 108876 - DNA, 1065 bp, Homo sapiens
atggtttgagatattattgcttgtgtttacatttccacatttgaggcaaagttagactccaagttgaattcattaaattttgattccaacattctgttcttcctttgggcacagaattcctatgaaatgaaacactgggttttgttccagaacaagaacagactaacccaaaatttctcctgggggaaaaaaaaagagtaaaattatatttctcattgaaaattgtatttctcattgaggaagggtgtgttactttattatataaaatgccttatcttcattataagaaaaaaatgcccttgcatttgtcactgttgccatacattaggcctgtatttgatagatctatatggaaacagagaataaataatcttgctgcaccttctggctttctgcttggtgatagatgtgcggattagagaacatctcaggtcttggttaggagaagctgaaaagaataggtgattgggtttttaaaattctgtatgcaaaggcattagggtgggtagtagatatgagagtcaaaagagtggaggaaagaagtgaaataggttcacgaagtgattggcccaaaataaaatcccatcaaccatatggatcatagagaatgtgacatagaaagattttaaagtgtatggtttttttaggccaaaaagcttcatatgtttggaaatctagaatgtgctgtccagtacagtagccacatgtggctgttgagcacttgaaatgtgtcttgtccagattgagaagtgtaaaatactaccggttttgaaaactttatatgaggggaagaaagtaaaacatctgattaatatttttatatttatgatatgttttaatgataatttttgatatattggttctaatagaagatcttactagattaacttcacctgtttcttttctctctctctctctctctctctctctctctttcatggtgtctagaaaatataacaaatgtggctaacatcgtatttattttggacagtgttgttctaggataaagcaggaaaacaatattctgggagaaagcttaaagattttgctggtcaaaacaataaa

SEQ ID NO: 108877 - DNA, 1129 bp, Homo sapiens
tcatgccactgcactccagtctggcaacagagcaagactcttgtctcaaaaaaaaaaaaaaaaaaaaaaaaaaggctaatgtttataccaggcaggtagaaaaacaaaaacggacctcattagaggatacatgaggtttctaaaagtggaactcctttgtaaatgtaagaagtgatatcaatattattattattttaatatacttattttgaagtaactaagtttttttgtttatttcttgaaagaaacaatagattggggaaaaaccatttactcttttcatgccctagtttctaaatctgtgacattataaaggtgtaaatatttatgaaaatagtagaagttgccactggctgtattcttttaagtaaggtatctcatttaatcttttctactgtaaagtagccgtaaagtaataagacttttaccttaaagatcatgactagaacaattttttcatttgcggagatatgaggcttgtcatttttattattccaatgttcatgtttttaaccaatttttcttgtcttgcctccactgattatatataaagaatagcgatgagaatatagctgtaattatgattactaacatctttgaatactttctgtgtgctaagctaaggtttataattaattcatttattcctcagaacaaccctatggtataggtactgttaatattctgattttacagataggggaactgaagcacagacaagtccaattaattgtgcaaaggtacttaattaataagtagcacaataaggagttgaaccaaggtagcccagctttagaatccatgctcctgtgtaaaagaataaaaacagattttaaaaatacttattttggatgctgataggagcttgagaacataaacgtttggaatactttaaaagacttgtactttctacatcatttgaagagattccagaagaatgggcagaaagtaagaggatagagagaaaaggcctggggtgaggggtgggaagcattaataggataggaagaaatgaggaatcaggtgttcaagggagattggtgctacacttttgaggtcattgatgaccagctagtaagtttaataatacgtagtgtggaacataaacagacacttggtgtttagggta

SEQ ID NO: 108878 - DNA, 1054 bp, Homo sapiens
gaagcttaactgtgggcaggaggagggagaactgggagaccaagaaagatacagaaagataggttaaagacttgtgagtaggaaggtaagaaaaagttcatgcttaagggctactgttatggctatgaaatattcgtgacgcataatattattatccactattgctaatgaacatggagaaagagtaatgaagttttagaaaggctgccgtgtgcaatgagatagggagctgtccaaggacagggctagattgtgaggcagtgaaagggcctatgtgaccctggaacataataatttatagaggcaatgattgtgtgtgtgtgtgtgtgtgtgtgtgtgttttcaaatgtatgtttcagtgtgttcatgtgttgtattcatatatgtgttcatgtgtgtgtgtttgtatattttgtaccctagaagtaatccaaatcctgatgcagcagttgataatttagtttaccaatatttttggaactccatctattttgcatcattatggctaagccatggggttactgagatgaataatatattttttctgtccttaaaaacatatggtctagtgggtcagatatataaggaaataaaacactgtatagggcataggtgcagagataattcagagaaggcagtattacgatatggatggatagagatggggataatgacatcttggtagctttttggaggaagtaacatcttagctggctttagaggaagaaaatagttacatgtgaggcacttgaagattctgaagagaaggagtaaagacattgttgaccatgcaggtggtccattctcaaggcatgaaatcattgagtaattcttaatgcagaacaaagtttcaggaagatagacacagcttacagtttatgactggacctttgttttttttttttttttttttatagaaactggcattaagacctaggaacttttttgaaaaccaaaatatttcttgaacactggggatgaggtttttttttttttttttttgatggagtctcacactgtcttccggcctggagtgcagtggcgcaatctcggc

SEQ ID NO: 108879 - DNA, 1016 bp, Homo sapiens
tgatactgtaggacatcagtgaagtgctacttagtaaatcttaacctatctcttttttctacaggttggtactaagaagtgcctttcctgacgtctctgctgcttggaaccgcttctagagcagtctctgcttttgccttgcttgctgccagctagactgtgacgacagcacatccaccctccacctctagcccagacacccccatttctacttataatcaagagaaaagctctaagtatctggcattgccctaggctgctttagtgttaaaagaaaagtttgctgaaaaagtaagatatcttctgccaggaaatcaaggaggaaaaaaaaaatcattttctcgattttgctctaaactgctgcatctgtctatgccaaactaatcaataccgattgcaccaccaaactccattgcaaattcagctgtgaggagattccctttcagacaactttgctgaaagcagcttggaaattcggtgtcgaagggtctgccacgttttcatgcttgcattttgggctccaaattggcactgggaaggggttactgagagcacaaggctgataccaggccctacttttaaacgttcatctacttacaatcctagtatttctctaaaaaccaaaacctctttgaattaacagtttcatgctgtgaatttctagtgggagatcttttccttgatattgacgacacaattttccatgtacttttaaagcagggagtggggaaaagtattttgaggggacattttcatcatcagttcagctttttttttttggttgttgctcttttttgggggggttgggtttgttggtttcactgaaacatttaactacctgtaaaatctaaacatggctgttagtgtcacaccaattcgggacacaaaatggctaacactggaagtatgtagagagttccagagggggacttgctcacggccagacacggaatgtaaatttgcacatccttcgaaaagctgccaagttgaaaatggacgagtaatcgcctgctttg

SEQ ID NO: 108880 - DNA, 1029 bp, Homo sapiens
ttgtaatgacaatgactgagttttttcctgccaagttcagttccattttttttttaagtaaaatatcagactatgtgaatttatagacttatttctcagagtatattaaaaatagtggaagttgggagatttttaattcttcatgagtccaagctgagacatagctacaactgacaggatctgttcaccatacatacttccaagtttggaaactatcagcaggcacctgcaactaaacccacaagcgtaaatgttccagagtgttagaatcttattcgcataatacctagcaagatcccagatgtaaacgggagaactcaaatgttcctttggattccgtgatggctgagaagcatccaggcctgctaactcactgaagaagaatccagcagaaggggactggacagaacctacttttgcataaccactgatcccacctaaagcagccagtgctgcatagacaaagccaagccagtataaaggcacctgtgggccagggtccatctgcattgttctcttctaattctctccagacaggagactgcagcaggcctgcacctataccactttcctgaaggtctgggtaaattgatgaggggacacaaactgtacgatgcttattttttaaaatgaaaagatgtttaacaaagcattttattcatatatgaaaacattcaagtttattccctctagacttcaaagtataactaaatgaaatgttttgaagtgcattaaaatgggtaattctttcatatataaaaacagaaaagtgaaattttcatgcttttattaacacttatagtgagtttataattttttaaaatgtgtggcacagtctcaagctagtggttagcattatttgcaagtttgtctatagagtgcattttgtcttttctatttctagaactcttaaattcccttgggacaagaaatgaaacaaatataagaatgtaaattatgaattctctttcttggaagtttaattttaaaaaatagtttaagtacttttagagtgggaatttagaacac

SEQ ID NO: 108881 - DNA, 1096 bp, Homo sapiens
gcaatctgacaatgtataacaaagtacaagtttaacctgaatatccttgaatagaaatccaagttcaacatatattcagtatacaatcaatccttgtcctgctgtcacctgggcagagagtggacagtggcacagcattaagtcagctgcggctcagggaagtgttggtggacagagaatgccctaggccctagtttctgacagcttgttgataagatttggaatgcacagatagttcttgttgtctgcaggttgctgctttgtgctgggaggggttggggattagaggtgctacttgagggcacttcatcaggcaagagccatcgacctggcagagcagctaaacatggcattcaaaccaacatgttcagaggcataattattttaagttgaaatggtataatctatattgtattgtttcttctcaatgaatcacattaggtattacatattctgttttttcatatttttgttagtaaaaatgtatagctaaatgcaaagagtttgtttcccaagcaatttttgaggtcaacagaagagttccctaagaaaggccttcttaacattgacagtattgacttttggggctggataattctttgttgcgaggggctgtcttgtatgttgtaggacacttagcagcatccctggcgtccatccattgaatataatagttcccctccagctgtgacaaccaaaaatgtctttagacattgccaggtgtctcctgagaggcaaaataactcagttgaaaaccactgccctaagaaaaagggaatacttgaaattcattttatttttctaaatatagaatcagggccagagtgaatagaggatatattttatcttttaacaaatttcttttgtactataagaattacatttgtaatatataccttatattgcaaaaagttttactacagagctctcttgaatactacatatattcagatatcatgtaacttcttattcctgtcagatggcagaattagttattaatacattctaatgtctcttttattctaaagagtcttctataattctgttcattactgctgagtaaagaaaataaattgttaaatattaccttaaagaa

SEQ ID NO: 108882 - DNA, 1047 bp, Homo sapiens
aactagaaatcacatcatccgatatttatctagggattttaattgtacaataaattgactacagttacatttacctaatcaccagaattatgaggattacaaagtagatattttaatcctttttaaatgaaaatagagataatttctttacattaaattataaactcatgatcagcgatgctgtggacactttgatcaaagtgattgatcaaagtgattatctaggattactttttaaagtaatacttagaaaaatttagcttgttagttccagcttaatagaaagtgaagtccatgctgcttattggtgaacatgtagctatatgtctttgaatacgtttcttaatattggccattaactattaaattgacttctcaaaatgttaaaatggacaaagtccctgtttcttgttataattagctttctgttcctgcttttgattgttattctccaagatgactgagttaattatacaaatatggtgaacacaaaacatattacctcaaagggatatctccttaaagaatatgcaaatgaccctccacttttgaataaattcaaatattgacattaatctccttagaatcccagtgctttaacttgagagcattgctgagtttaatactacttataaaacttacgttattttgaccattttgaaatatagtttttcatgtattaaaaaattagagatcaaatgacaggattattcatattatccagatttgtatggtgtgttgtaagctatgcattattttattcagtattcatgaccttttaaatagatgttaatagtgttttcattgtgaagattccttagctagtaaagtgataggaactggaactcacaatttttgactccaaaccctattgtctgtccgctatattattgctatttagttaacaaaagaaggtttatttagaattaatttacattttcttgggaaattttcctgattatgttttcttttgattatttaaagtttataattattccatagatgtttttctggaaatagaacttaaatgttttcagtgaatatctt

SEQ ID NO: 108883 - DNA, 1031 bp, Homo sapiens
tcataggtatgtcgagagtaccaacgtggcaattgcaaccgaggagaaaatgattgtcggtttgctcatcctgctgacagcacaatgattgacaccaatgacaacacagtcactgtgtgtatggattacatcaaagggagatgctctcgggaaaagtgcaaatactttcatccccctgcacatttgcaagccaagatcaaggctgcccaataccaggtcaaccaggctgcagctgcacaggctgcagccaccgcagctgccatggtgagtagagatatcagctctctccttgttagcagtcagaaaagcaaagtgagcaactatatctgactacaagctattcatttagtaacctttttaaaaaaattgctgaagatatgtttgttcaggtatcccagacaatatataaagaagttactttcacagaagtgagggtaactcctcaaatggttcagattgctcctactcttggcctaactcttaatctgtcttattgtggatgtagggtttctgaaatctctgctttgtaaagaaccacctgtctccttttcaacttaacgatattgccattttcagtcttcttatttctgtgtgccatctaatcagccattgttttcctttggtgtgttcttttgcacatcaaggctcttctttacatatatcttgcttttaacaataacatgatctggaactatttaggagaattgttcaacaaaattgttcttagaattagctacaggattttgagtagtatactatctagattgtctgaaataatattgtggcataaacataatagtaacactagagaagcttgactatgccattatatagacaggagagagacagcagtactcaaggagttagaaattggatcattaagaatagctactaaactatattctcaaggtaaattttaatgtgatctagtagctgattttaatgagcccattctttgttctttgcttacctgttttaatgttgtcatttttttacataaatatatgacttaaatcaatgaaatactcatt

SEQ ID NO: 108884 - DNA, 1384 bp, Homo sapiens
aacctatggtgtacctcacagcccctcaaaatccactgctaagtttaacttatatctattgggcaagtccatttcccttttactaacacttgtcaattaaatgccattttctgtttaattgacatggactcacataagtgttttctttacacacaacagtttcctttagtcacctttggtggattttgattggactatgagttctggtgtgtaaaaaaaatctatttcataaaagtaatatactgtatatttttataatagtaaatgagaaaaaaatactttcattcaaacagataactgtatatatgaagtaaatacttgtattttgacttagattttgaatgtctgactatgaacactatataaaattcttgtttttgacttagcatattaagcctgtttgtgtcaattttcttgatttgatggtaacaagcttttttcccccttttttttctctttcatccctcctccccttctctccttggaatgttgtcctgctttgcgctgtgattgcatgtcactcgctggtgatgatgtcctgtcacatggcttattgctgtgataaataccatgcccaattatctcttccatgttgccatggtttccatattgctacactcttctgtatgttcgcttatatgattttccctccgaaagttcccatggtgcacggtgctacgccagccactgtgtccgcagcaacaacatctgccacaagtgttcccttcgctgcaacagccacagccaaccaggtttgctaatttacagctttgtttcttaaaaaacaactctaatagggctcaatccaacagcccttacgcacgtggatttcccattgaggtcagtgggaatcgtgtgtacgtgagggctgtagagggtgctttaataagcatggggtttcaaagatacctcttgttggcctacacattctctctatgatgagcagcagaatgcttttatgccatttataagtgctccaaagtcgtcgcagctccatttctgaagctactaaaatgatatttacacaagcaattctcaattggtttcaaccaatcgtgcaggtattttgaccaatcaaaaatagaggccattttaaggtttttatttaaaatatttggtatatacagtttcttagttcttgcctaaatgattaatagaaagtaaaatacttaaatgtattacgtatgccacaaatgaccactcttgtaaataagtttgttataaattcattataatctgaatcatttaatgagcagattcaaaataaattgtttgcatgtagcatttctaagcttttattctcaatgctttcagtgaaagaaaaatcctaagcgctcttatttttataattaccctgcataaatgttggagatttatgaaggaa

SEQ ID NO: 108885 - DNA, 1027 bp, Homo sapiens
aagccatcacttaaagtatcattctttttttttcaaacatgcattatgctaatcaagcacccaaaaagaataaatcttgtttaatagaacatattacatgaattttaattttgtagaccagacctttactcttgaaaccttattaaacttcagaaaagaagtttaaattttgccctacaacaattgtgctaaaaaagagctctgtatattaggccccctgattctgcaaatgtattttatacttttagtttaggattggtaaattttggagcacattctacagttttattaaattgtacgtgttatttcattcgtgtagagatgatagacaaattttgatctgtctactcttgtaaaatggtttttgtttttatatgaagatataatgtaaatatactggttaatcaaaaagaaaattttcatattaaatgtatattagaaactgcttttagatattacctgttctaacaaagcttatctctttttcccttgtagatcatgctaaagaggaaaggacagtgtgcttggttagagtaaaggacgaggtcattagccatattgtatatatcgtcaagcaacacacacaaaagttcctcagccacaagacatccacatattgcatgttaaccagaagaaaagacaacattttccggaaatccactgcacactgttgcctatacactttgtacatttaattgatatttgtgctgaggtgatattcctgtctaaaagaacaacattgtctttcttttctagcacagagttatgcattcaaagatgcatacctagttagtttcctatatattcatgccatcttgaaaagacagactatggtgtaaccatgattctattatgtattggtacgtctgtagaccaagatataattttttaaaaataagtttatttctttcaaggtttacaaataacaaaggtgcaccttgtatttaaaattgccattatagatgagagcgtgcatgcacagtcatttttgtttaagagtaatatttttaatgtaatagattgtaag

SEQ ID NO: 108886 - DNA, 1096 bp, Homo sapiens
tatagcctctgtcaaaagtcaaaagactataaatgctttgcaaaaatggtttcacgtttgcttaaatgcttcatcacagtcacattcaaaatagtgactctaaacaaagaagaaagcagcactgtcatcagatgcatgataaaccaaaatatgaaaatgggaaatgtttaattaacctagtaattgggtgggttaagtacatgggtgaattttatatgtgatttttgttttgttttgttttgttcagattaactgcttatagccttagaaagccttttacaaaattaaaaaaaaaatagatgtgcattcagtttttaagaatggaatcatccaaaggaattcctttttttgaggtttggatgttgcagctagtaaaggatatttttgctctgttcagcagttctaaaaattgctgaagtaggggccaggtcactggtagttatagtatggaatgggagaagtgaaagttcagttatagaactttccatacttccaagtttactgcaagtttttatgcttgagagagatgctttctaatataagactgatgtgttgattttactgattgtactgtacatctattaaagccttagattattacattacgggttggaacccataccaatgtaatttcaatcgtgttaagaaagtaatggtgacttcacatgttattgtagttagttacattatagaatattacttatttttcttgttaaaatgtagtttttcatttcctacatttattagattttcattttctattaacaattgaataccatttcagtttatagacttgttttattagattttaccaatgaatttttcaaaatacaaaaaaaagtagtttttccttcataacatactcagttttgaattacatgtagtgtcacatgaatattcgtattgttaactaaatgatttatattttactgatttaatattacagtgtaagaatgtcagtcattgttagttcttgtctagttttcattaaaagaacaaagatcttttatatggatatcttataaatatataatcattgctaagtaagaagttaagttgttgctatcgcaacaatcctggcagacaattgagtaat

SEQ ID NO: 108887 - DNA, 1030 bp, Homo sapiens
caaatactcaaagtttacgtaatgaaaattatagcgtgtgtgcaaactcttgagggttgattatgctgcaatttagcatgttggaacgtctagggagaaggttgactttttgcacttctgtatatagtcaaaagagagaaacctgtataatagtaagatcttattttgaataaaaacgtctataattacaaggagttttgttaaggctaatacaatgacagactgagcaaaattgcttgcaaaagtggcacagagttagcactccataccccttcaaacatgttgctttgctttcttgtggacagcttgtagtttgccaggattttttcagctggaaagatacgccatcctttcaaaccctcatgactgacaaaaactccatggggccaaatctgcctgaagatcattaccaaaaatagcaggtacttctaccattaaggtgaaatcatggatcagatattccttacatttttcaaaactactgcatgtttaaaacttcaacaaaaaaagagagaaagaactatactaagaacatatattattcagatcagtttctgccaatttcagtggtttattgttcacaaaaaaatcttcaaaacaagtattgactttcacaaaatttaaatcataaacaggcaaaccaaacagcacactgtagctatagttgttatgtgattgttttttaattgctgtaggatcctgttctttcagcaggtgaaaaataaaacgcagttcaaatttcatggttttaattttcaactcagaagcactcaaaaatgcaaaatgtgataatgggcacttgtttaaaagaattagtgtatccagccttcactccagctggttaaaaatgttgcacttatcagcaaccctaccactttcatctgctgaaaggacaaatgtgcttggttttactattatgtaatcacaacttactttctgcttgtagttgcttaaaattatgtattttgtcttgggctgcaatttgttttatgcttattttattattactgcagtagttgactttgctgta

SEQ ID NO: 108888 - DNA, 1026 bp, Homo sapiens
ggtaacttggttaagctagaaaatactttaggtggaaaagaaagacagaagtaaagcatagaaatgagacagggagccactggaaatgtatgggatctcaggcagctaggtccagggactatgttgaaaggcaatcagggagttaacttgatttccaagacagactccagtctttggaataagacaaaggatgagactaaatttcatctgcaagagattaaagattttatattcctaagcaggggacttcaatagattaactctctggtgttgtgcagaacagagaggggtgggcctgttccttttactcatggcatctgcacatgtgcacagatagcagaatgtgaggtaagagtttgaaaataaatataacaaatgtctctggctatggagtaaagagattgatccctcctcccatggatacagtttgcgtgcagttatggcctccttccagaatttttcttcagatgctagatcactgctgattgttgtagttgctacatttttggccaagagtcaggggctaaaccaggccaaagtgtggtgtttctgcttctgttactaagctgagaaattcaaagtaactttctaagaatacttcattgaaatcatgatgataagatttagaaagaaattatgggtcatatttgttgtcataatagcctatcagtatcaaccttcagactaagaggatctatgatttaccccaaagagctgttctgtgtgaacgttctttatggtatgttagaatttaacagaattaatagacttaaggtgaattgggataatgaagtttctgggctcacagcccatgaaatcgtcttccccacttgtctaaagggaactttccattctatctggaggtgcattagagatggaatatctcctgactcggagcattttgccctgtcttgtccccacccccatcccacccctgccccttgtgactgatgctttgactcacagctgtttttctaatgcgtgtccagtcttcttttagaagctgccttcaaattgagtcctttg

SEQ ID NO: 108889 - DNA, 1046 bp, Homo sapiens
aaatgtgataattttattctcaaatgttgtttaatacataaatggtgatgctcagatgttttttgtggtctttctgttgttagcctcataatttattcaaattgactgaggagcaaagtgatctatttaatttactgttctatttaaaaaagagttgctttgccatatattaatctgacctggtgaaaaatttgcataggatcaaaatgaaatatatgtaatgttgaactatatttaacatatttataactccattgggatcactccaaacacataaccaactgccaaatcaacatacttccttggattctaacaggcatctcaaacttaacatgtccaaaactgagattttgatctttccccaaaatctgctcctcccagttttctcttctcacatttcataccaattcatcagtgaattttatggactcaactttaacacattccaccttgggttgttttcacaacctcctctgctaccaaatggtgggccaaaacctcatcatgtgtcttctagatgattgcagaatcctcctacataatctccctaatgtttatagtctcatcacagctaccagagtgattttgttaaagttagattatgtgacttcctactcagagctggccacaggcaactgcatttaatgtgaattaaaaacctgaattctcagtgatgtagaatggcctgcacctaattgttacatccctgtcttcctctcttggtatgttcccttaatcactctgctccagccactctggtcacctcgaggttccatcattacatctgatcagacctgctttctccacttcggattgctattcaaatattaacttcacagagaaacatttcctaataaccctttttaaaatgtcaagaaccatattcctcttcctcattttagtttccccactgccattcatcactttctaatatactatatattttacttatttattttgtttatagttttttccctccagtagattttaaactccatgagagttcaaatcttatggatacagaagtagatatagtatctacttca

SEQ ID NO: 108890 - DNA, 1124 bp, Homo sapiens
gcagtgatctctattggctgaaaaactgatcaggtcatatgatgattgaagtatgtttattgtaagggcagaaatgtgttggcatttggataaaaaactgctaacattatagaacttattacctaacaaaatttcacaccacaaaaaatattttaatggcaaattcaaggtgttttattgcttacaaatcagcatctttgactctttgaacatcaatttgtgtttacattgaaatgacaaaaagacaaactaagaagaaatacagcatgcaagttggaattcagagttaaaaccatgatgttgccgctcagccagctatgtgactgttgaccctttcaagaacacacatggatttaaaagttggatgacatccattgttggggccttgggggatatggtaaagcatgaaaactaaacagccaggagcctgtgaaatctgctactgtattttccaggacttcattccactccttggctaaaaaaatcttggaagtttcacagattatgatgtggacctgtcacctgtaaattgtctcaatctactcagacaagacactaaactgtctttggatactatagatgtcagtgcttatagcagctggaatttggctagtgacaatgtttaaagatgtaatactagttagtatctattgaagcttaaactttgctggtcaggttgtagctattgtaaaagtatttattgaagaagctcacagtccttcagttgtacagactgaaaaactttcatgaaagatccaacatactaatgtaaattatatttattacaatgtatgatattaatgtgtcaaactggtgtattttacaaaatatataatgcatacataaataagagttgtatattacagtgcttttcaaatatcagtgtcttggaatatttaagtcttcacattttttggtctaaaatatgaaaatgtttcatgatacaagtgattaattttccctagtagtgcttttgcatgtttgcctttttatttaagtttttttctatatagacacaatttggtgtcagactatcataagatcgatagtgaatataaaatatcttagccaaatggggtctgtattgtctacattttatatattaaataaaagtttttgttgtc

SEQ ID NO: 108891 - DNA, 2115 bp, Homo sapiens
ggagaccactttgcattggccagggtgtcttgggagcccggctggcctccgcggccggcgtcccctgcctccaccctgtgcccgagggggtgtccggtcctgcccatccgatactctggtggaaatgtggctctttgcagcatgtacgtttctccctgattttggttgatgcatatttccccgtttaagtagccgttagggcgcagtatcggcagcttgacacccaccaagcaaaagtttcagcctggaaaaaaaatgggggggaagggtggatgaaaaggagggagagaaggtggaaatggtttttttttttttttttctattttctttctttttttttttttttttttttggtcaacagccgtttttctagttccaagttttaaatacatggaaggaagtccgggagaaccatatgaaggagcaggaggagaggaagaaactttttttccttcttttccaggagtagctggaaattaagatcgggttccttttctgccagcttggaagggcaaccccatgactgattgcgattctgaggatgtctatgcaaagttggattcttgttacagtgtatccaatctgaagtattgcacatctgaactgggactgttaacactgatgccaatacagtgtggggtgccagaaagtgtctgctgatatttgtggaaaaaaaatctattttgtttacctactgtatcaaaggggagtctgggggagaatggtagtattttttttttttatcagctgtgaaaaaaatgttacagatctgcacattttcgtgtgtactatggtgtgtgtgtgtatgtgtgtggtgtgtgtgtgttttaagtttagccttttgtttttgttttttggttggcagtaaccgattttaatgactagcttttaaaaatacagtacaaagactttgtaaatgtgattcagggcccccagcacccctgtgtctgcagagtgccttcaaaactcagctgttccagccggtgccaacctgtgaacttcccaccatatcccagaatctgctattccccaaaccacttcccagtttcctttcagtaatctttctgaaggagccaggacaatagggcctgttgtttagtgaatttctttattattttcagcctttaaaatgtaatttccatctcttgcaatgaatttgtttcccttttttttgcttcattttgtttaaattttcaggtatttagctcccctttcatattatttttaaattttttaattacctgttgtagggtgttcctccagaagcaaagagcaaaattttactgttgtgatgtaccaattctaactaattgtaatttttaatttcatgcgtttaatcattgtctcttcattttaagacttttaatacaaatgtcatttttaaagaaacaaacccaaaactattgtttgtgtttctgtgtttcatattcagtgatttaatacagtatcatggctgaggtggatggggcaggtgcatgatactcttcagagctatttgtgaaattttaaagacagaagtgtctcagtgacaagttggatgacactactcccaactttttaaatttggagaaaaccatcaaggtcgaggaagccctgggtatggccattaccatctgattagaagatgaacaggtattttgaatctgatctgacatggaacagtttacctcattgtaggtagggaacaagagaacccatctattaaaattgccttagatctgggaaagtaaccatccttctggcaaagtaggatggcacttttaagtttttcttccttttttccctctgtttatattgcacatcaagtcaaaaacatgtttgggaaagatggttttcaattctgaagttatacctagtgatgttttttgcagtacatttgaatggattgtagacactgcctcaacccttttgaggttttgatttggaaatagatttaaaagaaaacaggctaagataatatccttgttctcatttacaccctgcagtttggaccacatttgacctcataagtttttccttttaacagtaggaggcagtgtgagctttttattttttatttttcttaaggtggtcttagtaatataacatgttcatacatatcaagagagtacttgg

SEQ ID NO: 108892 - DNA, 1051 bp, Homo sapiens
atttttgataaatttgtccaaatgctatgcataagtaatctgtcttcgagaaatctaaaataaaatgagaagtttgtttatggaaagtcatgataaaataatgggggaaagtattttgctgggagtcagaagacctattctctttttctacctctgcctcaaacacaatatatcaaacaaaatatgttaattgtgttgttttttattcataatggttttatattcccactgctatattcaaagctaacccttttcatctcgtttacagacaactgcagtagtcatgtaattcaactttctattatacatttttactcaaattaagaaaaaagcattgcttcaagtaatattttgtctagattactgaaaagttgaatatcttataactaagttcacatttttctcaaataactgactagggaaaccacagtatacctcaagcacgtggtacagacagcaatattactgtgacagcttatgaaattatgcagtgtatagcctgtttggcctcgcattaagcttttgtctataatatgttcaaatcaatcatttaagcaattcttgggtcttaaaacccttccctgatttttcttttcattgtccatgccataaagtccagagaatcagagaaaaactgtgattcaccatccttatatttaggtctgacatgccctgacatgccttcccagatctatttctccattgtgtcctaataagaagctgctatgccatccagactggtcttgcataactcttactcagaccaatctagaggctgactatggagcaaggtatagaaaggagaaacaaaagaagtgtcaaaaatgggtagggctagatgaaatagtttgaagataaagcaaaccaagaagaaaagttacagatgttactagaaggggatcaggagacaaaatccagaaatttgtctcggttaccacaccataactccattggttgagagagaccaaatgagtagagagactgaatcctttagctatttgatgagacctctattagacatgagagagagatggcatttgactgtctgtta

SEQ ID NO: 108893 - DNA, 1035 bp, Homo sapiens
gcttttaaaacctctctctctctctctctctctaatacaggacaaagggctttacaatagttctgtaagaaataagcaaagcacaacttcatgtaaaataattcccaggcaaacacttgtatctttgctatgatgtctttattgggaataagatctattttttacacaggctcaagtggaatttgcaaagtacaaagccaatcgaaaacaaaatacctcatgaatagaagtgttgctcaccaagagaaatctaaaatgatccatttgtgtctctctatgccatactgaaacaaattatacatagcctatactgctgtcttctggagcaatttagagcaacttggagccagtgaggcagatcttcctgtacacagacaccgtctctggcactgagtggccagtatcagcagtggctttgccctacagccagtttccagaagtccagatgaaatctttcacttctgtggcatgctgcctggatgctaatagcatctcttagacatggccacccctcacagggactccagaggatagaacaagacactccttgttgctatcactaaaaggagcagctttttgagactttcaattgagtgagtcccacccccccctcttagatgctgtcaaatccacaggacttcccctggggctttcaagagtctgccaagaggccgggcggggcggctcacacttgtaatcccagcacttttggaggccgaggcagggatcacctgaggtcaggagttcgagaccagcctgaccaacatggagaaaccccatctctgctaaaaatacaaaattagctgggcgtggtggtgcacgcctgtaatcccagctactcaggaggctgaggcagagaattgcttcaacctgggaggcggaggttgcggtgagccaagagtgcaccattgcactccagcctaggcgacaagagcaaaactccgtctcaaaaaaaaagagcctgctaaggagctcccccagctatgaagcagaaagtactacatctctaaagcaggaactaagttgttataagat

SEQ ID NO: 108894 - DNA, 1255 bp, Homo sapiens
tgcttcctccccacttcccttcccacacactcaaacctttccgtaaacttgagaaacttgacatatttagttgtctcatccctcatacaactaattttgccaaatatgagtcttactgaaatagaaattctttggccacttttacactgttcccaaatgcttaaaatggtttaatgagcacaggaaaaatgaccaatacttttaatataatattaagctataattacataaaaataattattcaactaaaggatcaaaagtttcagataagcaagcacttctctacataatgcagtcaccctggttttttattttgagcaccaagtattaaaattacaattaattaaatactgccccgccacacacatacttttaactctcttatgtatttattaaacacatgctacatgtcagacactgcactcaacatccactattccatgtaatcctctcaaaagcccatctgaaggatgctaagatcagacagaagttcagaggcaagcaattcaaaccaaagtcagtttctactgtgccactctacattcttaagaaaaaatgccttcatgaccaacacctggggaaaaaaactcttctctcatagcagcctgaatctacagatgcttgtcgctgtcaccccaccttcatccccatatgcatccttccaacccaggcagagaggatgacttaccgcattggaacatagcacccttgccccagcctttcctattccttccctgtttttgcgtagataagcccactcattattgccattaaaatttcttaacatacataacataaactgagttaatcataagcgtgtacagctctgtgtttacttaccaagacacagatgcgccaggcatttccattctgaccctttccaatcaataacctctgtccaaaggtgactgctcttgttttccattaccatggaatttctattaccatgcttcttttgtactttttgcaaatgaaatcctttagtatgtatgcttttgtatttggcttcttttgctcaacatatatccactcaatgctgaaaacacaaggctcacttcctccagtgggggctcctctgatacataaaccaatccttccatctccatcccagtctgataatcctgtttctagggcacccctctgcacaattctattatattgctggtcaacagtaagcctcataaaagcaggcagcttatccatttggttcactgcattatctctacaacattgcccaacacgtaacaggggctca

SEQ ID NO: 108895 - DNA, 1050 bp, Homo sapiens
attcataagatgcatgtatttccaaagctgtttaacattcttataaattaattcacaggattcaaatagttgctttttagcttcaactgggtattagcaaaaataatacaaaatgatccccgtgcaagcacaaatttaccttccttcctaaataaaacatgacagattatattacaacttgatagcctctcttttaaaaagtctgtgacattattaaagaggtgacggaatgcttgttttgcaaaccccaacacatctttcactgtggaccattgctattacttcattaacacagttgctcagatctcaaggtactcacggtctgaaatatattttacaattagaaggtatgcacaggtcaaaaagagcaatccaagggttagaagtccccagtgccccacactggctcattgccgaggtgacagggtgcaggctgtgtgagccaggcacacttacccctcaactgggcttctgtagctttacaatttggataactagttagcggacagtagttgggacatgtcacatacagatttgagtcctccaataatgtacactttgccaggttttatccctttgttaaagcaaatagaacagagagggaatatagctgccagtaaaaatcatttcccccctcttaatctcccatccttcatctccatgaaaccgactattaagataacctttctctctctgtgcactagtggaaaaagtaaagttctatagaaactcacagttaagagggactctgaatacagcaagttaaggcttttagtgcaaatagaatgaattcccactaaggtcaaaaggtttcaattgggtaccatgctgacttcttggtatcttttaaggcctaattttcccttccttgagattactgtagtgtgttccagctaatttctatttggaaacgagttggaacagctgaaaactaggtattattgaaggcaaagcagcctcacgtcagttttttatcagctcatttgggaaggtttttttttttttttttttttttttttaattaattagaaagtaggctgggcacggtgg

SEQ ID NO: 108896 - DNA, 1213 bp, Homo sapiens
gcatcagcgatttcagataggggatggagcaaataggaggatgcatcctgctacttccagggatggtattccttacctctttcctcttccatcactagcttgagtgaaaatccaggaaagaaggctttgagtggtgtattctaagatagaggtagctgattgctgtttcctatcacatagctaggtgtatcttagctgcaagagatgctggaaactctaagcctcaaacatcttaaggttttatagaaggtgttataggcagaaatctaagatgtcccccaatatccctccctgatactacatccataattattttatattgcatggcaaaggaatttagcagatgtaattaaggtcccaaatcatttgattttgagttagtgtcataagggacttatctcatgagtctaacctaattatgtaagaagttatttaaaagcagagttttctcccgctggtagcctaggagggagtcaaacagattccaagtgagaaaaggagttaacatgccattgctgctttgaagatggaaggagcctgtggcgaggatatgaagggcctctagaagctgtgagcagcccccagctcacagccagcaagcaaacaaggacctcagctcagcaacagcaaggacgtgaatcctgccaataacagaaatgagcttgaaagaagacaccaagctccaggtaagaaagcagccagccaacacttagagccttgtgaaactctaagcagagaacccacccatgctattctagacttctgactacagaactgtgagatattaaatgggtattgttttatgccactaagtgtgtggcaatttgttatgcagcaaaaaaaaaactaatgtcaaggaagtcatttttttacttctaccaaggttcacaaggtggtaaaatttcacaaacacaagggttcagatacgaggtgaccaaatgaatggtagaatatgctccaggggataagggaactgtgcactatgtaagataagcgatttagtcctgcaggtttatgccaactacgagaagaaacagcatgacccatctcctaaaaatgttctagtcttctagggcagctgatgccagcatgtacccaaagagaaaagattagtcctctgaaatgttagctacagataccttttaaatagagctctgatttggccaaaaacccaggaaactgtatacttaactgaaaacaacctagagtaaaa

SEQ ID NO: 108897 - DNA, 1068 bp, Homo sapiens
aatattagagcatactggttttgcctctaacgtcgaggtgaccatctggtctttcttgctctgtaagagtttctgtttgtgcttttttttcccttacttttattatccagtttaaatccagtcagttggccaaaatggtcttggaagaaaggatttagagattctgtaaaaaagattattagttggttctgtgtttgcaaaccagtatgtaattcccatatgaatggggaaaatgttcctgaggaattatttaattgatgaggcattcacagagattaaagcagttattgttacctccaatttatgtcttctgcacagctgattaggttggacattttaatccaaggtgctacttacattctgtttcttttgtttacaaaatagggcattactgagtagaaaatacattccaggtctaagaactgtttgttctttagtggattttaaagaataagacattaaattaagaaggaaaatctgtttgattcatcattttgagtaatgcagagaataactcttaaaaaaaaaacctgaaacagaaactttcaggaaaaaaacaaaagaaattaaactactgaataatctttcaaaagcatcgttgaacagtgagcacatgtgatgccttcccaattaattaatttgggcaaaagctctagataaacttacaccaattgttgcaaggcattctctattactgcatttttaaaacaaagtcctcccctaaaagttatgaattatacaaaagctttaggaggaattttagtactcctttacccaaaataaatagtggtaaatttccttctgttcttagctctgagtttgtatttatttataagtcattgtgatcatgtatacttatatatttttaatatgctaattgcttttaaatgggatttttgttctgattttaaaataatacatcctccctggacaatatttggaaatgtagcaaagtaaatcatgttaccattgttccattttgatatatataaactttaggtattattttatatataataaattttaagatattatatacaataaaattaaccaatttaagtatatgat

SEQ ID NO: 108898 - DNA, 1359 bp, Homo sapiens
cgctaatgacagtctctttctattcattaataaactaccctgtattcagatttaacatgtaatagaggatcataatcatgtacataattcagattaaagagacattttctgctcccaaaagccacgtgtatctgagggtaaacatttatcacctatcttggtaaaatttaaatgtaatttggtttttagaggcagtatcttttttctgtggctctacattctgtttcatgtgacatattatgggaaagttcatgtttttttgtctttgagcttattcagcttgtctttcctttttccccatttccctcctcttaaaaaaaaaagcaaactataaagaaaatctgtgaatttgaaaatatataatagcatttaagtcagtttaatagtgtgttctttttgattagtgtattatgtacagtttggatgccattttgtgtaaaatacataattaatatattactatatacttaattgtataaaggtctggaacttcagtggtggttgtctcttaaggactaggatcatggggagtgtatgtgtttttagttttatcagttataaaattctttgaattttttacaaagaaaattaaatattagtagaatattaagcttttactaaagtaaagagggaaaccagtagtaatctttgtttgcgggagaaatatagatttcttcatttctttgccccatagggctgggaagaggctaggcgacgtggtttcagatacgaaaaggactattgctgggaatattttctgtcttcaaacacactgcaggtaatggtgaatgttttgcagtaattatcatatatgctagattagagaatatatacatccattttgtacaattagatctatagcaaaaaagtcaaatatatggaaattgagtatatttgtatatatacacaaagtaatgggggatctttctgaaatcaactgcaacaaaacaaggaaaagaaacatggttccagaggataagagcaaggcacagtagggttcgatttctgttcctgtccccacattctagttgctattttgatgattcaaactgagaatttttgctaacactactaaaatctgttgaaaagtatcaaataggatagatatctgtaagttttctggtttagtatagtgaaacaccacaggcaagcatttgtaaaacagaagaaaacagtaaagagggcatatgccatcacatttcagactacactgaactgggtattcgaagccagtgagaatagaaatatcctcatcttctcccagtacacatacactccagctatgtgacatgaggcctgatactggacatttaacagatctacaaattagtaaacaaaaaaatctaacataccaaatca

SEQ ID NO: 108899 - DNA, 1004 bp, Homo sapiens
agagagtagtggcttgttactctttttaaagcaagctaaaatcgttttaaatgtaatgctttacaggatctattttaaacacacactcttcctttacagaacgctttggataaacaagaagaattgacacctcttggagtccacttggcacgattacccgttgagccacatattggaaaaatgattctttttggagcactgttctgctgcttagacccagtactcactattgctgctagtctcagtttcaaagatccatttgtcattccactggtaagaaaaatggaaataaaaccgagttattttagatgtgaacaggagttgcttagatatatttttcattagcgttttattagaatgtcattctccattatagcatcagagcaatttaaattggctatgtctgctatttttaagggaaaagaaaagattgcagatgcaagaagaaaggaattggcaaaggatactagaagtgatcacttaacagttgtgaatgcgtttgaggtaaaaaaaaaaaattttgtcctggattatgatagtttattcaaatgaaatgctaataatagaataaggatcatatttaaccttttgaaatctctgttataaggccgggcgcggtggctcatgcctgtaatcatagcactttgggaggctgaggcaggtgtatcacctgaagtcaggagtttgagaccaggctggccaacatggcgaaaccctgtctctactacaaatacaaaaattagctgtgtgtggtggtgggcatttgtaatcccagctactcaggaggctgaggcaggagaattgcttgaactccggggcgcggtggttgcagtgagctgaaatcatgccactgcacttcagcctgggcgatggagtgagactcaatctcaaaaaaaccaaaaaaccaaaatctatattatcataggtatcaggagtaaattactgagaatgttgaaatttagctgaacatttgaaaaaagttataattcatttttaattttgta

SEQ ID NO: 108900 - DNA, 1029 bp, Homo sapiens
gatgtcgtttatgtgatagatggaggaaaaataaaagagacgcattttgatactcagaacaatatcagtacaatgtccgctgagtgggttagtaaagctaatgccaaacagagaaaaggtcgagctggaaggtaaggtgggaactctgtccaaagcttttagaacacacaaaaattttgtgtaacaaaatgtgatgttggcatttaaagatatttattaaaagagttacctttcttattattttgagcttattgcaaaacatttttaaataggaaagttgttctaatcgtagtttgtttggaaaagtatctgccaagttttctattttatgaatcttttgccttcaatttctaagtttgattaataagttatgttacttataatagttggttttcatttttttaaagcatatattgtgtgataataatagcaactaatactttttgagtgtcagatcatctcctgaacacttgatccatattaactttcttaatcctcactacagtactatgaggtaggttattatatccattttacagataaggaaattaaggtacaaggaaattaaatgacttgtccaaagtcccatagctttctaaattacagagccaggatttgaatccaggcattctgactacacaggctaggctcctaatcactgaattttatagcagtactgatttttcaccagtagttttcaatgaaagcacaaggaaagtacttttcctcataatgtcataataacttaagaagtaaaactatctctgtcttaatgataggaaaaatgatctgtcttgaacttctacaaagaattggactttaatgcatatttcacagtatttctgcacttattcatatgagtgataagagccatatatggattttcagaagagggtttttcttttgcctcttacagatagaatgagagatttccattaatctttcgatacagacttaagaaaaggagagttgaaagaaaactttacaggccatttatcaacccctcgttttaagtttgtacaatatcca

SEQ ID NO: 108901 - DNA, 1023 bp, Homo sapiens
tcagggatgggatttaggagtctgtattttacaagctctctgagggattcaattcttacgtgcagtcaggtttggacttaacattaatattaacttttgttctaaagcaaacttaaaatagaaggtaaaagttacttactttagtctttttctaaatttttgactaaaaatgatctataggtttatatacttcaataaagaagaatgatttttatccaaaatatcaggttttataagttaatgaacacaaactgatattttagctagcattcacttgaaagcataatgaaaatgttctttggaatcctttttgaaaatcctaaatataaaatgtcacagattttagctaaaactagagtttcaaaaaagtgaagatattcaagaatgtttttattttaggtatgttccagaacaaaaagaacacagatcccagtttaagaggggtttcatgcaagggcatgtaaatagacaagaaaaagaagaaaaagaagcaatatataaagaacgttggccagattatgtaagggaactgcgaagaaggtaagtttattttgtctgaaggtgagaaatcagtggctaaataaaacaaaaagccagaggctgggggcatcttcttgaatctgtacgtacttaaaggagagcattgtgagtctcttattcgagctaaatattgtgctgatttgacttttaagcagtaattaccccagtaattctctccgatctgtagattatgttcctccatttgcagattgagttaattttaagcttttgtagcaagttaacagaaaacttgattaagtatttcatgactttgtgtttaactttgataggtattctgcaagtactgtagatgttatagaaatgatggaggatgataaagttgatctgaatttgattgttgccctcatccgatacattgttttggaagaagaggttagttttatttttctttcttcagttaacataattttaattttattaacgtatcaaggccatgaaaaatacagttttcttaaatgctta

SEQ ID NO: 108902 - DNA, 1103 bp, Homo sapiens
tgtgaatggtcgtatcttttaaaagaaattaacattatatcaatgacaacaaagataatgtataatgaacttgaagtatttcccattaccccattgtggtaggtgttcttataagtaaaaaattaagtgtgaagattttcattaaaactgaaagcatttctaaaattgaagatataaacctttgtggtagttaattattagaagagaaaaccaaggcttattaattcatgtctttcattcacagtcggttgccaaggaaacagggttctatcttatactgtacaacaggaatcatccttcagtggctccagtcagacccgtgagtatgtttcaattaaggaaatataagtgttatcaaaagatgtaattattaaattggattttactagttgttaaagaaaaatggttttaaaattttgtacttcacacttctgccttaggtatttgtccagtgttagtcatatcgtacttgatgaaatccatgaaagaaatctgcagtcagatgttttaatgactgttgttaaagaccttctcaattttcgatctgacttgaaagtaatattgatgagtgcaacattgaatgcagaaaagttttcagaatattttggtgagtaaaatgtatagttattacattagaaaaggtactagaaaaacaattaaaaaaattaatatggtactaggtaaagagtagtcaaaatgaatgtttagctgttaattttattttaatattattctaccctccagtttcatggattagacaattgggtctatttttaaatggtggcatcatctctcatagtgaggacaggtagcttcttgttgctaccaccacacaattaagatggcatcattgaagtcaaaccacagatttgcataattttataaacttctttctgttgtttttctgtggcttttatcacaggttagggtggcagtttgctgctaatactgctagtgaccacttatggaacaccttcaatgttccaggtagtatatttgccactttgtcttccttagtctttataacactttatgaggtagttgctattatcattcacatttttacagatgagaaagcagcctcagagcagttaagtaggttt

SEQ ID NO: 108903 - DNA, 1057 bp, Homo sapiens
ttgttctgcagacaaagccatatttatgaattatataaatttgtaatgtcctcaatagttgtttaggccaggagtttgcttctgtactcagtagccccacatatcaacattattttaattcttctccatggaacttataagctgtctcttcttgtttatgtcaatatgtttttctttaacagtgctttggctttgttctttataatttggtgcacttatctcttgcaggttggtagatccagatatccaaactgccagtattggatatggcaaaatttagaaagcattaatatgtttgttaaaaatagctatgttcagtttggtcgaattttgattaatatcttttttcagacttagtcaacatgtgatattctttattttcccttttgaaataggaattggtaaatttaattgataaccatcaggtaacagtaataagtggtgaaactggttgtggcaaaaccactcaagttactcagttcattttggataactacattgaaagaggaaaaggatctgcttgcagaatagtttgtactcagccaagaagaattagtgccatttcagtaagtaatctcttaacttattaaaaattgtctttttaaaagtaatcttgctagaacctactgattctgaaggtgtggagtgattcttaattaggcttaggattggtgactatgaaagcaaatagttgcttaacatgtttaataataaagcccaaaaaattgagtaacctctctcttaacagataatagatatttatgaattcaagataaaattgatatccaggcaaatttcagtacatgttcacaagaatgaaatagataaaatatttatagaattgattacaagcttcaaataatctccatcatttgattctttaaattttactacttggtttatttaacttttttttttacttctgtcattttttgagtatgtaaatacactgaatggtggtgaaagtgggaaaccttgtttttttttttaagctgcatttctgtagtcagtgatttatttatttattttttgagacagggtcttattttgtcactta

SEQ ID NO: 108904 - DNA, 1034 bp, Homo sapiens
atattttaattatttccttttttttttttgagatggagtcttgctctgtcacccaggctggagtgccgtggcacgatctcggctcaccacaacctccaccaattctcctgccttaacctcccaagtagctgggactacaggcgtgtgccactatgcccagctaactttttgtatttttagtagagacgggatttcaccttgctggccaggctggtctcaaactcctgacctcatgatctgcctgcctcggcttcccaaagtgctgggattacaggcgtgagccaccatacccagccgattttttccatcttaataaagggtgtttattaaagctgactttatttttatgccactgaagttttttttttacattatatgtacctagttgaatgtaaactacaggactgcttcttaaatgtttttatgtaatacgggtatagagttccataaaagttttcagaattaggaagaaattgtcacataaatataggaaaaatagtcattccttttgtagtattctaattgtaatttaacacatttgaaattcattgagtagcttatatgtttcagaaactggtatttgctttttatataaaggtttttcatttagatcttgtggcaaccgtatgagataaaatctttgaggcattcatactttaagtttgacttaactgagatcacagctctaaaatggcagtaccagattttctgactgcagatattacttgttttaagttttctcttacactcaaaggcaagtatatcctgaaatttttgattctgctccagtacttaatgtattagtaaatagtgcactgttgggtgggaaaaacataatatagaaatcaaatctaagatgaatatataaaacatattgaaaaatagtgaaagtaatttagcaattattagaatactgttagaggacagatccgatttcattttactgccactgacttaaagcattgtctctattttgctggatgtaatggagttctggttttgaatgtttcagacataaaaggaattggtaaatt

SEQ ID NO: 108905 - DNA, 1023 bp, Homo sapiens
ctcacttgctgggcctagggaaagaaaatctacgagcctttggctggctgttgctccagaggtacaaagataaacaactcgggggctcagacagaacctgatccctgccaccctccagaccaccggggtcgtcctcccgtgacgtcaccagaaaccactgcttgtgacgctaaatggcccgccctcttgtgcggtgctacggaagcaaaacggaagtgggcgcacagtggcttccgggcccggacgccatttccagcggttgctggttctgacgggttgtagtctgccaggacaatgagttatgactaccatcagaactggggccgtgatgggggtccccgcagctccggtgggggctatggaggggggccagcagggggtcatggaggtaaccgaggctccggaggaggcggcggcggcggagggggtggtcgaggcggcaggggccggcatcccgggcacctgaaaggccgcgaaatcggcatgtggtacgcgaaaaaacaggggcagaagaacaaggaagcggagaggcaagaggtaatctcggattcagtagtggagaggatgaggcagcacaggttttcttctctctcccgctgccccctttttcttggttttgtttcttaagtgatgcacgtgttttgtgaaatgtaaatgaggcgcaaatatattatgctggcgctccccgtagcgggtgtactgcgtaacattagccatgctcatctgaccaaaaacaggcaggatttatgcaggctgaatatatactttgcttaaaggacttgagaactgtgacaaagcaaatgttaagttcacgttccaaccgaaattaactttattaggagtgtcgttgtcgtatctctggccgtcctttcccttagaataataattgtcactttaaggtctttgcctggtgaagaagcacatagcgacctttctacatttgagataggtttgcgcggaacaaaagcaggcagacactgttttggatgtggatcattcagaaaaatagtccagcttttatta

SEQ ID NO: 108906 - DNA, 1039 bp, Homo sapiens
gtgggtatacaaagttgcaaataaatacatgaaatccagatatgaacaggttgaccttattggataaatgactcaaaaggctgcaactactgtggaacacttggccattcagtgtcattggtctcagaggccagcagttattggagatgtccttcaagtctacagtgggtctgaagggagggctattattttctgtgagaccaggaagaatgtaactgaaatggccatgaatccacacataaaacagaatgcccagtgtttacatggggatattgcacagtcacaaagagaaattacactaaaaggcttcagagaagatagttttaaagttttggtggcaaccaatgtggctgcccatagtttgcacattcctgaagtagacctggtgattcaacattctcctcctcaggatgttgaggcccgtatccatcgctctggatgcacaggtagagctggacagggatttgtatatgtttttatcaaccaagagaaagaggtcaactaagatatgtggaacaaaaagcaagaattacttttaaatgtgtaggtgttccttctacaatggatttagttaaatctaaaagcatggataccatcaggtttctgacttccgtttcttatgctgctgttgattttttctgaccatcagctcagagactgatagaagagaaaggggcagtggatgcattggctgcaactttagcccacatttctggtgcatcaagttttgaaccacagtctttgatcgcctctgatgaccatgactctggaaagcctagaggaaatacaggatgtcacctgtgcctggaaagaacttaatagaaagctaagtagtaatacagcgtctcagattaccagtgtgtgcctcctgaaaggaaatatgggtgtttgctttgatgttcctacaactgaatcagaaaggttacaggcagtgtggcacgattccaactggatactctcagtgccagccaaattacctgaaattgaagaatattatgatggaaacaagtcttctaatccccaacggaggaatggctgg

SEQ ID NO: 108907 - DNA, 1040 bp, Homo sapiens
agatcttaaaatggtaccatttatcactgaattttaaatgatactaaaaatgacaataaggatgttgaagaatttttttccaaatgtatcttatattagtccattttcacactgctgataaagacatatccgagactgggtaatttataaagaaaaagaggttccacgtggctgcagaagcctcacaatcatggcagaaggccattttacatggcagcaggcaagagagaatgagagccaagcaaaaggggaaacccctcataaaaccatcagatctcatgagacttattcactaccacgagaacagtatgggggaaactgcccccatgattcaattatctcccaccagatccttcccacaacacatgggaattatgggagtgcaattcaagatgagatttgagtagggacacagccaaactatatcatatctgctcatctcccaagcaattcaaggttaacttgaaaatatttagcaatacaattttaaatgcctgctcttcatggagtttaaataaacattcaggaagttggggggcagtattaattgatggttaagaatatagtctttaagacctggattccagtcccagctctgccacttactggctgtgtgaccttgagttaagttaattgagctgtagggttctcattataaaatagagataataatatctacttaataggcttgtcagaagacatagataacacgatatgtgtaaagtgcttaacactgtctggcacttactgggcaacaaataaacagtagttgctgctgaccctagttcaactcttccgagtttacaaagtggaccataactgttacaagaacaggattcctcatgagacccacataacttcctgaatatgggtaggccagaaattctctgggaactgttgaaatgtttccttccagatctgatgaattccaggacttgcaaaaactgcagaagtgaaaatcattaactaacatctgcaaaaatcattatatatgaatgggtgaattttgtgttcgttctcattgaatcccaaccatgttc

SEQ ID NO: 108908 - DNA, 1801 bp, Homo sapiens
ctatatttatggtacacaacatgatgttttgatgtgtgtacacattttgaaatgactaaatctaactgattaatataattttgaaataaagataaaatttttttaacaaaatgagcatgtaaaaaataaaagtcaggggaatatatcccttatggcattgggtactttaaactctgctatactgagagaaacaaagtaagacaaatcatactaaaaacaaaggagatgaacaaacaaagtgggttttttccaaggccagctggataaattcgtacacagactaatcagtctgtatagagggttgtggaaaggagaggttgattggcttaatgcaagatttctcacctttagcactcttgacattttatggtcaggtaattctctgttgtgaaggttgtctgtgcattgtaggtcagatggttagcatcatctctggccgctacctactacacaacagtagcaaaccctctcaagttgtcacaaccaaacatgtgcccagacattttcaaacattccttgaaacaataccaccccaggtgagaactgatgcctgaacagacacttgcctatgatgtctatatttggaattttagaagctaggattaaatatatgtttacatatatatacatacataaatacacgcacatatatataaaatacacaaacatatgtatttatgtatatataatatatttacatattatgcattatgtgtatgcatgtaatatatagaaagggagatagagaaagactgagacagagagagagtgaaaaaggacagtacagtagatgtaataaatgttaatatttggaaaaatatgggttgaaagtatccaggatttgtttatactattttcgaaaatttttcataagttcaaaataatatcaaaaaaagactggcctatatttgaaatgaaatgcatctggaaaactactaaagtcttatattgtattatcttgattctcccatataaccttataatgtcatgattcagaaattttaagaaactattactcaaaatttatatttgagaaaaaagtcaaggcaaggctgatggtagtttgtttttaatttgtggctcaaaccattagagaaaatctgtcactgagacataaatttctattacgaagaaagaacatggatatactggttgttataaagactctctctatatgtacattttcctcaggactctcccacacaacagagaacatctttctcaagacaaaattctaggaaccatccttgattcttctccctcaccctccacatctagttcttcagtaagtctgttgatttgatccctcatatccctactgaacccctccattctctttgtctctataatcatcagtctggtccatgtcaccatgtcactcccctgtagacctgttttcattattgccccttcccccaatccatctacacagcaactaaagtcatctatttaatatcactcttgtttaaatgcttaaatattcagatgtgctagaattttacaacatttcacctgtagtcaacgataatgtatgattcacttaaaaatttgttaaaagggtggatttcatgttaggtgttattaccgtaataaactaaaattaacaaagaaaagaaagctatgtggcattaaagctggtttacatctttaaaaaatctattaaaataaatttttaaagaaaaggatttttccataagattaataaagctaataagaaagagcaatcaagacatgcaattgccactttaatcttgaagatggtggttcatattttcttgcagggtatttagagcatagcatc

SEQ ID NO: 108909 - DNA, 1331 bp, Homo sapiens
attgccagcaatcaccagaagctgttctccagaactgtgagagaataaatttatgttgttgtgttacccagtttgtggtaatttatttcagcagccctagtacactagtacagtgtagaattaacttttatttctttcgtattattttcctatatgatggatttcaactattggattttttgggactatgtttccttctttaatcgtttttattttagtgctttttatgtaggctttatgccattcctttttcctttaattatttttcatttgttctattaagaccttctgtttgctcctagataattttggaacattcttcctctcatgttactgagaggaattttttattcttcacaccttcaatatgagtatttttatatttctgatttagcatgaagaggaagagtgaagtcaggctatggacaatcacggatagattactttgcctgtgcactctcccatataattttgttaaaaactcactgtataagaaaaatggctagactgggtgcagtggctcactcctgcaatcccagcactttgggaggccaaggcctgaggatcaccaaggtcaggagttcgaggtcaggaggtcatggcgaaatcctgtatctacaaaaaatacagaaattagttgggcatagtggctcacccctgtagtcctagctactcagaaggctgaggctggagaattgcttgaacccaggaggcggaggttgcagtgagccaagatcacaccattgcactcttgcctgggcaacaagagtgaaactctgtctcaaaaaccaaaacaagcaaacaaaacaaaacaaaaggctaaagacttcagtgagacctcacaagagcatatccaaatggccaattaacatatgactaaaaaacactgagtttccaaggatctagaacaatcctaaatgtcattgattgctggcataaattagttaaccaccttgaaaaattgtttggagcatctatctatatgtatggtaatatatcatgtgtttgctctatgaaccagcaattaaacttctagatgaatactcaacagaggggtatttatgtgttcacaaaaagacatgtaaaatatgttcatagcatttccaaactgaaagctgatcaaagaactcaactgtaaaatggaaaaaaaacgattatatgctcacacaatggaatacatacagtagtaagagtggacaaactaaaactacacacaacaatatgctaaatctcacaaacataatattgagcaaaaaagagatttaaaaaatctattgtattgaccaggcatggtggctcatgcctctaatcccagcactttgggaggccaa

SEQ ID NO: 108910 - DNA, 1028 bp, Homo sapiens
aaaaaacttttatataattccaccatttacataaatttcaaaaccaggcagaactaatctgtgaaattaaaagttaggataatgtttattctcgggagagatggataatgactagaaaggagcccaaagaggtccctgaggcactagccgtgttctgttacctgaagtgattgccagttatgcaggcgtttaaactttgtgaatattaattgagatgtatacttacgacttattcatttttctaattgtatgctatgactcaacattatagggttgaattatagggtttttgtattattttaagttcagtgcctttaatttactccttcaggttaggccattgtttgtttgtttgtttttactttaactgctcttaggatgtagctcctcaattcacttaccatcactcaccaactgccactatccaccccatcccacccaatttttcttctctgttttttaactacaaattgttggttcatagaaagggaaattgaattctacctgcagcactccaaatgcctcttccctcagataatgttgttttatttcctcttctagcatcctttttttaaattttattattattatactttaagttttagggtacatatgcacaatgtgcaggttagttacatatgtatacatgtgccatgctggtgtgctgcacccattaactcgtcatttagcattaggtatatctcctaaagctatccctcccccctccccacaccgcacaacagtccccagagtgtgatgttccccttcctgtgtccatgtgttctcactgttcagttcccacctatgagtgagaatatgcagtgtttggttttttgttcttgcgatagtttactgagatgatgatttccaatttcatccatgtccctacaaaggacatgaactcatcattttttatggctgcatagtattccgtggtgtatatgtgccacattttcttaatccagtctatcattgttggacatttgggttggttccaagtctttgctattgtgaatagtgccgcaata

SEQ ID NO: 108911 - DNA, 1022 bp, Homo sapiens
gaggaggaaatcttcactatgcctgtcatattttgcctctctttccctgtcttgcttatatatctatgtatttgattcttgctgccatactaaattattcttttgtacatcttatagttgttgttttaaacttattatttatttattttggaagagaaaggtctatcatacaacttttttccactatcttttcccagaaagcacaggacaagtttctctaaaagctactatatattcgaaggtacaccagtagagagtctacacaaaaacaaacaaacaaacaaaaacaagacaaaaataaaccttgtattaacccctgtaaataatgataaaaataataaattcatacagcaagtcaaaaattttaatgaagactcacgcaatatttgacccaaggtgttaaatagtagaattcgatcagttcaggtccagaagtaggatgaacatctccctcttctcaaaagacaattaagcactgcgtattttctccttgaaggcaatgacagtgtcctatttactcttcactcccctacccctaccactaagactctggacaaagtccagttctaaataaatatttgtaattgaataaattaatggatgaatgagaatgtaatcttaacaaataaaatataaacatagcacgttaatgttagaaaaaagagaaaaacagaaaatgtctctttaccattcccttatactttttaaaacaatttgctagcattgtgccaaagaacaaataagcatttaacttaataattaggaaaagaaaagcctaaggaaaaaatattaaaaaaggcaacattggaattgaatgtataataaataagtaaataagttgagaaaaccataaactgactctcaaatgaacaaagaaatagattttaagcctcaccaggaaaggattgaaaactaaagctccacattgatatatttgaaaaatccgaatattttaccaatagtaaatgtaatttcctagtaaaacacccatttccaaaactgcttcatgaagaagaagaatc

SEQ ID NO: 108912 - DNA, 2736 bp, Homo sapiens
gcggggtggagaaagcaggagcaaggaaggaaagaaggaaacggggagggagagtaagaaaaaagaaaacgaaggagggagggagagaggacatttaaatgaagaaggaaggaagcttggattcagggaggaaagggagcgggaaagagagcgaaagaagagcgtgagaagaggcaagcattatagtctccggtccacaggggagagatggagccccctcaggactagagaatcccgaagagcccgtgtattgttttcttgaaagccccgaagctaagcaattctaaaaatgtttagcaaagcccttttgggaatggtgagatggggggtggggaggatgggacattttcattgccaccgcccgccccccgtctccccggccccctcacatgaagtgactggatttgggagacctagcggaaaccttcaggtcacccagggaactgctcctctctctggtcctgcagcggcgaggcggggtagggggtggggggggtgggccgtgagagcgccgagacgcgcggggcgcggagatgtgcaagtggcgaagcttgaccgagagcaggctggagcagccgcccaactcctggcgcgggatctgctgaggggtcacggtgagtctctgtgggtgcgggtcggagggatgcccaggtgcctcgtcgccccacggcccgggcggaggcgggtccggaacctcccccaagtccggcctcagcctggagcccgcgcgccttgggcggatgcacggactgagaggcgcttggctgggctctcagcccgccactgccacccggccccgtgcgctcattggtcgggatgtgtcggctcagcagcctccaacttctcccgaatcccactggtgagtcccaggagagcgagctgagggagaaaggtccaaagggcgcgagcgcccagggcgctgggagcccgtgggacgggcacggggagggcagagccagccgaggggagcggctgccgggaggtgcgctgagcagggtccgcagctaaggtccagcgcgatccgagcgcccaggaccctgcggccgtggaggaggcgtgccctgggaaggagccgctactgggacctgaagagtgaggggagggagaggggcccagagggtgacctggaggagggctctggaagtcacgtcaggttggctcttcaggttcatttccatagttccctgcggcctctgccttggggagttatgttttgttaccgagatccgcgctaccagattgcaccggggctgatttgggggctgggaatttgccattctgctgtacagacactgatttttttttcttctttttaaaaagcaaggtttgttttcattttggtttctgtcggattttctcatttgtaactcacttttctatttttacttttcttaaccggaagatcttttcattatcccacctcttcatcttgcttttaacctgatttcctattatataattaatgcttaaatctcacaagggttggtcggtgcggggctggtgtgtccttttgtagatgaaagtttaagacctcttaactggtttcagtctatttgtctggtttcaaaataagggtaattgcaaccaaatatccctctttagcttctcgatcaagtcgattcctcccccatatatgattcaaatggcaattttattaaactgaaaactagtacctgacttgcagcgtcagcatttggaaagtgcttgtcggcaaatcgactgtatgaaggcgtgtagcttcatcccctgccatttttgtgggttctagcactttaaaaaattgtctggtaatttcttggacttaaccctgtgtctttggttgtagagcagcactaaccaggggagtaatatggttggcacttcgtgtccagaactccgtatttcaggctgggaaacacctaattaatgtctgggaaacaagaagatgatttatcctgagtacctctgtcctcagcttctgcagacacagtttaaatatggaaactgtttctccttcttcctgtgcctcagtttccatagaacaaactgtaattgcatagcacagcttcaggaacctgcagatataagttaatgttataatgtgcagtgaagatgaaaactgcttagctaagtctaagtctgtaagtcaatgagatttcctttttaacaaatcagttatccaggtttcctgctttgactgtctgatatagtaatgcttatgctcaactggtataagaattgctgctttacattgctttgaaattaagcttacacttaaaatagtaatttattctgttggtaatattgtcgagctgaagtttgcaggttcttgttatcttagacctcctaattctctattctcgtctgtggcagtgtccacttttccgtttaaactttttatttaacacatcttcagttgaagtgaaatattttaagaatacaggtatgtttttgcgtaccctgctttatatgggactataagcctcaacttggtattttttttttttttgtattcttttgtttacttgtcccccttactcttctctatgggattgggtgtggttaagttggatattcaggtatttggggtttagtcatatgttccacagtgagattccagatactgtcccctgatgtcttaaagaaaaattgtgaaccttccagaattaactggaaatgaacgacaaagttaattaggagattaaacttgcatcatttctgcttttgctcaatgcttttgaaaaaaggctactaaga

SEQ ID NO: 108913 - DNA, 2183 bp, Homo sapiens
attttaaatttagattttacttattttattttcttatattttttctaaccactgacaatgatatataatgttcagtttttagttcttgctttaagaaattgcttatttaattggcagtttttaaaagaacaaaagaaaaatagaaatttaaaaatttgtgttgccaatatttatgtatattctctcctttttctagatggtatttgcaagtcatcagactgcataaaatcaggtaagaaatggtttttacgtgtaatagttatacaactgatgtataatatttaaaattaaatgctaatcttaatttgctttgtttacacttttattcattgtagatcaattatttatgtgtctggctctataatcaatggaaataaaaatatatttaagtagtagattaattaacttgtttactctgaaaaatatattactattttcagccctgggctgtatagcagggcaatagaaaactatatcgctatttgtatggagcttgccatgtagttgaagaaagaaaatgaacacatatgaaatggtaagtttcgtatcattgtgttaaatgtctcagtgcacctcactaggtgggtgagaagaagggagtgagatgtaggcatgtaaatctaggtggagaagttaaaatctgggaagaaatttcattttatttattttttttattttttatattttgagacagagtctcgctctgtcgcccaagctggagtgcagtggcgtgatctcggctgactgcaatctccgcctcccgggttctagcaattctcctgcctcagcctcccaagtagctgggactacaggtacccaccaccacgcctggctaattctgtatttttggtagagacggggtttcaccatattgatcaggctggtttcgaactcctgccctcaggtgatctgcccccctcggcctcacaaagtgctgggattacaggcgtgagccaccgcacccagccttaaatttgggaagaaccttgaagcagggctagaatttagatgtggcggtgcagaagagggaattccaaacacaaaagaaagaaactatgttattgagaagtagtaaaagtgtacgcttgatagaaggacacattatggagaaccttgaaatccatgtttagccttgatattgtaatacaggagaaacagatatttttgaacagaggagtgatcaggccaaaggtgaaagatgattctgcgaatgtgaggttgactggattgagtgaaaaggagggcaggcaggtgggggctgcttctgtactccaagtgtaagctgaagaggttggcctgtggtgagagaagagtactattgagataatggggagggagaattgggtgactcagtagaactgacttgctaaataaaatgaatgaattgagaatgatgccaagttttaaaacccaagggactaaagagaatggaggcagcccacacagaaatagagaggttatgaggtggatgtggatgtgtttggtctaagatgaaaatagacaggaggaaggtagagatgaggtttaagaagctggaatttggatttgagatctgtcagtttaggagtgatagtggaagccttggaagtatttgagttctcaaaagaagagaagaggttcaagggctaaacttaagaagaggttcaagggctaaacaacatcaatgattagaagagaagaaaaataagtcagagcagaaaacagagaagtgtatgaagctatataaatcccatcaattggagtgtggtgaaaatgggagtatttcttctttcttcaagaaaaaggaaggtggtagctgagggcagcacctgggatatgaacacaatatttgtgtcctttaacaagagattctaaacctcctttctaacatctatgtgtcttataagaaataaataaactgttccaaataattttaaccattttctgctggatatttttaattttatttatttatttatttgaggcaggatcttgctctgtcacccaggctggagtgcagtattgtgatcacagcttactgcagccttgatctcctgggctcaaggcatcctcctgcctgagcctcctgagtagctgggactataggcacctgccaccattcctggctaggttgtgggttttttgttttttttgtttttttttgttttttttttttgtagagacagggtctcactatgttgccc

SEQ ID NO: 108914 - DNA, 1001 bp, Homo sapiens
ggaaatggctgcacaggtaccttggctgggggatctccgtggtcatgtgcaaaagtcagcatgtgcccaagttgtcaaagttaacgtttacttcctccccagatcctcctatgcttcctctctctaccagctaccctattatatgctcaggctgtcctgtttcgggaaacttccacttacatattgactactaagggttaattcctctgtctttaatacacttgacatgtctctttggtatcttaatctatagattctctcttctctcactatttttcctttttctcttcttttccttgaattttattttcgaagaaactggattttttgactaggtaggtgtatttctataaacgacaagtgattttgcctcagagatctaggcaggtttttcctcccaaggagcaatgtgacattcagaatctggaatcttaaatgtgacttaatgtttagagataggatttttaaatagtgtttggcaagtctcaactcactaaaatgtatttaacctgtatcctttaattgtagcttagaaatcaaaccaaatgtaaaacaccttgcaggatgtatcttggcagagaaatgtatacaatagaaataacttcagtggtaaacaaggttgctgtatagctgtatatttttcttcattctgctctgttggttcacaagccattagaatacttgttcacattggtagttactattcttcctaggagaataaataagatgacacacaccctcatggatacactctgcatactcataaacacacacactcgtgcgcgcacacacacacacacacacagtcttctgctggttaggaaatcttttctgccacagaaaaatacaactatttcttttagaagttgttgcaaattaggaaaaccctagaggaaatcttggacaaaagcaagtattaaagaagagtggccagagtagagtagatggaaagaaaaagaaatgtgaaaagagaaggctgggcacggtggctcacgcctgta

SEQ ID NO: 108915 - DNA, 1039 bp, Homo sapiens
aggaaggactgatggctaactcatgggggctactggccctgtagcagccttttagtgtaggaaatgaggctatttcattatgtagttaagtttggaaaaaatccttcatggaataagaaagcagcagacatcttagtaggaagaccactgaagcacacctttgttaatttaaatgtggcatgtggcaatttgctttgtgtggcttccctggcacaattctcgtgaaaattgtgtagggatattaccttacatttatccagtcaaaattagcatctgtcaatcagatcctttccaagaaagggaatcagttatatcataaatacacaaatatataacatgtgttttttaccctccagggaaactttaagcaagtagtacaccatcattttttaatgaatggtcaagaaattgaaaacatatataagttgagttaagcagttaaagggaaagacaattagcaatgcctggtaagctaagtggtactccaaaggtttattttatagctacagaaattatctacatgtagagggggtggatacaaactagcttagactggggtgagaatcctggtttgacatttaacattttagaataagagatatagaaagattcctctgtagttgaaggatcctgttttgtcctactcataagcaaatccatggggtagcaaggtgctttctggtaagcctttgatatgatatgaagctcaagttgataaaacagattaattgaaggaaattgaaaaatacgcaatttaaaaaaccataaggagaatgttgcacaagcttttgaatcctgtaaattttcattctttaagaccattcagaaaaggagattttgtcgggggccagtggtggcttgttttgatcctatttctgaaccagctgaaaactagaatacgttctttctgttcaaaacatcctagatgggccacatattagtcaggccttctccagagaacagaaccaatggtatatgtatataaagtctcagtatccaaaggcccaagaacctggagttctgatgtctaagaacagga

SEQ ID NO: 108916 - DNA, 1038 bp, Homo sapiens
acacgcccttcagggagatgcaccataggtataatgcacagataggattcatagacatcttatttcatgaaaattgcaaatgcactatttaaaattttttattgagaatcaaataaaaatcaaatcaaaaggcgaacagtgtatttttaaagaggaagttgtagccagaaacagagagaaagaaaaaagagaatgtggtacattttacatattctcaaataaaaatgtgtcatcctttatgaacaacatttgatttgattgctgtgctctgtcttagtatgggggtgacagttcaggctttgaatcaattagaatgagcacaatcagaaatgaacacttgaatctgtgtttcctgtaaagaaaagcctaccatcagggacaccttagtttgtaaacctagctaatctgcactcacccttgccagtaccccttttctcacctctgattaatcccttgaagtaagtaagtcagaggtctgcatcaggagaatgactagatccttggtattcaatgcgtggtccatggaccaacaacagcagcagccactgagaatgtgcaaaaatgcagtctcgggctccgcctcagacctactgaatctgtggctgcactttcagtagcctcttcaggtgatctgcaaaataaggttgagaagcactgaggaatagtgattttcaaatatggctgcttattacaatgatttgggaagcttttgaaatgtacccatactactaaaccttccattcttcctgggcacacaaagtttccatttcttcagtggagtagtttctgttatgtgttaggaggaaaagcaatttaagtaaatgaatagatgttaaggggtataggaattgcctggatatttgcatttttaaaagaaggtacatattgaccaactgattgctttaacaggttcaatttcagactgtgtgctcagtgaagactttaagttagagaggagtgaagactttaagtcagagaggagagacactgagcctgattttctgcttatcgtggacaagctgaacctggaatatcttc

SEQ ID NO: 108917 - DNA, 1067 bp, Homo sapiens
ggtgcatatcaactatggtaataaagtgaaaacaaagaagtgggaagctttgaaaagttgacaaattggttgagtaccatatggaactccagctgtaggatcagtcccattccaggcccaggcactcactggggccaaggtcagtagctcaaacattccacttccagtcagccctactcttggtgatctgcctctgaccccagctctagtaaatgggtttctgccttctcccatagggatttcactcctggctcattccccacttctggaaaatgagtttctttttttcttttctgtcttctgggactgaaatctagcttagctcttaacctcatgaccttttgccagaccacggagaactgaagtttccttggatcaacacacaccatctgctggttatagctccctcctcacagctgccgtgggtgccctccctgtgtgacttatttctgttgcttgtagctgagaacttcttctgttgatggtcctttatagtttaactaaaccgggattcagtctcactgggctagtcaaaccacttctaccagagcccagtttatgtgaatgatgaatgttttacatggaaaaaaaatgtttcttcatttactgaggaaggagcaccttcactgattttgtatgccaacacagacagcgaaggatcctgcttgtccttcacctatcagccatcacacctattaggaggggggaattggtcttttgttttgtttatttagtaaaaggaaatctaattatatattaaaagttaaaaaaattttagatcctgcctacatgactttaaaatgagcaataaaagtcattttttattcagggatagtaacaggaaaaagaagctagtatcagaatgttttaagattccgatacagtgcatatgcaggttttagtttacaaatagcagatggtgatgatttactataagaaggtgtaattaattgagaatgaaggatccttttggagtgtccattatgggctagtcattgtgctaggcgtaggaattagaatcctttccctgggtgggggtatacttaaaattattgcttttgtattct

SEQ ID NO: 108918 - DNA, 2113 bp, Homo sapiens
cagagatgtctgccagggtccagggaacttgggatctacctgaagagtgttactaagggaacaatgtagccttttcatgaccttctatagctttagtttaaaaaaggaacattatcatcatttgctaacattacaatcaacagcagatctgataactcattttaagtgatatattgtatttaaattacagtataatccctaatagctttttgccagcagagtctttcaggattcaaaatgcaaattgcacctgaaaaagaaaaattatttttagacttatggcactttaacttaactgtaacacagttagaatactttttattattattattattaatagaatatgtttcggttgcgaattctggaggaatccctactggaaaataattgccagtcctcccttggctgtgagccattcattgaaatggactatgagataagactgaagaatttcactaatttcgggagtgccaactgaagtttattattgtgaatccattagacatgagatttctgtgattatctcaatgagttctaaaatccaggtccaaatgaggtggaaaaattttatatgactatatacatgttatagagcaattaatattttaattgggtgtcaagaaaagcagtggttgctctataacttaatttgggttcctctgcctctctgtagagtttctgaaaatttttaaatgtcatttggagttaaggcagaatgatactgtggaaaaagcatcagcttaaaattagacctaggctcagctttagttgaattccttaaatttacattggtgacgttgagtttgtaaccaccccatacctagattttcttaaaataggagtaatatgtcctactttataaagcagttctaaggaagaaaaatgattagaacccaaggcagtttcacatagtataagatcccagacgctggccaccaggtttcttgagttcaaacccactgcattatcctttgccaactatgtgaacttgggcacaaatcacttaccgtcaatttctatatttggaaaatggggacacaaatatagttaccatacaaggttaaaagaaaacaaacattaaagaaagcatttaaaaaacagccatcatgaagttggcacttggcgtttgacatatgtcaagtgttggcttctattgttattattattattacatttaagcgtctttggctaaacctaaatgaaaatcctataatttacattgtatatttaaatctgatagtgaatttatctgatagcaaatggattctaggttgattattcatatgcttgtgcctacgtgtgtgtatgcatatttgttgtatgtataagacctatggatttaagataaattagtcacatgtatatatgaaatatagttataaactaattactccccaaactagaacagcaaaaataggtctccttacttaagagtacagctgtacagagtaaattcactatgcttggaaacttctttcatatctatttgtgtaagtctgcagctagtttctgaacagttgtatagtgatggtttcatggtactcaccaattagacaagtataagtcatgaccttggctttcttggaacgtaaccagtggttgacagggagtgtttgagttaaatgataaactagcagtccagtttacactcagcatctggtatcccccactctccatctttcttcaaccaaggcatcacaaaagcaatttgggggcaggcattttcatttaaaaatggagagtggattgtggaagcatcctgagtgtttgtaatgaaagccatttggtttttattagcattagagtctacgtgcttgctagttttcagtcattttctcttcaaaaatggttccccagattccagttttcacattgctgccttttgaattgaatcctttgtgacccgttgtgattacattgcattttccttgtgttcttttaaaaagttctgactttctctgaattgtggttggggggatggtgggaggagggtggcagcaagggaatagggtcacttgtacttttagaatgttgtcaaaagagatttttaaattgtcaaaaattgcctagaagtaatatcaagcttagtgtctgctaataaagcaaggattta

SEQ ID NO: 108919 - DNA, 1024 bp, Homo sapiens
gggctgggtaacatgctcaaagttacagaggcagaaaaccataaggtgtctcacagaaactgaatatactcatttaactgtgacagatggctcatgcgagaaagtagcaaaggagaagcttcattcgttctattagtgttagaatgtgctatggaatctggattttattatgattgcaaaaggatggtattgaaaactttggagtggaaaatgacattctgaagtattttgagaatatgaatctgcctgtggagtacagaatggacataggtaagaagaggcctggggccacaactttgtcaaaagggcacaaatagagtctgagagaaagagggtttgagacagaatggaaacaatgggaaagatggaatggactctggaggcaatgaactgagaacggatctgacctctgtggcaaggggagaggaggtgagtgatgggctgtaagagaaggtggtaagaagactcatagatgattcagtcacacataaccataattgcacccctgttacctaggtgctaggtgatacaaagagattaatcacatcaacaaaatggttaggtagacagagtaggtatttacaatgaaaaactcaaagtagtctcacattgaagacagagtgaggcaatgagctctcaggagtcaagagaaatattccttgaagtttggagtcacagaagcatcagggaagagatggaacatgagctgaatgttgaatgatgggtagaatttggaaagaatgacaggggcaatcaaagctgtgggatgaggaggttaaagcaaagacacaggactaagaaaacacaaggagtgtttgtgacacattgacgagggccatctggttggaacagagtttgcataaaccaccaaaagaggaaaaggggaaggtagggtgatacgtttattctggtaaaggtttagacaccaagctaaagattttatttttatttctgagatagtctctctctgtcacccaggctggagtgcagtggcgctgtcttggttcactgcaacctccacctc

SEQ ID NO: 108920 - DNA, 1063 bp, Homo sapiens
agcagagttggcaactaaagttatcagagtgaagaatggcatgctaacctcaggtgcaggatggccaactcaaagtagacctctattctttgttcttctgagataggaactagccagaaacttagttattcaggggtggggtgggaaggctgtgggacccagggtggaaggacccacacagttcaaaataaaacgaaccaactatagtgaaggaaaagagaactatacacagatagtattcctcatccccctgaattgacttatataaaaaagaaaacggagcatccgacaaattgatgcaatcaaaagggagcaataagcctttttctccttttaagcctcttaagaaataaacccatcattttatctagtgttttctctgctcttgcagctgctcgactgatccaaaacatggatgccaccactgagccttgtacagactttttcaaatatgcttgcggaggctggttgaaacgtaatgtcattcccgagaccagctcccgttacggcaactttgacattttaagagatgaactagaagtcgttttgaaaggttagtagagattgtgtctgtgcatcaaagatttctctcttaatatgttcattttttaaatatacaattgttagccattacaaggaatgtcacagaagattaaaaagttaataatccttccaggatttgtgtaccaccaccaagtcactctgatagtggcagacactgaaattaatgtgttgacatctcttagcattcctgctttcatttgtaggtatgcaaataataaagcggtatcatctctagagatggcaggtttggttttttgtttgtttgtttgtttgttttttgagatggagttttgctcttgtcacccaggctggagtgcaatggtgctatctcggctcactgcaacttctgcctcccagatttaagcaattctcctgcctcagcctcccaagtagctgggattgtaggcacctgccattacacccagctaatttttgtatttttagtagggacggggtttcaccatgttggccaagctggtcttgaactgacctcaggtga

SEQ ID NO: 108921 - DNA, 1418 bp, Homo sapiens
cagtcacacaaagataattattttccagccatcaaaaagactattcatactaaattccaaattcctctgtgttattgtttttttttaatctcaatttcaagaaaagtaactgttacctatggcagagccgtatgcatcactgttcataaaaaaaaaaaaaagataatctagtcaaaaggactttcatctaaattggctgattaaactgactcccagttctgtgctaggaatgataatctggtaaggggtttggtttttcctataatgttttggaactggggggaggaaatgaatgtacctccagaaaagcaaggtttttttttaactgaacccactttgcaaatgttaattactgcaaatgagcaattatgtttgcatagtgcaaatgagcaattatgttgatgcattttattaaatgtcctatttcagatgtccttcaagaacccaaaactgaagatatagtagcagtgcagaaagcaaaagcattgtacaggtcttgtataaatgaatgtaagtgctcttcatttgatttcattaggagtatatatatatatatattggtgccaaactatgcctagatttctaattgaatttatgtttgttgtttccaaaagctgctattgatagcagaggtggagaacctctactcaaactgttaccagacatatatgggtggccagtagcaacagaaaactgggagcaaaaatatggtaaggcaattttcctactaaaaaagaaatttccatgtaaaatctatgttataatatcattagtgaactaaagcttctaaagatatattttatcttttattgctttaggtgcttcttggacagctgaaaaagctattgcacaactgaattctaaatatgggaaaaaagtccttattaatttgtttgttggcactgatgataagaattctgtgaatcatgtaattcatgtaagtttgtgtgtcaaataactaaagttacctttaaattgtaataaaacttccacatacattgttgttattgatatttagaaataatgctattttcaattgaattgaataagcaaggaggtagtatatccatgctctgtccctaatacctggagttccaattttgaaagtattttcttaatgctgttttcgacattcaccccttgcttctgctacctctgttttagatacctctcccttcacaaaacaaatgataagaagggctccaggcccctcctattcagaaaaagttcctaatttctttgtatagtacttgaaaggagcatgctttcgtttatagaagtaatgcaggtctagaaaccaaaaaataataattgctttcaaaaagaacacagaaaagggattttaaacatcatttttttcctcactaaagagtatctgtacttttttctcaactaaaggtaaataaaatgcctttctt

SEQ ID NO: 108922 - DNA, 1045 bp, Homo sapiens
tttcaccattttggccagtgtggtctcgaactcctgactttgtggtccacctgcctcggccccctaaagtgctgggattacagatgtgagccaccacacctggcccatgtgcttttcttacagaaagtaaggaacagcaggagacaaaactaataatcttacacgttattagatattggggaaaggtgttggttctacaaaggtttgtcttataattattttgtagctcaaaagtaagttatctttgatgatcctaatggctcacagtgtagtgatgtgactaaaattacattttagttaaaattactagctaaatatgtttatgattggcatttattttgccaaattatgaagttcgaataacatggaatgaattcactgtaaggtatctttttgaatgactacacaacactgaaatgaagaaaaagatatatcatcaaaggccacaattaatagcacagataaatacatgggtatgggatatttgagttcagtacaatctagttgctgtgtggggtacagctactggctttaagagcaatgcagctgctttctgttacagatttgaaagtgattgaggaattttggttcactattgtacatttttatcaccatgaactgggatgcttttcatatttaggattgtgttcttatatcaaatttttcaaatcctatgatacatattttttttacattttaattctgatatcaaggtatacctggcagtcgatgtatatatttaaggcagtaaaagctttttttttttcattgttaagatgttgcatttttgcattttatactcaatgctatcccataatctcaaacaggtcacaaactggcagtctttggcttgaatctgatatagaagcatttttgtttaacctgtagtgtttttttttaaattttgaattagttgtcaatatttttcaaaattgaaagatttcatttgagaatccagatttcttagtaagtcagtagaatttgagcccctagcttgcattcttatatggcagcaattgaccagagtggtgttgtggttgctcct

SEQ ID NO: 108923 - DNA, 1798 bp, Homo sapiens
aatttgtaagtgaaaccaaccagcaacctcatgtgagaatgttcttctatattgattcactgagagaaatgaggaccttaattttcttaagaaatcacccaccttcagaagagtctgaactctgtattgggggtgaattggaattggtctcaaagcttccctttctctaccttcttagcttttcaagagcaattgttatcttactttgttgtccttcataaggaaatctgaagattaggaatccaaaatatttgagcataattacataatagatatgtttatgctctgtactgatgtttgcctgagaaggagcaataagtgaggttagtggtttccaactctaaggactactttgtgtgtgccaattacagggctctgtgcagaaacacctcacatgtacacacacttcaaaagccactatgatttatttttacttgtgcatttatacatccacaaaacatttctttgagtagagcatttcaggtctaaaagaaaagtaagaaaaccactcaggctagagtttgagagcataaggaggcgggaaaggaactggagagtagaagctacagggtatactgctgcagggcatggctagggagaagaagccagagttataaagaagtgtagagccttcacaaaatctgaggttcataaaaatagagacattttagggatgaggatagaggacttggaacatgggcacaatggactgaagccagaaagcgatgacccagagtctgtgctcctagatcagaaaagccaggagaagtctccaaattatatgtacctgggaaagaacacaagctgagattggctatcctgtagatgagcaggtgcaagctggaactgggattaaacaagaggggattttctttgtccacctacccaatgtacaagctgagagaaactgttcaggacttgagctaagaatagaagttccgaggaaataggaagtgagagaaacttaatatatttacaatttaacttcatttttttttaattcaacagatcttcattgagcttatgctatgtgacagatacttttctaggcagtagacattccaaggaaacaaggtccttgttctcatggaactcatgttctaatgggaagagatagacaataaataaccaagtaaataatttaaggaaatgagacaaattgtgagtgttataaagaaaataaatcaaggtgatagaataataagtgactggggtaaggcatgggtgattcaatttggcttgctgaaaccatctctggctgttgtttgtagaatgtgttttaatggaagcagaaagatcagagaaggccacatggtaattcatgtgaaagataacgatggactcagatggcagcaagtcagatagagaaatctgagcagacctaagataatcttgtgtaggtggctctatcattatagggaaacagtttgtgtactttaaactgctcggccaatatgtgcctcagtgatacgtggcggagcttgtctcactgcataacacagctatgacatgataagacaggccctgcaagggaaactgctgacctcactttgtcctttctgggtaccaagtgactaatagtcagaaggtttcactcagttcagtaatctgtgtttaagaaaacaaaagggggcttttaaacatgagatttagtgaatatgacagagaatttttgagatcaactgaactcagtttgtaaaaagagctagattcagccccccaagcatggaataaaccttggaagttatgcaagaagttgtacaaatcttcaggttcttattgataacctgatgaaagc

SEQ ID NO: 108924 - DNA, 1316 bp, Homo sapiens
aagtgatacctcattgctctcctttaagctcttattcaaagatatattgactgtctaagaatctgtgcaggtcatttctttaaatacttagaaaaggatttttattttactaaggttatctattaccaaaaattaatattgaaatgaaaataaattttaagtaccatgatgaatatttagagctactccaacagtttagtgctatttttttcttgcaggcttgtacagcatatgtggattttatgatttctgtggccagattgattcgtcaggaagaaagattgcccatcgatgaaaaccagcttgctttggaaatgaataaagttatggaattggaaaaagaaattgccaatgtaaaacacatttttttttctgatacactgaataatgtcaaccgctttttttctttcccctctctatcatactttaagagtaaaaggtacagcactttaaccaagtagtaaaaatgcatggcttggtaatagatcattgacttcaaaaggacctttgaaactaaagaattttatagtaaactgggttcctgacatttaaaagacacactaaattggacaaatattaaactagaaacacttaattgccttttataagtggattccatcagaattctaccatttacagtcaaactgttgttagatgcccttcagactcagagcaaatgcaaagctgttttagttttgatatgtatagaatattactttattttaaagtttaaagtgatcacagagattgtctctatttctttgctaagaagtattaacccctgaacatagccatgtggcaatgtgatactactgagttcaaattgtcaggctgctgagctgacggagggtaagacaataattttgcaacaaagcccaaggagtgtattcctgaatttcttctggctctagatcaacccttggagtctgagttggcactttcttccctgatgattctttgatagggcactgcagtctcaagtgagtgaactctgagtctaagcagcatccaggttactgattaaacccatcgtcagagtcagtctaggacccacagagttctctttgtcattgcaaacgacaacctgcatccctgactccctatctgcttgcccctgccatctaagctcatcagaatcttgaagagttaagatcatggagggcaattttagctttcctggggctacgtgaaaccaaaaatctcctatcagaaccagggtgttcttggagctgccactgaatgaatggcatttgaatgggttacatgtggttctgtgttggaaacagacttgctagaggagaaatgtttcctgctct

SEQ ID NO: 108925 - DNA, 1740 bp, Homo sapiens
ttggacagtcacacaataaaagcactagatttccttttaactccaaaaaaggataatttattcatagaacttcccgtgttctcatcaaggccatctacagaggtgttcagaacaataattcagaaataggacacaaataaaaagaaaagctctctcatagattccatttataaacagcagttgacttctttttccttacctagtatccaataatctctttttgtggctatgcatttattctcgtgtattagttgatgcacacagccaagagatgaagcaatatccatgggaaaacctacaaactaccacattcagcgatgacattctctttggcactaattctagttaacaaggacttttccaaaggcataaactattgagttagacatcttacatagaattttttaatataataagtgtttaataaatacgttttgaaagaatgacctaaaccaccaaaggaaatgaagaaaattgtatagcatagcaccctatactcagtaagtgatgtgtgcttgtgtctgtgtgtgtaaaatacaacctaagatattgatagtcttaaacattatcaattcccatttagaaagacaagatttcatcttttggcaactccgtacttagcttctgaagtataaacatggcatgcctgtagacccaatatcgataattgaaaagatgctgttttctttgacttcataacatcactgtaccactgctataacagtatattttcatctataataggatttccactgagatgtgttactgtgtttgaatgaattgtttattaatacccacttttaaaagctaaacactttacacacatttccatttttgcataaaccaaaaaagctttatttttaaatttaaatttaaattatatttttattttctgtattggttagacaaagaagatgacattaagcctaatttctaggtatatgttccttaagcttaaaggctttgttttcgctcttaaatggttggcttaattatgctaggtaaataatcatgttgcagaactagtttttatttaaaaactgattgaaacaattgaggaagaatcccaagtgaatatcaaactgatccaaccctctaactataactgaatcttggacccaagaagagaaatccacaatttctgaatgtttcatgcctgcttttttccagccattcagctggttgaatttcacaaatgaaatcatgtcaactgtgaatattagtattacaaatgaggaagatgtggttgtttatgctccagaatatttaaccaaacttaagcccattcttaccaaatattctgccaggtaggtatgtcacagtccccatgtcctcaaagtttgcatttcatatcactcttcagaagctttgcagcctcatcttttctgttgctgggcggtggttttttttatacagagatcttcaaaatttaatgtcctggagattcataatggatcttgtaagcagcctcagccgaacctacaaggagtccagaaatgctttccgcaaggtgaagaaaaaatctctcttttcttaagacttaaagcataaagtgatacatggttatgaaggcttaccatgtacactgctaggacatggtgaactttgcaaagggacaaaatgccaaagttcgttatcttgcacatatttaggacatgttgctgaggaagataaatcttcatgggctttaccatcttatgatggtctatgtggcacgatgattgcattgtcctgtaagga

SEQ ID NO: 108926 - DNA, 1944 bp, Homo sapiens
cccttacttaggttatcctgttattcttaaatttatacacatacaggttctgtaagtactcagagttcagctaaaaccttgaaaagcagtaatgtgttttctcatataccatatttcccccattacatttattgaatatgacttcacatttatgtttgtgcagtggttacagtgttgtatgtttttctaacgctttctacaatgatattaagttgtaatagcaaaaagttctactggggcatctactgaaaatatgcctagttttcagatcatatataagtaaacaatccatttggattacatttcatcataggctaggaacatgggccttgtgaggagaagtgatgaatatttcaagaacttagatgagacatttgtgaaatgtgtgctcttaacatgctccagacctttccttctggtcaaatgccatttcctttttcttttccgtaggccctttatggtacaacctcagaaacagcaacttggagacgttgtgcaaactatgtcaatgggaatatggaaaatgctgtggggaggctttatgtggaagcagcatttgctggagagagtaaacatgtggtaatgttttcagaataatacactgtcagttatacaggacactatcagtttgttcacactgatgagcaattacagttctccatcatttggctaaaattttattaatttaggcagagaacctctgaatcataatatgccattgtttcccaataaatcttcccttgccttccccaagagtctagttatgtttctgctcctaatactgtctagtctgaaaccaactcaccattttccagaagcagtgtatttggagtacccagtaacatgttctattgatatagtcatttataaactcttctattatcaaaattgcccccaaattagtattttcttaaaaacatagaaagtaaaacaggatttatttggagtataagaaatgtgctttatttttcattgttaggaaaatgaagacagtggaacttaatggtatggtgaaagaatttattgaaatgctactttatgcttagctaaaccactaatggtaatgacagccctaatattttacattagttcttccagtatgatagtgaaaccattatattctgaaaatgatttttaccttaatgcatatattaagacctatttaatcaagagtgtcgataatagcaatattgcttttaaaatataatggtcccatatatctgttagcttaggtcacagtttgtctataaatttacgtttattaacatattaagtcatacaaagatagcatgtagctctatttttaaaaatctgtgttacaaagaatgaattaatgacctatatttgtcttctgttctgatttgaggtcgaggatttgattgcacagatccgagaagtttttattcagactttagatgacctcacttggatggatgccgagacaaaaaagagagctgaagaaaaggtaaagagcagacagctaactagcaaagaaaaatctttgctagtataggaaaaattaactttaaaaacatttagaaaaaaatataatcaaagattgcataaaaacttgtaagctccttcaatatgtagtgtttccagaaagagtttttgtggataaagatatatttctacaattttaatcttttatctctgcaaccaatactctagcaaggtgaaaatattaagtttctgttcaagcaaatgtaaggtggtgcactattggtgcattataagatctataattaaagagatgttgaagaagcttttttataactattcatgcccacccataatgtgcagcttttattgagacttttactgagtttcataagaataggtctaagatttctcaggaaatcttaggtttaaatttactgtgatcatttgtctttataattatataataactagggggaacatgtcctgtgaaaactgttaaca

SEQ ID NO: 108927 - DNA, 1149 bp, Homo sapiens
tgagctggaataacaaggaaaacctcgttttccacttaactaattaatgtcatttattgaacttgagaagataggtacactgactttggagaataaaggagaacataaaaactccaggaaccaatatttaggactagtattagcagtaaacctataagcccatatctgttttctcagtcaaatcaatgaggcagaaaggtaattataacctgctggaatggaagctgtaaatattacttcttctaaaaaattgaaaaaaaaagctttgagagaaaaagttcataaaagtacaaaatatgtggaacaatgagttttgtcagtttttatgttggttttcttgagaaagctgcagcctataaggataaggcattagaaactcaatttcagacctgattttcatttattcttgaacctcccaggaaagagccattgcaaagatctctgtttaagtatgtcagacactcattttatgaacagtatggatcaagttattcaattgctagtcatgggcagattataaatttgtatctgaaagttatataatcatcttcacattcaatattataattttcataggccttagcaattaaagaaaggatcggctatcctgatgacattgtttcaaatgataacaaactgaataatgagtacctcgaggtaagtctctataaaatagactctggactactgatacttagggctggtagtagtgtcatttttagctatggggtgcctgaaattatatgaagtagcctgaaaccacaggttgtattatataaagccttcaacgctggtgccagaatgatatttgttttagcctttttgttttcattagccaggactatatttggttattgttcatttggtttccatatattccattttaagaaccgtaagtaaaatctggtgtcctttaaagagtatcaaggaagggatagacatcaaggtggtgaacaacaggcaggcttcttatcacattttacacaggcttcgagtttccctccaccttctaagttttcctctactggaaaaaccaattcatgcctactgtattttaaaaacaaaacaaaacaaaccctgatatttgagaactgaaaactattttgttctgccctggtaatgtaacagttaaaagagcagagagttgct

SEQ ID NO: 108928 - DNA, 1458 bp, Homo sapiens
agtgactaaactatatctcagtttccttgactttaaaatggggataggagcccttagttcatcggtattaaatgaacataatattagattctattagtataatagaattaaatgagtataatgtaaaatttaaagtacttagaatagtacttggcacatggtaagtactaaagaagaatgtgctattatccacatgtgttatgtgaagattaatgtcattaatgtgaggtttgtttgacacttggtttcatttgattattataaaataatacactgaatttgtgatttggctggaatactgacctgtgatatactaatagaattaggttaactggaactacatccttttttggtaagttttttaatgctctcttttaactttattgactgatataatttaagaaaatccctatgtttttagcaaaaatttagaagataccggttttaatatttcttcccaaatcttctttataatacagttgaactacaaagaagatgaatacttcgagaacataattcaaaatttgaaattcagccaaagtaaacaactgaagaagctccgagaaaaggtggacaaagatgagtgcgtatattctcatttctaatgtgatcatctagaagcaggtctttccctcctttctttgttggattaagtgaaagagcctcagttagaaaaatattaaaaagtacaaagtcctctttttattgagaacttctaaaagcatctaattatggtatactaaagatatggatcaagactttaaccagattaaaatacctttctcattaaggtatcctcaaatttacatgtctttagtttcgtcttatgtcattgcctatcagctcaatttatttgtgaacaagattctcaaaaaccttagcttaagtaagccaattcatagctcctttaagccttctcttaggccttactctgtgtccagaattttcttctgctgacagccccaccttttttctatcagtcaatcccacaactccatccccttcatagatagttaatgtaagacttttctaaccctgtggtagtcaaataggagatactaggaaccattcttattcacagtcttcttatgctcttaatctctgcttattagtgacattagtatttcctaataactattagtttagattttattttttctattaaatagatataactaacatatttatcagcatatgtgtttatgcaccgaaattcctagaaccacttatgttgactttttctccctaggctcttagcccctagacaacaggggctattccttttgaccataaagtctcagcatctagcatactgaagaatctcagttaaaacaaaattaatgagtgagtgagcaagtgaaaaataaatatactaacttgatttgtgtggtaactaacacagtaacatgccaaagaggtgcttgtttcattcatgcattcatttatcctttcatgcat

SEQ ID NO: 108929 - DNA, 1031 bp, Homo sapiens
gcctgggcgacagagcaagaatccgtctaaaaaaaaaaatgtaataaagtcattactcttttttcttttctctttttgtggagcaccaagttcaagtccttgctgtgtatgtttagacagataatttctgttgcttctacttgtccacatagcccgtagttacatcttagagaattacattttcagatgctcaagatcctcactcccaaagtcttgaaagagaaatatgtgtgcatacccaaaactgaagggacagagttgagacttttgtagggttgtattgtagggcacttcagagaaatgatgatgcattaaattttcaagacagcaactaatgtaaatgaattcaattagccaaatagtaaacttctagacacttttttcccccaattcacatgctctcactgggcaaactcattttacttctcgacatcttctatcatcatcatgtcagctgaatatttgtatttgactcagatccatttactaagattcaaatccaaatgtctacatgcttatgaaacatctccatgtagatgtcttattgaccctaaaaacacagcatttgtcatttaggcaaaaaataatatctgcccattttctaaaaacctccattttactgctaccaagacagaaaccaaggactcattttaatcatcctagacttatccctttctgttattcctgacatctacagtgatagttaattcaaatctccattttaaaaaaaaagtctgcatccaccagctgctatttaaatattacgtaggaatgggaagaggggatctctagctcaccattcccatggtcacttctgtaattcagacatttctcactgttcattgactcatctcaattattatcctactttttttaccaaccaccttctatatcttcagtttatcctccacactactaccttagagatttttttgaagacacaaattggcattttatttcctgatgaaaacacttcagtgtatccctgttgcctgtctcatgatgtgtgactgttttgaagagaaccaagg

SEQ ID NO: 108930 - DNA, 1003 bp, Homo sapiens
gttctttcctggaagttctcagaattactttaaatcaggagaaaagtcaccaaagaaaattctgacagaaatgatccacccacccaagtgtctccaaaattaggaatctctccgaaataaagcataccaagtgtgtatgcacatatatgtgcatgtacacatatataaggttagcaaagactaaaaagattgtgccttgttgccaaacagaactacacacaaacaactggtaacatctaggaaaacagtagtaattttccattaccttttgttgaaagagaagtggcttctcccagtttagtgtcaaaatcagagtcctagcctcagacagattcaggtaagtcacccagagtacttcagttatgttaacaaccatatgcaacaatagaagttctttggtcctactgtgcttttgcctttgggtaaaaagttacacttatggatcattgggaagagcctgtgctgtggagtcagggggtgaggggagtagacctgagtcagaattcctgctttgcctcctaacctctgaacctagaatttttcctttataatctggtgataatgacttcacttttgtcctgcatggttgtgttctacgttgtataatgcacctagaacataacttaggtgctcattaaatagtaaccagtgtgacacagtagtaagaaatggtcatcttcatttttaaagaggatggcaagaaaatggcattaatccctgtaatgaaattttgtgtatggtgcagatcaacagcttaggagtaggagatttgattggaaggtgagcaggttcctattcttcttagtttaaatataattttcccagttatataacgtagtttgtaggtgtattaggaaagagattaataaccatattgtgcctcagtttctatacctgcaaatatatggatggtttgaaagatgaataaaagtatacagaaaacttcgaagtcttgatgagagaatattgataattgtaaaggattagagtgattattgtgatt

SEQ ID NO: 108931 - DNA, 1620 bp, Homo sapiens
aaattgaacactggcagtaccggctcactaacaattttgttgttttcagtttttaagttacacaagagtgggtgaaaaaaatttattctaggtgcttttgcaatctagtgggcttataatacccaaaaggctataggatcagtctgttgtcttctgcttttcttcccagctataaaaattatttctgcacactttcatcagcactaagcttcttcagggcaataagagatagaagagaaacacctggttcctctgtcaggtatatttcagttctattccccacccacattgttagctcagctttgagggccatactgcttctagtggcccctctttgttttactgccaaatgcccccaaacgagaataagcttacctgacaaaattacatctcataaattaaaaataaggtttcttccttcctgcttccccactcttcactttataccacatacatgcccacatttgtatgcatacagaccaccagaggaaggatgagaaatggaagaacagtggttcatctctaaagtctgatactgctctgtggaggctgttagtgtttggcctccacactttaaaggtatcttcaggtaacctacactatctattattttaggggcaagaatcaccaccatttcactttctctttgtgaattttctcttctctgtgctgccagtcagcatcaaatttggactgcattccaaccaaaagaacttacagtttttgttacatcactgtttagttggccctgttaatttagtttttatattaacattgagatattttgtgattgatcacaaatattagacattcagtctatagttgttatcatcaccttatttaagatgtaatgatctaatcacagtacttccagaggttctgattattaccagggacaaaatgtcctgtgcttttggtaattcccagactggtttgagggcacatcaagaaagatctcaaagaagaaaaggcaaatactacacactagtgctgtgtaaacccaaccaccataattctaattttatttgaatgtttggtggtcataaatagctacctattttctttaaggtataattcacagtggacattttaatatgcaaaactctccctgctggaaatttgcaaacataaatcaaaatgcagtcttaaagccctcaatgtaatgtaacagaagagcagaaaagcactaaaacaaaaggtatgacatttatttttacaaaagcaatagacacaagatggataatatataaacttcattcgtgtcctacttttgtgatctattgttatctgaaacattaatttcatatatcctgttcctctcctctgtaatcacagtttaaaaacaacttggattggcaccttttctatttcaatattaggatttttgactagtccagagccaaaaaatatgcaactgttatttgtaattacctgtaaaacccatgtagaattcactgtcactaaaccagaagttcgcaattgagaaactgaaccctaaaaccactgggacctagatacctgttaaattaacttttatagcagttaaaactttaataactataagctgtttacctaaaaaatttgctgccacgtttgctatgaaaatgtcgaggacacatc

SEQ ID NO: 108932 - DNA, 1111 bp, Homo sapiens
tatcctcatccctcaaattatcatctgggagccatttttttccattttttcattcagcctatagttatttatgcatttttctcatctcctcaactaaactagagtctcctgaagtcaggaactgtattttataaaatctctgggttctatacagagccttagacatggtatagacagacagacagaccgacaaatctacttaagaatgacctgggtttcattttaaagtcatacaaaaatatatctttgctcaattagctggaatgttgtattttttgaaaacacttttaaatggcaataatcagagacatattactctaagacaactacttgagatatcttagttcccaaaaaggttctttgtaaaccaggaattaactatttttaatatacttggatctgaagttttaatgacccacacttcagtattctgtcaactgctccagaatcgttgtcatagttacctagtatcaggaacataaagctaaataaatttcaatacaatcttaacccattgcaatttctgaagtgatacattttaataggttttgcaacatcagaggcctccataaaaatccatgcaaataaaataaaagattacagacttgaatatatgctgatgtttttcaagaaatagaaatgctttcaaatgagctctcacctagtgaactaattttaatttgttgatcatgtttcaaacagaaagttaagattcatctaggaatggtaataatgctttaattgtgtgagtgggttgaatcagataatgcagtatcatttgtaaagagttcttatgttttctacaggtggataagtggagcagctgtagtcaatgcattttactcttcaggaagaaatcagataggtaaggtgtattcttaaataattatttaatatttctctatcgttcccaacctgtagtgcattgtatgaccaattacaatacctctaaacaagcacagctgaggctgagttattgctctattgaatgcatttcttgaaagtaaatgcatccgtgtaccttctttcactatagtgggaaaattcagattggtacaaatcacgttaagtagttttgtttcttttacaatattcttatttatatctaaaa

SEQ ID NO: 108933 - DNA, 1844 bp, Homo sapiens
ctgtaaatatctaatatttatccctgaagcccatgcaaggttatactgtgttcagcccacctgaaagacaaagaaataacatgtgctactctgtgttaactagatcttaaatttcttaaggtcagggcccttgttttattttcttaatgtcctgcatagcaatgacccagggctttgcacttaataggtattgatactgaagggtttttttttaattacagaaagtaacgtttcagttattcagtggatgctagagttttaagccattaaagatagaattactaaactatgaacatttaattaatttaattttaatttctttctaaggtcaaagattagttacctccaaataacatgacccaaaatttgattaaacaggggaaatatattccaagggaagatactctccatcttttattagtatttaagacacattattagtatatttcagaaatagtgaaatatatttcatgagagtatatattataagaggatactggaatggggcagggaaggggagggtatgatggaggtggagaggtgggagaggaccctggggccataggccagaaagatgtgtttagctagagagcaatggtaagccttccaaagatttttagcaggagaatgatgatgcccagagttgtctttaatctggctacaggatagattcagagagtagattagatttagaatagattgtagttgtgtgagacagaaagtgggagactgattaggaaattaagtcattcctgagacaaggaatgagagtatgtgtaaacagtaatactgacaggagaagataaagatgctcctgaaagctacctcacccagcctctgcctaagcagacttgtaaaagactgtaaaagaaaggaggcatctaagataagtagaaacatttacttttgctgatagagacccttcaagggccattagcagaaataatacaaagactgagggcctagaggggaaaatgaatttgatgtttgatgcattaaatataacacatttgtgagacatctgaatggagaaagttagcaagttaatgcagatgtcagagtagacatactgaaaactacaattcatttatttattcactaaactctgtaggacacattagtaagttagggtgatcattcatttatttatcattgattattcattgattcagcacatttcctgagccctgattatgttccaggtactattctagttttaggcattgttcaattttaggcatttagataatgaactagaaaaatgtatgaaattaaaaaataaacaaatatatgtacagacacagaaatctctgctctcaaagggctaatatttgaggagctggggtaggattagggcagacaagaaaaggaaggactgtgatcataaagaaataaatagaatatgaggtagtcataagtgccttgatgaaaataaggtaaggttatgtgattgaggtataccttcaattgagtggcaatacttatttaagatattattgtagatggatacaatttctgcaataacattaaaaataatattggtgttactgagtaactatttcttccaaatatttataaggcagaaaggaccttctgaatgaaggttataacttccctttgcttcaaactccttacagcacaaaacaatcttggattgtaaagtgaatcgtgatgataaatcatagtttatagcaccactccaaggtgaactctgttgtcatccataataaaatgcctgcattggtttctattacagaaggtttttgtatataactaagtgaaactgacatagtgaacagcagcttagcaagcacaaagccaaccccaagcctgccatcactgaa

SEQ ID NO: 108934 - DNA, 1033 bp, Homo sapiens
ggcatgcgcctgtagtcccagctactcctgaggagggaggactgtctctaagaaaataaaaattttaaaaacttatgccacaaataatctctaactatcttctctccttgtagtcttcccagccggcattctgcagccccccttctttagtgcccagcagtccaactcattgaactatgggggcatcggcatggtcataggacacgaaatcacccatggcttcgatgacaatggtaaagtgcagttgacattttcctttggctgaggtatatgctcataaatttgattaagagttattataatttattactacaaagctacatttattcaaacatgtatcatttctctaattttcaccacactttcaattttccctttaaattgttgcttaaagagatcagaaaattctcatagtgagttaagcaatgtgtgctttacactctggcagaatgaagtaaatattcccattgggaaaatactatggtgtttgtcagcggcagtgataatactaggtcttagtttcctggttgtatatgacgtatcttgtcatactcttaaaggacaggctgcatgtctatgtcttaaaatcagatgtaaaatcagaaaatattgcctctccaagagctcaaaagactcttaagctgcttaagagaccttttttttttcgtcttgtacctactacctagttcaagtctttgcaaacagttaggcacttaaatgccaccctaaatggaaaaatcaatttagagtttcaatcaaagctgaattcctgagaggaataaagacgtgaaatatgtaaagaggtgatagttcaatctatgacaaatttcattcacaaatggaaagtagagaacaatagagagaaaatacttaatccccattttagagagccagagaaagaaaaagagacagaaatgttagaattcttaaaaagacttactaagtgtctattaactcaaactatgcaacagtctttacaggtaggttctaatactgtttctgttttccaagtggaaaaaaataaaaacacatg

SEQ ID NO: 108935 - DNA, 1092 bp, Homo sapiens
ggcaaggaagctgtaggagaaaaagactttttttgtgtgcttgaagtagagggaaactatgagtccacagtgtcctatgaagggtccaggaatataaaaatgccagaataaaaatgttggccattttaaaaatctcaaaatatcaaactaaacagacttgggtcaggtaaaaaccattcaacagaacaaggcataacttcaagaatattttgtctggcggcctcttctgagatatcaagagccaaatgggtgaaatgtctgggtcaatgctgagaagcattagcaaagaaagctctggcagtccaggctttgccaactctgtgatgaggagggatgacagtctctctcatcgtctgcctaatttaatgttctgtcacacagcagtatttcagtccttgcactttgaattaaacatatcttataattcttgttgcaatgagttcccattttacttaaataaatatattataggcagaaactttaacaaagatggagacctcgttgactggtggactcaacagtctgcaagtaactttaaggagcaatcccagtgcatggtgtatcagtatggaaacttttcctgggacctggcaggtggacagcacgtatgtcattagcattctcttgaaaagttttagacatgttcaatcttaagtgtattattggtggtttctttttttaacaatcctaataaagtgtcttttttaacagcttaatggaattaatacactgggagaaaacattgctgataatggaggtcttggtcaagcatacagagtaagtaaaaaagattttctttccattttagtgatttagagtgtttctcatatttaataattcatttaaaaccttttgcaaaaaaagaaactcatataagcagtaaatgatgaatagaaaatggaaaaaaatatgagaagaaagagtggtgaatatgctaaccataagggtcaatacattgatgtgacggagctgaacacttaagtttgcaaagagccaagaagaagagaaaatatggaatattatatcagctgaaatgaggagagagcaggttcacaaaggaggcaacatttttctaagaaataatctctggaa

SEQ ID NO: 108936 - DNA, 1032 bp, Homo sapiens
tctagggacattattctcaactgctgagataagaatctactctgtgaatcttggggatttccattcttgtcctgtgtaagtaccataaattattatctctaatccttttgagatattgttttcctagcattgggtattttgctcacacacatcttcagatcaagactaagctgaatgcttgaggatgaccatctgtaatctctgaggttctctttttgtgtagctttctcctctttagtaacctgttcttggtgtccctgaactctcagctccttatcctcaactcaaggagtacccccagctctgactggtttgctcctatgatatggcctgaaaactctcaggacaataagctcagcagtcatgggactcactgagagtaaagtttaacatctctcaggggtcattctccttttgcctgatgttcagtgttatgcaaaccattgttttaaatattttgttcatcatttagttgtttccacaagaagttaaatccagtccctatcattccatcttggctgaaagtggaaggcattggcactcaatattcccatggtgattctaatacacagccagattgagaatcactgctataaaatccagccaaagttgggattgatagtactcccatggagaacctcacctagagcaagtacagaattgttaatgatgaagcaaattacaattgtgcaaatattttattacactttgaaaatatgtaaattcttaacgtgtaatgccttgcccccctgctagattgcgagctctctaagagggagcaggtgcaagcctttcccatatccccagcatctttacatagtagaggttcaataagtctatgttgacggtaagtggaagaaatgaaatatattttctgctcatctagttggtcacattcctttgtattaaattggaaatgacacatctcagaacgtttattatgaattcgttttaaaagtttatttagtagaggaaaactcatttttttcagtagcataaatctttaagaattaagaggattttctgacattc

SEQ ID NO: 108937 - DNA, 1466 bp, Homo sapiens
gagactaggcctctaagggatctcaagagaatcctttgacttggcaagaatcactcgatcttagtctggtgagtctattttgctaagatagtagtaactaagttaaatgtagcaattgcagacttccttggcaattcatttgtcctgactggtcttattcatcaatttataaaacaacatttagataagtttttcatcacttatttaggtcatccattcattcagttgacatttattgatcacttgacatatgccaggctcttgtcatctactattcagtagcttcttcttttcaaagcatttgtaaataaatttgatttgtctttctaatccataaaatagttgtaggttaccataactaaatgtattatcagggtgattttaacataaaatgttaattacttggtggcatgatcttttacataggtttatatataaccttaggaattaatattattgtttttctattttatcaactgcctaggcctatcagaattatattaaaaagaatggcgaagaaaaattacttcctggacttgacctaaatcacaaacaactatttttcttgaactttgcacaggtattgtgtctttcttgattgatagatatgaaaaccattttgagttataatttcacagtaagttagatgtcacatgctgagttcccttgttttacagagcatttgacttgattcactttcattgtttataatagactgttggatcatattaatgataaataactatgttcctggttgcctttcattgaacattatttgaagagcgaatggttgaggaatgcagaattccaatttaatttttctccttcccctcaacttgctcaaacaaataatccttgattgaacctgagtacatgctttgcttttcctattcctatctctaggtgtggtgtggaacctataggccagagtatgcggttaactccattaaaacagatgtgcacagtccaggcaatttcaggtgcgtggatatgaacagcaatcaaggtgctcttatattgggtccattgcttccacatttggaatttagacttttctaactctgattcttttacatttggaaattcagtgcttttttttttttttgagagtcaaaggtaggatcgagagaacacatcggagcattctacataagcatagccttggccactctctttcttagaatctacaataattataattccttagaatctacgaggctcagggcttgatctattccaacaaagatgtcgcctcagaacagtggctcaatttaaagctagaacaaagatatttctaagaggctgtgaatggtttaggcccagacccaatgagctccaacttgcaaagaaaaatttcaatataaaggaaactttctactaattagaggttcttcaatatggaataacattattcccaaagcttcaggagagagtacattgaagcacagcccatcaaggatgtgaga

SEQ ID NO: 108938 - DNA, 5498 bp, Homo sapiens
ttacagatcattctgactgtggtgtggagaatggttggaggagagagaagtcctaagatgtacacacagtagtacacctgccacgtagggagaattccataaatcaaaatggactcacctgtcatttgtgcctagtccttccaaaccagtccacttgtctctgggcccctcctcccaacccaagcaaacgtggtaggctggccttagcaggaggagaagggaaggaggtggttcagggttcagggtgggtgtgaaaacatcacctctgcatcaatgtactgacccatctctcccctcaaacactgctaggtgcagatagtgagttggactgtgttgtttttgcccactggggtcagagataagaggaaaatggcattttgccagccctttccagttattcaagctgaatccagcttctgatatttaaggagcccttttggaaaaaaggaaaataatcctctataaaagcaacaaaaaatatctatttaaagtctattatatttaagtcattatgtgagccctttcaagacatagtgagaaatcatgattatattctttgaccaaactcttattataatacaactccaaatacctgcattttcaaatgtgaattattcatgttttacaaacacatataatgcttataaattattaactctccatgacaaccttaagatgcatgttctattgtgcagaaaccaaggcacaaagaagcttcataagcaggattcaagccatgtagtctgtctcccaaattgcttttaactcctgttctttgttacttctccatttaaaaattctgttaatgagaaggcactgactcattgtaccaggttattttaagtttaactttaaattccaaattcattcacttgacctgcagagggaaatgcttcagggctccagtgtggtatggacgtgagtatcaaatgctgacggtgactttttttgtttgtttcaaaggattattgggactttgcagaactctgcagagttttcagaagcctttcactgccgcaagaattcatacatgaatccagaaaagaagtgccgggtttggtgatcttcaaaagaagcattgcagcccttggctagacttgccaacaccacagaaatggggaattctctaatcgaaagaaaatgggccctaggggtcactgtactgacttgagggtgattaacagagagggcaccatcacaatacagataacattaggttgtcctagaaagggtgtggagggaggaagggggtctaaggtctatcaagtcaatcatttctcactgtgtacataatgcttaatttctaaagataatattactgtttatttctgtttctcatatggtctaccagtttgctgatgtccctagaaaacaatgcaaaacctttgaggtagaccaggatttctaatcaaaagggaaaagaagatgttgaagaatacagttaggcaccagaagaacagtaggtgacactatagtttaaaacacattgcctaactactagtttttacttttatttgcaacatttacagtccttcaaaatccttccaaagaattcttatacacattggggccttggagcttacatagttttaaactcatttttgccatacatcagttattcattctgtgatcatttattttaagcactcttaaagcaaaaaatgaatgtctaaaattgttttttgttgtacctgctttgactgatgctgagattcttcaggcttcctgcaattttctaagcaatttcttgctctatctctcaaaacttggtatttttcagagatttatataaatgtaaaaataataatttttatatttaattattaactacatttatgagtaactattattataggtaatcaatgaatattgaagtttcagcttaaaataaacagttgtgaaccaagatctataaagcgatatacagatgaaaatttgagactatttaaacttataaatcatattgatgaaaagatttaagcacaaactttagggtaaaaattgccattggacagttgtctagagatatatatacttgtggttttcaaattggactttcaaaattaaatctgtccctgagagtgtctctgataaaagggcaaatctgcacctatgtagctctgcatctcctgtcttttcaggtttgtcatcagatggaaatattttgataataaattgaaattgtgaactcattgctccctaagactgtgacaactgtctaactttagaagtgcatttctgaatagaaatgggaggcctctgatggaccttctagaattataagtcacaaagagttctggaaaagaactgtttactgcttgataggaattcatcttttgaggcttctgttcctctcttttcctgttgtattgactattttcgttcattacttgattaagattttacaaaagaggagcacttccaaaattcttatttttcctaacaaaagatgaaagcagggaatttctatctaaatgatgagtattagttccctgtctcttgaaaaatgcccatttgcctttaaaaaaaaaagttacagaaatactataacatatgtacataaattgcataaagcataagtatacagttcaataaacttaactttaactgaacaatggccctgtagccagcacctgtaagaaacagagcagtaccagcgctctaaaagcacctccttgtcactttattactcccagaacaacaactatcctgacttctaatatcattcactagctttgcctggttttgtcttttatgcagatagaatcaatcagtatgtattcttttgtgcctggcttctttctctcagccttacatttgtgagattcctctgtattgtgctgattgtggatcttttcattctcattgcagaataatgttctattgtgggacttattacaatttgttcatcctattgttgatgggcacttgagaactttccattttggcgctattacaaatagtgcaactatgaatgtactgcatgttaccatcttacttgagcctttaatggacttatttcttcaaatccttccaaaaattattataagcattgaaattatagtttcaagccaactgtggatacccttaccctttcctcctttatcacaaccaccgttacaagtatacttatatttccctaaaatacatttaaaacttacctaagtgacatttgtagttggagtaataggagcttccagctctaataaaacagctgtctctaacttattttatttccatcatgtcagagcaggtgaagagccagaagtgaagagtgactagtacaaattataaaaagccactagactcttcactgttagctttttaaaacattaggctcccatccctatggaggaacaactctccagtgcctggatcccctctgtctacaaatataagattttctgggcctaaaggatagatcaaagtcaaaaatagcaatgcctccctatccctcacacatccagacatcatgaattttacatggtactcttgttgagttctgtagagccttctgatgtctctaaagcactaccgattctttggagttgtcacatcagataagacatatctctaattccatccataaatccagttctactatggctgagttctggtcaaagaaagaaagtttagaagctgagacacaaagggttgggagctgatgaaactcacaaatgatggtaggaagaagctctcgacaatacccgttggcaaggagtctgcctccatgctgcagtgttcgagtggattgtaggtgcaagatggaaaggattgtaggtgcaagctgtccagagaaaagagtccttgttccagccctattctgccactcctgacagggtgaccttgggtatttgcaatattcctttgggcctctgcttctctcacctaaaaaaagagaattagattatattggtggttctcagcaagagaaggagtatgtgtccaatgctgccttcccatgaatctgtctcccagttatgaatcagtgggcaggataaactgaaaactcccatttacgtgtctgaatcgagtgagacaaaattttagtccaaataacaagtaccaaagttttatcaagtttgggtctgtgctgctgttactgttaaccatttaagtggggcaaaaccttgctaattttctcaaaagcatttatcattcttgttgccacagctggagctctcaaactaaaagacatttgttattttggaaagaagaaagactctattctcaaagtttcctaatcagaaatttttatcagtttccagtctcaaaaatacaaaataaaaacaaacgtttttaatactattgcttttatgcctagtcaactctgttccaaactgccaactcctgtgtaaatctctaccccatttatttcttgaaaaatattaagattaaatggagcttttatctctgtagtcttgcatttcccactagcttcaaattgaatttttagaaaatgaatgatataagctttgtatccattatgtccttgttttccccaccctttttcaaagatcaccatgactttctgattggattttttttcaaaagtgaaatggccatcaaatgttatatggagtcactagcataatcagatgacttaggcaaaagccaaaagtaagtgtctttatccacagtctctagtctgaagaagttgaccatttggttggtcaagtggacagaggagtcacatctgactggtggtcaaactggcacatgtttatcgcattctaatcttttatctaacaatggtttcttaatttctgcttctttgtattttgcatttcctctaaaacagtgagaaacactactttcactttcaacctcatagacaaaatgttgtgcttctattttgcttgacaaaacagatcttctcagttgtacaaaggaagtctggcagaaaaataatcattggctcttgccagaaataatgatgagtttccaacttggggaagtatagaaagactggaaagactaatatttatgataaatgtttatactctggattttccttctacccagaaactgacaattttgcgggtattaggcatattagcatcccatttcactcttataaatacacttgatagaatctccaatctgacatttatgctatatccaggaagacaaatggagccaagtatctgtattatcgttttaccttggtgtaaatccttcttacatgctatgaatgctctatgtcctctgacatactgcatcaaagatgtaatgctaagacgtatggcagctttataacaccaaagaaatagggattcaaacactaactagggctgggtgcagtgcctcacacctgtaatcccagcactttgggagtctgaggcaggaagattgcttgagcccaggagttcaagaccagcatgggtaacacaaggaaaccccatctctacaaaaagtaaaatacaaaattagccaggcatagtggcacatgcctgtgaccccagctactcgagaggctgaggtggaaggatcgctta

SEQ ID NO: 108939 - DNA, 1032 bp, Homo sapiens
gcaaagtctatgtaaatttactatcaaatctgtacctcactataaaatgcacttaatcctatcaaaatcaactcattggctgggcaaggtggctcatgcttgtaatcccagcactttgggaggccgaggcaggaggatcacaaggtcaggagatcaagaccatcctggctaacatggtgaaaccccatctctactaaaaacacaaaaaattagctgggcatggcagccatcacctgtagtcccagctacttgggaggctgaggcaggagaatggcatgaacccaggaggcggagcttgcagtgagccgagattgtgccactgcattccagcctgggtggcagagcgagactccatctcacaaaaaaaaaaaatctacttattatttatagctaataattcccaaaacatatatctttttagaaaaatgaatgaaatgaaaagtagtatattacttatatgtctcctattttaaaagaaataatacacattatcaagtattttaagtaattctatcaataaacatttattaatcatctgatacgttcaagatactatattggaaacacaaagttagaaaagaaaagcaagataaagcaatattgtttagccagtactgtacttctctaatacatgtgttcacttattcactggtgaaacattgagcattatttatgtgtggtgcactataccagatccattagaagataaatgaaaacaattgtccttttaatatagtagagacatgaaaaatgtacacaaacatattacacagctaaacatgacatgccaagagatatagagaaaacaaaatttgaaaattgaggagaatttcctttcctatcatggtaaagacatcctggatgggatagaatgtaatttgcatttgacaatatggctgggattttggcaattaaatcaggacataaggaaatattttggcctaaaggtatctcacatgcaaaattagataacaaaatagtaagaaccccataattactctgtagcaatgctaaatctgaaagaacatagca

SEQ ID NO: 108940 - DNA, 1032 bp, Homo sapiens
ctaaattcatgtgaaacctaattcctaaagaggcaatattataaggtggcacctttgggaggtgattacatcaagagagtggaacctccatgtttgagattagtgtcctagtaaaagagaccccagagagatccctggccctttctgccatatggggaaacagtgaaaagacagccatccatgaatcaggatgaaggccctcaccagacactgaatctactggtgctgtgatcttggactttccagcctccagaactgtgagaaatttctgttgtttctaagctacttaatctacaattttctatagtagtagcctgaactgacttaagattatcagaataaatagaatatgatataggattcaataatgatcaaagtgatggaggaatcaaatgaagaaattacatttacctatgaatatttgcaaagtctttagtaaaatgtgtcattgaggtaggttttaaagatggagagattttttttttccccaagagtgaatggtaggatgggaattccaagagaagaatacaacctgaatcaacattcgtaattgggacagttcttcgagtcagttgggttatctcaaactaaccagacaaaagagttatttttcaaggtagttcagagccaaactgggggcatctagaattcaaactaagaagttttaattttggaagtgcatttgaaattttaaagccatattttctgccaaaaagaggattgtgctaacatgaaaatagagacctggtagacaacacaaaagcagacttcatgtctgttttttaccattgaaacttcagggcttgttacagcaccaggcatattttagcactctttctttttttctgtttgggaactaaaaggtgagtttatgctattgtccttaattattctaccacaaaacacacctgttgaaatatcttcagcatatccaactaagccaacccccgaaccatctcttgagtcattttataaaacgatgtttgtatcctttcctctggtaaaacatcttgccagattaaaatgctaaga

SEQ ID NO: 108941 - DNA, 1050 bp, Homo sapiens
gtccaggggtgtttcagtggcttgagtgccatcccttacttgctaaggacatctttttgtcacataatgactccagtagctccaaataccacttcttctcacatcaatattcataggcaggaagagagggttggggtctctctgcctcttttttctaatcaggtgctgtggagcttctcttctcccaccctgactctttatcaaggaagagaatctttcctaagagcctctcaatagacttccaattatgcttcactagtcagaactgggtcatatgcctacctctagctgcaagggggcatctgacatttgcagcctcactcatgaaagtcaggttctgtcagcttagaaaaaggggtaggagaatggctgctgtgttcagaatcagcaatcaataccacgtgtctgccacacacagcaacaatattctcactgtccatgtataggattataaaacatgtgccccaaatcactatgctgttgaaacacaactcactgaatccccaccatgtgggagtctgaatcacaatcaccgacggcagagttgtatttaatcacaacataccaattcctgaggaaatagagtatttcttgaaatccaatatcaagcaacttcctgggaacatctatttgaaggatcagatgagaaatcgtggctcttatgtaacaattcataacaatttaagagaagtttctgttatacagagttttccagaactcataatcaaaacggtagactacaaataagtagaaggctggagattgaccaagaaaattttccctcctgaaagataaactacaacttggcttatttttcaaagaatcaacttctcagactctaggcagataaatgaacacaaaataacttactactgtgtattttagaatcatacacattatctgagactttaataacagttaaacagatggtagatggtagcagagatgcctgtttcaaatgacagtggtctaacagctctcagttaaattgcttgtgacagcaaaaggaaaaaaagacttgcaatgctatcaaaagctaaaacttaaaaa

SEQ ID NO: 108942 - DNA, 1038 bp, Homo sapiens
ctacaaaataaaaataagaataaaaataaaaataaaaaaatcagccaggtgcagtggtgtgtggctgtagtccccactacatgggatgctgaggaaggaggatcacttgattccaggatttggaggctgcagtgcgccatgactgtgccactgcactccagtctgggtgacagaatgaggacctgtctcttaagaaataaaaggatgccacgagaaaagaagattcagagaaaaaaaaaatctcttggaaattaaaagcatgagaagaacaaacaaaaaagaaatagaaaaaaataagagaaaatagaagggagaaacttatcaaataaataatacaaaaaatttattagcatggaaaggtaagattctctagactgacaaacccaaacgagggccaacctcagtataaagatccacaaagaggcaaatcagagtgaaatttcacagtgccaaggataaagtggaaccctgagtgcttgtaaaaagagaaaactaaactaaactaattagcaaacaacaactggtcctgtgaaaaggactggaatcagaatggcatcagatttctcaacagcagttctggaagccaaaaatcgtgagagcaatgattcaacctagaattttctgccaaaaactgtcaaacaaatgtgtgtgtggaataaaagacaaatacaccagagcacacacaaaaacacatgagggaaataaataatttacttcctgagagctctttcacaagagtgacagagtaaagtcagagcaaaagctgaatacagttccagaacccaaccagaaggaaagaaggagaacttttgtagggagaaaaaaagcacaattcatggattatctgttgcctttgattatgtggaacttgagagaccattagagtcattgggaagaatttgtgataggtacattaaaagttaaccaaatgagtaggaatgtcagcaagtaatcataaaaaatgttctgtgagaaaggaaacacaatcacagtgtacaacggattcagcattgttcaacattcgcatacttggaataa

SEQ ID NO: 108943 - DNA, 1055 bp, Homo sapiens
aaaaatgagaataatgaaattaaatggctgcatgagaaaatccatccagtctagagcgtaacttatttctgcagtatggccatgctgagtgatggccatgatgcagtactcatacttactagaagaaatccagtgtcattagggatcagaccctggtgctgcactgcctgcggtccagcccccactctgcctgtgctatgcaaatttggatgaattacttatgttcttttgccttcaagtcttttatctgcaacatggtgatgatgataatgacagtgtctgccatatagaggtgtgttaagatcagttgattatatatagtccttagaacactgcctagcacttaataagcagtttacaagtaataggtactgctgtcattgctaaaaagaggtaaagagtggcaaatctttagctttcctattcagataaatgaaagtctgaatactcagcagatctgtatgcaaagatgatggttctggcacttaggctcagcatttttctctatcagaccattctccttcatgttttccccaccttatctcttgaccccatgagggaaattattacttccagaaggctttaggccacctgttatgtatgttataaatccagaccttattcttcccccgtcaaactgctgggcaaatctggcccactcccaatccaggaggatttttgcgtggactcctgagctaagaatgggttttaaatggttaaaaaaaatcaaaagaaaaacattttgtgacctgtgaaaattacttgaaattagaatttcagggttctgaaattttaataaaggttttattggaatttctgaaattccaataaaggtttattggaacacaaccgtgttcattcatttatatctgtatggctgctttctcataacagtgacagagtggaatagttgcagctgagagcaaatgtcctgcaaaacttaaaatattcactatcaggccctttacagaaaagtttgccctcccctgtgctagataggatcattcaatgctttgcatgctcctacagtctcttgatagaaaatcctagatcat

SEQ ID NO: 108944 - DNA, 1080 bp, Homo sapiens
tactaatatttaccctctcttaattgcttgagaaactggaatctaagtctcattcttgattaaacccatgcttgtggtcctgcagtgctgacaagataaatgattaatggagttggtctgcaggcatccttcttgctgggattgactgggcatatagcaaggcctttctggcctcagtttccttatctgtaaagtgagggtataaggctagttgactcccttgattcccttcttcaccttttgaatggccttaaaatacaggtgtctctgtccttgcagggagtagcgctactcccttgccgtcattagaatgtgtgccctaatttttttcgcaggggttggtgatatatttgtgctgctctggctataatccttcacccagagtattgctggaaaagaatggaaataattcagctcatgaaaggatcttgacagtgtgaaaagtctgagttgatgagccatgaggttttcatcaatattcacagcatgcagataaaggcaactgggatttagaaatgaacaaaacacaaacaggatttaactttctgtgcttaaatctgttggtttgatttctaactctttaacatttggtaaacaacaaccaaccaaaaatactgaatgttttctggtacaagtatcagaaaccgtactaacagtgccttaaacaataaagaatattaattttctcataaacaagagacctgagatggggcagttccaggggcagctacttcactggttcagtgatgtcatcagagacccaggtcctgccattctcaccgtgttggcttcgtcttgcagccgactgccctttggtcagagagaactgctgcagctttaggcagtatctctaaacacagccctaaacagaggtagtagagtttcttctcacaattttttttttttttttggagatggagtcttgctctgtcgtccaggctggagtgcagtggcacaatctcggctcactgcaacctctgcctcctgggttcaagcaattctcctgcctcagcctcctgagtagctgggattacaggtgcctgccaccatgccccgctaattttttttttttttttttgt

SEQ ID NO: 108945 - DNA, 1053 bp, Homo sapiens
gctttttattaatatcagaaattcaaatgaggattacttctctaatgtaattgccatgagcattcataataataatattacagatcatgtgcagaccatcctctttagtttactaataaaagatttccataaatcaggatataactttaagaacactccctcaccaccatttagaaaaattgtatgaggaactgttttttttatttgcaagatttttaagcagagctcttaacaatttttttgtgagcagtcattttaaagtgcctacatttgcatgactttatagagacacagttaaattgacataggcctagtcatctcaatacagaagagaaggcaaaaattgcattttaaaaactgcattttggactggaaagtatttaatccccaaagataaaccgctttacagctgatttgttcatggatatgatgatggctctagaaggtaatagatacttgatttggtttccctgaataattccaaattctggattaaagcatggtaattgacttaaagaagacaggacttttttcttgatatggagatatagggagtagcgtgtgtgaaagtgggtaggaatagagtattctgtgactacaaatgagctgattctatggagtttccacttgtagctttttggtagttgtaatatttcagccatcaagcacagctcttttcagacacaataatgatcacttgctgacatggccctttcaagccatgtccggtgtctgacagagctgatggccactgtgaaactactgaaagatgtcctggatgagtcaagctggccagactggcttaggtttaaaaccttggatcctcacatttctggaacaaaagaaaggatgcatacagatcacacagaagtgtgatttcagttaaaccaatcttgactatttttatgtttctgagtcaagtgcttcaagacaaaaaaaaaaaaaaaaaggagttcttgtggtcacttgttcacgtagggaaagagcatttaaatggccactagtgcctaaatgtccacaggtgcttctgcattattcatcagaagtttcctc

SEQ ID NO: 108946 - DNA, 1051 bp, Homo sapiens
tcagtagatgtgccaaagctgagtgatgtttatcatcaagctttgatttgacggtaaacatgtgcagatcgtgtgcaaactgtcttcctaactgttgaaccccttgcttcctttgtgcactggctagtgcacccagggatgtcaggtgactttttcataagaagatggtaggttaattccataaaagcgcaattcaagagcccactttgaatacattttgaggtggaatgttgtctttgcagttggtgatttgaaaggttactttaaatccactgagtaaacatactaaagtaggtgagaggttctttcttgggttttgggaaagtgttattgatgtatgataattgtggctaaggtcatttcctaatcttcaatattaactacaagtttgtcctgtcctctgtagagaagtataagaattaatttgctgtctgaggaaataaaaatgataagggactactcacaaaacgcattttccatagcaaaagggcaaaagtgctaattgaatgtaggtaatattttcccacttcgaggaaaaaataatatgaactttgaatcgattccttatctacagatatggatccttatctacatggcattttattttgctcatccttaggacttttctcatcttttattaggacaggacctaccatgtttttctaataatgctggcctggccaaagtcatatagaactttcgaattcctttttacttgatgttgtgcccaggggctggccaaagttaagggtttagcctcttctggcactgagtagtccacagggaaatggacctctgactgagggctcattaatttatcctagtcagttttattttttaatataatttctgcatccaggtatagtttacaatgttcagactgtatctttagctgtcaaaggcttacggtccaatcagtttggggggaaaagctgctgagctttaagctgttctaaaagtatataatttacacaaaaattagagaagttggatagggtgatctatctctagtgaatgactgttttgttgttgttccaatttccagtccatt

SEQ ID NO: 108947 - DNA, 1017 bp, Homo sapiens
tgcctttttgttctatttgggccctccacagattggatgatgcccatacacattggagagcgcaatctgctttactctatctaccaattcaaatgctaatctcttttggaactaccctcacagacacacccacaaattatgtttaatcagatatcttggcatcctgtggcccagtcaagttgacccataaaattaacaatcacaagtggagccccttaaacttctttcagtgaaggtgatggtggagacagtgtgggagagtctgcaatttatcctgagtggtttttgctttctactttcattatactaaagaatgcagtgatttttaatttaaagtaacatctaagccttgggaagtagttcagaatgtggatgctgaaatcttactccaccacttacaggctgtgtgaccgtggggaagttacttagcttatttatgccttggtagcttctgttgtaaaatagggataataatagcacatacctcatagggttgtttagattattaaatgactccaagcatgcaaagcactgtgaatactgcattgtgagtacctattaaatgctaggcagatttagctattctttttttattattatattaatgcattcactatttcttacaactgggaacaattactcttgatccattttttagtatgccaaccttctgcagctggtgaatcttagcattagtggtcttatttaggtttttgactgattaaacaggattaatttctgactagtgtttaataacttctctgccaggaaagcctttgggttttttttgaggttttagtataagttttcaattgataggatccaggtgccctaaacttgagattttaaaaagtttaaaaaaaattaaaaattttttatttgtttggatacataacagttgtacatatttatggggtacatataatattttgatacaggcatacaatgtgtaatgatcaaatcagggtacttggatatttgtcaccttaaacatttgtcattctttgtgttaggaac

SEQ ID NO: 108948 - DNA, 1130 bp, Homo sapiens
agtggcgagtacctcctcttgtatctggcctttctggaatacacagtagacagggaatatctgccagttcctctgatcaggacaggatttcggctgcactggagtttcctcttcttggactttttcgccttgacttagcctttttcaccttgacttaccctttttcactttgccactagtatcagctttcttggcttccagtctcttcttagtatccagccttttaaagttttcacctgccatcttgcaagataagaaagcaaggtattgtttactatatgaatccctttgtattttattggtaaagtttaaagcgtaaataatgcggaatgtttgggaatatcttagctctttctcaataagcgtagtttcagattttctgattcaataaatattttggaaataatagattattattataaagttaaactgtgacctctgactagtgtttcctccttatggtggtcccaatctcgctgtgggtggttttctcacatatatgcactaattagtactcagccgaatgctagagtccgcatctatctccggagctcttctctaggcagctgtttcctctccagtaacctgtcctgtgaactgtagttgtcttggcctccctagactcccagccttgtcttctcaactgacagagaccactgatctcttcctaggttccccttttctgttttatagtctggaaaatctctccaggcagtaagctgaggcaaccataggcctacttcatttggttcctgtctctcagagatcactgttcttcattgcttgactccaaagccttgaaaactgttgttcatatattctgtttgtttcatgtgggttactcatcttggttggaagcagaagtctcttttctgacctattcttacatttttttttaacttaagaatcagcttatttagttgcagaaactttttttttttttttttaaacttgtccttgttgttactcatatatgagaatcttctctcccattatattttctagctggttactgtgttattgcatgcaggctatttattttagtatgtgaattttataactttctaccttactaaatttttaaaatttttatctttgattatcttgggttttataggttatatggttac

SEQ ID NO: 108949 - DNA, 1866 bp, Homo sapiens
atgagtgacagaaggaaatgaaggcactgaaggatttggtaaggcaagtgaaaggttcaggtatggggggatgggatgctagcaattagaaccaaggctcagaatctgagctatgagttggctttgataaagagccagtagcctttgagactccctcctgggttcagtgtgtcttcagaacctggcttatagatgggctaatcaaaatatgccttgttaccctccagctagggttgctctgtgacccagtgtaagtaaccctggactcagtgctctgttcaacctctctctctctccctgctctctatctctctggtctgagcacagaaccctttcattgccttagccaaaaatcaataaggttgtgctatgtgaactacaaagttgttgaaaaagttgattgtttgcctcttatatggtatatgagagtgccgaatcctaaccactagaccaccagggaaggtatcatatatggtatttgaaatgtttcctgtccacctctgctatgggcaatgctgacaaatttggcagaggacaatacttccctattctaaatatgccagttcttcatgtggcattttgtttaaaagcctcaggcaggcagataggtatttcagctatatggaatgatctgtagagtatatcagacctttgttatttggtaaatttcatatgaaattcaattacctatgaagtcactctaggggagtcactcatcctgagatacataggaaaaggaaaattgtcaatttctttttcaacaagggatttttcttttttaaaaaaggggcatgttgattttcttttgataatgtaaaatcccaatgcacagaagatgaggcaaaactctagagactgatatgggtagatggatagaaaagttattttagggcaaaccccctacccccaactcctgtagtaattgaaattattcagctaaagttcaggagcagctgtagttagatcactttaaaattaggatattaggatgaagtatatgtttttcaggggcaaaaatggtgctgtctgcctttgtcaatctctgtattctccagaatggaactgtgcacacagcaagtttctaaggtatactaaccaccaaaaagtctttattgtgtaagacctacaggggttgactggaaatagccttggagttggcctgctgcttccatctcaatttcaaatgccttcagtgtatgcagtattcttaagaatttcagaatttgctctgagagccatcttggagagagaataggttggtaaaagtggctgttgacttttgaaaagaatatagtttcccaaaagatgttatatccaggcaggccgtggctctgctgtattaggaaaagtccgactttcaattgtgttcagcctgttaggcacggaggactgccacagagagtgggcagccacgttcataattcaggtatgggtgccttgtcaggagatccatccattctagaagacatctggctcccccactcatgaatataggtaatgattctttccaagttaacatataacatagcaggcacttgatatgccagtgtcaaattaagcagaacttctctttttctaatgatcgactgatgttaggaaattattagaagtgaatagacagctgggcgtggtggcttatgcttgtaatcccaatgcttttggaggctgaaggtggtggattgcttgagcccaggagttcgagtctatcctggccaacatagtgagactccatctctaaaaaaattacaaaaattagctgagcgcagtggctcacacctgtaatcccagtcctttgggaggccgaggtggctggatcacctgaggtcaggagttcaagaccagcctggccaacatggtgaaacccca

SEQ ID NO: 108950 - DNA, 1096 bp, Homo sapiens
aaactagaagcaggagcaagcttgaggcatgtaaggaaggtgtttttatcatcttgttgtgtctctgaacctcaatttcctttttagtaagaagagataatactactttcttgcttacctcacaaggttgttgtaagaattactggtctctgaaagcatttgaaagatagaaaaggaccccagatatgtaagatggtatagttgtacaaataaggataatgtatatttcatatactttaatgaaaagaaatcatatttgttctgggatgacagtaaatacactttgacctagaactttggtaccatctgctactaatttcccccatggcctagtatagcctacatgccagcagtgtgcatgctgtgtacgaatgcctgatggaagggtagatgtcaacgtaagagcgagtcctagatttctgagcaggaagaaaccatagcaatctcattcttttataagaagaaaaaatagtcatagggagactgcataattttcttgaagacgtgtaacagatctgtggctggaattgagccatccaattcccagatcatgagagctgtatctacccttctcagtcatacagatttttttcttttagaagttgctacatttagatatttgtgattttgctcatgctatgtcatttgaatcctttgtacaggctgttttttttagggaggaaaatggagagcttcttgtggaattctcaactgctaatcattaatgggtacaattaatagagatagaccatgtgctttatctacaaggtgctggttggggatatgaagatgaataaaaagaacttagctctcttgtagtaacttctggtatagtgcacaaacatgcttatattactgtaataacagtaatactgtaatagaggaacattccagtggtacctgagtatggagaagtcagcaaaggatttctggaggtgacatttgaactgagccttgaaatatgatgaggatgatgtcaggtgtataagcaagggttgaagctgaaggagtagcaaggaccaggtgttataataaagacctggtaatccaggttaagaaatttagacattattaccaaaaaaaaaaaaaaaaaaaa

SEQ ID NO: 108951 - DNA, 1047 bp, Homo sapiens
atccaactgacttctttttgtgtcttcataggtaaaaatgattattaactctctgtggggagccaggtgctgaactttacaaataatgtaacataatccatgtagcatttagatccagtaaggatttcactgtatggtaatttactaggtagtagtgttgactctgtgaatccaaaggatgtttagacatttttcatttcttaggagaaaggttttagagttgctgctctgcaaaaccataggtgaatgacctttagttgtggaagctaaccctttaaagcagttgccctgtgtatctgccagaaaaataatagtgttccgatccttgggaattatatcagtcagtgacaggaggatggttattttttaaagacaaatacttagtctcagtatgtcaacttgcagcctgttgagaccatttttaatacatatatactcttgcttgagcttctaagaacccatctgggaaataatattctcataggtctcttattttggtctctgattatatttttgcttccttatcccttaccatttctcctaaattatataaatcagtgtagacatttaatgtctagcaactgtaggcaccatgtttctgatactagtaatgtaaaattttctcttagctagagaacaagttctgcataaatcatagtactaaattatttctaaattagattaatttatataaagtgataaaatgttattggtttcctattttatcatctttagtattcatgaaggagcaattcttttttcttttttccaaggtctttaacaaaattagcttttgaaaccatttttgtgctagtcgactatgaatgaggaggactattgaagcagaaaattaaaatacttttgatgtttttattttaatactaatcattaatctatacttcagcattatttctctcattgataaatttattgcttttaaagtatttctatcttccataatgtcttttctagcaaaagagctttgctacatttttgaaattcttgctatttgagtgacttatcaaggagcaagaattttggcagcca

SEQ ID NO: 108952 - DNA, 1102 bp, Homo sapiens
ttaacagaatcctataatctaagctgctttcacctttctaagattgttctgaagtcttccccaatttgatgacagacttaatgtttattattgctttaaactaagtttaagataacaaatttaaccttactttattaagcactttggtgtttatagtgttttttcaacgttcattatacaacctcactaaaagcccttgtaaagtagagagtgatttcattttacagatgaagaaagagaaacagagatgaaataactgcccaagttgatgtaactaattaggtattagcaatgtcagcatgaaaatttctgcctccacctttccaggttggttctcttgacattccagtggtgaagtgcccttagcagaggaggcgtgggaatggcgacttgaccctgtggcactgaggttctgcgttgcttttctctagcctcagccaagggtcctgttcattgctttatctctcatgcagtgtttgatttatgtattgttctgttgcaaatttattcgtattaaaaaatagtaaatatgataatagaaaaatcacgggagttagaagaactaggtttattttttcaagctttattttgtgccagtttttaaagaatttagatttaagtgccttaaactcattattattttcattattttagaatgcctttattcagagatctcaaaggctataatcatttaaaattttttctatgtatttttatagtcgtattaccaattagtttattactatattgcagatacttatgctaagggcttgatgaccattaacattgtcatacggaatcctttcaaggactttgctatagctattattcaacccattttatgaatggggtaactaaagcttgtggagattgtaaaatggtgacctaaaattcaaatcctgatctgcctaattccaacacctcactgttttttcttctttcaggctgccatctccgttttaattaaaaaaaaaattaacattctgaggcttaagttctatataacagtatttgctctgttgttgactagcagtgtacggtcttggacaagttacgtaatctttcaggaactcagttctcttttctgtgaaatgagcatgct

SEQ ID NO: 108953 - DNA, 1057 bp, Homo sapiens
cacctgcaactgaaatttcctgaaatgttaccagtgttgactagtttggatcttggactactaggagtgaggctgggagcacatatactggtcctgaaacctgctctctgatggtaggtttatttcccctggagatgggtaacattgagccctgaaaggtggtttgaaaaagttactgttttgatatgctaaatgtcattctagaccctgggaagacttgtgagaaatttcttagggcctgggggattccagctccatgtgtggagaagttgtatgccgtatatgttgccccgtaatgctgggcaaccgatggcattatgctaccagtgtgagcgtgtggctgccgttttcttcatttttgtctcattctgtttcccttgacagggcaatttggttttgatgctgtgccagaaatcttctgacaatgagttactggaacttggaaaaaaggaactgtgtgcagtaccgcaggcattttctggtggacaacagtgtgtttcatggtaagctgtctcttgtatttatgtagttggatcttttattttgtttctgacaggacttttattctagcactctagatgcaaatatggtataattgttggatggaaccaagagcttgagttaacttgtttatgaataattacccaagaagtcccattgcacttactatctccacttgtaaggaatgggccccacctcaacgactataatagtgttatctctttctatttcgtagggtagttggtaccagtgcctttcctcttctaccacactgtcaactccagtaatatccctttctgatgtttgtaattattttgggtgagggccatataattgttcagttaatatttgtggatcaccagtcaatgcttattaccagcatagcatggccttccaaattgagatgttagagggtgcttgtggccacctgctttagacacttattgaagagaagtccacccacttttattgctgtcctttagggctttcagacttatctatatattatgtcccatataacaacagaacagaagagtttgcagcactaaaccgttac

SEQ ID NO: 108954 - DNA, 1217 bp, Homo sapiens
agtgagttactgattaactgatccaaggcactcaaggtttctctttcatctgtcttcacttccttgttgctagtccacaagaaccaaacatttgaattcagcttcccacttccctcttctctccctcttcaattaagttgaagaggcttctggaccttagatctgcatggagtgctaataaaacttctgcagaattatttctgctgggaacttggaagatctacacaggtttttcaggtcagaatcctggaccagaaattcagtgagttgatttgctataaaatcatatgcaatgtagttctccagacatcctatttctttttgccaaatagctctttcttatctttgagtgatataggaggtattgaaaatttattttttaaagaagagattgcttcatagaacagtaatgtgttaatataaggagttagggttatgtgaagaccctctgattttttaatttatatttgagggggaaccaccttttcttttacacatacataatatctctaggagggcagggcatggtggctcacgcttgtaatccctgcactttgggaggccgaggtgggaggattgtttgaacccaggaggttgatgttgcagtgagctgtgatcctgccactgcactccagcctgggtgatagattgagaccctgtctcaacaaagaaaaaagaaaaaaatcttcagaaggatacacaagaattaagaagttgattactaagggacagaagtcagaggtaaacaattcaccatatactcttttttttttttttttttgagacggaggcttgctctgtcacccaggctggagtgcagtggcgtgatctcggctcactgcaacctccgctttccggattcatgcgattctcctgcctcagcctcgggagtagctgggactacagacgtgcgccaccacgcccggctaatttcttttgtattttagtagagacggggtttcaccgtgttgcccaggctggtctcgaactcctgagctcaggcaatccagccgcttcggcctcccaaagtgctgaggttacaggcatgagccactgtgcccggcctgtatactcttttatgccttttgaattttgaagctttcaacttaatacataaaatgaaagaaaaaataaaaacaaagaaagaaaaagagaatatatgggtttcaataataaatgaataaataaacgactgtctcttagctcctaactggtag

SEQ ID NO: 108955 - DNA, 1033 bp, Homo sapiens
taatgctgctgctgcctgactcctttttttttttttttttttttgagatggagtcttgccctgttgccaggctggagtacagggtcacaatcttgtctcactgcaacctctcccttcccagattcaagcaattctcctgcctcagcctcccaagtagctgggactacaggcacaagccaccatgcctagctaatgtttgtatttttagtagagacgaggtttcaccatgttggccaggatggtctccatactcttgacgtcgtgatccgcctgcctcggcctcccaaagtgctgggattataggcatgagcaactgtgcccggccctgactccttcttagaacataagaaaatggattttgcaacctttagaaattaaacattcattttcagtgaggtcccaaatattccaaagattttttgtgtgaatatggttttatttcattacctttctttgggataggataggaagtcacatcctagtttttatttcctgatttctatgcctcaatagctttttgttttaaggggatgttttatttttatttacatgaagttaacagagtatatttaaactagttttgtggcaagctcttgagcctttttcttttccaacttggcattgtgaattacagaatttgggcctaagtaattgtcttccagtgatgtcagatcttacaatagttatcactgtagttagttctgatggcctctaccagctcagccagcatactactatctttccagttaagccgtataaaagtgagactgatgtaggtcatcctgtgacttcatctaacttttcccttgatgatgtagtagggaaccctgattttgtggacaagatgagcaataagaaatgcagatcaaggggtctcctctcatgcgcagtcaccattgctgactattcttgtactccacttagacggtggcagtattaacacctacgtgaaggtcatgtattcttgggtggagaatttccattggttggcagcttttttctgggccagcactcactttttcagcttgtctct

SEQ ID NO: 108956 - DNA, 1033 bp, Homo sapiens
atctactggacagttcacagaaacttacttaaagctgaattaacagccttaaaaaaaggagaaggaatatggaaggaagactctgaaaaagaaagttacttagaaaaattcaaagattcctggagagaaatatggaaaaaggacagttttttaaaaacaacaggatcagatttcagcttgaaaaaagaaagttattatgaaaaacttaaaaggacttatgaaatatggaaagacaacatgaacaactgctccttaatactgaagttcagagaacttataagtcgcataaactttcgtagaaaagggtgaaacggtcaagaaatctagaggtaaccttctccaaagagtgaaatatgtaaatatatggacgtttttcattgaatcaaaatggaagttttgccaaatgatcaaagtgttagtccaatggtatttaaatattaaaaagagatgattattataagcataatgtcagaattaatttaaacaaattataattaatgtaatatgattttaggaaggatgaaacactttatgagaagttaccaggctgaatgatttacatatatagtgctaatgtgtgaagagaaagtttaactcttcacccactatgttgtttttagttattttgggctgccatattgaattttttgtttgtttgttttgagaaggcgtttcgctcttgttgcccaggctggagtgcaatggcgtgatcttggctcactgcaacctcctgcttcctgggttcaagcgattctcctgcctcagcctcctgagtagctgggattacaggcatgcaccaccatgcccggctaattttgcatttttagtagagacggggtttctccatgttggtcaggctggtctcaaactcttgacttcagatgatctacccaccttggcatcctaaagtgctgggattacaggcgtgagctaccaagcccggctttttttgttttgacatggagtttcgctcttgtcacccaggcaggagtgcagtggcgttatcttggttcactgcaacctccgcctcctg

SEQ ID NO: 108957 - DNA, 1374 bp, Homo sapiens
aggatcatcttcgtggaaatgcaaaaggaacaattaatatatatgctactggacattctagcaaggtaattgtagtttagttttaattcggagagcaatgataatcagtgcacaggagtataaaatattattttaaacagcgaaattaataatataaaatgccaaatggttgaaaaaatagaaacctttctgtatatttgatcatattttttttttgccttgtcaatgtatttaaagtttacttaaggtcaggaaattctaaaacaacttttctggccttgttatttgatgtatatcttttaaatttactgaccaaagcatgttttaagctgcaatgcagtagtcacgggtggtaaccatgtagtcaggtattgttattagtacctatcactgctgagctgtatttaaaattttggtacaatatataaaatggagaagagcttgatattcaggtactaaccacaactagtctgacattgttggcagttaaaatcttattttgaattgtaaattagttaaattttatgtggaatttgctgagaaaagaatatagactactgaaatgtcattttagttatttttcttatgaccacattgtacaaatgaatctgtgttaaaaagactattttaaatgtatttcctgcttttgtaagcattaaagatttataagaaaattattcaaactattttttataaaatgaaagttatgatttttaaacttattgattcctcttgcccctaccccctctttttggaagatattttgattccttataaacttttaccctaagcttatatatgttttctgtcacaagtgcttcctggcacacagacagccaatggaggggatcaaattcagtgttgtatgtatgtttatggcaacattttgaaaataaaaattaaatgtttttcttcaagtagtttttttttaattgctgagagaaaaaaacagtaaagctttctgattaagtaaaatttaaatgggcagtaccataatttaaaaaactaatactttaaagagagagacaaagatattttgtgcctttgacaaattaaatctaatagtggaaaaatgtttcttaattaagcactttactagtgaaaaagatctcacaatttatgccaaatcaggtactgtattttcatgtattaacacataaccttttgtttgaatactatagttttcagtggacagttgctattccaagaaaattaagcttttgagtactttagcaattcccagcgtattacatacacccagtgataaggttctttgcatgttttgtgttatgtattactctgactctttagagattatataaatcctccaaaagttagacgaaacaagatagtacattatgagtcttaatttta

SEQ ID NO: 108958 - DNA, 1432 bp, Homo sapiens
atccaaattttacacaataacagtccttataactttaatttttttcttgttggggatctaatctaggatcacacattgcattcagttggtatggcctttcattgtccttaatatccttgacatttttgaagaatacaggccaattatgctgtagaatgggcttctagttacatttctctcatgtttcttcttgtttgggttgaggttattcaggtatataagacaggaagatcaaagaagtaatgttttgatgtctgcagggaattatactgaaagccatatcatgtctctttatccctttaactgctgtttttaactttaattgctttgctaatctattgtaaaagtactattttttcttttgtaattaaaaactgactcatggggagatactttgaggctatctaaataatcttaatttaattcttactcttttttgtgctgttttaaagaattaatctaactatactttatccctttcattttattcaatctctcagatacgttttcccagaattacttttgaaacattagatgaacttaggaaattttattatggtcagtcagaaatcattaaaaatgtatatatatattggcagttatgcttcattttaaccagattgatttgggtcaattaaaggcttaagttcttttaaacctaaaactttcaaattggtaaatttggatttttgaccccgtttactataacacattggactttttgaagtggaaatttagttgtatttatagccatctaccatccctaccagtactgaattttcagttgttttcacttaatattattagaaaaccataaggcaaaatgtacctcgtataacttgactgttgtaccaggtataataatatgatgctcacttgtaactgtcatgggtcagtaataaaattgaggttcttgaagaacttacatatgcatggaggaaaatatttcataagtcacgaattaaaatacttttttgtttttatattgcagattggtttttcagcagcagatgctgtaacaggactgaaattggtagaagagggagtacccaaagaacatttagccttattggcagttccaatggttcctttgcagataatactgcctctgattatcagcaaatacactgcaggtccccagccattaaacacattttacaaagccatgccctacaggtaaaaatgaaataaaaccttactaaataagaaagggtaaaatgaggaacattcatcaataccactaatatctgagcgtagaattatatatatggaaaaagatttgaaaagcatcttttttcaatattatttatatgcacttttatctttttaacctcctaacaggtttagatacagcttctttcatatggtaggcacacggatttctgtttttgttgttgttgttatttaagctaaaatggaagtcaactcaatg

SEQ ID NO: 108959 - DNA, 1037 bp, Homo sapiens
tagcatcaaagcaatgttaataagtctaataagactactggctatcatctatcaacattggtctgatttgtgataattgtgttcataaaacttcttaatatatttcctggcctctctgaactattggctttttcattcttctgcatgtgcgagagatggaaaccctttgaattagggctttgtgactgacccattgtcactacttccttctttttatgtattttctcctcaaagcacaaagaaattagaaatatccttgtctgggtaccgtggctcacacctgtaatctcaacattttgggaggctgaggcaaaaggatcacttgagcctaggaggtcaaggctgcagtgagccaagtttgcaccactgcactgcagcttgggtgacagagtgagaccctgtctcaaaaaaagaaaaaaagaaataatcttatctgcaaacattgctgaaacctgtgtagtttcttcttcttttttctcttggtattggtatcaaggaatttaaattttagatggactgtgtttattaaaattggtagactatgctaaacaaatttacaattcttttgcctagaaaaatggaactacttaagtcttatataactggaaaacttttacttttcgcttaacattaattggaattttggtgacagtgaaaattatttttttttcagggcttgttaaacaactgttttaaaacagatgatgaccaaaaccctgctcaatgagaatagtattgtacgtgaaactctaaagaagtcattattcatctcattttgcagatggaattaagaatgcaaaaatagtggacatgccaagtgaatgctgttaataatatgtaaaattatttgattaaacatttattacttaaaaaaaagtggacattagcctcacttataaggataatgttattaatacattattgttcattcctttcgaaccagattccaaaatgctagaaattatgttaagatgttattttatactgggcgtggtggctcacacccgtgatcctggctctttgggaggccaaggcag

SEQ ID NO: 108960 - DNA, 2233 bp, Homo sapiens
tagagactgggaccacttcctgaagcgcgaggcaggaagttatatgctttttctggagtcctgtagagaaagtgctctctgccgcattgatagcagcgagagctggaggtgttgggtcgggagaccagccgttcgatcccgccgcaggtaggagctggtttccatcctggcaccacggcacacacctccagcctcgagcccggcgctgctgcccgggggtctccttcaggctctttgacgccgttccagggggcacctatccaggcatcctctgggcctctagccagaggactggctcccggcttcagcactccgggctgcagtaagaagtgcccttatcgctctgagccctgccaccatcccgtgaaccaccgaaaccctggtccagcgcgacagccttggacctgggactggacggatccaaaacgctcagcctcggccccccacagacggggctctgcatcgtctctgatatgtcacccaccatctcccacaaggacagcagccggcaacggcggccagggaatttcagtcactctctggatatgaagagcggtcccctgccgccaggcggttgggatgacagtcatttggactcagcgggccgggaaggggacagagaagctcttctgggggataccggcactggcgacttcttaaaagccccacagagcttccgggccgaactaagcagcattttgctactactctttctttacgtgcttcagggtattcccctgggcttggcgggaagcatcccactcattttgcaaagcaaaaatgttagctatacagaccaagctttcttcagttttgtcttttggcccttcagtctcaaattactctgggccccgttggttgatgcggtctacgttaagaacttcggtcgtcgcaaatcttggcttgtcccgacacagtatatactaggactcttcatgatctatttatccactcaggtggaccgtttgcttgggaataccgatgacagaacacccgacgtgattgctctcactgtggcgttctttttgtttgaattcttggccgccactcaggacattgccgtcgatggttgggcgttaactatgttatccagggaaaatgtgggttatgcttctacttgcaattcggtgggccaaacagcgggttactttttgggcaatgttttgtttttggcccttgaatctgccgacttttgtaacaaatatttgcggtttcagcctcaacccagaggaatcgttactctttcaggtagtgtatttaagctattatggtgttaggtttatttatccttttgaaagagtgtgtgacgttggagggaagctcattaatttactggaaatcattgtatgggagataactcaaggtaagttttctgtttcgtccaaatgagcttctttgaaatattaaagccaaaatgaatgatattagagcaatcaaatgatcactatgcggttaacagggagaggcaacccatcaaataacacaaccgagtccagggattcatgccacttgcttaatacacaaatgcacacttttaaaaagtgtggctcatatggttcacatttttccttttgtcttgttggttttaggtttctagctctatactttctaatccatttctacccctaccgttgtacccagaatccagccttctagtgaatggaacagggtttattcgttcaaacattattgaaccagctaagggacgggattctaaggcctctaatgaataaggcagagttctgcactcaagaaataaggaagatgaacattttaggagagttcagagttgccagttagtaactgcctttgggagtcaggcttcacattgcagataacatttgactttgttcttgaataagattccacgaggccaggaaatggcacaccagaatgcacaacacaaagtaaaagtgcactgaggcaggaaagtacaaaaaagtacaggacattgcctaaattgtggaactgggtttgggaaatcgtgctgagaaaggctgtgactaaattagtaagattttctttaattactatgggaaaagagtttaaagtttgtcctgtaagtaatggagggtaagttctaaaaaatttccctgtttctctgcatgagtaaaacacatgtaagtttttctcttttttcttttttcttcttttttttaattgagatagttgggggtcgggggggctgtctcactatgttggccaggctggtcttgaactcctggcctcaggt

SEQ ID NO: 108961 - DNA, 1054 bp, Homo sapiens
atcttgtctgcgtgtcgaggtccgggcgtcggggagggcatcagctccccgcggccgcgtcgctggcccccgcctcccccgcgccgctgtggggcgcagagcccgcgagcgcggcgcgagggtgggggtagggcggcgagcgggcttgtgtgtctgcgtgtcggggtgggggcttcctcggctcccaccccgtccctctgggaggctgggggcccgttgtggcgatcccggggcccgccgaaggcagggcagggtcggggcctcctgtgcggcgttggagctgggccggcctctggtcttcccgccaccccgtttcccgcctgccctcggcgaggcccgctccattccccccgccagccttgggctccgcggcggttaggccggttctggacgaacccctcggagctgcactgtcttccccctcccccaacgcccctgcaggcccgcgtgagggctggtggccccagggtcgcgcactccgttctccctccccgcttccttctcagagaggaaagggtgtgtgtccaggtcccgcccccgtccagcttgctccctgtcgagcttgctggtttgcggggtaacccgcttccccgcctttggggtccctccccgggacgcgagccgtgccagctcgcccgaggcctgggcagtccggagttccggagtgctggaaaagttgccgccttgacgtacccggcggggagagcacgtttgaccgctgctgctcatctctcctccaactcacttttcttagaccgttcctcttactttcgtcccgcttttgaattgggcaccttcgctttcacctctgtattaaaattttcattggcctggagttctttctgaccttcactaagtcagttttgccagcgggaaaccgtgcagttttgaattgcgatttacttcattaagatacacctcctctgtacgctgttgagggcctagctttaggaaaaaacttaattaaatttcattcggggggtgggattgtatacttcgaggtggatttggtgctctacgtcagatagtagtgccttgttcaggcagaatttta

SEQ ID NO: 108962 - DNA, 1127 bp, Homo sapiens
taataaacataaaccaggactatattttggcgcagctggattgtgtgctcatcctaccattagatcatgcatgtaagatatatatacacatgatcactatattacatagtcaataagtggtaagatttattaagtttaagtgtttaatatatgcccatgcatggatatatattaaaatcttccctttaaaaggggtattttgaattggtaactcagaaagtcctaagttttcattcctatgtgtttttggagctgacagtgatcattaatttttttttaagtactgtagctttaattttcataattaagactttgtatttgtattgatatttgcagctggagaatgctggaggagaccttaaggatggccaccaccactatgaaggagctgttgtcattctggatgctggtgctcagtacgggaaagtcatagaccgaagagtgagggaactgttcgtgcagtctgaaattttccccttggaaacaccagcatttgctataaaggaacaaggattccggtagacttttcactaatcttttcatgaggagattgaacttagattgtggaatattttattattaattttcttgagcactgaatttttctacgaaaataagatatggaatggttttatgagaaatttcccatggctctgatttggggagaaaaaggaaaaatttaagctttcagtttaaaaagattaattttaattgtacagttaaaagaacttatcatttgagtattttatgttttataggatttgtgggtcagagttagatgtagctgttgtggccattcattcatttacttaaaagcatttcatcaaaggaaagtaggaagttggctagaatactccaaagagaagaaatctgtgtacaataagtgtttttgcttcctatcccaatagactagtttctaaagtatggagatttcttaaatctaatatatgggctaattttgacagcttgtacccttagaactagtcaaaataacagccagcttatgtagtttcttcctttaacaactatttttggttaatgtcatgctttctttttttttgaggcggagtctcacttggttacccaggctgaagtgcagcggcacgattttggctcactgcaacctc

SEQ ID NO: 108963 - DNA, 1023 bp, Homo sapiens
ctgtaaacaggcaaagttgggtaatgtatactttctattctgccgtcttttgttgtagagtattttgctctgagccatccagggccttcataataccttcagttgttgttctttgacctgctaggctctgagaagacctgtattttcaccatctctagaattcttacgtacttcttccattgataaggaaacaagtaaaacaaatccatgctaagtatcacagatagaaacattggtattatctatttggaagtttgtgcttattaacaagtaaatgctgaattgatagacttctaaacattgcagtaaagtacagtaaaaataattaaaccacgtaggatgacaattcgctgtgatataattagaatttgctacattctaccaaaaacaacgcaatttctggatctgtgttgtttccctcagtggtacaagggagagagggcatagaccttgtataaaaattaacagagattcttcactgattgttccttaaatcacagtgctattatcatctctggaggacctaattctgtgtatgctgaagatgctccctggtttgatccagcaatattcactattggcaagcctgttcttggaatttgctatggtatgcaggtatgtcagcaaatttgttttgaaagcttacttatattttattctgtttgtgagtcatactgtattagtattttctctctttaggatatttaggatacttagttggatgagataacttgtgcatgttacaactatgtgaattgccacactagtatggcagaactggcctgatagggaatctattttcaaagtagtaagtacactgtttcatgtaacaaaacactatccatttaaaaaaaccttggacatgcaaatttacataaaattttcagaaatagtacatagagctcctgtatacctttacccagtactccagttgttgacatttttgaaccatttgaaagttgcacacgtgatgccctgttacttatatttcctaaatattaggacactcttactgcataacca

SEQ ID NO: 108964 - DNA, 1539 bp, Homo sapiens
caacagagcgagactccgtctcaaaacaaaacaaaacaaaaaacaaacaaacaaataaaattggctgggagcagtggctcatgcctgtaatcctagcactttgggaggctgaggcaggtggatcacttgaggccaggagtttgaggccaccaggccaacatagtgaaaccctatctctactagaaatacaaaaaatcagctgggcgtggtggcacacgcctgtaatgccagctacttgggagcctgaggcatgagaattgcttgaacccaggaggcagaggttgcagtgagccgagatcatgccactgcactccagcctgagcgacagagcaagactctgtctcaaaaaaaaaaaaaaaaaaaaaatgaaaccatagaggcagagattgtgagaaattaattgtggttattgcttgagtcttttcagcatgaaaaaattttaatttgtgactattttctctataaaggcatagcaaatgaatctaaaaagttatatggagcacagttccaccctgaagttggccttacagaaaatggaaaagtaatactgaagaatttcctttatgatatagctggatgcagtggaaccttcaccgtgcagaacagagaacttgagtgtattcgagagatcaaagagagagtaggcacgtcaaaagttttggtaagcaaattattatctggaagtctacaaatttatatcaataatattggaatccaggagttagagtcctcaacacagcccttaaatgttctacagttttagagtgcttttccagttaccatacatatctttggtataaatagcacttttagataaagatttaagccaatagtgtttattttctttttgcttgttttgctcattttgatttttcattttaccccgtaggttttactcagtggtggagtagactcaacagtttgtacagctttgctaaatcgtgctttgaaccaagaacaagtcattgctgtgcacattgataatggctttatgagaaaacgagaaagccagtctgttgaagaggccctcaaaaagcttggaattcaggtcaaaggtattgaagaacctcagaaaagttaacttacatgttaggacttgtttaatcaaatctagtcttatggtttaaatgagcacaattacagttttctcagtatgctcaaggttgaaaatgttttttatttttacaattacctctggtgtaagagaggtctcagtataaatttttaaactattgattctgctaatttaatacatagattgataaattaacattttctagctactgttcagttctcttctagtcattcacttttaaaattatcttttcctggccaggcgcggtggctcacgcctataatcccagcacttagggagatcaaggtgggtggatcacctgaggtcaggagttttgagatcagcctggccaacatgatgaaaccccatctctactaaaaatacaaaaaattagccagtcttggtggtgggcgcctgtgatcccagctactcgagaggctgaggcaggagaatcacttgaacct

SEQ ID NO: 108965 - DNA, 1044 bp, Homo sapiens
cttaagatttttagtatcttatttgttattctggttcttgaaggagtccttcaaattgtaaaacttggatctgtccctggtaactgacatagcagaatggaggaattcacaaccttggggtggggtgggaaggaagccaataaaaagcaagctgatttgtgctgtagacttctggggaggctcaggaatttgaagcattgggttctttttgggacattggtctctgggttagcctaaaacagggattagttaaaaatctgagaagcagatccttttccttagcacaggagcaaactgtgctctccttccccatcagaacactgtggatgtattctctagaggggctaaacgagaggttctgggcttgagcctactaataccaggcatagttgagggtggaggtaagactctacattaagaacaggattaagtaaaattctctatgctgaatggtgattccctcttcctaccacttcctctgtttaactgccagaatgccaataggcaggagagtagatatgtcttctctgggtagttgaccaggtacaggaaagacctacaaattcactggcttttccacaatgaaatagccagctgccttgtcatcttacggtgaaggcctccagtagctaagttttattagcaaatagagatcttagtttttagtttcttgtcattaaataaaaagccaaggattgttaaatgtatgttcataaatattagttttacaagacactagggtgtgattccaacagctttgactccgtttaggagccggtgcttttgacttctttggggctaagcttcttgctgtggcttctgcttgttgctctggtgaagcactgaagagagggaaaacaatcagcataaattttttttttttttttgagacagagtcttgttctgttgcccagggcagaatgcagtggcacaacctcggctcactgcaacctctgcctcccaggtttaagcaattctcttgcctcagcctctgagtagctgggattgcagacatgtgccactacgccccactaatttttgtgt

SEQ ID NO: 108966 - DNA, 1051 bp, Homo sapiens
tggggatggagtctctctctgtcacccaggctggagtgcagtggcacaatctctgctcactgcaagctccgcctcccgggttcacaccattctcctgcctcggcttcccaagtagctgggactacaggcacccgtcaccacacccagctaattttttgtatttttagtagtgatgggatttcaccatgttagccaggatggtcttgatctcctgacctcgtgatccacctgtctcggcctcccaaagtgctgggattataggcatgagccaccgggcccggccaataattcttgaatattgatagtttattgaaatttgtaggcagatttaggggagatcaaaggactgctcttcagactgggaaagaaatagcttttctttctgtattttgacttgttatttttgattaaaaaacatgttataccaatttaaaacgcttctcccctttcctccagtgataaatgctgctcattctttctacaatggaacaacaaccctaccaatatcagatgaagatagaaccccacggaaaagaattagcaaaacgttaaatatgaccacaagtcctgaagagaaaagaaaaatcattggggatacttttgttaaggtacctttgtttttaatatcctcaacatgtactatttttgatgtgaatcttagtatttgtttttccttgtcactatatcaaataaccaaattagctaattttaatcctttttcttatgtggctgagagttttattgtatattgtcattatattgaccagtagaaactgttttatgtttttttgttgttgtttggttttttttttgtttttttgagacagagtcttgctgtgtcaccaggctgggctggagtgcagttgcacgatctcggctcgctgcaacctctgccttctgggttcaagtgattctcctgcctcagcctcctaagtagctgggactacaggggtgcaccatcatgcccagctaatttttgtacttttagtagagacgggggtttcaccatgttggccaggttggtccggatctcctgacctcatgatccgcc

SEQ ID NO: 108967 - DNA, 1019 bp, Homo sapiens
caggcgtgagccaccacacctggccactaattttgtatatttagtagagatggtgtttcatcatgttggccaggctggtctcgaactcctggcctcaagtgatccaccccactcagcctcccaaagtgctgggattacaggcgtgagccactgtgtttggcctcatgtacctttttgaatcgtgttagaggacatgttcattaaggagtttattttggagattggtggattttattttctgatcagtatttctaaaggactctaagagatttagctgaaagtataaacttttgcttttaaaaaaagttatctcttacaaggctgttttactcctgttgattatagattgccaatgaagtaattggagaaatgaacttgaaaccagaggaggttttccttgcccaaggtactttacggcctgatctaattgaaagtgcatcccttgttgcaagtggcaaagctgaactcatcaaaacccatcacaatgacacagagctcatcagaaagttgagagaggaggtaaaagtttatgaaaactttttcataaagtagatacatggaaagtcttccattcttccctcctcttccctctaatattcacagaattgcataaccatcaccacatctaattttagaacattttccttaccctaaaaaggaaccttatacccattagcagtcactcctcgttctacctgttgttgtcattgtcatcctgcccccaccccccagctcctcctttcctcctttcttgccagccctaggcaattaccaaccactaatttattttctgtctctatagatttgcttattttgggcattttatataaatggaatggtacaatatgtggtcttttatgactggcttcttttacttaccgtaatgttttcaaggttcatccatgttgctgcatgtatcagaactttattcctatttattgccagataatattccatcttatgggtataatgcattgtatttatcctttgatcagctgatgggcttttgggttatttcc

SEQ ID NO: 108968 - DNA, 1188 bp, Homo sapiens
agtacccattagctttgcttattttttaattgacttatttatttttttattattgagttgtaaatgttctttatatattctggttacaagtcttttatcagatatacgacttgcaaatgtcttctctagttctgtgagttgtcttcattttctcaatgataacatttggagaattataattttggaacactagtatattttctaattgctttgtattctaatgagaattagatcagagatgatggattggtttaccctgatttatttatatttaaaaagcttatgtttaaaatgtgcttcaaagagaaataatacccataagatattcgtctaattccttataggcacttaggaacaaatactttaaaagatgcatttttagtaataatctgttagtctaagaaaagtggtaacaggaaaagccaataatttattacgctttgttttccatgtcatcttggttactagtttatattggttggcttctttcctccctgtagggaaaagtaatagaacctctgaaagattttcataaagatgaagtgagaattttgggcagagaacttggacttccagaagagttagtttccaggcatccatttccaggtaaaaattagaactgaattttgtttgattcatctttagaccttcatgttgaagaaaaatcaattcagacaattctgaaataatctgtcatctcagggaatatgtaacatgagagaaaggaaaggatggttagggaataattgaaatcttttgagtatctactgtatttacttcattttattaaatactcattttccattgtatctgcatttaagtgttacattatccttgggagtctggcatctgatgttgccatcagatgagaaaaccaagacataaagatattttaataatattgccacacagtcctagtagtagagctaggatttgttatattatttgtaccataccgcagtgcgttccatggaagatgtgaggatttaaatttagctctttaaaatccttgtcctatgtctgacttgtttgaatggatgaaccacttattctgtgcagagaattcctggcacaatgtaactaattcctgaacaaataatacttcatttgctgtcatatagaaaaaaattagaggtgatacttgtttaaagttaggactgcaagtcttaacctgtttttgttactagt

SEQ ID NO: 108969 - DNA, 1023 bp, Homo sapiens
gataccaaatacaatccactgctaaaaaccagtaaaatacataagatagtagtagataataaaagagtgaataccttatttcttaaaactgaaaaaatgcctctttggtttttctcagccacataccctattacagagagtcaaagcctgcacaacagaagaggatcaggagaagctgatgcaaattaccagtctgcattcactgaatgccttcttgctgccaattaaaactgtaggtgtgcaggtgagttgtgtgaattcattcaccagtgatatacttttttttttttttcttttcttgagacggagtctcactgtgttgcccaggctggagcgcagtggcgtgatctcagctcattgcaacctccgcctcctgggttcaagcactctttctactaatcttgaaataaggattacttaggaaaatgaaatatgtgagtatatataccaagtttagagaaataaggtaattttttatagaatgtttagggagtgaatagttaatggaactaaatagtcaggctgagattttgtagttttggaacatctatgaactctaaccaaaggtaaatattgaaagcaaccctttcctatagggttggcatgcttacttctgccttgtagggcagggatcaagaggtcatttatcctaggtgtgaaatatactgtggttttagaagtctttaactgcaggaaggcctccagatgagtaagttacaccatttaggtgttgttctcagcttgtgtattccctgtactagggaacacattctactgatgttgtgtttattctgcctttctagttgtaaaagaacatgagaataatatagttctcaattataaaatgctacttgcaaaatgactaataactaataagatagtatgttaatttctcctcttttttctggagacagggtcttgccctgtcgcccaggctggagtgcagtgatgtgatcatggcgtactgtagccctgaattcctgggttcaagcgaccctactacctcagcttcccaagtagctg

SEQ ID NO: 108970 - DNA, 1052 bp, Homo sapiens
tatcctctcctgtatacttgataatgattattacagtgtactctgtgccaccttggtggcccttagagttgtatgtttaagctgcagataatttgcagagcattggctgaaacacataaaatcacatgcttggatgccacagcaatgtcaaatcgctatatgttcttaagcacttgtggctcagtcacaaacacaacttgcagactagcacctgtttgtggatcacactttgagtagtactgagtttaagtcactaatattttaaaccttaataacttacacctatccctgcagaggggaataggttcattatataagattaatcagaaaccatcccatatacatggaggacaatagtgaaaatagtcaaattttaatttcaaattacaaatgtaagccctctaggactgctggacatgcagtggatgctgacttttctctataattttttttaataggtggtattaaagatggtcactgagattaagaagattcctggtatttctcgaattatgtatgacttaacatcaaagcccccaggaactactgagtgggagtaataaacttcttgttctattaaagtaccgtgtgcagtttaaattgattagaaatcattcccattattgacatgcagtactgtgaaaagagttactggagcagctacatcacatctgagttctccacagcaaaaatctacggcttaagagctgagttggggataaccaaaagggactgaagagtttgtacgggtaaataatcaaagcaccattgcctacactcagacagattgatactgcttttgcctttgcctcacttattctttatgtataaattcactgttgatgtctctgtgaatatgtatgaaggtgggtgaatttgggggtaattatgggcttctgtctccttaccagtttctaagaactgttagaaacgcccattatttaccagtgttacttactacttatatatactttttggagaatcagttttcttataagtaatcttatttctccaaagggtgaaaaagagatgaacatatcagataaaggtat

SEQ ID NO: 108971 - DNA, 3566 bp, Homo sapiens
agatcgagaccatcttggctaacacggtgaaaccccatctctactaaaaatacaacaaattagctgggcgcggtggcgggtgcctgtagtcccagctactcgggaggctgaggcaggagaatggcctgaacccaggaggcggagcttgcagtgagctgagatagtgccactgcactccggcctggtgaaagagcgagactcagtctcaaaaaaaaaaaaaaaaggaagttcttagtgtgtaattgaccatcagggataaatgggcttcaaaagtgttaattgtctccttacttacagtgagtttctagagatagccctgtctttcagaaattctctgacatctgcttgcgcaatgttataaccactttcccacactactcccctccagaaatctcattgatatgtggcgaggacacgccttagctatcaccccaatggatgcttctttcattgacccaaatccagaatgtaatggggaactgaatacaagttggatgtctccacccttggaaagcacatcttttgttcttactgaagtagtttaacaccaccagatgatcaagggatcagggtatctttctggtatctttttaatcactgaaggactttgacagcagtaatggtggcattgttgactcttaaatttctgaacgtttcacttaatggcaagtgaagagatatagaatcccccaaagagtgtcaagatgctaacttccaaccctatttttatgtactgaagaggcctcagtgtctcactgaactctaacctttttgtcagtgttcctcaacactggatgcgtattattacataacctgaggagttaaaaaatacaataaccagatgtccaattaaataaaattagaatctggaggaggtagaactcaagcatttacagttttgttttgttttttttttaagacagagtctcgctctgtccccaagtgcagtggcacaatctcggctcactgcaagctccgcttcgtgggttcacgccattctcctgcctcagtctcccgagtagctgggactacaggcgcccgccactacgcccggctaatttttttgtactttttagtagagacagggtttcactgtgttatacaggatggtctcgatctcccgacctcatgatccgcccgcctcggcctctcagagtgctgggattacaggcgtgagccaccacgcccggcaagcatttacagttttaaatctcccagtcagaataaattcttattgagggccatacctagcctgtcttcatcaaactcataggtgaatctttgtcaaacctataggagagagatgcaggccatagagatggtcttgctgaaggtcttatagctaaattagttcagatccaggaaccagattctggaactgattgcacctatattatgttgtgtgtcagacactcccaggacctgtttggtaataattaggacagctgacatacttgttgctaattttgagatctgggcaacaactgtgtaggctgttctttcaacctctttcttcttacttctttacttttccttcagagaggagaaagccacccctgtgctatagccaccgctccaattctgactctagctaggtcatgaaacagactgagctattattgcatcaacacataaatcctgtcatttgggtattattctttagagaactagagattacctagctgcaacctaagtttcctgaattagaatcatttgagcagcaccatcttaattggctcattaacatatttgtgaccaggcacagtggcgcatgcctgtaatcccagcactttgggaggccgaggcgggcggatctcttgaggtcaggagtttgagaccagcgtggccaacatggtgaaaccccatttctactaaaaatgtaaaaattagctgggcttggtggcgcgcgcctgtaatcccagctactcggaaggctgaggtgtgagaatcacttaaacccgggagatggaggttgcagtgagcagagattgcgccactgcactccagcctaggtgacaagaatgagactccgtcttaaaacaaaaacaacatatttgttcacttttgaaccctgtggtgtcttttaactttgttaagggcccttggttagcaaaattatgaaagtttaggaaatttggctattgagtatattaagtacaactacaaaatcctctgagttctccaggaagcctaaaccttgagcagtatcttattcaagtggagtatatatcttcaagaatacagatttttaaggtaagtagtttttcgtctttgcatctcctaagaccattgttaacaaccttgatattaaacgaagaagtgaatgtaaacctccttttgaacatattttttataaagaaatattttgttaattggagtaagtagtattgttatgaaatcactgtgtaattgttaattgtaaactgcaatgtctattttgtgttgtaacaatgttgccataaaatagctttgctaaatgtgaaatgactttaatcccttttgtcttcaatatacttcataaaggaggaaatgatgatttacacaatttgtcatgaagcttccgtgtttatgagaaattccaagaagtaagagccaagaggacagatattatcagaatatgggacataagaaattgcatatagtgtcaagggtttctatataacaacttaatttatttcccttgcatatatagtaggggttaacattttgctcaatgttaacgggggacataatggacataaaacattggatagctttttatttaaatgagctaaaggtgtgcgtatacacatgcacttataaaattaaagtcatatatgtatatacacacagacttatgtgacttattgcatattcatttacgtttgaccaaatcttttgtcaatttctcaagaacaaattaacctttatttaatacataaatcaggtccttttaagtgtttggaactatgttatcagagttgattaaacccatcaaagtaaatgtactagtgagtcatcaatatgaagattagaagaagtaatcactttgagaaactgaattccatagttactttcaggcagtcatattactgtggtttgtttcccttcaagtcagtgcccttgcctggccttctgttatctgagaagagtgtatttgagacaactatattttgaaaatttttttaccgttttagcataattcataacaaaagtattaggtttctaatctcgaactcctatatttcaaaactgacattctgtctcttaatactccttttatcaaaagctatattaagcaccacacagctgtttttgtttttgctttttgtttttttggtagattattagtgagttattctaatgaatttatatagattataagaaaagcagctaggaatcttatgttaacctcacttttcaagtagtgtgtcaaattctaaccattaattcctttttttatatttcagaatgccattccatatgtatatattactgttcttttaggtaatatgaaacctgccaaaacattcttttttaaaaaataacattattagagaaaactttttaaaattcccacttaattt

SEQ ID NO: 108972 - DNA, 1863 bp, Homo sapiens
gttcatcatagacaaacaacctacagggaaacagattggaaaagctattttcaatgtataaaaccaacaaactatttagaatattcagggaattctagcatacaattctaacttgcagcaagaaaaagtcagaaaacacagaatattaataagtagttaacagaaagggaaacttatgtaagcattatatctcttaagtgaatgtaatacgaaaaatgaatttagaataaattaactcaattttctcagaatccggttgacaaaaatgaagtcaggtaatgtcaaatactggccaaagatgtgaggacatgagaatcctcatctatggctggtggaagtataaatagtcattacagtgagccattttagcagtgcaaagttaaattaagaatacatagtgttcagcctgcttccggacgggcgaggagacttgtggtctggttctgggacttccctaatagcatggcgcctaaacgccagtctccactccagcctcaaaagaagaaaccaagaccacctcctgctctgtgaccggaggagacatcggcctctgcaggcttgctgaagaagggagaaaaagaacagcaagaagcgattgaacacattgatgaagtacaaaatgaaacagacagacttaatgaacaagccagtgaggagattttgaaagtagaacagaaatataacaaactccgccaaccattttttcagaagaggtcagaattgatcgccaaaatcccaaatttttgggtaacaacatttgtcagccatccacaagtgtctgcactgcttggggaggaagacgaagaggcactgcattatttgaccagagttgaagtgacagaatttgaagatattaaatcaggttacagaatagatttttattttgatgaaaatccttactttgaaaataaagttctctccaaagaatttcttctgaatgagagtggtgatccatcttcgaagtccaccgaaatcaaatggaaatctggaaaggatttgacgaaacgttcaagtcaaacacagaataaagccagcaggaagaggcagcatgaggaaccagagagcttctttacctggtttactgaccattctgatgcaggtgctgatgagttaggagaggtcatcaaagatgatatctggccaaacccattacagtactacttggttcccgatatggatgatgaagaaggagaaggagaagaagatgatgatgatgatgaagaggaggaaggattagaagatattgatgaataaggggatgaggatgaaggtgaagaagatgaagataatgatgaaggggaggaaggagaggaggatgaaggagaagatgactaaatagaacactgatggattccaaccttcctttttttaaattttctccagttcctgggagcaagttgcagtcttttttttttttttttttttttccctcttgtgctctgtcaccctgttcttgaggtctcttttctctgctccatggttctcaacttatttggggggaaataccttgagcagaatacaatgggaaaagagtctctacccctttctgttcgaagttcatttttatcccttcctgtctgaacaaaaactgtatggaatcaacaccaccgagctctgtgggaaaaaagaaaaacctgctcccttcgctctgctagaagctggagggtgctaggcccctgtgtagtagtgcatagaattctagctttcttcctcctttctctgtatattgggctcagagagtacactgtgtctctatgtgaatatggacagttagcatttaccaatatgtatctgtctactttctcttgtttaaaaaaagaaaaaaaaaacttaaaaaaatggggttatagaaggtcagcaaag

SEQ ID NO: 108973 - DNA, 1051 bp, Homo sapiens
gcactgcatgactgtcattttgaactggaaacgaacacagaaacatgaaaatgattggtttgttaaggcagtgggaaaggtaatttttttcctttcttttgacatctggtttgcaatggtttcttttagttcttttaatggaaacatataggtgaaagacagctataaaatattgctaaattttagaaatgtagaatgccattttgtttgttgcttttaaaattggttatcctcacttaaagcatattgtgaacttttccctaatgcataaacatttgtccaaaatatgatttaaatggctcctttgcattacatcacgtgaataaatcataattgatttaaaaattccccattgtgtacatttagtttgctgcctttttactattataaatcaaactgtagtcgatatccttatacatcatgtttgtgtggatcttaattgcttccttgagataaatactttgaagtaaaatcacatgatcaaagggtatacagatttttcatatattggtggattgtgttctgaaaatatttctgtgaatttatactctgaggggaaatgtttgagaggcgcaaagagcaagacgagggaccaggaatccatggtgagttgacctggagaaagactgggggacacctctaggagaggcctggcaagaaagggaggagaaggagctctcaggaagaaacccagggacataagcctcaccagtgacaaacacagcaatgtgagctgagggcaacacttcgccttaaagtgtagattaaagaaaatgatgcatacaaaaaatgttcattgacctcttacgggctttacaaaagtttctaaggtagtttattatcccctagtcacagaggcaggaagggaggcacagaaattaagtaagtttcctaccaccacgctaatgaaagtggcagaacacagacaaaaaatgatgtatgccattccaaatctcatggttttccactcaactttttctatactctgaaggagagaggttggcctgatgtcaccttttttatactctgtgatgaagcaggatgcccttcc

SEQ ID NO: 108974 - DNA, 1079 bp, Homo sapiens
tcttaaaacatggcaaatatttattcaatagatcttgagtgttaactaagggacatgtagtaagtaccctaggaactggaaaaccgtggaaaagcaaagacacaggtctgacctcagagggcttgcagtccaacaggagagacaggcagttatactacattatcataaaagatcatgggagggggaatacaagatgttcagggaacagcaagaaggggctcagcacacagcaggtgggcaatatttgtggaaagaacaaacaagtaaatgatgtatgtatattgtcctatgacttaaatttccaagcaagttatcaggccggcttttatggcgaggcctgggaagtcagttgccacgtataacactgcaatgcactcttccacagaaacaaaccatcccaagaaatgagctttgggaatactgcctgttcataggcagaggacaaccctggatccatgtactgggaaagtgttctgttgcctttgttccccctactcttgccccacccaggacagagagggggagagatgggacactgcctggagatagcctcaaaggcaccattaaattccctgatgttggaaggggctgcagtacttgcctgaatggcaccaaggttttcaatgagttgttcaggagtggatgatcccaggagcacagaactcacaccttcatttctcaggcaccacgctgggaggagaggacactgggtcagtttatcaaagcacttccaatcgttgattagcttataaacacctgctacagctgtttgttgcagccaaaatttattaacttctttttgtggaggatgtacagtgcttcctaggattaaaaacctgagcagcaccccctgttgtgtagaagatttgacagaatctgtcaaagcccagctgggaggggaaatgcaaatgcatagaggcgctggacaatggattgtaagattctctccagcacgctcagctgccctcaagtagaagcagaaaacacagatgcactgctgtctttcttgcttctccgctggttttccaattgctagcctactatatgtctcttaattaacactcaatgcatttgggttg

SEQ ID NO: 108975 - DNA, 2231 bp, Homo sapiens
aggtggaaaggggacacagatattagatatgtattacaatccaagccaggcaatagggccttaactagggcagtggagcagaaaagtggacctgagagacattttgggggaagatggtggtttcaagactgagtaactagaagtatattggtattgattattgagattagaaaccaaaggagaagtagtttggggaataagaagttgggagagaataggatgtgttgagtgtaaagtgcctgtggaatatccacctaggagtgactgagcagctgcaagtgcagctgtggagcttagtagctgccggaggactggagttgagggtttgtgagtcatttgcaccgacatgctgactgaagccccgggaaaggatgagctcatccaaggctagcatttactgtgagaagtgggccaagggtacacattacaccataagacaagggacaaaggcagactttctcactggaaaagtctgaccctgtgtggagactgtggtgaaatacaattctgacgaccaattctgaggtttcaacctcattcttcctttgttgcaatcctgctggccaaggtgaccttgtctccagtcaagtgctatcctcagaagccttagggtttggcaaaatagagctgccagcctgggaaacttcattctggttaatgttttactgtctgaagctgaaggaagaatttggtttcccactagctctggaatttcagtgtccaaacagctaatgtgttatttaaaatgagattgtaacaatgagaccaaaaacctagaaactggatttgttggatttttttttttgtctaaaatacagcgggttagccacgtgaggagaagaatccttcattcattacaccaaagcaaatctctataggaaagagatttaaacattaaaaaaatgaaaccataaaagtactcgaataaaacaagacatagtatcacaagaccagaattttcaagagaagccccactttgaaacattgtaaactactacagattttacaaacaccccacaggctactagttttgcaaacttgatgttacactgcctgggataggtggtgggttgggggaggtctggctaatgttgctggggctggctgggcattagtaaagtcctcccaggattgggttcctattgatctggaacttggggatggagtaggattttgctaggctgggatagtggtcagtttgtaggcagagggccactgttatcgccgaagctctgagtggttgagagcggctcaagattcagattccaggaaggtgtggtggggagtgatgaggcccgactgctgtggagcctggccttctctgatgggtgatgggaagcctcagaagggttttaaggcatgtggggaggagggggagaggcggttctcccaccttttaggtgggagtggggaggatggaacctgtgcaggtgaaggtgggctgcctgcagctgtggtttctcctcctgtctctcccatctgtcaggctctgatttatatacgccccttcgttcctgcacatcttaggcacgtggcatcccttgaagcagctgccttcccagcctactagaaatattttcttacaactgctggtgctccgtattttccatccttttgcagccagtgccaccactgctgggcacccctagtcacccagtctgcttttcaccatgttgtggggcccaatcacaactcgtcttgggtggactttagtgctgggtatgggggaggtgaagtagaacaggggaggattggtaagcccgcaatggtagcagtcttgctgcatggataatgtcccctttaggataggcaaagcctcatcctgctgccagccaaagccttgctagggaggaaatgttttgggaagaaaaattactcaagagttttcctctgaaatgtgtccccttccctgtcagctgccttgcctatttccacagcttttaaaactcagccctagacttgcctcatatgccatccctaggcactatgactgcccccaggaatggcagtgatctccctgtattagcatgataaaaatcctcaattcctccctcttctgccaagccatggtgtctctctttcccaaacctgcagaatccatccatttctctccccctccatggccactaccctcattcaagccaccatcgcctcctgcctggatgactgcccttgcccttcattctactttatgcatggcagccagagtgaccttcagacattcaaatagg

SEQ ID NO: 108976 - DNA, 6499 bp, Homo sapiens
atgccggagtcttaaaaatggaggcagttgtcctgagtgttcattctagtgttaaaccatgttgagactatgcatcttactaggctggtatcattgatcagtgttagaatgacatgtttcctggaactccaactcttgtgttttaaaaatttacatttaaacttctatgaaattagaaggtgttttatagttgatggctgcacttaatgtccttcccttcctccaaacttacagtaaatggaagagttattaagtcgatggtgtctgtagaattgaggaaatatggcatctgttagagactacagatttcttaagatgagcataagatgttaattagccttcatttagctcctttccggcaaaacttgttttctttggattagtatacttaatgaatataatgtgtcagttaccaatgacttacttaaagtgctgtccttagggttgaggggatgtgtcatctgactccagagtaggtttatctttttgggagacaaagtgtctacaaagtggccttcaacctttttgataatgacctacagtaaaaaatatgtattttaccttttgaccagataaactcacacgtggacacatgcacatgtttcataaaacgataattatcctactctgtgcgatgtgctgctgatgtttttctattctttcctatttcatttttttaaaatgctggtctcaactcaattaatttctatgggcattcgatccacttgattgagttcacatcccactaatgggtcacaacctacccttttaaaaactgctttacaaagttaattaaccaacaagaatgaaggctcccttattcacaggcatcctataacttccttttgcatgtgtgaaggggtaaaagaaaagatggatgaaataccagtaaattaataagataaactatcagaacaagtaaaatagaataaaaagtagaaggattttacaggcattaaaaagtcctcctaatgattaagcgctctttttttgtttgaattaataaagatggctaacaatagcctacttctgtgagaccacaggtaatttttgtcattgggattgtcttctgaaggtgtgatattgaagtctgaaatccgtaggctgtagaaagcctcaagcccaaggtatagccaaggaaactccacaggctgctaatcatggagtttgagttttaggtaagggccaagagaaagatatttgacttagctgctgatgaaaccgtgcgggttgccattaatgagtcctttcttccataaccctggttgcctgggaaaaatggtaacataaccagcatgatgttttcttcactatcatagagtgacatattttttttcagtggaagaaaggggacaattctgactaaatctaatattacaaacacattcttaccctagaacactcaaggaaaaacttgttttatgatgaactagagccatatggtacttaaaagtttttttaaatcatatttataagcttgtttgacttgtttctgtgtctgtagaatcttgtggaagaagaatgaagttgctgattatgaagctacaacattttccatcttctataacaacactctgttcctggtcgtggtcattgttgcttccttcttcatattgaagaacttcaaccccacagtgtatccttttcaaggttgattatcttttttagaagtcaagaaacagtagttcattttggttttgacttgtctggatattttagtggaaagaaaaactgctctgggagtcagtccattaaatagtgctgactttagataactttctggacatttaaaataacagctattggtttaagattcttttaagtttatgaattatgactgtatgataaagtattacaaagtagtctatgggaatctgtgtccttgcctccttaaaaaaaagctccaaagagccaaagcaaacctgtcatttttgatagcttctgaaataataagcccctgtacctgttatttttgggctctgggggttgggtggatggccaatgcagttaaataggttcattccagtgtatcttaatagtgtttcaagctgctgttaagttgagcttttgggcaagaatcagtcttctcttattaatttattaaagatgttatccaggaatgtgcagccaagattttaacaattggtgattatgatgtaataaaatatcagataccctccaacgtgtaccttctgggaatgctggagtgatttgctgaaaattgtagagttctgaggctaggagtagcttcgaacttttagaacctccttgctgttgcaagccaactgcagcaaaacactgatttgcagggaagacttatttttccattgctcttaggggaagaaaaggaaaacaaatctcttttctctccatgttctttgatcagctcttcgtgaaggttaaatggaattcagattattctttgtgatcatgtgttctaggtttctgtctaaagtgttttttttaaattggaacacatttcctgtgaatgttttccatttttttttggtcttctgtcttgcaaattgtgtttgcagacaatggggctgcacatcattatgattacaccaagtgtcaggaaggaagcagtacattccaaagagatgggctctttattttctcaaaaaaccaatttggagttactcatttttccataacattaaatttcttacaggaactacatattgtccataagtgcttcatcaggactcatcgccctcctgtctactggctccaaatagaccatgtcagcttcaccccctggctttgtgtctatgggtggcctgtggtatatggaaaagtagcagggtggtcagggtgggagacacaagatgtttttatagtctagagcctttaaaaaacccagcagaatgtaattcagtatttgtttattggctgttttttgacagattgttgaaattaaatgaattgaaagggaaactcagagtactaggacgtttattaaaaggaaaaaaatgtcttgcaatgtgctgtaatcacaagaggagaaaataacttgtttccttgatctgtcagaggtcacagtaacctgggccgagctgttattatttattatataatagtagtaggaagttaataactggttctctgtgttccaagcacaatattacaacttcttttgaaccgtaaatatcagaatgaatcctcttcccaggggattgaacagaagcttaatgtttacaagtgtttgaatttgtgatctgaaataacacaaaattaaaaacatgatttctctaattttccaactagaggaagagaaacttgtggaaaagttctttttttttcttttttttttcttaaagaagggcagccaaggtagtaacctaaaaatagtgcccaggcatatgagagttgtcctacgaggttaaagaacacactgttccactgtatggctttggccctgagtggccagggaggtcaacttgaccctgccatgttggtttgacttactaagacacaggaatcactgttttccttgaccagggtctcacaccctggaggaatgttaagtaagagaaagaacctctttcctgaatattgacatgtaaaagaccaaagtaatttttctgaacttctgcaattctgagaactctccaaggaatttacagtgattttagtgcttgtcagcatttttccatgaggactttcatacatttgactctttagttcacaggttcccattgattgtgagcaagatatttatctctttagcccttggggatccagctgagagcaatctcttgcatttttttacccgtgtatgtacagatatcatttcttgtgtatgccatgacttgaaaaagtttgggaagctctttagcaatatcagctaaaaggatatgaaatcacaggtgatagcagttgtcattcagtaatttcctacaagcagcaccccaaaggaaatatagtcctaatctttactatccacttctaaatttaatgtgaatttcatacatgttattagttgttttctttataattttataaaaattattcatcgggagtttaacttccacttccatgctatcggatgtgttgggctccatgcaagaacttggaagaaaaacaggcaggaatgcatttgcataatgacccagatcatcattttctgcaactgagaattatatttcatcattgcttctagaagtctgcaattctttacttttctttggtgcattattatctaggtgccatcactggataatgtggagtgactagagaagtcacatatcactgtaaggtacagttagggtaacactttagaggtttattatttttaaaaaacttttcttgaactcctggccaacatggtgaaaccccgtctctactaaaaataccaaaattagccaggcgtgatggtgggcgcctgtaatctcagctacttgggaggctgaagcaggagaactgcctgaacccaggaggcagaggttgcggtgagtcgagatcgtgctactactgcctgggtggcaagggtgagactccatctcaaaaaagaaacaaaaaaacccaaaaagttttctttactgttggttaaaaaaaaaagccagaccatagtttgactggtggcatggaatttgtgtatcaaataaatgcatttgcttatttgacaaaccatcagtgtccactatttgttaccagagttgggccactatcttttaaaattgctggtgaaaacttgccactagatggcagtgcctgtatagatggggaaaaaattgccaccattcttggtataatacagtgtagcttagatgaggtggtgaaataggggtatcagccgaatattcctaatatagtttctcttgaattaataaactgaagatttgtaggaaaatgagtgagcaaaatttgtttactgttgtgaatttttcctacagcactgtttttaatcttgatgttttccaactttctgtactaatagatacatttctgtgcataagattataaagcatatactcacagttcagtagttttcgttaaggatttactgtgtgagtactttactgtgaggaattgcagaaccttttcccctctactcttgtctaaaagttctgtgtggcacacagagatgcgacctactcaatctgacttagtaaaaccatgctgtagaatttttgtcttaaaaagaccacatacccagcacccatgaaataaaagattcatctgtaattgggattcaaagtgattaaattcctttgttcatactcataaatagcactaaagtgttataacattttcatttacctatttttagttccttcattttaacttaataaaaatcttggattgatattcttttttttttttttttttttttgagacagcgtctcgctctgtcacccaggctggagtacagtggctctatcttggctcactgcgagctccgcctcccaggttcacgccattctcctgcctcagcctgccgagtagctgggactacaggcgcccgccaccacacccggctaatttttttgtatttttagtagagacggggtttcaccctgttagccaggatggtctcgatctcctgacctcgtgatccacctgcctcggcctcccaaagtgctggaattacaggcgtgagccaccgcgcccggcctagattgatattcttaagcaataaaagtttactggttgtcctatttgccatattattgaaacttggaaaggataatttgaaacaaggtttgaagttaactgaaatatggagattgaatttatactcaattcttgtgaaaagtcttgcttaataagtatgattaaactttgcttcttaaaatttgtattttccctacacttctttataagaatcctatgatgaagtacgtaatctttattatattattttacattaaccatcttttttttcaaattgttttattttttattttactttaagttctgggatacatgtgctgaccatgcaggtttggtacatatgtatacatgtaaccatcattttaatatctcacacatgtaaatgcacatctttgtagttaccaatcaaatgtatgtgaggcaatgaaaggcattgagcagttacagtaaagggcagacatcaggcctctgccagtatgtacctgctgtgccttcctgcctgccctatttctttgttttcagtgtgcatgccagtcactgctgcttctggagacaggatggaaggatacatgtatgtgtacatttatggagaaaaccaatttatagatgtatcagagctctaagggattctctttcacttccttgggactcccaagcagaggaattaatagattaggagggtcttttggggggttggtttaaattttcagggcgatagaggctaacttctcgttggccttcatgaattttcaatatatcatcttttcgctgacttatccctgtttgatttctgagtttggattaataactatgttttttaacttcaacattctcacaaacaatttctgcataaaacttcttctttaaagcttaaaaagaa

SEQ ID NO: 108977 - DNA, 1018 bp, Homo sapiens
aaattgggaatgaaacctttgccatttgctggattaggtatttcaaagtggggtgaggtggaggtttcatggatatatataagtgcagagtgtcagaacattataaaatttctcttcttttcattggtagaaatttggctgtttttatttccaccataaaagccatacgggatacagtttgtactgtattgattgaccttgataactgggaccagagcctctcattaagatctagcttgtttctctctgaaagaattccaggagatttgatgtaagaagaaggcttatcagcatttctttgcttagatgtgtatctctcaaagctctgtctacattcatttggaatatatactccatgccgcttaaaagtactttaaaatgttcatttatccaaggatggaaataagcagaggagaatgtgagattcattaacattcattccagagtgggagtgtggtttcttcttgatttacaggtgatctatcatttaacagttgcttggtctcaacatttctcttgtaggaagctcttcctgaaaacatccttaagatattgagaagtgctctcccaaaccacgttccctactaggaagaaaatgtcttctactaggcagaaccgttggcaatgagggcatttgggggtcctaaatttaaaacagaaacaaaaacaggatatgggtggactcagtaaaagttctaaaggctgtcaggcagtcctgactttatacactgatgtaactaacacgtggtcatattgggatctagggaaatctaaaggattgggccacttctttcattaaaagctttttgaaaatggttcttgtattagtcgattttcacagtgctataaagatactaccagagactgggtaatttataaagaaaagtttaattgactcacagttctgcatgactggggatgcctcaaaaaacttacaatcatggtggaaggtaaagaagcaagtgccttctacacaaggtggcaggagagtgagtgagcacaggggaaagtgccattt

SEQ ID NO: 108978 - DNA, 1403 bp, Homo sapiens
aaaagacagctctctgcccccttagcagccttttactttaggtttcagaattgatttcctcttaattgtgtgtgttttgttttgtttttttttagaactattttttcctctttccagttaccaatttgtgtggggtaacaaggtttaaaaagtaactttgtaaaccttttaaaaaatacattatttgaaactgactaaacgttttctttttattaataacaatgtcaattctaactcagttcttgagtgagagagctaaagatggagacaggtaaaaaaataggtaaaatcagttgcaatttgtgcttaacttgtatcccagacacccttgtagttgaagatcaagattgaaaactcctgccttgaatgacctggggctttctgtccatcacacccagcttaaattgtcctttggagtaaagttaaaataattactttaagatattacagctgttatttccacttcgtttaagcctagttttcgctcctgttatgtacttggaattgaaataatacatcatttactaatgccttatgaaatttattagttgaacagttagatgataggttaaaacaaaatgtagttaaaatgattcttaactaaattgtgttaatagcatttgactttattaaccacattaattcctaaactgtggaaaattcttctttttaaggggaaatcaaaacacgtcactaataaaccacatcttggacatttctcgaacttctcttttggctagtgcagtgtaataaacttggaactttctgctcagcttcttttcttgaaatgtgaaatatcattctgttgccagtacgaaatatgagtacggtgtgtttctgagagagtgtgatgttcacctctgtagcatatggaaactttttctttttttctttttcttccagagtagcacagaagagggaggatgctgtttccaaagaagtgactcgaaaactttctgaagctgataatagaaagatgtctcggaaggagaaagatgaaaggtttgactcctgtttaaagtatggccatcataaaagggggtactttgaagagaattttttgatttttgcttaaagaatttggattttggaattgtctgaggtaaattttggaattgtagtagtagtagtaatggaaatagtaatagctgacttttagagtttttattacaaccagatacttttatctgtgctgtacaatagttgatttattcctctaaagagtcctgtgaagtaggtactatttttatctcctttttatacctgaggcaacaaaggtacagaaagcttgagtaacttgcccagggtcctgaattagtacatggtagatccatgataagaacacaggcagtttaacttgagagcttgtacttgtaactgtctgctggaattgaggaggcaac

SEQ ID NO: 108979 - DNA, 1062 bp, Homo sapiens
ttcaacgtactcagtcctgggtacgcacagagggcactaatggcgtggggccagaagagcttttaattttggaattctgaagaactgagaactcgtgagtctgtcagcagctctgaagtggaatatcaataaagttttgttaattttttttaaagcaccgactaaactacaaatcccttctctctcctccaggtgggtgggtcacgtggcttgtcaggaatccggaagtctggcccgctcgcccaatcacgcccggaagcctatctagtggcgccaagctggccaatcctggggacgcttgctcttcgccaaaccgggtcccgcctccgcgcgccgcgctgacgggtcgttagcggatacggcggccgcaggggcggagtcaagggcctttgcccgccttggcggccggctctacgttccctgttctcgcctgcagctccgccatggctcctaaaggcagctccaaacagcagtctgaggaggacctgctcctgcaggatttcagccgcaatctctcggccaagtcctccgcgctcttcttcggaaacgcgttcatcgtgtctgccatccccatctgtgagtgctgggagcgaggcgggttaggcaggccgccggctagtcgggctgggcggggacgtggcaggacccggcgagcagggaaggcgtgggtgccggccgggggtcggcaatctctccagctcccctgagctcggggaggcacggagcctcttctttgggcacagtgttgtcgcttgggattgtcctgtgcagcactcggggaggtcacttgttaaaagtacgcacgttcccgagctccaccccaggagaaggtggttaactagttctggggtggcggccccgaatctctatttaaacagacaaactcaagcatactgcctctgcccttttctatacaactgttgcttgccgttacgaaattttaaacttattacttattttgcataaattagttaggtgagaaacccatgaagtgacccactgaattataagtgcatctttacgtgagctacttcacaccattgcataattttcctggttttt

SEQ ID NO: 108980 - DNA, 1029 bp, Homo sapiens
tgccaccagacgaggtcgcctgccccgagccggacaggctggacaggctgcgcacctgcggcggccgactatttcgtgggccttgtacgccaccttgcagaagggaagctgtgaggttttggcgatagaagcgcatttacttgtgttttaaagcccacaaacgccgtagtgactaacttattcattcagcaaatgtctgtcagagcgtctattacgtaccaggcatgtagcctgaacttcacgcctgtcctcatggagcttgcagagcacctctgaaatacacaccacatacggaatggccatattttctgggttgtaaaatactttgaattgtaactccatatattgaatagattttcagtagtgagggaagaaacaatacatttagttcatataatccatatgtacgaaaaagaagtgctggtaattccagacatggaagtcagtaaaactaggagctaagaggtaataatcatagacattatgattctaagcctttgttaaacggttctaaaccagactgggtaagcgcaccagcaatgaatagattaagggtgttatctccttagcagcttatttcaaattgcatcaaggcagggccattaaactaaggtgagaatgatatgggcggaattcagaggacaataggtaaaagatgaaaatctttacatttaaaatcttattgagacaagatcttggtcagtgtctactcatacatagaattgcctagaagctaatatttgagtttaccatattactgttggctttctatttttctcatttgttctgtttcttttctgtccttttgtgccttcttgtagattattaattccactcccttgtaacaattaggttgttatacattctttatgcttttagtagtatttcagttatttattgctgtgttcaaaccacccccaaaatataatgacttaaaacaatggctcttttatttactcatgattctgaattctctggcacaggaattcagtcagggcatagtacaggtggctcatttctgctccatga

SEQ ID NO: 108981 - DNA, 3753 bp, Homo sapiens
ggccaacaggaggcgtcactcggacccgggctcggcgccggggtgtcgcgcggcggcgggcgggcaggctttggagcggcagttttttcggaaagtgcttttggccgggagtgccgcagaaccccagcgtcacgaggtgaggggtgtcgcggtgtgtcgcctgccgctggagaccggaggatgtgttcttctcatctttatttttctgttatgaaaactaattgaggagctaggttctagtggctttccccctccagccacttctccagttctctgcttcttcctcccagttttgtttccgagtttgatgaaagggcaataataggaaaagttgcgcgcgcgcgcttgcgtgtgtacgcgcagacacacatataaataaaatcgatttagtgtctattttaccttgattgggtttgataggagtggttagagagtgtgcgcgtggggaaagcacaggccggtttggtatggtggagagggaataccacaatctgtgccaattgtgccttgaggcaataacaccaaatgatgaataataacgcctggcttggctcctttccagttgatttatgtctcatgtcagatccctccttcttcgtgaagctttccctaacaatgccagcttacagtgaactctcctttttctgccttttccttttgtacttatcatgtaaatttaatacttcgttataaactgctttgtattttacttttctgaatttgatggacttcttacacatagatttatgactctccaattaaatttttaatattcacttttggggacactcagttttaccttttgttgttgacccacaaacaacaaagaactaagcatttaatatgtgcttttcttaactaattcagccaacaaaatatatatggaacaccagctgtgtgcattgtggtagctaggcactttattgggcacctaggatgcatatttgattaagtcatgggaccttgcgtcacagatctctttcagtttattggacaagagagaagaggattaattgctcatcaccattcctttctcacctggcacaatctcagtaaatgttttcaaatttcagtttttttcaaggggtctgattcttggaagaaaggactttttcgtctctttcagtagttgattaggaatctgaaatttggtgtgtgttttatattttttttttatttttctatagtatgccttcatttgctctttaaaaatgtatgtatgtaacttttctgaaggcaagaactaggaggctttttctgtgttaccaagttgtgcttgtcttctgacacatcgtgcagtggttgttgctaatggggcttctgttactaaacacacccttgtattccatcagaagcggtaatgtttttgggggttgtaaaagtagactcttaacattcttggatagtatattagagctttctgaatatagaaatgcttaacagactcctggctttctcccatagaacatttcaattgagagcccctgttacttgtgtatgttcttatacccttaaattgactcactgttttaagtttgaagtttatctttcatttgatgaacttttaaagaaactttttgtcaactcatgagataggtgatacataaacaactataaagagaaccgcaaagctgagtggaaatgtggtttccctgctgtcatcatctagatacagttatttctacctcccatttcccaccccactctaaccttatagtagaaattcttaacctagcagaattgcaaactcttatgtattcagtccacaaatgcatgccaatggcctgttgaaagactcttctacttttacctgctgtgtgcttttgaatagccttgggtgctttggagccttaatttctcgataaaatttaaaattgacttgtaaaaactaaatatagtataagaggaatggtttcagggaatcagtcaggacaaaaacaaaacattttaatgaatgaatgaaatccagttgctgtcagtttgtaaatgatcatcttccttcctttcctcgtaggatttttagactctgaggagcagttggagctaatccacattatggaaatggaaaccaccgaacctgagccagactgtgtagtgcagcctccctctcctcctgatgacttttcatgccaaatgagactctctgagaagatcactccattgaagacttgttttaagaaaaaggatcagaaaagattgggaactggaaccctgaggtctttgaggccaatattaaacactcttctagaatctggctcacttgatggggtttttagatctaggaaccagagtacagatgagaacagcttacatgaacctatgatgaagaaagccatggaaatcaattcatcatgcccaccagcagaaaataatatgtctgttctgattcctgataggacaaatgttggggaccagataccggaagcccatccttccactgaagctccagaacgagtggttccaatccaagatcacagctttccatcagaaaccctcagtgggacggtggcagattccacaccagctcacttccagactgatcttttgcacccagtttcaagtgatgttcctactagtcctgactgcttagacaaagtcatagattatgttccaggcattttccaagaaaacagttttacaatccaatacattctggacaccagtgataagctgagtactgagctctttcaggacaaaagtgaagaggcttcccttgacctcgtgtttgagctggtgaaccagttgcagtaccacactcaccaagagaacggaattgaaatttgcatggactttctgcaaggcacttgtatttatggcagggattgtttgaagcaccacactgtcttgccatatcattggcagatcaaaaggacaactactcaaaagtggcagagtgtattcaatgattctcaggagcacttggaaagattttactgtaacccagaaaatgatagaatgagaatgaagtatgggtatgtatttataacaacttgtagaactgttgttaaatgctatagagaaggtaaagaagctaaaagcttagtagggtggtttctttcagtagtaacaggttttctttttttccactattattcttttgactgtgctgtcctgatttttcatggtgggtgaatgcaggctattaactcaaccggacaatgaaagttttacgatttgaacaattcatatgtcagttcaacgtgcgtgtgactgagaagttgcacatacattaaatattgtgaatcaaatactgttttaatcacccaaggaaagctggcttttgaaagaaagtctggcgaatcttactataacataaataatgaatctcctaatttatctaattttaaagctctgcacattgagcagctgttattttttaaagaaaaatagtattgtcgagagatgtttgtgaccctcttcattttgaatggtataaacatcttttctgtgaatgattcagaagttcctcccatacttctggatcttttattagtttccttggaacttttcaccattaagtttatattatagataaaataaatttttccagaatttagggtattttttttttaacctggaagagtcctttaacaatcagtgaagggatgaatttatggtaaggtatgtttaatactcaaacaattatccttgagttttggtacacaagatgtgtgtatacacataactcagttcttttagtatggatgtctaagcagcattcactggcaggcaactggtatttccacatctgaa

SEQ ID NO: 108982 - DNA, 2754 bp, Homo sapiens
cctgcattgttgtattatgaggtagttgcagtgggtgcttgatttccaaatcagttttaatgaagtaaactaatgtttatctgacacttgggagaagaaaagtgtgagtgaagtattataattaccattgctcctactacattgttagtggtaataagtggtcctgtcctaggaaaatagcaaaaagtattaactgttaaattactagtaaagtgaagttctctgaagattacaggaagaaatgttgtaatatagtagatagctaagtgtcaaaaattaggcttttgggaagttgacttgtggtcattgcaacctggttttccttgtattccaaagcgatgttgtgtttcctggcaacaagatgcagataacggcatgttgagccttgctgagagattcacaaacaagctggagcagcccaggttcacatggttaccacattatttggctaaagctattaatctctgtggtcaggcctgtaaagctggtctatctgtgcagattgcgcataaccaggaagtgtgtgttcagctgtgtatatgtcgaagttggaaccagcagtctttggattcagaaataatgaatggcagttgtttatcccactgttttcagtagtttatatggcttggtaaatcattatcatattctgtatccataacatcttcattgtgtgatatacttggggaaagttcatagttctgggtctctagcagagatgaaagttcatagtttcaaactgtacagataaaatcttttatttagctttgcaaatgtattggatttaatacctaaatctaaattatatgtatagtgttcattttgttctcaggaatgaaattggaaaggaagttgaactagataaattcacaggacctttccaactttttagtcaagatgcttagatactaaaagcacattaaaaaaggatttcaataatacatgcttatttgttccttgtaatgaaattatgatgtaatcccactttgctttctcattttgcttttgtacatctacaaacgttcattgccaacatcaactgcatactagtgtgtatgtacttcccagatatagatgctgaggcttcttttttgcacacgagatgagccttggagaatttccaaattccaaatatacagttgagaaacaacattgagtgttgtgttttcgattaagaaaacagagtctggaacagtgtaggcactcatccttagtagacgatgacattggatggcagaattaagcagttttaaaagagccttgcacactgtggagtactgttgtggataattgaaattatggaggttgtgcaaatctctctttagcaaacaagatcaccactagtttcatattacattcattttaaattgagccagaacaattttctatttatttccacctgtcaagaagggacacactgcaaaccttattttggaggctacctgcaggtgcacatgtgaccaatgattatttctaattctgaatttattgaaagagagtggaggtgaagaggaagaggaaagttgcaaaccctgaatccattattaatttttttcagaggacagggtttttttcttttgggattaatgctcactgataaaagagggagctttagttgctttaaggcttaaggctagagtgttgtcatagttttagttgctgagtgattttgattgctaattgcccttagaagtctatttttaaactctgtccaagggacaataccattagatgacttcacagaaactctatataaaagagaaatgtatattaatgatcataaaaagcatatactgttacagtccctatatgacttgcatagtgaattagctaaactagagcaagctcctgactgaactctactggagtagttaaattagccaagttagctctggcgtgcacagctgtgatgatgtatgaactaactcattatgtgttattgataacactggagagaggagaacagctgaaacttactatgccttgtgactttttggtagttcttgaatatacacagctggatgagtttaaatttattttaaaaatttctgcctaagagaaagacagctccataagcaagaactgtgtttgaagtgactttcaaaatgtgtgccttgtgctttaggataaagcaatccaatgaattattttttgtacttctttatgctactatttacatatgaaataaaactaattggcttctgtctatactaacccagagaagttactggatctgtgtagagctgtcatggcaatcaatagcaatcatttatttattccctttttggtttttcatcaataagcagattagactttttgaagcagctgccacctggcttcaggttggggtcattcttttcctgatgtatttatggtaatgaaaatgaaccttgtcaaaatgatttataacttttaaatcagacagttggaggaaatagcttgtaaggttatgtggcattccctaaaaataattgcatgatacattatatattttatcattgagttgaatccaaagctcttactttttattgtaagtaagaaaaaaaaggaatacaagttgaatatcccttatccaaaattcttggagaccagaagtgtttcagattttggattttggaatatttgcatagtaccccagttaagcatctgaaatccgaaatgctccagtgagcatttgggtatcatcttggtgctcagaaagttttgggtttgaagcacttccgattttcagatttggggtgctcaatttatagtagt

SEQ ID NO: 108983 - DNA, 1052 bp, Homo sapiens
agtattatatttatgtagaaaaaattataaaaacgtttattttatccctttttaagggatgtcaaagtctatattcaaaaaattgaattaaccactatttgtgccttgaatacatgggaggcattttttattgtttactttgagataagatagaaacctctcagttttaaaaatatttttcttaacagaggggatatctactctttataaaaatcagtgattgcataatttaaggtagtataaggcatgctaccaatttataaaaactaacctgtgccttctatcccagctgttcttacagaaattaagtttcactttctcatcaggctatggttgagaagtatgtctcatttatagtgccttctgtgatcttaggacatgtgactaaacttgaataaaagttaaggctgtatgacatttctggtaccttcatgatgcaaaatttaatcccacactaccataaatagatggcagtgagatcttctgatctcataagtgtaatttttatttatgaaagattttagacttatccacattttattggaaagtgtttttgtgttctttgctttgatctgtagttgtgtaatagaaaacaaacaacaaaaaagccagcataacaatattttagtaggttcttttccttaagtagatactgtaatttgcttttagtggttgcattggggccggtggacttcattgtatggtattatttattaggggtttagcaaacatctagatgtattcaaatggctatgtcttagtatcagtgtgttttgagaataaactgtgttatgtttgtttagctccccacatgcttttggagaatatacaattaaaaagcttaaaaacagataatctttttcatttaggaaacttacctgcctctcttcatttcactgggttcacttctagaatgacttttaagactacagatgtctaacgatttatgaatcagacatgaggtttggcacacagataaatgtgatttcagacagcatccttctcactaacttgctgccttcttggaataagaatttccaagatgtctcagg

SEQ ID NO: 108984 - DNA, 1059 bp, Homo sapiens
aaccagttagctcttacaggcaggaagccaaggttctgaagtctaaccgatctggttaaaactgtacagagtaggattcagaaaactttgtatttaatcaacctatgccaaagtctgagttctatgttttatttctatcaccttcccacttaaacctgctgtacgtctggtaatttgtcttgttaatagcaccattatccaaccacccagaccagaaacatgggacacatcctagactcttttcactctcttctgccccacgtgtaattatccttcatgcagttaaattctaactcttaaatacttcagctcattcctacattgcctccttagtcctctttcatcatatgtctcttgtgcagttctaataactatacatggctgttcatagaataatattgataaatatcctaatatttagcagttgaatggtttttctctacctgtccactgccaaaaataaataagtaaatcattcttctataccactacaactggagtgacctttataaaggcaagtctggactttgttgtaaattcactggtgtttcctactgcccatagaatcaagacctaacttcttaacacagtaaacaaagctcttcattatctggcccaagccaacttatccagtccagttttatcccttatctctcatagatacatataccctaacctcccacatgaactgggtgtgcctcttgcacactattcttgtgtgccttgtttggttagcttctacacatggagtcactccgcatgtggtgtcctgcctcccattgtttgcctggtagctggacctggctcacattttatccactctggaacaactcccttgaccacctttcttgacaccttttccagcagaggtaagccatctgcttctgaccacctttgtgccacacttcacactatgctgcaaggtttccttttcccactagattggtgctctgtgtcattttgcctttttcattttcttatggccaaagcagagcccagtaccaaattaatgtgtctactttaaattactttgctttttttttggtctcattttcttct

SEQ ID NO: 108985 - DNA, 1092 bp, Homo sapiens
tgttataaagcatctaaattatgagaatgggcgtccttttcagcattttaaattagtgttgtatatggattcttatagtgggatgtgtggtggtgagatgtggaaaaacagaattgttaatatttcagcggttcaagttcattcttcccttaatagcaaaaatcagcagtctgttcacaaggttttgttttcttctggttcatgatagggctgtatcttagataaaacaatactgatggatttagccatctgatacaaatagcaagatataaatcctactgtacagtggctattacccatactcttttttggctgtccctcagtagagatgcctttagaccagatggggttttcatccacaaggattattgcaccttgcttttacagagacacccccaatctctagcactgtctctcttgctcagtttccaacatcctgtatttactgctttgactctaacttcatctgctcaatactgtaaattcctaaccttatatcttaaggctctgacaccctggacttaaacgtccacagtttgttgcctgaagtctctcacattgcttgttttacccccttataggaatttacaggttcccatttcctcatctctcagatacccctgtttagaaggtctccttttccaactagtaccaatcctgtctccacccgtctttcaagaagcaaagtgcttggagacctctttttccttgttcttacagctctttacttacagtgatatttcctgttatttaaactgcttctaagattcttcttcttgcagaaagctatcttggattgataaagtaaaacctcttaattttcctgacctttatccattactggatgccaataaccacctcctctcccatattgctgcatgtttattctttgtctcttatttcctgaatgtacttgccactggtgaatttagataggcagatgtactgcttctttggcttacattttgttagttattcctttcttaacgcccctggaagacagggactacatctgtttaattcttcgtgtattgcccagtagagcccaccatcacgattatcatacatagatgactcataattgctttctga

SEQ ID NO: 108986 - DNA, 1538 bp, Homo sapiens
atttttcccttcttttattctgtctttgatcaggcaatactgtgtattcctgtattggctcaagtaaactgatggcctctgaaaaaaaggtcaagcttgaagagaaattttctgtctatgtttagtttctacatatagcatcatagtaaaactgactccctgattggctgaggccagcccactgtagagtggagggtgggcttattttgattgggttaggccagtggtgctgtggggttaaatcaatcttactataattccatggcctagaaattttggtcttgattagaaagggcatgtaggaaatggatgctgtggaaacaaccggcaataaatatgcttttactccaagtaaagcaagttttgaaaattctacaacaggctatgctatgtatttttaatgtccaatgatatttttagatatttctgttttacaaatttattaacaggtttttgggttttttttgtttttgtttttttttagaggacaagaattttgggcagatttgaatgccatgaacgtgtatgaaacaactgaatttgaccaactacgaaggctgtccacaccaccctctagcaatgtcaactctatttaccacacagtctggaaattcttctgtagggaccactttggatggagagagtatcccgaggtatttacagattctttgttgacaagtacatttttcaaatttatttttttcttcctgtattcttttattctttctttacaacaatgactaggcagaactatgcatataatcaaacagcttatgaatataaaattgagtctcattgatacaagaaaacttttctctttttcttaaaatttatttctttccattaatttgaaatccaaagatagcataccactattatcagataaataaaatgctttccacagaatcttgcattatagagatgaaatattttgacctgttgccgcctgtggagtaattttcacgacatgagaattggtataacttttgattatatctggctcttgggcttatggagattggatcaagtgttacacttagcattttagaagcccaatggaaacaatcactcatgtctctggaagaagtacttgaaaatgtttattgagctgtggtcagggaaatcagttatttacaattttctcctatgtgcacttgcatccttagtctgagacagtgataatagcccttcagtctcaaagcaaggttttaaaatgatgatggtttactttgcttctgaatgacaattctgagtcatttaaacaacctcaaatggactttagagattaatttcacattccaaagatctgactttttcaatttaagttcatttccagcattacaaaaggggggaacaacttatctaccttacttttatttttaaagacaatagcaaaagaaaaaaacctagtatgttaattattgttaaacacaatattaaactaagtaagtttaagtaatcactagtatctaccttccaaagagaatacaaggctgtttaaaatgtactctcagaatacttggtaatcactagttatc

SEQ ID NO: 108987 - DNA, 1069 bp, Homo sapiens
ctcagaatactcagactgttcctgtgtttttcctctgagaagttttttgggtttagagcttgaactttatataccaccaccttttcaaattttatttatttatttatttatttattttgagagagaggtcttgctctgttgcccaggctggagtacagtggcacaatcatagctcactataatcttgaactcctgggctcaagcagtgctcctgcctcagcctcccaaatagctgggactacaggtgcatgccaccatactcaactaatttttattttttattttttgtggagacaggatcttgcgatgttgcccagtctagtctcgaactcctggcctcaaacaatcctcctttctctgcctcccaaagcgtggggagtggctcacaggcgtgagccactgatactggccaacatcactatctttaattcctcttttgaaaactcccttaagaaatatgaacgaaaactctctatgatattattaaggctcaaaatagaataaaatagttccctgggccccacatgttttgtaaggtggaaatccatgccttatgaacagggagcatctttccaccctacatacttggaagggaaaaaaaatcttagcatataaagggagttatttagactcactgtactttattgaaattcctgtgaggttaacttttgcctttggttaattttcatttttaaccatgattattaactttcctttttttttttttttttgttctgttttctcctccatagtctgtcattcgattgattgaagaagccaactctcggggtctgaaagaggttcgatttatgatgtggaataaccactacatcctccacaattcattcttcaggagagagataaaaaggagacccctcttccgctcctgttttatactgcttccatatttacagtaagtgtcgagtatgaagttgcaatatttactctcattttatgtaaatgcattcctgaatactagagataaaaaataaataagagtctaccttggttagtactcctagaatgtgaaattccaaattagtctttggattttaattcctcaacaaat

SEQ ID NO: 108988 - DNA, 1026 bp, Homo sapiens
cagtcaggccatcatcaaggcaaaaccctcccaccagtaaaattactatgactcaccaaaggctcagatgattgttagtgttttttagcaatgaagtatttttaaattaaggtataaatattgtttttttaaagaatgaatgctattatgtactgaatagactatggtatagtataaacataacttttatatgcactgggatactaaaaaattgtattactcactttattgtgatatttgctttattgcagtggtctggaatagaatgctcaatatctactaggtagtcatatattgataatatgggcttacaagagaacaaaaatagttactctttattttcctttttcttttaaaaattttctattttaatctttctgtctaaaactgataatcaggtataaagtaagagatcagcaaatcaaagaaatattaaacttcagtgagaaaagagcagagaaatagccagtccaccagggtgggatgggtaaatgcagtgatcctatctaccctagagtgtggggctgaaggacctagtagggagaaagatgaggggaattggttccaaaaagcatattttagaagtagattccagaggctatgatcttagccagggaaaatgtttctttttaagtggtttttgttttgttaaatttttaaaacttttttatttttttattttttattttttatattttttaaaacttttttagagacagaatttcctctgtcgcccagggtggagtgcagtggtatgatcatcatagctcactgtaacctcgcactcctgggttcaagtgatcctcctgctttagcctcccaagtagctgggacttacaggtggatgctgccatccccagctaatgttttctttttttttctttggtgtagagacaaggtctcactatgttgctggggctggtcttgaactcctgtcctcaagcagtcctcctgcctcagcctcccaagtagctgggattacaggcatgatgttttgtttttaagtgttattaaatgcaaaggata

SEQ ID NO: 108989 - DNA, 1033 bp, Homo sapiens
ttaggggtttggtggttcagtgctttcagctgaaagaacatttatcccatgcagtcacctcatggtcatgggaatgcctggcacagtttctttaatcccccctgaaaaggataaaatgaattaatttgtatttcatcgctgaaactgatttagtaaacatctttcaaaatggtaaggggaaggagggaaagtaataaaaggtgagtttggattctgaaatttcattcttcagagatccttgtgtagaagctcaattccctttgactccctctctagagaaggctggtgtccgtctgtgaaacatgcagtatatctttggaatacccatgcagtgaatacaaactcattctcagaaaataaaggcacatttgtaactgcgcttgaaacatatttttttaacccatggctattagagtgttgaagcccatcagacagatgtgtatatgcatttttatgttttaggcaagttaggatgttggcttgttaaaagtaagcatctatgggttggaatggatgttaaccatatacatagtccagtttaatatcttagaatggataggatttatttatctcggctcatcttcaagcatatgttagtaataatggacctccatcccctgcaaaaaaggaaaagctatatttgaagtttgcattttatggaacgggtccatagtagtgatatcagaaagaaaaggggcagaatctcttctgttgtcacggctaggtttgctgtacaggctgacagtctaaaacctctagaggagagtgtttgcagagaatcttacctttttctttcaaaccagaagcctgtgttggtaacttcaagccctgataataatagaaaacctggtgggctggggacttacccttttctttgcaaagctggatagagggaggagctattaaataaaaataaggggcttatattctttgcttccccgccattcctccagattagtgatggctttttaaggagttatagatatttgagaatctgattaaagcagtcagacctctcttcaggaaagtgtac

SEQ ID NO: 108990 - DNA, 1141 bp, Homo sapiens
tgctacagaggacaaggactgttgtgccttttgttgtgaaggttggagaaaccagcagcactttaaatctccccctgtacttaaaagcacctcggagattcagtaagccctggatccacccatccatccaggactctgtctcacaaagagactttgaggcacattgaattgaaggcacagtcacttgtagaaggtgggggttagagacggcagtcatgcttccattgttttagcttcttgaaagtcatctcctaaaagactgtgtgttgatgataatgcggtggtggtggtggtggtggtggtggtggtggtggtggtggtggtggtggtggttgtggtggtggtggtggtggtgatggtggtgtcaggcaaaactaggttggaatcctagtatcctgtcgatcactttctagccttgttttaaaaaatatatatataaattgtgaaacatatggaactgaaaagagtatgaaattagaaactatctagatgggcctggcctagattcaaattctgtcttcgctctttgctagctatactcgggcaaattatttaatctctctaaacctcagtttcttcatttgaaaagtgggaataaccaagtcatcttacagggttattgtgacaattagtgatattgtatgtaaaatggctggcacatagtattaattggttatgattatgatgagagagatggtcagctatgctctttggagatgagacacacaaagttgtagtctctgtgtcacaaagctcttatgaaaatttcagtttcctaatacattttggcacacattattacttccttgtgaccagtatgtgccaatgagtgttatagcacctggccctgaactaggtctcagggtcaggatttccttgctctcttccacttctctttttctccatttcgaaatggccaaggaatatgatttaaatttaagcatttaactaggcaggaataagtaacttaccaaagctgctgcttatctaaaatcattgttcaaagtaacagacatgaatttaaaggctcacggatatgcattctggtatctagagtttatagtaattagctccatcttaagcacactcaaagctataaaagttgaatagtattggtggttttgtttctatgtgtgatctt

SEQ ID NO: 108991 - DNA, 2853 bp, Homo sapiens
atacattccagagttttcttcacaggaaggaggcccacagaaggctaataataggttattcatgtacaggcgatgtttgctccaagcctttttttttaattaaatagatagcattttttacttttaaaataagcacttaagctatacagattataatattaagtagacactgatatagatcactataatgtgaggtgtacttatttcttaatgttttacattgatgtttcttcctctccattttaggacacttggtggggttcccacacaagctcctccacctcttgaagcaacttcatcatcacaaattatctgcccagatggggtcacttcagcaaacttttaccctgaaacttgggtttatatgcatccatctcaggacttcatccaagtccctgtttctgcagaggataaaagttatcggatcatttacaatctttttcataagactgtgcctgagtttaaatacagaattttgcagatattgagagtccaaaaccagtttctttgggagaaatataaaaggtgagtcagatgtatgaaaagttcaagacggccgggcgcagtggctcaagcctgtaatcccagcactttgggaggccgaggcgggcagattacgaggtcaggagatcgagaccatcctagctaacacggtgaaaccccgtctctactaaaaatagaaaaaattagctgggcgtggtggcgggcacctgtagtcccagctactcgggaggctgaggcaggagaatggtgtgaacctgggaggcggagcttgcagtgagccgagattgcgccactgcactccagcctgggcgacagagccagactccgtctcaaaaaaaaaaaaaaaaaagttcaagaatcaagagagctttattgtagccagtgtcaaatgaggaacataatagtaaacatttgcacagaatttatgttcatattttctgtgtattgactgacatataatcctcataacagacataagtaggattattacaatttatatcctacagagaagaagaaactgagtcacagaaagcttactttgctgcaggtcatgcggctattatgatatggtgctggaatttgaacccaggccgtctggcaccagaggccttgctcttaatccctttactgtggtgcctctcaagtcaacaaactaatgaaggacaaatggagggaatacatttagatttcaggaatctcagaatctaagagaccctcagattggaggaattaggcaaggagggcatcctgaggaaaaacataggagaactcttaatagatttaagatgaaagagaaagcaagtgaatgattggtggagaaagaaggaaaaggccttttctacagtggaaagataagtttcaacttttaataggatctttgatggcattttgcccttgataactcctcattaaaaccataaagagaagtttatgactacatcatgcctgttaaattgacctgtatttcatccttctgaattctctgtctgttctttccattaggaaaaaggaatatatgaacaggaaaatgtttggccgtgacaggataataaatgagagacatttatttcatggaacatcccaggatgtggtagatggaatctgcaaacacaactttgaccctcgagtctgtggaaagcatgctacaatgtttggacaaggcagttattttgcaaagaaggcaagctactctcataacttttctaagaagtcctccaaaggagtccacttcatgtttctggccaaagtgctgacgggcagatacacaatgggcagtcatggcatgagaaggcccccgccagtcaatcctggcagtgtcaccagtgacctttatgactcttgtgtggataatttctttgagcctcagatttttgtcatttttaatgatgaccagagttacccttattttgttatccaatatgaagaagtcagtaacactgtttccatttgaaaaatcttggtactgctaaattatttgatatgaactcaatccagcatttgtagcaggttttgaatgggtgggactgggtggggaacagcattggacattaatagggcacttttcagacccattttttaaagtgctagaaaatgctttttttaaaaaaaaaatacaagttttaaaatgaccacttactctttaattatttactaattgctagtgtactcagtgtggaaaagactacagattacacactcttttcattcacacttgtacatatagacagcaatgttattaggagcattaaattaaaaaactgaacagcctaatttaaatgtggcttgggcctggtagaagtttgaccaaatggaatggaggctgtgagcaatgtgaggattctatttatttatttacgtttgataaaacttactggaactagtactaccatgcgtattccctgtccaaagcatcactgctttggtatagtataagttcatgaaattctggtgggtagaaagaaatttttatttctatcagcagtactaaaatgtatcagccaaccagagaacatcagtgactttaacttctgcagagtttgccccagaattcagagttctatttagaggaagttaaaacaacaacaaaaaacaaccatttgaaaaatttttgtcaccagcaaaacttttcactaattagtgatatgaaatgtgatttttgtgttgttaaacttcagctttggaaaactcagtctctttcattatcatccattccaatttgaaggagttgggcagctaatttggttaaaggcagtcttgagggttagaagtattacttccttttcgggttccagacctagcttgtgactgaaagttttagaaaaaggaagtacatctatagccaaattgata

SEQ ID NO: 108992 - DNA, 1873 bp, Homo sapiens
taaagataataagacacaaaggcatcttaaaaagtgatctgagcagcttctcgttctcgcctgcctgcccgctcgctcccttgcttgctcgcgctttccctcaccctctcctcgaggatggaggggactctgaccacagcctgtgactgggaagggagacagaggcagcggcggctcaggggaaacgagattgcagtggtggtagtaggaagatgtcgggcaaggatgagcagcaggagcaaactatcgctgaggacctggtcgtgaccaagtataagatggagggtgacatcgccaacaggggtacttcggtccttggtggaagcatctagctcaggtgtgtcggtactgagcctgtgtgagaaaggtgatgccgtgattatggaagaaacagggaaaatcttcaagaaagaaaaggaaatgaagaaaggtattgcttttcccaccagcatttcagtaaataactgtgtatgtcacttctcccctttgaagagcaaccaggattatattctcaaggaaggtgacttggtaaaaattgaacttggggtccatgtggatggcttcatcgctaatgtagctcatacttttgtggttgatgtagctcaggggaccaagtaacagggaggaaggcagatgttattaaggcagctcacctttgtgctgaagctgccctacgcctggtcaaacctggaaatcagaacacacaagtgacacaagcctggaacaaagttgcccactcatttaactgcacgccagtagaaggtatgctgtcacaccagttgaagcagcatgtcattgatggagaaaaaaccattatccagaatcccacagaccagcagaagaaggaccatgaaaaagctgaatttgacatacataaagtgtatgctgtggatgttcttgtcagctcaggagagggcaagcccaaggatgcaggacagagaaccactatttacaaacaagacccttctaaacagtatggactgaaaatgaaaacttcacgtgccttcttcagtgaggtggaaacgcgttttgatgccatgccgtttactttaagagcatttgaagatgagaagaaggctcagatgggtgtggtggagtgcgccaaacatgaactgctgcaaccatttaatgttctctatgagaaggagggtgaatttgttgcccagtttaaatttacagttctgctcatgcccagtggccccatgcggataaccagtggtcccttcgagcctgacctctgcaagtctgagatggaggtccaggatgcagagctaaaggccctcctccagagttctacaagtcgaaaaacccagaaaaagaaaacaaagaaggcctccaagactgcagagaatgtcgccagtggggaaacattagaagaaaatgaagctggggacaggtgggtcccatctccccagcttgctgctcctgcctcatccccttcccaccacaccccggactctgtgaagcgcagttcttcttctccacctaggaccgccagcagagcaggggtctccctgcccccaccccagttccccaacccactcccttccaacaacaaccagctccaactgactctggtcttgggaggcgaggcttcccaaccacagaagactactttaaatgaaaaaaagaaattgaataataaagtcaagagtcaaaaaaaaaaaaagtgatctggactagactaggcaaattactagctttgtgctctgatacattaccatttgaatcccttttctaatctctgatatggtaacaattggaaaatggatttgctttttggatcaatgggcaagaaaaggattattttctaaagtaattacctgaatgtttggcaacattgaatataaattttccctaaaaaccctaaact

SEQ ID NO: 108993 - DNA, 1015 bp, Homo sapiens
tatccaacaaaggatttatatgtagaatatataaataactcccaaaattctatattaaaaatatccagttagaaaataggcaaaagatatcagtagaaatttaaccgaagatgatatatagatggcaaataagtacatgaaaaaaatgttcaacatcattagccatgagcaaaatgcaaaaccacaattaaatacaactacacatttattagaatgtctaaaattgaaaagactgaccatattaagtcttgacatggatcagagaaactagtttactcagcactgctggtaggaatataaaatggttcagccattctagaaaataattttgcattttcctctgaaactgaagatgcacttaccacatgacgcaacatttgcactcttgagcatttatcccagataaatgaaaatctgtgttctcaaaaatacttgtatgtaagtgttcatagcggctgtagtcataatagccccaaattggaaacaacccaaatgtccttcaatggatgaaagacaaatgtcctatgtccatatcatgtaatactgttcagcaacagaagggaacaaattattaatatatgtaacaacttgaatgaacctcaactaaattatgctgagtgaaaatagccagtcttaaaagtttacataagatatgattttgtttatatagcattcttgaaataacaaaattataagtgtagataacagattagtggtagccagggattagggatgatggggatagtggtaggtttggctataaagggatagcagggatcagctttgtggtaatagagcaattttgtattttgattgtgttgatatgtaatgaagctacatttatgatagaattgcatggaactgtaacacacacacacacacacacatgagtgtgtatacaattggtaaaatcggagtaagttctgtggattttaccaatgcaattttctagttttgatagtgtgctacagttacacaaaatgtcaacaaggggagaagtgaggtggtgttaagt

SEQ ID NO: 108994 - DNA, 6572 bp, Homo sapiens
attaaaaacataataccccattggaggggaatctggattaactacccactgttcccaccccccccaacttttgaaaaattttggccatatagaatgcatgaaaaatcagtatgatcttatgaggactttatagtactgtaaatcttaggagcactttagttgttttgtttgtttgtttgttttaccagtcaaatagcagtgggagattgtataccaactttagtgacactgatattagtaagttctgataacccactaccatcggaccagcctggagcacattactttggccagtggaaagtctcttggagagactttgaggtttgtgatgacaaatcatgctatcgttaaagttaaatacatatatatacacacctagaatataagcagaatggaaaagttggcagggatgaattcaagaacattagagtgaatttttttcattacagaattgttagttcctttaggaacttagtctcgtagatgtatatatttaattagcataacttggacagcacaagattaatgctttaacttgtttgcaggagtttaaaaagctggtttctgttgccaatagttggttggaagggaaaatggagatgccacaaataaaattttttggatgtgcaaaacagttttgattttatttcttacaaactataggactccaagccccctgatccttgatcagaactacattaacaccaaaaatcaagttatcaaagcagagaggagggtgctaaaggagttgggattttgtgttcatgtcaagcatcctcataaggtgagttgtagagtacagaaattgggttcgtaagtattaggacttttctaaaaattttattttatatgaatttatgtttctatctgagtgttaaccttggttttaaaaagcattcttttaaaggttcaggcttcatcgaaaaacattcttttggatgttgagatttatcagtaaaatgacagtcaaaaatgtaggttcaaatcttaaatcttaattgtgtgctcatagagaagttatttttgtttctgtggttaaagtcccagtttttccacctagaaaacagagatgtaaagttcctcattccaaggaataaatgtgtagctacaaaagtatctggcacacttatcatcatagtagaatgttctaagtgtgttggctgctcactgttaccattattggaaatttgtttctcccaacatctcttagctttcattatcaatataagccatagagtgagttacccgggtcaggactacctgggttagaaatgtaccttgggaaattaggtgaaataatctagcacggtgcccatcacatagtaaagtgccaatgaaaaatattcttttaattgccttttttcctgtacaattttgaaatatgcttctaaacataatttatataaaatctagtcatgtagcagttcacattagaatcttatgtacatttaaattggtctgtattatcgatgcacaattagaacttgagtctaacattttcaattacttttttcattgaactctactccgaaagaactaccagtatactgaattgagtttttttcccttgtccttcagatcattgttatgtatttacaagtcttagaatgtgaacgtaatcaaaccctggttcaaactgcctggtaagtcacttttttagatttctttcctagccaggaaaacagaagcagaaataaagtaagtttcgttttccctttccaaaataatgagataagtttgtttggggcttttcgttgtttttttgttttgtttttttaaccaaaaggtaaataatgcttatttctgcttcctgttttcttggcttgactaattacttttaatggagaactcaatttaactttgttcttttttctactctttaattaaagggtagtccatgatggtaagtcatagaactctgccctctgcacttcagcccatgacctcaggatggcctgattggctaccctgctctccagccaatccagtgcaagctctcatccgagattcactgaagtggtccatatccatctggcagcatcttctagttctgtcggggtgtcaaaaggatttgtatatttgcttctagaagtaactatttgacatgcctatgtatttaatgtatacttgtaactatcaaaatgaatagttcatttttgatagatttgttgtgcagccattatgaattaaatggtttattaggagtttgactaaatttttatttttagtgtgtatagcatgaatactaccaaaggagacgacaaacttgcagcttaaaatgggcaccagttcccacactggcttaatttatataactgcttggctgtattgcgggtaataatattagaagcaagaagcacttcatttttaaaagagatgttactataatattgcttaaatgctttagcacttggacttcttgagatgcagatgtgtgatttggagtgctggcttatttaaaggtcaagccaaggagtttgtggttcagccacaactactgtttcctaagactattgatgtgaaggacttagtgaagtaatttttatattctgggcttcccagcaagatgtcctttttatgactgccatgcttcttttggactcagtaaatatttgtaatgttagaaaagtctcattatttttataaaatgcatgacattttaagtatgtgttgcataaaatggattatagcagttctcatggtttaggatttttaagaaatagtccatttaatttcagcttaaccttttaaatgatctgtaaaatttctttgatagtttaggaatgttgtggggagggttcattaataaaagttcagcaattttttaactgaaatagtttatctcttttacctagtcacaaaaaaggtatgtaaacaaggccattatatgtgtttattgctctttatttccctatctagattttctaagtatcttagctttcttaatataagtttaacttggtacttactgaaaatgcctttttacccctgttaacggtattttgagcttttgaaaagaacttggttgacactgcttttattgtggataaaggagagatggtcagtaattaatggcttgaagtattattggagtggtttatcatttctgaaactaatcgtgtcagaattgactttgaaaagcattgctttttacagaaatatattaactttttaggagtaatttctagtttggattgtaatatgaaataatttaaaagggcttcgctcatatataggaaaatcgcatatggtcctagtattaaattcttattgcttactgatttttttgagttaagagttgttatatgctagaatatgaggatgtgaatataaataagagaagaaaaaagaataaagtagattgagtctccaattttatgtaagcttcagaagaactggtttgtttacatgcaagcttatagttgaaatatttttcaggaattacatgaatgacagtcttcgaaccaatgtgtttgttcgatttcaaccagagactatagcatgtgcttgcatctaccttgcagctagagcacttcaggtaggtgtatatttcccattttgttctgtaggataaatcacacaaattttcggtggttccaatacagatttagcaaaaatttaatttaaaacattctgttcttatggtttagattccgttgccaactcgtccccattggtttcttctttttggtactacagaagaggaaatccaggaaatctgcatagaaacacttaggctttataccagaaaaaaggtattctctatttactcgtttgtgccaacatgctaagagtccaagctactctaaggaagaaatactaacttttttttcctccaacagccaaactatgaattactggaaaaagaagtagaaaaaagaaaagtagccttacaagaagccaaattaaaagcaaagggattgaatccggatggaactccagccctttcaaccctgggtggattttctccagcctccaagccatgtaagatgtatttagaattaaaatgacttgggggcactgaaagtgtgtctttattagagagcttttacatttgaaagttgcatagagaaaaatgatgttaggaaactgctgctatgttctctcatggcagtcaaccaacatggaagcggaagcatggtactttgagttacatttagaaacaacttttggccctctgttaaatccagtagttaacatgttgttattatatcttttaaaagcatcaccaagagaagtaaaagctgaagagaaatcaccaatctccattaatgtgaagacagtcaaaaaagaacctgaggatagacaacaggcttccaaaagcccttacaatgggtgagtatacttgggctggaaaactggcttgaggaatcttttatgtgtttactttttaacacactaagtttgtaactaatatgtcatgattttttgaagtgtaagaaaagacagcaagagaagtagaaatagcagaagtgcaagtcgatcgaggtcaagaacacgatcacgttctagatcacatactccaagaagacagtaagtaaatgttttcttagggaagcagtcttatttggagtttttaaaggttattgctttttctttaaaaattgaacatagattattttcaaagttaggttagaattaggcttttagtatgaggcaaattatgagaaatgagtttggagatgttctggacatacagtatcttaatggcattctgttatattttctcccatgttttttggagaagtgtaggagctacccacaaagtgcttgagggccatagtattgttcataatgtgaaaacttctttttttttttttaatttcagttagaaaatgtgtttcattaaccccttattaataaccaataatcaaattaaccagtcaatgaatcttctttagttaggcctgtaattagattgttagctcttcgtggctcttcaatgtcttttgaacatgtgggagatacttaataaaaagcatagctctaggacactataaaaattgctaattactccccttggaataaagacataagaacatttgcttaagatttaatatgttatatataggcttgggcatacagcagtgaggggtggggagattttgaaaagttctggtttgtcatttatgtagctggtagttttgttttgaacctgttatgagcaaccaccggaataatctgttccccatagaaactgaacctaaacttcaaatttttattatctaagctataataataggcggagtcgatctggaacatacagctcgagatcaagaagcaggtcccgcagtcacagtgaaagccctcgaagacatcataatcatggttctcctcaccttaaggccaagcataccagagatgatttaaaaagttcaaacagacatggtcataaaaggaaaaaatctcgttctcgatctcagagcaagtctcgggatcactcagatgcagccaagaaacacaggcatgaaaggggacatcatagggacaggcgtgaacgatctcgctcctttgagaggtcccataaaagcaagcaccatggtggcagtcgctcaggacatggcaggcacaggcgctgactttctcttcctttgagcctgcatcagttcttggttttgcctatctacagtgtgatgtatggactcaatcaaaaacattaaacgcaaactgattaggatttgatttcttgaaaccctctaggtctctagaacactgaggacagtttcttttgaaaagaactatgttaatttttttgcacattaaaatgccctagcagtatctaattaaaaaccatggtcaggttcaattgtactttattatagttgtgtattgtttattgctataagaactggagcgtgaattctgtaaaaatgtatcttatttttatacagataaaattgcagacactgttctatttaagtggttatttgtttaaatgatggtgaatactttcttaacactggtttgtctgcatgtgtaaagatttttacaaggaaataaaatacaaatcttgttttttctaaactgcttcaaataccttatttaaataaattattaaaaaggaaaattttaatagcaaaatggctgtactggttttctgacaaacttattctttcctccattagatggtagtttgagattattaaaatgcaattcttaactgcattgtgagctattgtaagtcttcactgtatatatggaaaaagtaaatgggagtcgcccaacaatgtgacattaaatgttatattttagcactaaaccaaaaaacctgatttgcttttgaatggtgtcataaggtaattttgagtcagatttaagtactatttctgaaatgaggtaccctattgaatgaaccaaaacttagtaactattgagctttaacagttctgtataatttaggcatttaatgttacgatttttacgtaggctaggagaaaatgtgaggcccctgaacttgagtggttgatagaatacaagctgatcacaaagaagtgaagttttgatgaaaaagccggaatttctatccagatgaatgttttcaagttactcacatttactatttttttcaacat

SEQ ID NO: 108995 - DNA, 5227 bp, Homo sapiens
cggggcaggtgttgtttcatcgttttttctactccaaatctttcgtcaaacacagtttcgaggtaagcacagcggaggcgggtaaaagggatttcttcatccggaaatgggcagagtaggggtagtgtcagcagccagcttttccagaaagggagtggtttagtttaggcctttgtacctacttctcactcgccaggaagtggaaacctttagaatgtggttcaaaatcgatcacgagcctaagtgccctcttaacgaaaagtacagttttcaaccaaatgcagaactcctgtaagattgagtttgactctggaaccaaaattaagatgagttaaacaacaaaaagtatagtactagcatagctggtagacttacggcatagagatgtcttctctaattttactaaaggttgtcccaattgtgttctaaattttattcttcaaagtgagtttaatctaacaatggcttttgtggctcatgggttctttcagattgttgctatggcttgtattaatcttgcatcaaaaatcgaagaagcacctagaagaataagagatgtgattaatgtattccaccacctccgccagttaagaggaaaaaggtaagattggcattattgaacatagtatctcttgctactgctgtaccgtgcaccagtcatcaaatcaaaacatctttcctttcaagtgaatacggatgcaaaagaaaacggactttaatttaggtgttaaagttcatataggaacactgatacttaaaataatttgaaaaaagaaacataattaaccggttatctaaagtttgtagaggcagttgcatttatggacaatcctaacagtgctgtgaagccaggcctgtggcttaagattaaacaagaaagggagtacatttggctcaagtgtgagtgtattctgtaagttatttttcctctcccctctctggaagactgaaggctggaagtttaaacactgtagtttaagttaatattgtggcaaagttctgtgtagattatgtttttctactcgaagtcccagttaattctttatcaattgaggttggcttttgttagagtacttctcaacattgaactacgataaatcgaataataccggatctgaaaggactgcaggatgataaagtttgaagtttgaagtcaaagggattaaacaggtattttgttttggttagatacagtctcagtgagtgggttagaaaattaacaagtaagattgattgggttgcatttagatagggccatttatttgatgttgtaagaaaatacagagactgaaatagtatctcctaggtgttgtggtaacataattttatgtggacctatgtgttcctgtgaggcagtaccaaaaagtttgttgcaggacttcctgcatctacaggtgacttccagtacatgctgcagaatgatatatttggtgtagaatagtttttgcattcactctttaaggaattgtagtgatgttagacaaattgtactgagtttgaaaggaagttattaaaaggattataagttgttctgggggttgggtatgttggttagtgctgttagtattctatatgagtagtccttattggctgaatctgtaagttggcagtaatggaactattcagacaagcaaatattaaagcaactttaagatgactagtctattctgtgagtctacagacagttcttttttaaaaaaagagtatcctagtcaaaaagtctgcaacagttttcctacatactttttctcccccatcttttctcattcaccttaactgtgtccagggatagagtactttttaaattctaaaatatcttttagtttgttgatgagtccctgggaattgggaagatttcaaattggtctttggtatggtctgaggttaaatctgtatttagatacctggctgattcttcaggatgtttaaagtaatgacactaatacaaggctctatctttagtcaaaggtttctctttgcttaaaggaaatggttttctagtattctttgaaccattgagccaactattatgtaatcacatgattatcttctgtggaattttcctgtgagactagtttacttcgttgatgttagaataggtcttaactgtaaaaaccatggaatttaaaataatataatctcacctgattgttgtgtctgatgtaactttgttttttgggtcattattacagagaaactgattttgtttcaatcttagaagtctgattatagcaaaatttaaaaggagttgttaattgcatggaagcctttttttaaagcaggatgtaaaagtgtttctatgcatattacaagtttactcaagcacgtaacttgtatatgttattaacttcaactcttttttcccttgcaaccgactatacagcgaccagctacatttaccaaagcctgggtgatgtggagtggtacatagagatgaagctgtcgtcatggcaacagtgagtgaagtatcgaaaatccccaaggagaagccagtgctctgagaataggtcactggaatcggggactaacaggttggccactggtgaaccatttagaaaaactcctgtttcttgttataagcttttgtctttgctgtccaagttattagaactatagctttgtatttatttttgcataggttaatgtcattagaaagtactatcagtattatacattggttaggtaaagcatatcacttgtcttaatgatgctatttgttttaatctagtttattcataactttaaattgtagtgtgactttgacaattacagtggagatacattattcatgttgcttgtaggtcattggtctcttcagcctggctacacattgagaattagcagaggagctttttaaaaagtaccagtgcttagtccccaacctggattgtttggcctattcctccttcagttttttgtggttcgataattatcttttaagttgacaataaacagctaaatttagaggggggattgctttttcattgttctagtttccaaatatttacttttgagatgcagcgtattaaaattttcaaagactggtttaaccattctcattagtaaatacaatgtattttcagtgtatccatagataataaaagttggataggtaagaattggaagggtgttaagtgatgtcatttagtctaccacctttctacagtataattctgtggctctacaaggtggccttcagtttgtttaaatacctataaaggatgtttctacttttaagtaggcattacaaatttttgtatattgcttggcagtatgcctctttgtaaactaccaatctgttatagtctcttgaagacttggttccaatatttctcagtctttgtaacacataaatgaaactaaccatgtttggactttgtaatttttgttgttgttgagttatatgtcaattacataatcatgctaaaggaaaatagctcctctaacaaaccataataataaacttctaatgaccaaagaccaggattttctaaagctgaaaataattctcgtataaatcagaaaaattggacaatagaaacttaaagcagagattgagttagtttgtgtgttgataatgaaaattatttttgagttttctctgaatagatgaagacttcttttttaaagagattttcaaatgccacctcctcaaactttattggcaaagaaagtttacctgattggggaggaagaaattctagcaggccttaatttaatgtgcttgttgcaacagaaggtactaatgtatactttgagactttgtttactgctgattgatggagatatattttttaaatttatgatacaaagtaatctctaccaggtagttgtaaattacgtgtgcaccgttgatttgtgaggtagaaccaattctgaacaaaataaaggtatctggttttaggttatatacccacaaagttaactttgaaaattgcaggtaataaatagcaggattaagcaagaagttaagtatatattgaattatagtaaataatgggtttggttttcttaaatctattttgatgtcattggcattttgacacaaaaacaaagaaaatggcatcattaagtctgatttgggactaaatagtagctataattcaaacatatttagcttctttagtgtaattgcaagaacaaatgaattatatcaccatttgaaggcagttcttaaagcaggttatcttaagaggtatagataatttttattaacaaatggagaaaaatgagacaactatgttttcataaaattacattttactagggattttgatgataccgtcttctgtctggattgcaaggggttaagagttaaaatggtgtgtgcagctgtaacactggagctattttatctcttaatgacagttaaggagagccattagataacacagccataagttaaaaagagtctgaagttggttttacttttttccaaatttcctgtgatgataaaacctgatcatagaccttaagatctttggaatatgtttatatgtatgtatgtatgtatgtatgtatgtatgtatgtatatatatggagagagagataggttgttttcatgagaattaagtttgacttattttccaaagagcaatttgtagcctactgtcctgataaaatggattcatcattacacgttaatattagaaagcagctcaatgaggccagctggtggcctcattcctcataggtgtgaggaatgaaaccgagggaaggccattttaagtaacagctgtcttttatcttgtcagcgctgccagtttttgtttagtaagcattccagtttctgtaataattttaaatggaagaaagtaaggaaaatgtatgataactgactttttactctgatgttaccataggggtaatgaagttcatcgcagattgttttctaaccttcggtgcatgtattgaaatagatttttgttttaaaaatatgagattacatttttctggatctggtgtgcattggggtagagaggatgactgtcttaaaaatagatcgtgtattctgcctagagcaaagactcttaagtcttttggctgaaaatgaactgagtatggacaaaaatattgaagtattctacttgtaaacttaccgtataatcagtgtcttgataaaatagtagtttttgttggttgaatctaagaatgtgttggacttgggtaaatttcagacatgaccaacaacaaaaaacaaaagcccaattccttaacctttcctga

SEQ ID NO: 108996 - DNA, 1235 bp, Homo sapiens
aaaaatgagtctatatctgtggatggaaggaaaaaataattttaaaaaatgataactctgtcctattctttcagggtcaaattccagaaaaatcatactttggaaattcttttctttctcttttcctccccccgccgccccacccccacccccaacacacacacacctttttttgagacagggtttcactctgttactcaggctggaatgcagtggcatgatcacagctcactgttgcctcgacctctctgggctcaggtgatcctcccacctcagcctcccaagtagctggcactacagatgtgcaccaccactaatttttgtattgttttgtagagacaggggtctcactatgcagccctagttgctctggaacttctgggctcaagagacccgtccacctaggcctcccaaagtgttgggattataggagtaatccacagggcttgtctgtgttaaccttgtttctgttactttgaggaaggttgcttttccaaatgtacctacttacaaaacatcaacattaaaatgcagattgggaaagaccgctgggcgcagtggctcacacctgtaatcccagcactttaggaggacagggtgggaggatcgcttgagcccagaagtttgagcccagtctgggcaacaaagtaagaccatcccccctttaaaaaaaaaaaaaaagaaaaggaaagaaaaagaaaacaaaagtggaaagggtaagacctagtcacaattataaaggattcaaagtttggaagagtgaagctcatgtttttttgtttttattttatttatttatttactgagacaggacctcactctgttgcccaggctagagtgcagtgacatgatcaaagctcactacagctttgacctcctaggctcaagtgactctcccacctcagcctccccaatagctgggactacaggcacatgccaccaagcccagctaatttttaaacatttattttttgtacagacagaatttcactacattgcccaggctggtcttgaactcctgggctcaaatgatcctgctgcttccacgtcccaaagtgctgggattacaagttgtgagacactgcacctggccaagccacccccgccttttttttttttttttttttttttttttttgagatggagtcttgctctgtcgcccaggctggaatgcagtggcacaatctcagctcactgcaacctccgcctcccgggtccaagcaattctcctgcct

SEQ ID NO: 108997 - DNA, 1050 bp, Homo sapiens
ttacaaaatttaagattcatataaaacaaagaatacatctgttttcatcagctatttctcaacttttattactgggatttattttaaaaaattgttttgcccagacagctttgttttactaagcgtgatttattactctcccatgagcccacaaaaagtgcgtgttcctgaatcaaaaataatgaagaatggaaacttattccttttacaattgacaaaatgatcatttaaaatatgtaaatatgtttaaattctaatagggtttttataatcaatgggtagaaaaatatattcaattaccccaagctgatatacagaaaaattgagacacaatcaaaaaataaaagaaagaattgaagaaagtgacttttgtaatgctattctaaaaatcggctcaaagttggagaattatctacctaagagagagattaacaaggtttttatttatttattttctgctttgttccacaaaaaaaaatatttcaggcagcttgcctcttgatgttctgttaaaagattattgactcttagcttttgaatatgattaacatttgatgtctactttcttggcaagaattttacatgtattttatgctaatattttaaggctaaaatagcattttcttgtctgcgtggcatactttttaaagaatgaaattttttaattgtaaaaatatcttggaatttaaagattactagatagcttgacctttactggcttccgtacttcaataacagcaaatttttgaagaattgaagactgcaatatttttacttcagaaacaggaaaagactgaaaaagactgaggaataattacaaatagaaaatgatatagatatctagatatctaaaataatgagctaaatttgggttcaggtcacaaagaaaagtttaagttgtatagtgttttgatgtaatcacgtaactgcttttaaaggagaaattggctttcttggtgaaatgttgaagatatttcaattctaggtaaagttttttgcaagttaccaaaacactggctcacatttgcttatattgagttggttttgggg

SEQ ID NO: 108998 - DNA, 1101 bp, Homo sapiens
gaactggcggctaccactgttgagatggccacaggtcacattgttcctgagggaggaatcctgcagattggccaagaaaagaatggctgctgtgtgggtggtggctttgatgaaacattagccttctctgggagactcacaggcttcaatatctgggatagtgttcttagcaatgaagagataagagagaccggaggagcagagtcttgtcacatccgggggaatattgttgggtggggagtcacagagatccagccacatggaggagctcagtatgtttcataaatgttgtgaaactccacttgaagccaaagaaagaaactcacacttaaaacacatgccagttgggaaggtctgaaaactcagtgcataataggaacacttgagactaatgaaagagagagttgagaccaatctttatttgtactggccaaatactgaataaacagttgaaggaaagacattggaaaaagcttttgaggataatgttactagactttatgccatggtgctttcagtttaatgctgtgtctctgtcagataaactctcaaataattaaaaaggactgtattgttgaacagagggacaattgttttacttttctttggttaattttgttttggccagagatgaattttacattggaagaataacaaaataagatttgttgtccattgttcattgttattggtatgtaccttattacaaaaaaaagatgaaaacatatttatactacaaggtgacttaacaactataaatgtagtttatgtgttataatcgaatgtcacgtttttgagaagatagtcatataagttatattgcaaaagggatttgtattaatttaagactatttttgtaaagctctactgtaaataaaatattttataaaactagctcacgtcatttaattataaatttaagagatgttttggagcaaactcgtacttttctcttttcatttaaagtaggcaattagttttcagatactattatgtaaacagcatggttaatattgttaggaatgagcaactatagacttgttttaagtttggcttcctataaatcataagcaagaaatattatctctgccaagtcaattc

SEQ ID NO: 108999 - DNA, 1058 bp, Homo sapiens
ccgcctcccgggttcaagagattctcctgcctcaccctcctgagtagctgggattacaggcgcacgccactacacccagctaatttatgtatttacttattttgagacagagtctcactctgttgccaggctggagtgcagtgccatgatctgggctcactgcaacctccatctcccaggttcgagagattctcctgcctcagcctcccgagtagctgggactgcaggtgcgtaccaccatgcctggctcattttttgtatttttagtagaaacgggtttcaccatgttggccaggatggtctcgatctcctgagcttctgatctgcctggctcagactcccaaagtgctgggattacaggcttgagccaccccgcctggctgtagttttttaaattaaaataaaaattactggatcaaaattagattgagtgatcaaccaactaaaagattaaacacgacaaaagtatatttttctctcacgtaaaagaagtccgtgggcaggcagctcagggctggctagatggcttcacaatgaccaggaacccatgcttcttctgtattgttgcatggggtctcctggtctaagatggttgctgaaattccagcccattaccatattccaatcagacagaaggaggaaaagaatcacatataatatttcagcgttggtcagaacatagttatatggctgcatcaagctgcaagtaatgttgaaaaatatagaatttactctgagtggtcacatgttccactaaagctaggattctgtcatttagagaaagagagaaaatgaatatctgggaacaattagaagtccctagaactcctagctagacttactgctctaacagatgaaatttctacttttttaacccaagtattattttattttcttctatttgtttgttcttcaccctaaacatgtaattacttaaaaaaattaaaagttttcttatattaaattctgtcagcatatgagtttgcatttatctcggcctgcaacatctggcatcacttaaacatgtataattcgtgttgcagcatgtaaaggaattt

SEQ ID NO: 109000 - DNA, 1069 bp, Homo sapiens
cggctccttggccccgcgcagcggcccgctctccagcacctcccggtacgtgatcgcctccttcttctccttcactttctggtcaaaagacttggagacgaacgccgtaagttcttccatcgccgccgcacgtcagcccggcgctcaacctctgccagcagagccccgctctttttttccttcttctttttttactgctccagcccccccaataataacacatcaatgggacaggaggtgggggaggagagggaggaggagaaagaagaagaaaaagaggagaagaaagaagaaagaggaggagaagtagaaggagaaaaagaagtaagaagaggaggaggaggaagaagaggaagagggggagaagggtgaagaggagagggaggaggaggaggagaagagaaggggcgggggctgccggagggaaatgggaactgatgcttccctgccggagcgcgcttgttcaatgttaagatctttgacaattcttcctgcggagagttcagatctgatagcgacgctgcgcttgaagtcccactatttatacttcctaacggcggcctcttgttttgagtaaattacctcccctcgcaactcggagtgagcccccttcccgggtagcagtcgcgcctctaccgggggttggggaggggaaaaggagagaaacagagagagagagagagagagagagagagagagagagagagagagagagaagaggagagagagagattggagttcgggcgggctggggctggagtggtagggcagcacagggggaccggagggggcggggagagaaggccggtccccggccgctcaggttttcagatagcccctgccgcctgtgctcttggccattaatccaggattgacaagaatccctaattaatttaattaggcgtggattttgcgttggtgtcacgacttagttaaacactggggagctggatagaccccgcggggtggggccaagaggaaactgacaagtgcgcagctcttagagtcagtcaggtatcccgacactgcatccttccctacagccttgcttcgagtcagggtgcctcgc

SEQ ID NO: 109001 - DNA, 1154 bp, Homo sapiens
gaagttatgtgtatctctcatttcataagaatattaaaaagatgtgtatgtactcgagtggaaatttagtaaaatttatgatttttactgctttattgaggacattcttaattgaaattgcttttttttttaaactgtgactgtatggcagtgagggatacagtgactactaagtataatttggtgcctctgccttgatttgtgctaaggtgccagcagttttgtccactattacttttgcaccatcagtgcaaaagtcagcacaatgaaaaaggtaaataatgttttagtgttacagtgaatatagttttgacttcttgagtcccctgaaaagtgttgtagagatccccaagggtctacaggcctcattttgaaaatcgctggtactagaatgtaagcttctatagggaaaggattttttttttcttgtttattgatgtattgcttatatgctatcagtctgggatgtctttcgtatcttcagtataagattacttatattttgaatctgggttgtctgttgtgatactcttcttttcatggagcacactgtcgagtaacttcatgaaaaggggagagtgtggggtataattttgagaccttacatgtctgaaaatgtctttattctaatctcgtagcagaacagtgatttggctggatagagattctaggttgagattcattttctcagcattttaaaggctagtctccgttgttttctgtgttgtgaaaacccatatgccttttattgtgctacccatatttttttatctttagaaatttctaggctcttctgtatattcctggtgtctaaagtttttatgagatatactgggtatgtctttttagaaaaatcattgtcccagggacttagggcaattcatctttcaattctggaactttgaaacaaggacttattctgtcacccagactagagtgcagtagggtgattgcagctcactgcagcctggaccttctgggctcaggtgatcctgctgcctcagccccctcaagtagctgggactacaggtgtgcaccaccatgctcagctgattttttgtagagacaggggtttcaccatgttgcccaggctggtctcaaactccctgggttcaagcaatccacccacttcggcctgccaaagtgctgatatt

SEQ ID NO: 109002 - DNA, 1051 bp, Homo sapiens
ctgaggattggggaagagtatcacctggctgggtagaatggagggactcagggacactattacataaattcaatcaattttttttttgtttttagcctcatggcctcattgtgcctgctctggtatctggtgtcttaaattcctgatcctttctgatttttgctatgtgaatttgcttttctcttgttggaattctctacagttgcctgataataagttttcttagctctaaattctccatgtgtttttcacttgccaaaagtttgttgacatatctcatgttcctgttgttttctagtctctatcctttcaaatttatactttttaatttctttaatcttattttggtattttttaaaacaagatagcaagatagtaaaagctcatcttaatttaaatggttatttgtttgtgaggaacattcttaaatgattaaaggtaaaaacaagaaaggaattaaaagccaagaaatgaaattattatcattcaattgtgtacatatttcttaacatggatataagtatatgtgtgtgtgtataatatacacacatacatatgtgggtatctatttgatatatataatggatatatgtatatattttatgtataaatggatatggacacatgtgaatttatatgtatgtacagatataccttatatacatctgaattatgtttgtatttaaatgtatgtttgtatttacatatatatacatgttgtatatatttataatttcatagtcttttttttttttttttgagatagagtctcgctctgtcacccaggctggagtgcaatggcactatctcggctcactgcaacctccgcctcccaggttcaagcgattctcctgtctcagactactgagtagctgagactacaggcgcatgccaccacgcccagctactttttgtgtttttagtagagatggggtttcaccatgttgatcaggctggtctcgaactcctgacctcaggatccgcccgcctcggcctcccaaagtgctgggattacaggcgtgagccactgcacctggccactttcatagtc

SEQ ID NO: 109003 - DNA, 1006 bp, Homo sapiens
ttttgtcattagggaatgtgagaataaaggaatagttggttgattactaaagaaaatgtcatataattaatgagaaatataacttaaaatatcagataattgatataaagaactgctctcagtcttgtcaagaagccaggcacataaacaattttactttgaataagacttttaaaaattttacaaagttttataaaaagtagtacattgaggccagaaatggtggctcatgcctgtagtcccagcactttggaaggcttgggggaaggatcgctggagcccaggacttccaggttgcagtgagcaatgattgtaccactacactccagcctgggatacagagggagaccccatctctaaaataaataaataaatgaaataaaaaattaatatattgcatttcatccattgtgccaccatgttagaaataatattcttcaaatttatgcttatagaaatgggacgtcggtcatcagatactgaagaagaaagcagaagcaagagaaaaaagaaacaccgtagacggtcctcctcgagcagttcttcagatagtagaacatacagccgaaagaaaggaggaaggaaatcaagatcaaagtcaagatcttggtccagagatcttcagcctcgttcacattcttatgatagaaggtgatttttgtaatttttatttatatagtaatgaggataacattctttaaaattcatgtttttgtatttttaattttgctagataaaacatttttcttttactagctatatatttatgaaagtcccaacccagagtttttttgttccaccaggtccagtccgtgggtctagtgtcctcaacctttgtctgttcttagtaggcaaatagatagaaagtggtgtagtttccttttttaatttaatttaattttttttctagtgcatttatttatttatttttctaatgaattattttttattttattatactttaagttctagtacacaacatgcaggtttgttacatatgtataca

SEQ ID NO: 109004 - DNA, 1007 bp, Homo sapiens
ctagttttgtatttttagtagagacagggtttcaccatgttggtcaggctggtcttgaactcctgacctcaggtgatctgccctcctcagcctcccaaaatgttgggattacaggcgtgagccaccgtgcctggccttaattttaaatttttttagagacaagatcttgctctgtcactcaggcgggagtgcagcggtgcagtcatatcttttggactcaagggatcctcccacctcagcttcctgaatagctagtactagaggcatgtgccaccatgcctagctaagtttttttatttttattttttgtggagacttggccttgctgtgttgcccaagctggtatcgaattcttggcctcaagcgatcctcctgcctcggcctcccaacatgttgggattacaggcatgagctactgagcctggccttggtttagttttcataccatataatctgatgatatttggaaagattctaagacccttaataccttaattagtactgatccaatcactaagttatgaaccagtcatatgactgttcaagagaaataacattttaatttatctctgtttgcttccaggaaacagtgagacagtaaaaatcagatgattctttagaatctagaaggtttttccttaatgctcataataaaaatttttatagcagtgatctttgattatattttatttcagacgcaggcatcgatcaagcagtagctcttcttatggctccagaaggaaacgaagtcgaagtcgttcaaggggtcgagggaaatcctatagagttcagaggtctaggtcaaaaagcagaacaagaaggtatgccttattaagtatttattgctttgtaacaaattattcccaaattcagcgatgtaaagcaacaatcatttattttcttataattatataattttgattgagcttagctggcacttatttttttctcacctggggtcattcatgcagttagtcatctgatagcttgattggaactggatggtc

SEQ ID NO: 109005 - DNA, 2467 bp, Homo sapiens
ctagagtgcagtggcgcaacctcggctcactacaaccttcatctcctgggttcaagtgattctcctgcctcagcctcccgagtagctgggattacaggcatgcaccaccacacccagctattttttttttttttttgaatttttagtagagacagggttttaccatgttggccaggctggtctcaaactcctgacctcaagtgatctacacgcctaggcctcccaaagtgctgggattataggcatgagccactgcgcccggcctatagtgtaaatttttaatgttttttttttctggagttttccctccaatttttttcttcacatggtagccaaaatgcaatgcaaaatgcaaatctgataggacctcctttatttcagtggtttagaataaaacccaaaatgttgacaaggctttaagtccctttgtgatctgactccttcctgccttttcaatcacatctttccaatgctagtcatacttgtagtgtttaaacagttttcttttcctgtctaaggacccttgaacatgtggtggttgcctctgctcaaaatgtacttttctcccacccatgatctgtaattaatcttttaggtctttacttaaagacatttccttaggctgggatttccttaggcagaattttagcaagcatggtaaagcagagcccactttgtcaaggaaacatggatatgcatgcagtcttactcattttcaacgtatagattgagctgtaagcttgatcataatcactccttacttaatttgcatttctaccatgtagaaactaatttgaaattatagaaggtggcattacagacaagagatagcatggaaagagctctgaatcagcctgagtctcagtatcttcatgtataaagtattatgctcattctagttctaatttgattcgaaattacatgaaaataagtttcataatgtatattatttaaattattttaaaatatcatttttaagttttttaaaaaactaattagatgtacctattattttgccatgttaccatgctctaaaatagttataattaaatccgctaaaaggaactgaacaattacattgatgctattgcttgcttggtaaacttctacttgctcccctacagagctctagtttgcactgagctaaattcttattctgttgtatatttgtaatgaaaatgctttttgtatgtgagtttttgtttatctgattaatagctttcagaggtggctgtgaggtcttatagaggtacagaatttttagggctaaaaggttattttatactatttcttttaggtgagggagctaagactagggaagataaggtaagcaagtaatggtggcagaaatggttctgttcagtgtgtggtgactttatggttttctttttgcagagtgttttttcttttttttcctttccccctccagtttttcaatgggtgtggagatcatgcaggagcaatagagaaaacgagaaaattgtggacgagcaaaactgggcaacattgttcttggacagatagtctgaaagtgagccgtttgcttgaggataataagttgagtgtaagatgggtcacacatataagtacaagaggttatcaattcaagttctaaaaatctgctctgttcttgtaaggacactgttaaataaatgtgtgtttctatcgttctttcatttacctgaggtagtccattttaataaaatttatccaaaataaagaagcccagaccatgagtctaaccatgtatgcagttaatttttattcaggtcactatttattttcattatttcctcaactggaatgagcagcacttttacactgacatgcaaaacagatggatttttgattattaaacctattgaattaataagctcatttaaaaaattgggtattctcccctcacctcactttctatttctcagtcaagttgctttaattaggattttaatgtaatgtgtaatctgaatatggcaaaaagtgaactgttaagtattatttagaaatcactaaatttttgaataaaagattcagtgattaatattgaataaaaggttttatggagatatataatactgacccaattaaatatatatatatatataataacactattattttgctattttgctttaagatgatgcccttgcagtttttaggtattttaaatcagttttaaggctttaaagtcaaaattcattgtttagatctaaaaggaatattgtaaaaattaattagttgaccttatttccaaaaattagtagattcagaatactgaagttcttagttggcagaagaactctattgtctagtgacaaaataggtgactttttctttttctttttttttttttttgagatggagtcttgcacctgtcgcccaggctggagtgcagtggcaccatctcagctcactgcgacctccgcctcctgggttgaagcgattctcctgcctcagcctcccgagt

SEQ ID NO: 109006 - DNA, 1007 bp, Homo sapiens
accatgcctggctaattttcgtatttttagtagagacagggtttcgccatgttggccagactggtctcgaattcctgacctcctgatctgacctcgtgatctgcccgcctcagcctcccaaaatgctgattacaggcttgagccactgtgcccagccctagatgattttttcatagacgttttttctcaggtttttaactgcagtgccattttagtgtttcacatcttgactcacattggagccctttgttgcccagatacaattagggaccagatttccacctgggatggcaaccacattgtggggacctctagttgggggctcctgaattgactgaatgtaccctttgttgcttagctaagttagagctacttttctgtttttcagctaagtttccatgttgtgcagagaggggctatgacctcaaatcagctgagtggatgatctgtccatgttcaatttccatggctcctcttcactggtatagataaccagacagtgactgcacttctttatgcaatatttagcacagtatcaagttggagactttcatatgtgcttttggttgaggtgattttgttttggcagtaccaaatttcttgctatttcttgtgcctcatttatgcagcgtgacggaaagattgagagaattctatgtggggtgtgctttgtttcctgggcagggcccagcccagagtttaccaaggtggcttgacataagcactactattagatttaactaactactaagcagttttattgggtggctccttgaatgtggcaaacacttaaatgcagtccctgctttaaatgaacttattgtcataagatttcctttttattttttctctatatctttgtttacttattcttttccatcattgtgttataacaaactatagaaaataatgtttcctatattccatgatgtattcaggaggaaaaggataattcattaagttaaaattattttccccaagtcattcctgtgaaattgcagaattgt

SEQ ID NO: 109007 - DNA, 1065 bp, Homo sapiens
ttttggattagggtctgttttatttttgtggtggtatattttcttctctctctctttttttcttttcttttttgaagtggggtctcactctgtcacccaaggtgcagtgcagtagtacgatctcggctcactgcaacctctgcctctcaggctctagggattctcccacctcagcttcctgagtagctgggaccacaggcacatgcacaccaccacacagagctaatttttgtgtattttgtagaaacagagtttcaccatgttgcctaggctggtctcaaactcctgggctcaagtgatccacccgccttggccttccaaagggctgggattacaggcgtgaaccactgtgcccaggtatgttttctaaatctagctttaggtggttattttagggaattgcagttgtgaggcacttattgctaaacttaaatgggcaaaatgttaatatttcactcaagtaaatcctttttatgtttcataagtttgtgcagaaagtatgaaaatgttgttagaaaatgggacagtgttctagaaaaatggggcagtattttaatgttattttgttggctttcatctgtatatttaactacactggtaaataattagatatattaatatgtgctagttataactagaaggaaaatgttactctaggattcctgtgtacttcagtttcttcaagcatatggacataaccaagacagccatgcacattggggcttggcttcacttgctgttttttggatctgtggtacaactacgtcaggaacctctggttagcctctttgaaggtaagaaactagggagcaaaggcgagacattctagccaagttccctaaaagctgtcagtctacctaccatcagacttgtgagtgagggagggtatcgtagacctgggtttagcaaagtcagattaactgttttatgcctgtttttgtaaataaaattttattgaaacacagctacactaatttgtttattgtctgtggcttccctctacaatagcagcgttggatagttgctacagagacctcatcccccgctctccactgcaagcctaac

SEQ ID NO: 109008 - DNA, 1054 bp, Homo sapiens
tcatgtggaactgcatgatggcagcacaggtagctcagactccaagaaaaaaccatccttttttgccagtgatctgggaaaagttgctcctgggagccagaatttaggagtaaccccagaaaagagagaaccagagaaagagatcctcttattctgtgtatgactggcacaagacctggactcacccttacactgcatgtgagtggagagattcaaaggagcataacaaaagctttggaaactgaactgacattggaactacaacccacagaatgtgaggtagaacttttgatctaaaccaaactggactgattgcttgctaaaataaacaacaaaatcaacattctacagagcattttgctagtatacacagtcttacaacatgataaacaaaaggtccactatataatccaaaggtacttagcatacaaataagcaggaaaatgtgactaatatttaagggaaaagacaatcaacagatggcaactccaagatgaactggatattggaactattagatgatgactttaaagtagctattacaagtgtgtcctccagagtaaaggtaagcccttctgaaatgaatagaaagatagaactttttagtagagaaatataacctgtaaaaaagaaccaagtagaaattttggcactgaaaaatacaatatctaaacaaaaatacaaagaatgggctcagtatcacactggagatgacaaaggaaggagtaaacctgaagatagataaatggcctggtgtggtggctcacatctgtaatcctagcactttgggaggctcaggcaggaggattgcttgaggccagcagttcaagacaaggctgaaccaaatagacagatcctgtatctaccaaaaataaaaaaattcagccaggcgtcattgtgcatgcctgtagtcctagctacccaagaggctgaggtgggaggatgacatgaatcctggaaggtcaaggcatgagcaaaccatgatcatcccactgcactccagcctgggtaacagagcaaggctgtgtcgcttcaacaacaacaacaacaacaa

SEQ ID NO: 109009 - DNA, 1055 bp, Homo sapiens
atttaggaagactgatgagtgatgccaagcatctgtgtgttctgtatcttaaacatgagaaacagattggaaagtaatagctttttcacagaattttggtaacatatgggcttatctggatctaagaagtctttgaagatctttgaacttgactaaatgacttaacctttggcatagtgggtgggttatatgcttttttagaggggaggcactgactttctgcatttctcttttgctttttttccccttcttcccaattctacctttaatatcttttcttaaaaatggggagaccagagatgatgattgggaatttgtaaggttgatatgatgagaattccaaaatatttagttaaatggatctacttgtaacaagatagggttaaatcttttgataatattttagaaatgagtctgtgtaaatctttattttctgttttatagattttatttgaaaatgatacggccatcagatctcattggcagtatgtcgtagttgaaaggatgtggacaaacctgagattagatttcagttttatcactcattggctctgcgacctctgaacttttaagaatccagttttctcaaagtaaaaacaaaacaaaacagctgtcccccaacaggagaaaaatatccaaaacaccaaaggagatgattacaacagctatttgtttgaaactggagaattgagtgagataaagtacatgaatatagcttgcatgcttcttagcacatagaagatccttggtaataataggggaaagtgttatgccctatcacattgctaaatgagacatatactaaacaagcatattattatacatattttagagcattaactattatagtaaaggggagattggttttgatttttatttactagctttgcattctcatagctcaatagtaaaacttgatatgagttataggtccaaataaatgtttctggcattttgataagatatattattcaattgagcaatataactagaattacatattaggaatatacaagcaacccctctttacaaacacttgatctgcagcaagtaga

SEQ ID NO: 109010 - DNA, 1042 bp, Homo sapiens
ttatattggaacaattagaaataagaaataaggttgaatagataatggaagcaaagattgtagagaaaaggaaagccttattcttgtagattaaattagatacattatttgaggagatgtgaataattaagactagatttgaacctttaaggcaaacactttttaactgcatcataatttcctataaagttagcatatatatttccctcatattaagtgagagcatttacttataaagaatcatattcaggtgcttgcttcacgtggttatttatttctgagtccacaactaaaactaagtagtttttttcagataatttaaaagagtatttacttttcacgatacaaattatacactaagtttatttaacaaaatctgcttactgtaggtccaggtcaagacctcgtctccgttctcatagtcgtagcagtgaaaggtccagtcacagaagaacgcgtagtcggtctcgggatagagaacgacgtaagggcagagataaagagaaaagagaaaaggagaaggataaagggaaggacaaggaattacataacatcaaacgtgggtaagttggagcaaatcttatctggtaaggacttggtgattccatggcgatgttcaaactaaatttttgttctctgaggtttttcttgtggcttatttgctataagagtagaagaaaatggaataaaaagagagaatacagtagagaaggaagaaaggataaatcaaaatagttacctcagatttttactgtggtacattttcatttctatttttatttaataataatataacaatattggaatcaatataaacagcaatatcaaagtttagtatgtaagtagaggaaaatttgcctaattctgtaggaaagtttcatactctgtttcctttgttatgagtatgaacttaaaatttgtagactacttagtgattaaaaatgtctattaccatattgtaaagctgttagcggaaaagtataaagttgaaacagaaggaggggaccatgtgatttactattgtttaagccttttttagtat

SEQ ID NO: 109011 - DNA, 1226 bp, Homo sapiens
gagtttgagatcaagtgatatactgttgtttaaacgttcctagaaaatagaactgaaagaattttctgtacactgtttttccctgatcagcccagaaatctcattagtaaaagattgatcccttcttttctccctctctcttcgttcttactttcccacctcagcatttcatctatttagaattatatttaattatcttcacagacaattcctaggccttaattaagtttattttagtgatggtttcattagctgtcttttttccaggtggctttaaaaaatttgtggagagagagagaggaaaaaggattcacaaacatttaaattaggacttatgtattagttcattgtgattgtgcagtgcatgacaagtgttttagcttgtgctaagtaacctaagtgcttcttcacatgggaaaacaacctatgtgcaaaagtaacagtatttagatagatagatagatagatagatagacagagagacagacagacagacaggacacaaagtatatatttataaagcacaaaaagcaaggacagtaagtacagtaatggtaaagcaaggtaaaggttgtttataaattgggaaaaacaaaacaggaaagaaaggaatgctcaagcaggaattaatgagcttaataatgagggagagcttttttatacttttgagaaaaaaatgcgagatcagataattctgaaaaaccctttttaaataacagctaattatagttctggaaatacctagaacattaaaattgtagaattcgtcttataatgtcataaattggcctgctaattttatttatctacagatttaggaagacctaatataaactggaaaggtctcaggagtttctagggactaaaagatgcctttccttataacactgtgtgaatgattaatataagaaagacatcgagtcctgtctgaaattttatcaagaatgtttaatgacttttaatgttttatatttataaaatttagtttctaagaatattttctcctttaaacactgatacagatttttcttttttgttttccccccaaattttaaaaataaatatttcttatctttagaaaatttcattttttaaaagtgaaagcaatttattaagaaagtaaaggagtaaagaatggctactccgtagtcagagcaactgtatttctttttttctaatttgtaatttttagagacagggtctcattttgttgctcaggctggagt

SEQ ID NO: 109012 - DNA, 1045 bp, Homo sapiens
ttaaaaagctgtaagtattataagcagtgtgaataagaaaactagtaccatgtagtaatcatactttatagatatatgttagttatggctttaaccttggcaaaattccagtgtcttcagttttagagtttcatgtaataaattcctgtcaataaggggttttgttttttattccctctacctagtgattggtagaagatgttgggagtgatttgggaaagctggactctgagttttgacagcagttacatacttatagagtctgtcatatttttcctaacctgttatttatacagcaggaagtaatttatgctaatttacccctatttgcatataggttatagagttctgtggtgcagagcatgcttagaactccttttaagtgtctgtttggatcaaagcagggctgtgtgatagctgttgtctgacaccaagctgtgtggtgttgttttcattaaacatttatcacacttccaatgtgacagcaggcaactttgtgccaggataacatgtcttcatgcaaaatttattgaaaaagacgaagactttgtaaagagatcttgttgcctttcaccagtggcgaagggtaaatgtttggttcgaaagcagtatatcgaaagtatacctttaacacatgtcattatagcatgcaaaaaaaaaaaaaaaagcttcataccgtcaattttgttaagcaggtaaacaaatacatctttatatacatgtgtgcactggaatctttttaaattaaagtttttacagtttcctcataaaccaaatgaatattataacatagtggcccattgtgttgttggccattttatattacagcaaaatttaccacccaatttctattctgtgggtttgaatatttggtattagttctgatttaaccaaaataatctaattttttagaaaagatgaggtcaagaaagggaacataatataacaaaaaacattcagcaaaagcaggagacaaggatttcctcagtactccaaggtaaccacctttcttttatacattatatcagtacatttaaattatcac

SEQ ID NO: 109013 - DNA, 1081 bp, Homo sapiens
ctcttttttggtgattgctcgactgtgaaagctttagaatgagagaaggtactttaaatttcctttttcattccacaggaggctgaggaattagggatatgtgaagaagttagaggatgggagtagcctcatgctggactttttagtaagtttcattacatggtctataaaaaatttagtggaccctttgcaagaggtattacaaaaattatgttagcattaacattcaggaataaaagggaaagagtactgagttgtagtgtaatggaagacccttgtctttggaccggtatggaatgcacagaaaccttcaaattctgactcattatgctttggagctactgagggatgattgtttttaaaacggcaaaaccatgcctcatacaaatatacatgaacacttgccaaagatattacttacctaattaatgagaaaataagtgagacgttacaagtagctcaaaggatcaggagtagacacaaacgtaggctaccaaaaatctagccatgaataacgtaatagattcaaaactagcttcttccacataggggaaggaaatcaattacacctccactggacaaaattcatttgcctgtttatagaaaagaattatttgcattgctatcaattatctataatctatggagtctaaaaatacctcagataaggaaaggtgccctagacaatatacccggtagtcttttttgatcatctcaagtcatttacagtttttttcctgtgagaaggcaagtaacttttttgaactttaaatttattattccataagatggagataatggtaatagagaagatgttaactattagaagcagtgtgtgtcagaagactagtactatgtagtagcagctcaataaatggtcatcattttattttttattgataaaacagttttaactattggttttgtgattaccagtttctcaactatcattcttttttctcacttttgtgtctttttaaaggttgttccttcagtctgaaatactttcttctctacttttcttgccagttgctattcatctttttgggttcattttaaatttcatttattttgtaaagta

SEQ ID NO: 109014 - DNA, 1389 bp, Homo sapiens
taatctgatgggtgacatgatcagattagtgttttgaaaagatcactccagctgcagtgtggaaaacagattgcagagggataagtaagagtggatgcggagaaaccagataagtagcacagtaatctaggagagatgtaatagtagcttgggccagggatttggcattggagatggaaagaagttgctgaatttgagacatatttatgtatttaatgataggtttgatttggtaaatgagatgcagatgttaaggataaccattagttttctgatttatatcattggaacaatggtgagactttttactgagcaaggattacattggaagatggcagggtatcatacatttgctttggacatactgagtttgaggatcttttgggactttcaagaggagaatgaaagtagtcaggaggatatattgtaggtgcagaactcaggagagttttaacatggtctcaggttttcaattccgttttattcttaactctttaggtattttacttggaccttgatgactacagaaacctataaaggggaggctgcagtaacccaagcaatatcttccatatggcaagattaaatcacagtgactgctggatgtgacccatgggccacaacaaagataaatgcattgtgccatggattactttggatgctgttaaaatgtgtctggcactattgtagttactggagattgcaaagatgaataagacacggtctttgatctcaagaaacttccatgtagtttggaagccagacacacaaataatgataacaatgtagtaagagtgctgtgacagaagatgcccactatactaggggagcatattgaaaggacacttaatccaaaattagccagtcaaggaagattttctggaggtgttgacacttaaaccatctggaagaatatggaagaggaagtgagaaggaaagggaaaaacagaaggattaaaaggagagggattattatatgtttaggaaaccatttttattcctcttttttggggagtaattacctttttattgttagacacagaaaataccttctggaaacaaggtgacatcaagcattgttggttcttcctttttttcttttgttttctttctttcattctcctcctctttttccttcctccttttctgaatagatgatatatttcagaatggaacattatataagggcttacatacagtacagagtcttatttacatcttttcccccatccactcaattcctattctttccctaaaaatccatgtaattacatttattagttttttagttatccttctagggtttctttatataaaattataggcaaatacaaatatacatttgaaaaattccctttccttttgggatctttagttcattctggctaa

SEQ ID NO: 109015 - DNA, 1053 bp, Homo sapiens
tattttaaaaagactattgtttgccttggtccttttaatctgcccatgaggaattcaagctgaatgatagggagctgtgaaaatccagttagtgtgagctgtaatctttttactggctttaaatagttagaataccatgcagacaccctgcagataactgaatcaaaacatacagtaatcacctaaacatggattctgcctttgctgttagggaaccatagtaaaaatcactaataaccatttactttgcagaaaagatatttggtcatgatatcaaataaaatcagggtttgatattaaaagccatatttcacaggtaggcaacccagtattggtgaaaagtattgatttctgaaaatttgatattattcagtatttgtaatatcctctgactataatagagtcaggaaaacatctttataaaaagagaatatttataattctttaatctttagtcggtttctacttcagatcttgctaaaggaaaacaaaacactagtaagataatcaggctttggaactataataaatagcaagaagaaagtgtgctgctcttttcttataaaagaaactggttccactaatgcagtttattgaatttagatagcaaaatattccctaataactttgtcaaatggtggtctatttttctagctttataggctgctttttttttaagttgaaagatggatttctcatccattagattctgcattagagtgatgagaaacatggtatgcagtatgccgatgctgcttcctaatttcattagctttccattttctaatactgctgttgataatattctagtgaagtttataaaataaaatagtctacttgttgaaaccaatattctagtgttgctggtatgattcatgctacattaggagttcgtaagtcattaataatcttttatgtttagtgtattcttctgaacagtaaacttgaactcctttgttttgcaagatttgtagggcctactccaggacaaagatttcataaagtagatgcctttcctatgcttattgctttgcctcaagcagttttacagag

SEQ ID NO: 109016 - DNA, 1336 bp, Homo sapiens
taagaagtatcctttctggctaagtaaatgcctataaatattgtgatagtagaaatacggtatattcaaatctctttcaaatgaggtttttgaagtaccaatcttgataattttcatcttccttttagaaaactagtctttttgtctgtcttgacaatgatactgagtttcctctgcctcagtacaaaaaatattttttacagatcatcatggtagatgtatagcaagagagacctagtctagcctgtttccctgcagatgagtagagtgtgaccaccagaggttaagtgatacatttttccaagatagctagcagggtgagattttgatattttaagttacgtagttgtctaagtaactcttatcttattgaagacaggtatgggttttgtatttagagattttgtatctccctactatgattaacaccagtatatattaaatacatatgtattaatcagtaaatacaaggaattttcccaggattttaagtttcaaccaattgctctatgccctgttgaacttgctcccccttaatgactgattaaagtactctcccacttttcattgcctcctgttcagttactgctgcccagagccagagagtttgtttgtcttgttaaaaagtaagatttacaccccttttggtttggaggcaattaaaagttataaagacggattaaagtagaagcatcataggtatattaatgagttatttgggactttctcacagatttcaccaaaagaattgtgagaggaaaaagaaacttacatctaacaggaagagaaaagttttaggaagaccaaattgtgagtaaacctatacaagcccttagaaacatttttacattcagtagaacattaattacctttaaaataaggactacttgatagcattatatcagtcagagtccaacctggaaggtggaaaacacactagagaatggtacaaaagaaaacattgagataacagatattaagtaatagaaattaggtacccattctagggaaatgagaagaggttagtattatcagcacatagtaacttagggaatggcagaactgagacccaggcctctaatgaagcaaaggtgttacttcactagtgttggtacctcaagggcttgtgggagggtccccattgcgctaggccctagacttttttgaggaatggatactgtttggctgctgctggttcctctgagggaatggaatgggtctggatctgaaaggacaggtgaaaaaaactcttagaaattagaactaatattaaagagttatttccttcaaagagttgttggtggggcaactctgacaggatcagcaagtaaaacag

SEQ ID NO: 109017 - DNA, 1339 bp, Homo sapiens
taaggcaatagcttagtaatcagcataataaattgccatttttatccctttacattagagtctttccatctttcttttctgaatatgtaactgttgcttatatccattggttcccaccttggttcaagagataacaggtggatgtttgacattgctgagtaggtctttctcaatctgtgtgccctgtgtctagtgtaatataatgttatttgcacttttgtccacagtgactccatggtaaagtacatgactcagcatcccctttcttacaaatgttaggggtgtgcagttctgagtcccaggcttattttcctctacaagtttttattgcaaaaacctctactccttcttgcccttttaccttccctcccttttctgtatccacccagagtttcatctttttagactgtccataacaggattgatttgtagtttgtgcatactggaacccaaaatgatgttgaaatgtatatgttagtaaataaaagacttgtagaattttgtgtaaagggaacttaaggttgagaaatattttcatgtattagcgtttttggccttttttctgtactgccccacaaggagaaaaaattaagttaaatgtaaattaatttaatattatttataattaaatgaaagagaaagtaagaaaattaaatactaagatataagattttgttgggttggtttagctttggaggacaaaaaccatggtaatatctaaggtttcctttatccctcctcctttaaccaattttcaactgcttggggatgttattgcccctattcagaatacatgctgtatactatataaacacactgtgtgttaagagacttgtgtcctagtccaagctccagtgctgaatacaaactcagttactaaatatggacctccttgtcctgccctcttccctctgcccccaagattagacgagtggttttcaagcttttaaaaattgcttctttccgccgattttcttcctttgctttctaccgttccttccctttctctcttccctactccttttctcttccctcccttcatctctcttttcctccatctttgtcttcctcccttgatttttgttattgactatataaacctttgtgcaaaggaaatcttattgaggatcacatgatataaaatgaataaaagaagagccttggtggtggtaggtagatacactgatactcttttactgtcctgccaaacaggcaaaggtagtttgaaaaccactagtctagaagaatcatatgttacgattcagtaagttgaaaggctatttggaaagcattggagagaaatgtgaattaattttctagaccagggatcagaaacttt

SEQ ID NO: 109018 - DNA, 2869 bp, Homo sapiens
attggacaaggtctaatatggtccttttatttttgggtctcaacttttatgtttttaaaattatagtatgctgcattgcctttgatcaaagcaacaagcagtaatatattatttcttttgagtcagagtattattgagacatgctgactatattgaagttttttagaaaattgggctggagggaaagtgaaaatctgtagttttacatgtctatttaattttcactttgttatttcccaaatcattcaagagtctattactttaccgtacttttaatacagaattactactaactcttcaagcacaatataaaattctgaatgaaagaacaaagaaaagtgaaaaatagtaaaacagcatgaaaaatagagacttattaaaataagacagtaggagtgagattattcttttacccataggctaaaatgtcacttgttgttactttttttctgttttaatgttttgaatttcagcactgatgatttatctctatattaatagaaagctaattgaaaacagcttgctatatgtttttgtttagtactttggctttatgtaattttaccagcatatgttttgctaaattcttaaaatagtagtctaaaatctacagtgcatttttgtgatttatatttactttaaaaagatatatatttaaaaccataaatggcttagagaaataaaattataactgatcaaatcttaacatttagtttaagtaaacttaatacattttatcgtatctaacaaaaagtagtcccatatttttgacaattcttttttcttatcagttccttttcacaaaagtaaatatatgggaaattataagaaaagcatgttacttgacaggtggggatagtcaccaccatactcacaagaacatctgtgaacacgttgcttgaaattagatgtttacattgaaattgttgactatacgctttctataaacaagtatatagaaccttgggtttcagtgtccaaggacagtgctctagagatacgtagaagtgaactatggcttgtattataacacctgctcaatatcttaagttagtattgaactttaagaatgaagtcatgttttagcctatgtctggggagcacggcataattttagataatcttgccctcctcagagagaatggtagtcactgaatctaaccagataatgcttggcaaaatgatctactcataaccaagtaatcacagcacttcaggtgagaagctgggctcagtaactcatgcctctttacaaaaatcagatttatacttatatgacatgtttttactacccatgaagatattttaaatgttttggttgtccttggagtggtgttgcatgaagctttgagcttcgtcctcagtgttagaaaaagaatgtttctaattgactaaaggaaacaatgttgattgagttactgaatgaataattaaaaaacagaaatggaatccagtaaattgtgaccctctcattcttttcctttcagcaatgtgattgtgaccttaaaaaaagacacaaactgactgttgcaagtgagaagggaaagacataaattcctttccaacattttcctattacttctttgacactatcatcttcagagtagactcagatattcccaccaccagtggttttttatttgtttatttgtttttatatcagtgggccaaagccgtctatattttcctgaaattattatagcatagttaaacttagtaggaagctatcagtttggtgtctttgtggttactcttagatattttctagtgattgcaattgtcttgttaacagcaggtctgaagtgatgatcaaaactggagaaactgattgttatgagagttaagaaaaacattaggaatctgagttaatgaaataactcatgattatctaagtttaatacaagcacttgtgtagtatcaaagtgaaaagaagtttcctgttttgtatttagagtgttttaattcgatcttaaagcatttaagcttctgcaaagcattaattttggcattcttttcatgataaatgctatgtgttttagagaaatcaatattcaaatttgcttcaaagaattcatgaagagaaacataatgaaatcttgatatattatatacaaaagacaacccctgatcatttctttttatgcaaatgagtttgatttagacataattccccaacatcaccatgaatttccatctgtgtaaccctgatgttcttaagcagtctgcagttacctcatgctctgggctatattcattctccatgtatggaaactgtgactatcttaacactttagatgatgatatgaataacaattgtttgttgatcttattctctatctccctggataacctgctgtctgcaaaggctgaataagtggcagatagcttttgtcatcccttatccaagctgtacacttgtaaggaagagcagggataatcgcctcaatctaattaggggttaaaagaggccatgactgtgatgtgacagtgagacaccttactgtagcaatcctgtttgcattagaaaaataaggttgtcatattgattattcaaattggtttgtatcagccaagtctcaatggcttgtattgcagctgaagcagttgaagatcccagctattcacaagaagacctgtgctatagcatatattatattgtggcttgtttgataatttggggttttagtaatgaagacagagtttaatcgggagatttaaaggttaaactgataatcagaaactgaagtttagcttccaccttgtgatagcaatgattatgtaaattttgtagtgatattttaggtctctaactgaagatatataaaaaacattatttagaacttctttagtcatttgatgattcatgttt

SEQ ID NO: 109019 - DNA, 1005 bp, Homo sapiens
ggcccagaaaacagatttcttattttacctgttcttaaggagttattcccttattttttttcttttgatatcttgaagatatcagaacaagaacaacaagaaaacatttcttggcttctaatgtaatttatgaagaacttcttttaactgaagaaattgaaagcaaatatttactatgttagtagatatccctgtaagttagaagctgtatttctgtagacagaagattttgtttcctggtatcagtgtgagtaatggataggagcaactgcatacatgattcaagacaccaggttgcttgttggaacccgcttgtgactctcggtaaagcttttgtccaaggcttgtgctattcctcaaacactcttcattgctgttccaatggttgacgtgtaggagatccatcatactccctgctgcctttgctgctgtgtttgcttaaagctaaccccagggatctaataagggaaggaggctgcagcagggcagcttgaagttgaaagatcaaacatttctacctcccgagttaaccatgatcttggaacccgacaaaaggatagggtaccccaatgatagggtgactttagtgtcctcaccctgtatggggactgattcacaatactaagctctaatggaattgcgctgtgccagtagctttgtgtttgtagggttctttaggaatttgtaatgtcacagattggttttacatattgtagtcatgtatttcaattgtaatttattgagcataccataatatgctcactgtttacttgctgtgttaacatgtttggtactaagggtttaaaatttggaataataaggtttccttaacattattgtcattttataatatcatgcaagctttttagaaatttaatagatttaagcatggcatttatgttttaagtttcctggttttctgctatagcttaaattttataaggactttaaaatatacagattcattataatttatttgcaatgacaaagtttagactactaatc

SEQ ID NO: 109020 - DNA, 1011 bp, Homo sapiens
ttggaaacattgttcccctttactaaaaaatggtatatataagaataaaagcattgtcttatataactatgagtactagcttttgagaggttaaaaaaaagaacctgtttttgtgtttttatcttctgatattagtggaaattaatttgcaggttttaatcccctctgtcattatgcttctatttatattcaggaatcatctcaatgacgtatagcaatttcaatgcattgttaatgtataacttataaacctggaacttcgttttattagttcagatagtttttattattggagggttaatatagttaaaacttgcatattccatttagtattaaatgttcaaggtagtaaacatacctggccctagtctaagtcatacacattttccattcataaaggtctttacacatacatatacacacacagattcatcttcttgtggaaataagctaaatatcttttatttgttatttatggattcaaaatgtaaggtcctgtaagtctattttcttttttcttgtaaacagtcatattttcttctgttgtataaatcttaataaaatatggaactcacggataaattatcccccattctatcgcaatggcttttcagtatgaatgttagcactgaggcctatttcctgtaatacgaagtctagccattcagaacatgtattatattgatatgatatattgagaacctttatgaaaatgtcagtgtgtttataaggtctgattaattggattggtaagcatccccatactgaataagtattaccctaagtctactttctttgagttaaaacatgataataatcttggagggaaaatatgtagaaccagttgagaagtaagcagggacatttcttaatattcaatctttggattccattcattctctctccctctgtctttctctcactcttactctctcaggctctctttctcatcgtagttgcttgagtcatgtttgctaactgtatctttgtgaaatgtatagttgtttttac

SEQ ID NO: 109021 - DNA, 1121 bp, Homo sapiens
tgttatttgtctgttaaaactagtctgcagattatttcatgaatatcaaattaagaaagttaaagtgcaataatgtttgaagacaataagtgatggtgtgtcttgtttctaataggataaacttttttgtctttgctttatcttattagggaattatatgtcagtatataagacatactgtgtagtataataggtttaaaataaattctttaaaagaggagtactgaaactagctctgtagatttgtctggtgcatgtgatgaaacctgcagctttactgggatgatggcaatgctctgctggtttactttcaagtagctgggtttttcattttggcaggtacagactttttaaattgggcttcgctttaaaaattgtagggtgggaggaggacatcttaactatgtcatgattatatttagaaaattatggggacaaatctgggttagcctgaggaaaactgcctctgtctccacagtaccattttaagttcacataaaaggtgaaagctcctggttcagtgccatggcttcatggcattcaatggttaatggtagtggtattaacactggtatgttttgaaattgaatgttagataaaattattagccttaaggttggtaagctagcaatcaatatgctagggtgggaagctggtgagccagtggccattagataaatacctttcaagtgtgagcttagaagtcaatcttaaaatatgtaacaataacactaatttgtgatcattatgaaacccttcagtcacattgctggggggtggggagtagttgactgtaagtacatcattcttagtctattcagttttaaaaacatcttgggttacccactgtgtgtattcccataggctacagaaaaagtcatacaagtgcatggtttccaaccatatgtgttttctgcagttatttctcttgttcctggccaaactaccctaaaaatccttaccattccacaaagttgggccatcacttgtgtgtccactttcagtgaaagtataccaccacattgcatttctgtttccatcacggcttccaggagactaggctactgttttccaggttgagtttgagtgtaaaggaaatgtagacaaggaattgtccaatt

SEQ ID NO: 109022 - DNA, 1054 bp, Homo sapiens
attactgacaatcaagtgccagactattgggagttttctataagggcaatgcatttgaccttggtatccacagatttaatattctgtctattcaaagtgatgtggcctgttttatgtgacaatttgtaacttttgtgtggcatgacttaaagcctatgttctgagaggatgctgtgaaggagtcatgtaacttagccaatgaataaagcctactaactgctcagcactgtatctcacagtggctttgttttttctgatgttaatgtattgaacaatcctcatcaaaggtctgtgtagtaatggtgatgttgacaataattagtaatatttgctaaatgcagtatgctgagcactttacatgcattattgcattttcaacttgggacatttgcaaagatcttagcgcttacccattaaatgtcaggaaggactgtaagtttagagattaagaaattgttatgaacatagtcatggtgggagtttaattggttcttgtacaataaatataagaatttgcagattttgagaagaagagaatcttgttttaggtagatgaatggatgagcaaaattatggaggtgataatgaactggtttgagaagagttacatattggcagaaaattgttagccaggtaaggtagattataaagcaggcaatgacaagaacttgggatatgaagacattgatgttagggagaaggtattggaggacttttggtggttagtgataggagccaaaactaacatagacaaagtggggatacattattgaagagttcaccatttctgtttgcctcgtgcattgcaaacataactgtgttcattatctctatttcacattctccatctctaaattgaattcatctgtagcttggataatcacataccaaaattaggaagattctatttgtattaaattacgtagatggtataagggtgaaaaaaaatgtagacaaggtttttaaagtgaacactagaggtaaaatcatgtacataaataatttatgattatagacaacaggaaaaatgtgagctgaatgtagacccagaata

SEQ ID NO: 109023 - DNA, 1464 bp, Homo sapiens
ataatgtcaagaataaaaaatctgcacatgttcaatacagatgcacgttccccgccccccccccccccaaatatttttgatctgtggttggttgacttcattgttgtggattcacagatggggaggactgactgtactagccttggtttgacaacacagtttttaacatctaaggcatagataccatattttttcttgctttttttctgttgatgatgtttatgttgttattgtttttattatcccctcagaatttatcatggagctaagggagctcagcaaataacatttctgttgtacttctttcaccttgacatttcaagtctgtttctgctataatttctcttatgtctaaaagacctcttttattggttcttttacatcagatctactgatgacaaaattttagttttcctctgtttgcaactgttatctagagcatgacttcagaaatattgaactctcttctctttcccctgtagaccctttctgtgaactctgtttacttgactggttttaagtggcataactgatccataccagcttaagtgttcagcttcccattggaataagccaagtgtgtatcataagtccttggctgtttaatatatttaatttgaacttgtcctgacatagtggatgctcactaatatttgtctataaaactaaaggatcttaaaaagataacaaaacacttaaattttgttactatggtagacttacctgtgcaaatgatttataagttctagagctttatttattaccgataataatcagtcagatcaaaactacttgtaaaatgcaaacatctgaaaaccatcattctgaactatagtaacataagaatattcatttagagccactaatttgcaaggtgttcgccaatcaagagaaaagtgctaagaattctaaccaaacctgagaagcagaaactgagaatttcaggaagatctttgtagatcagagtactgacattaagcatttttaaaaattgagttaaaatgcaaaaatagaaattatttttgcttgcttttcccaacactgtaccttcttgcaaatagaacataagaatgtccttatatcaggatatctgtagtgttctattggatactagccaaaatttatctgtctttctatctttctatccatccatccatccatccatccatccatccatccaagatttgatgtttgaaaatgagactgactttcatttataggtattacagttgaaatggatttcaaggcaattaagaaagctgaaaattatatgaagatttttttttttattttgaaagtgaagtgcagtcaattggtccattattaggctgttgtattgaaccagtatttactgagtgacttctatattgtatgctgattatcttgttaatctgattttgaatgtaaggcgagaaaaatttgagaaatatataactgaacaaagaccattagtaaatagtagag

SEQ ID NO: 109024 - DNA, 1029 bp, Homo sapiens
ccaggtgcatatctgttcataattgcatgtcattctgatggggaaattacttgagagaaaccaaagtattcatcctgctttctgagtcaaaaaactaacaaaagaaatattgcattaattttcaaatgatgatattacatttagtgcctaggacccatatatcaaaatctgaaaactgctcagttactgtatgcgcttaatcttaatggtatctgtggatgtcaagggcatggaggaaattaaatcggaaagtgcagatagacctaagaagacattatctcttgatgattgcagttttgataggtatttcagtgaatttcattttcgcagaatggtggaagatgagttagccaccagattttctcatttttcttctacatgatttatgtgagttgagtataaaactttttatgggagtgcagttaccgaagatgagaggtaaattaatgcactgggtttccatctcagcttcatgcacaattgtcagagctgtacatatgtaatggtccccatcattattcagggttgtttacattcaaaatatgtaatgaaatctgttcagaataatgagggaaataaaagtttagaaaattgtaaaggtcatgaagtttgagaaatgatgcactgctcccaaaataacatttaggcaatataaattacattattatgcaccaactctgccttatagagacatgaagataaagtgctttcgactagtaaaatgctgttagcgctctctgaagtatgagaatgtgtaaaatgtttctgatttcatattctgttttgtgcatattgtgaaaaaatatatttaagggatcttgatgtggtatctgcttttataaacctctaagttttaaacatattttcaagtcctcaaattaattcattctgaaactaatttttataattattggtctgattttctattttttgaactatgataaaaataattctagcatttaataaacgtttaataaatgtttttaagtggaatcttagtgatggaaatgacagaaggccaactagaat

SEQ ID NO: 109025 - DNA, 1090 bp, Homo sapiens
aatttagcaaaataaatgctttaaatgtaatcatcaaactttaatcacaatatttcctacataacaataaacctaagttcaattttttaaattggtttattcaaaaattaattatgttatttggtttttcgcaggaacgaatacaaatcttgattacatagcttttgtgtgttacctttaagggagttgtaatcaagtactaactgtaaataacaaatgtaacatggttagctgtatccaggtttattctaaagttaagtgtagcatattctgagagtttgataaatttagagaagcaacttttaaaaatatgttttaaaataacacaaatcaatactagttgaggaacacctgatttccatttaaagaatgttatataaacattaaatataaagtaatgtagtttagaaaattttgaagtatcttaaaaggtaattgctaaaatgtctcataaattgttattcccagatacatggtactcatatgtcaaaatttacaatgaaatttctgtaacatcacttttaatgcaatgccaatattacttctttcttccctccttcattcactcaatcacctttgttacaatttataaaatgtttatactaatctactctcctcgtttgtcagtttctaaataaatgtgtatttcaagaagaaattttacagtgacaaaagtggcacttattaaaatacacgtgcttgcttttgtcagtcattgatatgtcattgatatgtctttcttatatctccaatcaaaattaatcattccctatactgaactaccataccaacttacagtacctctctaacagtgttaagaattagaatactttatgctcattattatatctatatcttacctaccatattaaactatgaattccttacggttaaactcatgtttgtactgcttatatagtcccttagcacctggtatatcggttgtaaaaagtatatgctaatttttttcatttattggatgaatattttaaatgctccagaacagcgtattcttcaaataaatatttattatgaatagatgtataatctaatttttaaatccagcctttaatatttagatttaaaaatt

SEQ ID NO: 109026 - DNA, 1015 bp, Homo sapiens
tatatcctcacaaatttatcagatctagattatatgtatggccatatattatctgaaatatttattgccgcagtataatgctaagtgtattgctaacaggtcattctttaccttttcatttataaaattggcttcagttttagttttttattttgatgaagcccaattgattaatttgtcttttatgtactatggttttggtgatgtgtttaagaattctttgactaatcccagattatgatttttttcttacattttctttcttttgaaagaaaaattaaaatggaggagttagtcttaaatgtaacatgtaaaaccataaaactttatattttatggcttttatttatataaaatataactttatattttatggttttacactttacatttaagactaactcctccattttaattttttaaataaggtgtaatgtttaggttgagattttcattgttctaaagaaaatgagatcagtgtcatttagtaatttccctaattacattggactaactcactggactgtatgttctggataccatgtactcttcaagtgctgtatgttttatttctcaaggtactataatgctgtgacttagattttagataccatgttcacttgcatatagacattaaatactttacttttttaaaaatatataagatctatattttctgagtgctgatattttactttgaatcttaatgtgctcttcaaaaatgtatataacttattcaaacaataagttttaatgagtagtacaatagtcctctcttatacatggtggatgtcttccaagcgtccagttggtgtctcaaaccatgggtagtacaaaaccctgtatctatatctatatttatctatctatatatctaatttatatctgtatctagatacacacacacatatacacacgctatattttttcctatacatacatacctatgataaagtttaatttatagattaggtaagagattaataatgataataaaatggaacaattataataa

SEQ ID NO: 109027 - DNA, 1008 bp, Homo sapiens
gccaagatgggaggatcatttgagcccaggagttcgagaccagcctaggcaacatggtaaaaccctgtctctacaaaaaaatacaaaaattagccaggcatggtggcacatgcttctggtcctagcctcttgggaggctgaggtgggacattgcttgtgcccgagtgaagtcaagggttccgtgagctgtgattgcgccactgcactccagtgtgggtgacagagtaagaccctgtctcaaaaaaaatagaaattacatttaaaacttctacatctttcccagcagttttaacaatacctatagtagtactacatcagagaacattttagctgttaatcttttgtaagtaagtcattgtagagaaacagaggatctagctgtctgaaaaacatttagatgctgatgtgctcattttaactgctgtttgatggattttataataaatatactaagatgttacctagcttcaaaagcagaagatatatgacataacctgactttttacacttaaactttaagacagcgcttgacagaaaagacagtaaaacatgattatttcacaggggatggagggaaaacaggaagtttaggtaaggactcctttgtctccatcacttttgctgttgcctttgtttgtcttgatagccccattccaaacattatctagattttctgcaaaaacgtattatcatcttatcccaaatgtgtccatgggtctaaagaatttagaagagagatttttccaaaagatattttttatcagtatgagaagacaatacctgtaacacaattttctttgaagccttctcaatattttacttttaatagaattgacacatgcacctttaaaattatatttctaatgttataagaaaagatagaaatttctttttgtacatatgtggtaaaacaacttataaaatctctgcataacagtatttcattttctgcatagtatctacaacctttggattgtaccttatagttttcaaagcactttaataaat

SEQ ID NO: 109028 - DNA, 1062 bp, Homo sapiens
catgagctgattaatggagtttggtttcatagccattattcattcacgaacacctgatatctttcccataaacaaattgtgtttgtccaaattaagaaattaaatgaagcatttgatgagtttatgattgacccttctaactcagagcccattagtcattgtcgttatcatagaaaactctttgactaatgtgctgtctaaagaagcatgtggatttattatgacttctgattaatgcttgctgcaagccaaactactagattataataattttttgattctcattttagcagtcattgaagaatttcatctctgatgaaatgcgtttatgtcccattagatttagggatgattacaagttattgagtggataaatttttaaggtattatatgttttagaaaacatacagtatatgctttaaaaaaaggcattttttaaaaaagctgttttttgtcttttaactttgtggacatcatctttcccttttaaggtaatgagcctattatttagattttatgaactagtacttattaatttattaagaaatttaaataggagaagtacatgtatgaatttataacacttgaagttcaacttatcaatttaaaatatttattttaaaattgtatgtaatcttgtttaatacattttagttttgacaacaaagtaaatccctctttgcccaatttattctcattataaagtaagaacaagatttccaccttaaaaaaagctctttaatagacgaatatagctaaaccactgttaacgtaggtcttgtagtgagatacctgctagaggctatattatatgaccaacacactattattatgaaactaaggacctcaatatggccaagctgttgtttaatttgtattggggggaaaaggcagtttaaaagatggaaacattgattgactttcatcagaatccatgttattaacagagtttacaaggcagaaatgtagggtttatagtctttgttgttaagtaaattgacttatatgcctcttaaaatggggaagaggtgagcagcatgcatgttcacaggaccataatgt

SEQ ID NO: 109029 - DNA, 1051 bp, Homo sapiens
ttccccctttctactactttttatatttggcctattaaaagctggacgttttaggcaaatcagaccctcatcagtctactttttataaacttcgtatgtccatatttatactggcaatgatctgaagagaggaagtataggcacagtatcatcaatattcaaaaagttaaggcaagtatatctttaaaatttttctttaaatggttattatttatataactgttggagctgacagatgaatgactttaagagttgtattatagatctactaaacctaaaaataaactagtagaatattttctatgtaattagtccaaaagctccaaaatcagaaaattaatagaggcagaattattttatgtccctcattatctgttgcttagtgtagtcattcaccattttgtatattaataaacattaatataagctattttgtaacagtttctctttaagttagaatataagaattaaagaacatttgtcatttgctgactcatacttctatcaaaggtacatgctgtcaggaccaattagttatcatttatacttttctctgttgtcctcattggttggatctagatttgcctttaagctgtatgtatgttattgatattttctttaaagacttcagctagagccagatgataaaatgagttgtgctgtccagcagatacatttacaatattcagctgtttgtaggtgatttttctaggctataacaaaataaaacctaaagtatcatattcactctgctgtttttatgggtgctaatacactttgaataaaaccctcagttactaagcatttttgagtcccaataagacagtcccatgacattagtggtatctttataacctttttaacttctagtttctctgacagagctctacaataacagcaatgggtttgcccttggcaagcaaaaactcattctgagaggataataggtatttactatttagatagctggcaataaaatttctctcaatgagattttcctgagaaactataaactgattaaattactttcttttaatggactggaaaagcg

SEQ ID NO: 109030 - DNA, 1033 bp, Homo sapiens
atagaatatataatattataaagcaattattgtaaatcagtacttgtgttacaccatccagatcaacaaacactttgccagcacctcagaagcccccatcttctgatagttcctgtcagaactatcaccttctcttttattatgttgagcactttcttgcttttctttgtagtttcactatgtattgctaagtactacagttaagttttgcttcttttgaatgggaatcatacagtatgcattctctgggtgttctgtttctcagtgttgttcttaagattcatctatgtgcatgtagctgcagcatgttcattttgtgctatataatatttcattttatgaacatattacaaactttttttaaccgaaatttctgctgttgatggacttttgagttgttgtcagtttgatgctaatatgaataaggctgctttgaacattcttgaaaatgtctgtgtcctggcacaggttgatcttctgtatactctatacctaaaagtggaattgctgtgttgtagagtatgtataattttaaatttactaggcaatgtcaaatttttccaaagtggatatacgaattaatttttttcaccagtagtatgtaagaattcccattgctctgccttctcaccaatacttaatatttctagacttttttatgttagccaaacttatatcattctactttctcttttttttttgtttgtttattttttaaggcaaagtctcacaatgtcactcaggctggagtgcagtggtgccatcatagttcattgcagccttgaactgctaagctcaagcaatcctcctacctcagcctccagagacactgggattacaggcacacactaccacacctggcagcattttaatttatatttctccagttaccaaaatggtttaccagcttttcatgtttattaggcatttggattttttattttatgaagtatctacttgagtgtttaggccattttagtgtttgtttgtttctttttccttattgacttgaaggagctattggtatatcctg

SEQ ID NO: 109031 - DNA, 1075 bp, Homo sapiens
catcaatctgcttttctgacagcattttatttatgttagagaaatctctgcttcacatgcaaattgttttccttttttcttcctttcctctcctgtagcttttatgtagaaatcagaagtttcctacctctgtggaaaaaatcacactgagatttctctaaggaggcaatatagtaaagtaggaaaagccattataattttctgaaaaacggttttcactatggaaaaaaagatgagacatacgagtgattaggtcatttgcaaattttatagtgcatctgaatgattgggtagaggaacttaaattagctgattacacactgtatgccagggtgctgtatgtttaacactttaattcatttgatcttcagaacatacctatagggagaatattaatatcaaaatttttatacagatttattaatcagttcttatttattaatatatatcctatatattattttatcctatatattatttgaaggattctatagcaaagtaataaaatggtgatatgtgacttattaaaaaaaatcagaaaaaaggaaaaatatacattaattagtcaagaaaggagaaaaataaaacaaaattcacatatcagaagagcctatcaaattgcttttacttgtttcgggtttcctgacaatctaagcccaaagttgattgtcaaagagaactataagttttgcagaatagcttttcctagaagggaatcacatgagacttcatatatgtgattttcttaataagtaaaaagtggtaaacacacaagtgttatcttttgtggttattactatctttttatcatcatgatcattatcatcactatgtgatgtagtatataacatcctcaagatcataattgcaagaaatgcaatcacatgtgtcacacacctcttaacttttattgtccatcaataaaagccaaggatatgaccattaaaagcaacatagtaaagtaaagtctgttcagaaaatatgctccaaagagatagcactctcatgggtctgcttgaatctagttaaaacctgttctatctggagaaacagggagaatacttgtttttacaat

SEQ ID NO: 109032 - DNA, 1098 bp, Homo sapiens
ggcaagctgagacaagttagtcatattagaaccttggtacattttcagaacaaagaagatcagtatggattgactcataaggagtaagatgatcgagaatggtctggatggagctgttaagaagataggcaaagaataggtgattcgtggccttataagccatgataattttgaggttttgctttttatcctaagtcaaaaactattgtaggttgtggcatgattagaagtcattctttgagatccacctgcctaagaagaatagatttgatggtgatggtaaatgttatggtagtggtagtgggaatgaggttatcacaaaactaattttaggaaggctagtaagatcattgcagtaattaaagtgaaagattctgatggactagggtagtggcagtaaagatggaaataagtggactgatgaaaatattttatatgttagatgtagaatggataaaattcaggattaatggttgtgagaaggtgaaatgatacaaacagaaaaaatgggcacccagagaatttgagataatagaatattcttaatgaaactataaaataaatatgttaaaatgattcaaggcataaaagaagaaatagaaaccatcatgtacaaacacaataggatgaaaaatgcttaggcatgcaattggacccgaattttaaaacttccttgcctgcccacagaccttaccatcataaacaacaaatggcagagtttataggtcattttgcaaatttttcttagaaaaattcatagctaagtaactttgaaaacaactgagcttttgctgtgtggttcagacattattaaatgttattcatccctatccattcctaccctcataatagaagcttttttgatgatacatatgtttggttttcatcagaaattgattttatttgatgtatataaactaagtcgggagaagtttcagtttttcttttttattattattattattattatactttaagttttagggtacatgtgcacaatgtgcaggttagttacatatgtatacatgtgccatgctggtgcgctgcacccactaactcatcatctagcattaggtatatctcccaatgctatccctc

SEQ ID NO: 109033 - DNA, 1012 bp, Homo sapiens
taaggtcacttaataattttgtgaccctgagcaattgttaaacccctctgtgcctcagttttcttaactgtaaaatgagtatgaaaaaccatagagaaccatattaaatcattcattgaatcagttaatacatgtaaaatgtttagaaagatgtctggcacatataaagggtatataataaaggctgattattttagtggactgcgaattggcacataacgtgtattataacctagtctgcctccctgtgtggcaaaggctagaaagcaaaaatctacatgtttgataatcttttgtatctaaaattctggatatgagttaggtcccaccagttatgtgtattcacatgcagtttttttccacatggaattttgaaaatggaagtggtgtggtaggctatctacttgctgcttcagctgttgctactagcgagcacagctatggagacctgaggtatttctctagcagtgtgccaaacatctagccactagctttatgcaggtcgaaaggcaggtgcactagtagcttcttgatttgcagctgtagcaggttattcttgaacttctcagttcaaatggcagcctcctgatttctcaccgccctgagaggtagagggagcagcgccctagcaagctagttctgcagtgttgatttaggcatcattattagaggcacagcccagagctggtactttcagcccttctaataattttattattcatccaatttctggtgtttaatccacttttgtttaaaaaaatgtttgaattaaagagaaagcctgaccaataggaaaatgatatacacattagggcatttacactatgaaatattatgctgctgttaacaaataataaattaactctccgtcagttaacctggagagatttccatgatacgttttggagtgtgaaaaacaaagtacataaaatctatggatatgatttcagttatagtaaaagcaatagcaaaatttatgtatgcgtgtgtatacatgtcttgtattttatac

SEQ ID NO: 109034 - DNA, 1019 bp, Homo sapiens
agtctgagaaaatataagggagtgtggggagttggtatggggttattgccatttgtagtaaagacagcatagtaagttgtaggaaatgaaaatggacactaactatggatgctgactaaggaggagcaatataaaaacatccatgttaatttctaaaatattggtttttggtagagtcaataaatagcatgtatacactgtttcatagggagcctctgcagcaaaaatagaaaaaaatggtcaaatgtgttataggttgttacaaaattaattacagtttttgctattttaatggcaaaaaccattaaaatagcaaaaactgcaattactaaaaatggcaaaaaccgcaattacttttgcactaacttaatagcaacagcttagcaaaacaacagaggaagtaggatgtctataagcatggaatagaaatgactttcttggcgtccagggtgggtagtgaaggaagcgaagcctagaggggacagttagccggggagagtggaagaaccaagggactggaacttgtgtacaagattagtaaaagatgtaattactttggtaaatgaagtgcttaatagtagatctggtatccgaacaggatcatgaatcattagagcaggtctgaccacttgttcgttatgctctttggtgtcaaatttcatggcacatctagtaagattcagtatccctgtttgtaaaatgggattgccacctttttgagaatacaaaaatttgcagaataaattaaatcacatatgaatgccatgagttcttcctttattcacacttaaatcataatattataaagcagtcagaaagacaaaaagaacattttttccagatttccttaatagtcaatgaggagtttatcctaaggactcaatttaagtaattgttcccttcaagtgaactcagattctttatggaggacatactgattgttggtaaaattttcaagtgtgtgcttttaagattaattattatctatactatttcaacataattcaaaagattttcta

SEQ ID NO: 109035 - DNA, 1174 bp, Homo sapiens
ctaaatataaactattgttgttactcagaattgcaacacaaaagagtatgacgattattcttttatctttcatccctttagtgacttttatcaactcaaaaaatatttcctgaatattcactacatccaggatactgctctaagctgtatgaaaaatcagtcaaagagaaaatcaaagcccatatactcaaagagcttacattctagaggataagggggagacagaaaataaaatgaaaacaaatcataaaatacactaaattcaaataagggttattgttttcacatcctgtgtgaccttaggtagtccctttgaaccaagtttccccatctgttaataagtatgataataatctatctactatctaaatatgtagttacatagtgcgtatgaaaccattttatagactttataaaatattagttactgcttttgtttgtctggtttttagcacaatttggcatactcaccatagtatgcacctttagggatgccgaaatgaaagatatggttctctgttgctctcaaagaacttacagtcaatttaggaaaacatggcaaatgaacctgaaatggtagcagagtacatgatatagtaatgtatagttatgggctaaattgtttaaggttactaaatgagacagagatttacattaaagcaagatgtatattttttctgttttcactagattgacgttattgaaacttcagaaactgtattttgtgtgtttctatccaagatgagtataaaatttattttacttggctaagttttctgtgttcttgtagtaacaattaaataccagcacagaagcaactccatttgatcatattattactattacctgtgaggaaaaattatttttttgagacggagtctcgctctgtcgcccaggctggagtgcagtagcacaatcttggctcactgcaagctctgcctcctgggttcatgccattctcctgcctcagcctcccgagtcgctggtactacaggtgcctgccaccatgcccggctaattttttgtatttttagtacagatggggtttcaccttgttagccaggttggtctcgatctcctgacctcatgatccgcctgcctcggcctcccaaagtgctgggattacaggcgtgagccaccgcgcccggccagaaaaattattttctacaaatac

SEQ ID NO: 109036 - DNA, 1096 bp, Homo sapiens
tgagattagatgttggatgttacatgtaatctgcacagaaatcaaattatttaacctctaagcccacaataccccctcctgctggtttgctgttaaatattcagtattttcttgtcatgaatacaaatggaggacaaattagaatctacagacagctgacctgagcttcagattagagactggggggcttgtgctattttaaatgttttaattatcatactcccagtagccatttgaaggacacacataaaatcattttcaacaaaagaaaaagaaaaagctcatcctccttcttcctcttaatatgaatgtttgactgtgattacatttgcacttccattggacctatgctaatttactgcattaaattaggtctattagtggtagtaattttttaaacactaaacattctcagtaatattttcagttggtgtgtttgccttgttgcaaggatgatttgtatttctcatcttatttcatagacagtagatcttcggtgtttaagtataaagcagatactttatttaaacaacagatctggtaattcccattgaatatggtaaaaatatatgggaataatggactaatttagatgtgataacatgtatttgcattagcaaagaatagagaacccatgtgaaatgagctgaaaagatcattctgggaatgaaaaatatttaatgtgtgacagtctgagatttgtctttaaatattgatgcttacttgaaaactttcacaatttaaaggggttacagattacagtgttgtattcattgattaaataaaaatgtttataggtatttatagagcaaggaaataaatgtaatctttaaaaagacaaatttaagtttgttcatttaaaaagtaagtttatattaattttattctcaagaatatattattctggtgcctacagtcttgaatttgcatttttttgtttcttttatatattggtataatgttgatttgattagttacgcctgactagtaagcagtgaaacatttttatatactcttgggaaataaatttggcagaaaagcagcatgagtagatttaattatcactctgagaccttttccttttctagcttagtga

SEQ ID NO: 109037 - DNA, 1714 bp, Homo sapiens
attcaaaagtgcttgcttgactatttaacagccatacagattatcatttctctaagtatttagcaatactctaccacatcctcatcccttttttagaaccattacagatattttcagactaagaaaatgcaaatatattgtattactcttttaaatgttcattcctctcccagtctacaagtgttagttgatctaatgactaattgataaatcacattctaatgtcccttacctgacttctagtgttgactgagcagcattgacctcttacagttaatggttgttcaaagggagaggtcattatggaaactggatcactgccttgctatttcattcacatccttctgttggcaaaatcccctatctcttccaggcaccatgttaaatgctagggctgtgaagataaattaggcaagcttcttgttctaaaaaagtttgcagcctattgagggggagggggaggaatatgtcatgtgcataaacatgtataaaacaaagtagaaataagctccagtaaagaaatgctggtagactgcttgtgagaagggagagattacttgcagctgagagaattggggaatgccttgaggaaattgcttacatttttcaaatctgtcagtatgaacaagcttggagtaaacatataggtggtgggggaggtgggagaacattttttaagtttatattaaatgcctttaccagtgctagaaccaaaacttaggttacctaattttagctccacaacaaccctgtgaattatgtattattcttattttataaataaagaaactggacaagttaagtgacttcctcaaggtcctacagctaataaatagtagagattgcactggaaaattattttcctagcattatactcagagctctttttactgtgttacaaccaactagtgtagcccacacagcaactggatctggatcttccaccgcagcatgtaactataccagttacatgtttcccaaacctggcaaacatcagaatcacttgagagttgtttttaaaatatctcgattgcaaacaccttatatttttcctaattttgaggagtcagcccaagaacctgtgtatgttcttaaagtttctcagctgattcttattttcattcaatactgttgcacagataagcacttggaaacaactgctttaagcagtagagctaaccaattacaaacatgatttaccacatactacaagaatgaatatgtagtcatgtacctatattgaatcacattcttttttaaccagtaactgatttaaatattcaatttataatttggaagtgccatgatttccgatcagaatatttctggatctctgaaaaatagcaaactatacttctttgataccatgacacactttttatttttcacgtgttttaacatctctgaaatcaagatgcatcttacaattaacgtcatcttaaaatcactgttcgccggatagcagctgtgactcttgatgttattgtctatttgatgaacttggttgttattcctggccacatgaaaggtcaactaagtcctcaactggctatcaggaaaacatttaaagatcacttgaggaaggaatattatccctgagttgtgatccgaaaaccttcactggcaccttctgatgaagtcaaaaaagtgcctgaataaaaaactggccaggcagtggctcatacctgtcatcccagcactttgggaggctgag

SEQ ID NO: 109038 - DNA, 1053 bp, Homo sapiens
agatagggactaaggattgcagtgctaagaagtacacccaggtgatgccgatacaattggtctggagagcacacttcgagaaccactggaatagaccttcattatagtaaaagagtaatagggacccatggaaagacagcattcactgagatagcctgagtcttctgaaaatttaccaccctttcccagagttggccttgtggcattatggacatgaacactgttttacaaaacatgctgaagactgccctcatccatgatggcttaacatgtggaatttgcaaagctgccaaagccttagacaagttccaagcccacctttacatgtttgcatccagctttggtctgtgatgagcctgtgtatgtcatgttggtggtggccctttgtgctgaacaccaaatctacctaagtaaggttgatgaccgtaagaaactaggggaagagataggcctcagagagggaaaaccctataaagtcattggttgcaattgtgtagtagttaaggactatggcaaagaatctcaggccaaggatgtcattgacgagtacttcagatacaaaaaaaataagcaaataaaaattttggcttatggaaaaaaagagagagggtttaagtagagatgaaaagcagaatataaaatagaatatatactatgaaaaaatttttaatttaaaattttttaattgtggtaaaataatacataagaaatcttaccgtcttaaccattttaagtatacagttcagtagtgttatgtatattcacactgttgtacaacagatctccagaactttttcatcttgcaaaactgaaactctatacccattaaactataactcccccttccccctcccccctagcccctggcaaccaccattaggagtgtacctacttttttttccataagttattggggtacaggtggtatttcgttacatgagtaagttcttcagtggtgatttgtgagattttggtgcacccatcacctgagcagtatacactgcaccacatttgtagtcttctatcccttgcccccctcccactcttcccccc

SEQ ID NO: 109039 - DNA, 1052 bp, Homo sapiens
cctgtgctaaccctggtctgggtgttcaccatttcttgcccggacttctgtaatagcctcacaagtaactggtttctttactctcttacattagagtgaccagcggtttctctactctctcgtattagagagtgaccagtgttttctttactatctcttgtgctagaaagggaccagtggctagttcagactgagtgctctgggaaggtctccctaaggagctgacatttaagctaaaatctgaataacaaggagggacttgccacccaaagagcattctagatggaggaaacaccttctgtaaagattataagctaaaaaataaatttcaaatgcttaagaaccctgaagaaggccagtttggcaaggggtagagatttggttaaagagtttagcaggagccagattataccagccttcgtaagtaagagcataaaatgtaaactttattctaaatgagttaagaggccaattaaaagtgatgctttgaatttaaggggtgagagagaagaattgaagatgtggcatatgagtctaaagtttgggaaagatgttaaggctagagctaaagatttgagggtcaccagcctacaaatggtgtttataactatatgttacctagagagagaatatagataaagaagagaaaggagcctacattgagccttggagtactctaatgttagaggtgccagtagagaaaaatgaggaattgtgaccagtgaggaaaaggaaaaccagaagtgtatgatgtcatggaagccaaatgaaaaaaaagtttcaggaatgaagaagtggtcacttctgttgaatgacggactggagaagaaatagaaatagaatccttctattaaggtcagccttgagtagtttcaaggacagtcaaaggtagtttttaaatactctctagaaattcttatgagaggtaaacaagtatcttccacttttccaaatttaatttggaaaattaaattggcccattctattttgtagcagaatttcagagtggttgataaccttttggacaagatcaggttttcttaaagcttaca

SEQ ID NO: 109040 - DNA, 1045 bp, Homo sapiens
tttaaaggatcaaagttgtacataaaattgataaaataagcacgtaaaatcataactattaatcatgtaaggttatcaaagattgaaaggctacagagcagcctagtgcaatgggaagcgtagaggatgtttgaagtactaagacttggtttcatatccaaaatctagctctaatagtatatcttaaacttagaaatgagtatattacgtattaccaaaaattaggatcaagtgaaacatgctaaggcacttgcaaacacaacaaatccctgttcctacccactgtatagtcagatcttaactgcttgcagataaaagttctaaataagaattagtttgatttgccaatgaactctgagagagcaactggaaatctcaaccagaaatctccaacacctagcctagcacctggcataaatacatgttaactaaattaatttcctatttctgaaccccagtgtttttattggctctgttcagagaaattaaggcacatggggccatagactattttctctaagcttatgagccgaaacataatatgcttacaagaagagacattagaactcataactttatactgactaatgttcaaatacaattatgttaggtatccatttgcttctgacatcacaaaagaacagatcacaaaagacttggacttaagctgtctgcttttccttgcataataagtcccctggttcagggaatccagtcattatagaatttagcctaactgcttctaatccatgtaggactttttattaaagatgaaaactagtaaagaattaaccatgagaggaaataaaagattaattcaagtcagtcatcaccgtatctatatcttaagaagttaatagttcaaaatctttttttttttttttttttttttactggtagaagacttctgaatatactcgccgcttctgaatatactcccagccccatggtgttaggggtaggttgcaactatgtaactccaagctgactgggctggcaccaacatcatcagcactgctaacatcttccagcaagttttagttca

SEQ ID NO: 109041 - DNA, 1106 bp, Homo sapiens
caatttaaaacatttttatgtctattttcatacaatagagctgaggtactgtaaagctgaaaatgtaaatctcctgtgaatctttcaaattttaatttaacatgcgtttacaaccagtaaaatgattcccacattgaaacaaaaaagctatgttggtgtattttcatattgtgagtaaggcaaactggctttctcctatctgctctgtcactttgttagttctgaagtgatctttaaagaaacacaaagataatgatgtttttctgtaatctttctccttctttcctttataatttttccaatgctattttgttaagcattggttttggcaagcctctatgataacacttttatttgtattaggagctggttgtatgtccaaatttaaagctacaaacactgcaagctttagacatcaagtactgtttgtgaggtcacctctgacatttaatactaatgatttcctttacaactccaaatagagaatatgtttagagaaaaaattcaagtggtccaacatttcattcatatgagacatcatcctgaagtcagaaataatgtcttttggttgggaattagtgactgtgaaataattctagtgaaattaactaagacctatacagacaaatgtagttttcatattgacattgaagttggattacacagactagtacccattatgactttcctttgccatattaacattattatatatgtaattaataaaaaatttatctacttgtatgggatgtgttaatattaataaattagctgggcaaagaatcttctctcatttcacatgctcaattagtacattgcataattaaaatctagaggagctttcattgtataaagcatgtgggactatttactcttacatggcactctgacagtgcttggttttattatgtgggaagatatattcttccaaaggtgggagtattggctgtggtggctgctacttgcaagcatttcattctcatctgattatttctcacaagagaaaagactggtttcagctgtcagggacacatcttcataagagccatctttcccacaaatagactagaacttgcacaagactataatcattataaattgtgatt

SEQ ID NO: 109042 - DNA, 1594 bp, Homo sapiens
ttctacatccataaattgtattaatggctgtataatatcctgttgatgtctcctgatggttatttttcctctgttatcaaataagtagttttaacttcagagattttaagtacatgtttattatctttttaaaataaaattttaagatggaattacttgttaaaggctaacattgttttaatacatgtttccaagtcaccctctgaaaatattctaccaattcaaattccacccaaaagttcaaagagatatctgcctcccacagatatcttggttaacaccaaatcctatcgggtttctcatgtttactgacctaataggtaaaaattggcctgtttccattagcacttcttttgttattagtgagattaaagtcttttcaattaccatatactttttaaaataatttattcaggagagatatattgagcatatactacatgttaggcataggaccagatagccctggataatctgtggtccttgcgttgccattttgttgatttcctttgaacttttgatagtttgccaccacaactcctaaaaaaatggggctgtgaaatagacattcataaatgtagttgcccattttatttaatcttattcttacatattatcaggccattcatatatcctaatggaattactatgatttattttaaaacttgctttcctaatatttgtttgtgaagtttaccctgacatcccagtttttattggactctcttatgataaactagcattttcattctgtagaaatgcttattcttccacagtcaatacactgggttttctactaaacaactctttctcacttggtactaattgttaatttttccctttaaacttattttcaagtcaacgcctccaagaaagcatgcattgaaaggtaggaagtggtgctaacaggagaatatgctataaagcttcataaggtggcatttatcttggtgaatatacagtagtctgaagtcttactggacttttattagtcactacacttcaaaatgatcagaagatcagtgatagtctaacaatgaataaattcacacttgactgaaatatagaacaaagggacagtttattactttagaaagtgatatcccttcctagattctaaaatatctatatctgcaatataaggcaaggattcaggatgcccaagaagctgaattattaatgaggagattacttagcaaaaggaggtaaattatcttgtggacccttttatccagatcatggaaggatatgatggactatccctaatgcatagcaaggatttaactctcttgaggactgagttacccatgatcctagtttcaacatatttttctcctggacagttttatacactttgatataaagtttgtatccctaaaaaaaggcttttgtatgctggccaccccttcagttggtaccgtatttgtttagctgtgttaattccactaattaagctagggagcttttaccagaaaagtggctattaccagtgacatgctagacattgtgtctcctgcaacacatattgatttaactagttttactctctgaaatcgtatttcttttgtctgagtaaatagagaatctgatagtc

SEQ ID NO: 109043 - DNA, 1081 bp, Homo sapiens
aaaaaataacctcaaaaacattgattctattgaaagtcactattgtaaatgaacattttatatgaatttgcataattttattattaataacctgtctacttaaaaggatttgtagcatctgaagagtttcagggttttataaacgactctgaaaacagaaattttaggaataatgtttaggtatagttccctaatagtccaaataaactagtactataataatactctctatattaacatcaaaaccagtcacttgatttgatctgaagaagacccataacattctagtcatccagtttgaattctatggatcatttcagaatgcccaaataatctagggcattattggttttagtaatgtagcaatctggtacctacaggaggaggtacgaaacttgatgtataactaattgattggcttaatgttggcaagattacacacaagggtcaaccactgactatagaagtatcacaggtttgggggcatagcatctttattgaaatctaagccacgagcacccaaagacttaaggatctctgagtgagtcacttattagtctttgtaacgagagtgggataattgtacctaaaatggacgaccgttaggaccctctaggggtgactttttttgggcggaggtaatttttcaagtcacttctcacttgagaacctgggtgtgcctttgactacaccatattggtagtttagtatccttagtagaacttacagctagtgttgttacttatttgaactctctggcaataattatttatatttgactcgactgaatttacaatttgtttacctgtagggtcaactttcagtggatccaaatggacattcattttgttcttcctcagttatgacttattccaaaataggagatgaaccgccaaaggtttttcaggcctcaactcaaactcgtcgagctccaggaggagtaagttttctataagcattcctaaagttttataaagttaggggatgatagactgtctagatcaaattttaactattaaaatttaatctggtacaagatggtggggggacaggagggaggtgtgggggttgggggtaaggt

SEQ ID NO: 109044 - DNA, 1024 bp, Homo sapiens
aaataattagagtacagtaaaaactacactgaagagtttaaactttgatttaggtgatactttgtcaagtcattgttttgaacttgtattttactgtatattgagtaaggataaaccaggttgcattaaattgggaagattttgtgttatatattttatcattttcttctgtaaaacttgatatgcagaaaagtagaatgtgatgtctattataaaaccagagattttttttttctcattatagtggactgttttagctcttccggttactggtagtacaaccttgaccttaaacttgcctatttcagtatatttatctactattctgtgtacattttaaaggtatacattagtcttatttgccatttgaatgcaaatgtatcagagctctttgttacctaaaaaaatattttaaccattaatcatatatttttcattagtccttcatatattaagttgaatatccttaaagcaccaaaatatttgctttcttagtcagattgttcgatatggtgagattccagctgaattaagggcggcggccactgaccaccggcaggagctaattgaatgtgttgccaattcagatgaacagcttggtgagatgtttctggaagaaaaaatcccctcgatttctgatttaaaggcaagtgctttcaaaataagtcttatgttaacaacaaaaagaagtcgtttgttttttgtagggaggggacatgatgcttttatgtatgggctttattaatgaaatctcaatacatttatttaacataattggcttcctcaaaaaatacttgacatggtatacttttttttaagtgagttatgtaataacttcaaatgagaaaagttattgaggacccttaaattattggggacctgattttagtctctattagagccagcactccaaagagtgtcagttcattttattcatttgttggttgtggccacagcactattgttggcctcttccagctgctagagctaaagctccactacgtattctctaaggcctgctcag

SEQ ID NO: 109045 - DNA, 1016 bp, Homo sapiens
gattacaggcacccaccaccatccctggctaattttttgtattttcagtagagacagggtttcaccatgttggacaggctggtcttgaactcctgacctcaggtgatccactcgcctcggcctcccaaagtgctgtgattacaggcatgagacaccatgccccgccagtacatgccttttaattccatagaaataactttagaaccttgaggcactgtgttgttagtactgcagctccttcaagtaatgagttttctgtttaaagtaaaatcttgtctattgatatatggtttaaatgaaggccttttaaaaatacgtcttagcatggttgattattgtattggttctagctaattcactatagaattcaagcagagagattctgccacgcttttttatatacaatgtgtgtactgtacagtttactttttagttaccacatctttatttgtattacttgcaaatataattttgtgttatttgtttttttaggatgttgaggaagtatatgccggagacatctgtgcattgtttggcattgactgtgctagtggagacacattcacagacaaagccaacagcggcctttctatggtaagccatttaatttcaaagctacttatcactagaattttaaaagtctgtgtttttatgtagtgcatttaatacttcagaaaaacaaccacagaagttttcgttgagtaccacagtcatcaagttagttgtggctctttgaatgttggttatagctctttgaatgtcaattagacaagtgctctgtaagctaacttacctggtttttcatagtaaaaaggaaaacttggaggatccacaatcctcccaagtttagcaaggaggaaatatctccaccagatggtacctggacagtgtggctctgattcctccaccctgagacctgcttccacacttggggtgcatttctaattgttaccactaacatcaagctagtttcagtggagtgctacttccttattaactcagtagccagaaagtat

SEQ ID NO: 109046 - DNA, 1055 bp, Homo sapiens
ctgtcttgctgctactaataaaactctctcaacctttttgttctagaagagggtttgaggaaagtatcatagttaaatctgacttgactaacccgaaagattaagagctatgattaccgtgatgctttttgaaagtgcagtctagatactgtgtattaacaggaagtgtttcactgaaatccttggctttgccttgcttttgttatgcttcctagtctctatgttcccagagcatgcaactaacaaagcacagttattaggcaagtttgaggcaaaggaggcctgtggtttgcatctctcagccaaatcaaacaactttttagaccagttactgttgctttggactcttcctacaattcttcaccttctctaatcttgattgtacctgacctcccctttgaaatcccaggtttgctattaaatacaaaatgactataggaatactgttaatccaattatgaattacaatactttcgataaatattaaccccattaatagtgtattttatagaaactacttaccacttgcttgacagtttgaatttttaccattttataccatgtgtcttcagtagaattttgccatattatataaccacaggcaacccaggctaaatgtagaacgagcgtcatttctggagatacatttccaaaattgtctggtaggagacacatttatatgataatcatatatatagtattaaccttttaaaacaaaatctaaattctaaatcatgtcttagtttccttcgaatgttgtgcaaaaaataatttaattaagctatggatctataaaatttctgaggcctcttttttgttggattggattagaaatgagtatttttgcaaaagcctgtaagtttctaacatacttagcaactaacaattttaagcacagataattgagattgattttaagtttgaatcaaacaaatggttttcatgccatatttatatacctggaatattttgtgcttctagcggttccttcatggacttaagtctttgataaaatgtgttgtcttcttcatctggattctttccagtttctcctt

SEQ ID NO: 109047 - DNA, 2125 bp, Homo sapiens
tttttgtttttaaccttttaacttagaagatcttattaacaggttataattttggtttcagtggtggagcatttttttgtcattaatgtattctatttcaagacaatattttgtgattcacacactttaaattcttatatccactaagattaatgtagatgaaggagaacttagacattttacagcatatataacttacagttttgaaatgtcaagaaatattttgtgctatctgcgcagccatgttattgtgttgccaggaaaaactaacttaagtggtaggagctccacaagtatttgttaagtgactgaattaataaaaattgcaagctcatcaaatggtactctttaaatatgtgcagtttattgtatatcaattatacttcaacaaagctattcttttaaaataattagatttgaaaaaatggtgaattactctttaattctagttcttactgacgttttgtaacactagagctataatgtagtgatctgccaatgaggcaaagcagttagaggtatgcagtaggggctcaagacacagctagtgaataaacaccaattttggtgggggttttcttttaaggagtttcttagttttgcctttccgctgcttcctcattgtaaaattaagatcatgctgtctctatgatgggttatgagtaattgagttgagttgagtaattcctgaagatgaggttatgagaaagtgattgttagcattctaagcattgctttcaaaccagcttacgcccttaactaatatgcttttccaaggaattgttcatctaaatgccacgataataaaacttaaatagtaaagttgtactatttacaatagcaaagatatgtaatcaacctaaatgctcatcaatgatagactggataaagaaaatgtggtacaaacacaccaatactatgcagccataaaaaagaacaatatcatgtcctttgcagggaggggcatggatggagctagaggccattatctttagcaaactaacacaggaataaaaaaccaaataccacatgttctcgcttataaatgagagctaaattgtgagaacatatggacacatagaggggaacaacacacactggagcctattagagggtgaaggatgagaaggagaggatcagaaaaaaataactaatgggtaccaggcttaatacctgagagatgaaataatttatacaacaaacccccatgacataagtttacctatgtaacaaaactatacatgtacccctgaacttaaaagttaaaaaaaaaatagtaaagttgttaaacatttttaaaaaattatttttgaggggtgaaatacagcacacataaaaacgtacacttctgaacacaaatattttggggttcttgataatgtatctgcaagtaaaatccactcactccagaagttgtgttcattcattaacaggggtttttagatgcctgcgagaagggccctctttctggtcacaagctctctgggctccggtttgtcctgcaagatggagcacaccacatggttgattctaatgaaatctctttcatccgagcaggagaaggtgctcttaaacaaggtatgctgggtccgggcaccttagcctgtctgttttcctgatagatcatcatagcctcagaaggcaacactgttttcagtcttcttcacccagagcactaggctccacagggaatattgtaggtagtgggcaaatctttatggacttgagatcaaggtagattattatgttctctttcttgcaaagctaaaagactactgtattctcctacattctctggggctttctttcatgtatttgaattcatagataatttataagttctgtttttaatagggaagactgaaatgttcagaattctaggaaatttttaaaaggtatcttaactacagtcttatttctagtgacttattgaaatgtcaagaaatccataaatttgtaagtaatctcttcattatgacattgtatgcttttaggcattttgaggatggcaaagtattttcaaagaatttggtaaaccttattcacaatgcagatttcttgcaaaactgctaaaattgtcaacatttctcacagagtaatatttgtatttaaatgctgatgaact

SEQ ID NO: 109048 - DNA, 1283 bp, Homo sapiens
aaattcactcattagaactaattagtcgaggagggtaggtgtgagctaggatatgatttaaatttaaaatatttctaattacattcctgttgtcataattattgcacttaagctatactgtctctagaagaagcactgagtaaatatataagaaaaattgttagttttggtttattataaacaaattgatgcttctggaaaacctgtgattatatttaaacaaaatattacccttgtcatcatttctgtgttttgctgaaagcctttatttggagataatgtaacaaacctgaggcggaagtatttgtcactatcacaacttccaaattaaatgtaaatgtttgacgttttattatattctctccatattgttacatttaaacattagcactttagcagaaagaagtgttttggttatgtattaaatgggataaaaataaatacagacacactgagttttagtgtttaaatggcccaatctagtccggaatccttattttgtagatgaaaaaatttgagacctggacaaattgtgtttttccagaaggcatatagcttctttgaggtagagcaaaaactagaaacttgatcttctcattctcaatcaggtgatgaaattgttcagactagaaaaggaaagacagatcgtaggcgtggcttgattcttgcttctgagtataggaagggtaccctccacgtcccctcctgccctgtgacaaaaattattttcttataattaaaaataactgcctgccagggaccacaagaaagaatgggtttatccagcctggccaacatgtcgaaagcctgtgtctactaaaaatacaaaaattagtggtagcagatacctgtaatcccagctactcggaggctgaggcaggagaattgcttgaacctgggagacagagttgcattgagccgagattgccccattgtaatctagcttgggtgacaaaaaaaaaaaaaaaagaaagaatgggtttaccttggtcaaatttgtaacagttattatctttaaccctgacgattttcagagagaataaataactcagctggataatttagatggtaaaggacttcatcagatgttgttttaagacccttttgtattattctctgctatttaatgagttttaaggataaaaatatgataatggaaataccaatattaaaattaaatgttggaatttccatttagaagagtgactgttattactacaggaaaaatgagtctaggtcgaatattttaaccttgccgtttgtgtttgtacctttgggaaagc

SEQ ID NO: 109049 - DNA, 1144 bp, Homo sapiens
agtttgtgggtattaagagtggtcaaagacgctggggagggcagtgctgggagaagggcagcgcgcgtcttggcgaccccagcgcagttcgaactactccggagtctggtgtggagccgagagggagccccgcacttttctccccgcggagctgcgctgagtctgaaataggtgtacgcgtcagcggggcaggaaacggaaagacagtgcagtaattggtggaaagctggaagtgggcacctcgagggcctcagccccacgaacacagtcacccaggaaaagcgaaccgcgccaggccctgtcatcgaccgctgggtccgtcctcccagcgctcgcggccgctcacatgggcgtggccctgcgtgacctgccggggcgtcacgtgagctcccggagtcatgtgaccgccgtcttgacagtgttccacgggcgctgcttcctgcctgggtttggagttgtcaccactttcccctctccgtctcctgcgggcgcaatggaggaggaggatgaggaagcgcgggcgctcctggcaggcggccctgacgaggccgacagaggtgccccggccgcccctggagccctgccggccctctgcgaccccagtcgcctggcgcaccggcttttggtgctgttactgatgtgcttccttggctttggtgagccggccgggtgggttggggctgatctttaaggaattcccgactttctcttcgaggtagatcgtcatcgtggtcactggtgccacggggcctcagcgcagcttctgtcttaagctcctgggcctccttattttcccctttgcgatcgattccagccacacctgtggatgttgctagttactccgcgtccggaacgtggaggtcgagggactgagctgggcgagttttgtggcactcctttgctcttcagtaagtcccaggggctagcgactcgccctagaggcgatagatatgaaggtaactccagattttcaaggttcctcttttggcacacgtggtcggaggaaattcagaaagctttaactgttcctaaacaacttttgtttgtttggttttaggtgagacaggggcttgctctgtcacccagcccggagtgcagtgttgtgaaagtggcttactgcagcctccacctcctgggttcaagc

SEQ ID NO: 109050 - DNA, 1085 bp, Homo sapiens
ataaatggttaaaaaaaacttgccctttacagaaagaagaatgtaactactttccactttagattgtcatattttgatttgttagttgctaaacttaactgtttggaaaaaaatagttttattttcttttcatataggatatgcaagtgaataccacgaaattcatgctgctgtatgcctggtattcttggcccaatgtagttttgtgtttctttggtggctttttgatagaccgagtatttggaatacggtaagcttgaaaagaaactatgggtaaatcttacctgattgttagaaaaatacagagctagattaaggtatttctagaaagagctgaataaacttctgtattaactaataatttgcttgagttttttaaaaaaatgatttttatatctctggagttggtttttgaaacgtggtatttcagttaaggtcaggactagtaaatgctgatggtataaggtaactcagttatccataggaaaattatactcacccttgggatcaggtaaaccaggttctgaatcttatcgttgccactttctcatcttcctggctgttctgagctgtttgcagcttcctgagcttcagttctctcattgccaaaatatagatgattcctaccttgcaaggtggttatgaggattaagtgagagatggatgtacagtatttggcacataggtagtatgtgcttcctccagccccggtgagattttctatttctgcttttcttggggtgtaaaacattttgtgaccacttctgttagaggctgagcagggaataacactataaggtttgccactgttcatccttattattgtgtgtatgttgttagtggaactgaagaggaatatagactgggaatattttcagaaggcaaagaccaagatgatgaaaggtcttcaaaccatgtctggtggataaagattaaagaaactttaagagtttacacctggggactaacctttaaaatttttgaagagttaaaatatgaaggaagaattaaatttattttttttgatctcaagagagagaattagcttgaaacttctggggaacagattccttttaatatgagga

SEQ ID NO: 109051 - DNA, 2846 bp, Homo sapiens
gaaaaccaaagtgaattattactaaaggactttgtgattactaatactaatgtaaacagaaattaagattttttttttctttttctttttctcattctcattctttctttcccaaacagatggggcacaatcatttttagctgctttgtttgcattggacaggtaaggaaggccaaaacattcattgattattgacagtgacttctaaattcttatctaattaattccattggcaaagctgtgtttaattaatgcctagcttaattaagcagaacccataaatgcccatgtgatataatccatagtctattttaagccttgaaataaatgaacattaatattttaacttcacagatttattaaggagaaatattaaaactattgtagaagttgagatttatcatgttccttttgcttctctttaatactttgaatttactttttcattaatttgacatgaacttctacattataggttgtttttgccctgggtggaatatttaatgctttttggctgatggaatttggaagatttgtatttgggtaagttatgcataatttaatttatcctaatgtattattgttttagtgttcatctatgaaagatctttaaaaaaccttgtctcttctggggaattacttcaaatctttgaaacctagcttcatatgcataagagtatttcttagttgtcttagttttcctttaaaataagcaacaattttgaatggtcctaatcaactctgtgtggggtttgagtattaaatagttctctggaaatgatatttttcccaggcattttgcctgttctgttgtattaaagactatgatttgaaccacatttagaaaagtatagaccatcgatttctaggttggtgactgatggacatttcactctttcttagcaagtgatgcgagggtcctttcaaccctgtccaagagctttgcttgaatgagcacaatatgtgtaagctgactattctgtgtgaattcttatagaccagttgttctacctgaattgcattgtctgttcagtaagcctattctgagaccagccttgggcttgctgccctgagggacccagatgacagaactgactcagttttaaaagcataacttattcaagctttgcacaggtgtcaggagcatgtagacataggtgacataccccaaaaagtaaccgtcagtgagagagaaggaagaagaatgtatgtaaagttatgacagggattcagaaacagaaatgtggtcagaaatggccttacagatgaagtaggccttgacagaagtacaggatttggattattagaagagagggaaaatatttttgggctaggacagagtcacaagaaataagactatttcttatttgtcttaagactgtttcttagtccttaatactgaggtggcctcggtgtaaggatatggaggaaggaagctcctaactgaaggcccttggaggagaatcgtaaatattgaaacttactgaaggaaaattaaaacccaggaagtaggagagtgttgaatatggaaagtgaatgtggggattgattgatggagagctttgcatattgttctgaaaaatgtgagtttttatgttttcacaaagcatggaccacttttcccacatctgcattttatataatatcgatggtaatgtagtaaccaagacgactccttttgttgcctatcatggttattattgcagtatatcatgtgactcccacacttagcggtataaaactaccatttcattatgctcatggactttatgggcaggaattcggacaaagtgtagcaaggacagcttgtctttgcctctagtgtctggggcctcagctggtaagattcatggaagggtgggggctgggatcatctgaaagcttattgactcacatgtttggcacctggactgggatgcctcaaagactgggactgctgactggggcacttacatgtggcctctctttgtggtttgctgtctcatagcatgggggtagtggttcagggctccaagtgcgagtgtcggagtgaaaaggtgatgtcaccttttataactgagccttgggatcacactgtctcatttccaccatattctattggttgaagtagtcacaagcccacctggattcaaggggaggggacagaggccccatctcttgataggagaagtgccaacattttaaacctgctgcattgctaactgtagtatttctttaaagttgtgacttctggtttttttttttttttctatttttaggattggtggcgagtccttagcagttgcccagaatacatatgctgtgagctggtttaaaggcaaagaattaaacctggtgtttggacttcaacttagcatggctagaattgtaagtataatgaaaagcctgatgaagccaaatggaagcaaaagattaaatcttatagttctcttaaaaatcacaggatgaaatgtatttgtgtatggtaaattagatattaacttttatggatttctctagaacacagcatggcatttaccttgagtaaagcatttctaaccttatttcatctagtaaacagtctaaaatggttgtgtacattcattagttcaaagaatctgagcatagggagagatcctgtaagttttgttgtctaatttcttacccatttttggcatccctgctagaacctctccacatacggctgtccaggttcagtttgcaatatttccagggattgcaagcttgctctgtgatgaagcagcccacctaccttaatgaactttatgaagcgtaacctcacatagcgatgaaacctccatttacaagtagcttttactgatggctctgacttttgctctctgtag

SEQ ID NO: 109052 - DNA, 1466 bp, Homo sapiens
gagagtactgcgctttgggaggatggggcacttgggctgccagagggcaggagcgaaggccgtggactctgggaaaacatcggaaggaagagagatgaagagcctaacttggcttcatcattttttccctggtgtccattgacaattggtgcttagactgaatgaagaaatgaggactacatcagtagctgctcatcagttttcttcagtctgtattctgcattacaggactagactagttttttctagtcttttccttttaatctttaactttgaactgtgaaataatgcagtaaaagctactactgtttgctgagtatttgaatgtactcttcctcttttgtcccgatttagtaattgcagatttttctcgtgtctttatgtgacatccctttcagttgctgtttttgctgtttatgtaatgtacttctccttaggaaccttctgtttggttctcttttcaaagtctgtttttcttttttttttttttttatttagggggtataacgtgtattctttcactaatctgtgccttggctcttgcctacttggatcagagagcagagagaatccttcataaagaacaaggaaaaacaggtaagtctaaatgaaagaatgggacttaggggaattacggcctttgtgagattttataatgagatctaagttcctaatgaagtgttgtaaaaccaggtggagcttaagacatgatttttattttttatttccaaattgatttccacttttctaaatttttagatgtattttcttttccccttaaatcttttggcagaatttacattctcgattgtatatttgcaaaatggttattcttggaaaggagcaggaaaggtagatgccagtcttagtcttaggttttgctttttcttatgtctttgtaagttatcccagaaatgatgtttgtgtaatttactagaaaagtatttttttaagttgaattgcaaagattaatcacaagattttaaaaaataatcttgactatagatgaaagctccttaggtatgcaaaattatgctgatagtgtcttccctttcttctctaaggtgaagttattaaattaactgatgtaaaggacttctccttacccctgtggcttatatttatcatctgtgtctgctattatgttgctgtgttcccttttattggacttgggaagtgagtattctctatgtttccattatttcttgtctaaattatcatgagagttcaatcacataaatgtagtttttaaagcagtaaatcttgcttctctggttatagtttatattttcacaggaattactttagatcctgggatatacattttcttttagcttaaggtttagtattggttttatacttttattattcttttgaagaaatacctgtattactccactctcatgctgctaataaaaaactgccccagatagggtaatttataaaggaaaaagatttaattgact

SEQ ID NO: 109053 - DNA, 1051 bp, Homo sapiens
tcgtcatccagcctctggggtagcgctgaacctggagataactggaaaagtcagtaaatctatttaagatactgttgtggccacaaaagagcctccagcaagagggctggagtaagctaacccagaagaggtccttgctgacattataatctccctgcctgtttatgtgaggcttcttagtgagaagctgagtccagttcctggcacagaaaggcagaggggggaaaccgcacctgtggttgatattcacatggcccttctttcattcagcacaaaggtattgaatccacattgcacttaatgagacaagctcccttacctttgagcagtctagtagtggaaatagttatgggataaaaaccaatccaaaatctaatcaagtcatccctggtggaaaacatctctgaacacaaatagtatatggttcacagatactaatatttatagtgaagtgttagcctatgtgtgaagacttttgaaaatgaaatgtgtctttatatttcttccattgtagcatgcagtccattcagaatcttgggttggccatcatttccatcattgctggtatgatactggattctcgggggtatttgtttttggaagtgttcttcattgcctgtgtttcttgtgagtattccgtatgacaacattttgtttcttttactacataacagaatgttcttatttttacttaggcatagctcccagatttgcctaattctcacctgtgaattagaatttcatagctggtgactttctagccctctgaagattcacaggcattttttaggagattcctatccttaaaggcagtgattgagttggtttcatattctgttttaactatttacagtttaaaaaaaaaaagcattttcccacttaaagtggaacaatttgaagagtcctgagtatatccttaatgtgactatgtggaaacgttggtgtgatttaggtgtgagtactcatggttattcattaggcagttttaactgatttttatttttagtccgtaatttagtttttacctgtaatttcattggtttgaaattgg

SEQ ID NO: 109054 - DNA, 1333 bp, Homo sapiens
atatactactagaaataacctcatattaattgaaacctcagaatattaattaaaaactcagaatatttttcaaattttctacattgatcttttgtgacttttaggatcaagaagagttaaaaaattgctcagaaaaaaaatgtgtagcttagtatttgctattacatgtcttgtaatgcttggttttcattttataaggcaggtgagcttcatgtttttttcttcctctttggtaatttattgcgttatgttttgcagatgagaagttaaaatgaatgtgtcatgagaatgggcttaacacatcgttggtttgaaaacttccatttttaaaaatttagagtttagtcattagaaaaaataatggactggaaagttatatttatatccaaatatacctatttcaaagtgtatttgtgaggcctgttttagcctgtgtcttttgtattgtgtgttgctaaagaattctacttttagtaggctaatcaacaatgaaagggttagaaaattgctgtggaacatccaggtgaacttcaggaaagacagtgaaaaatggaaaacgttggagcttctgttgagataatcttcattaggtatatatcttagggatacagccttttctttatcttatagcaggaaaaaaaaacttttgagggaaatagaagggctgcgttacacaaaataaacaatggcattgtcataggccttccttttactagtagggcataatgctagggaatatgtgaagatgtttttatgaagtctctttctgatcacgaacaatagcttgcgctctactctgtagttatgtggattgccgagcaatgacccttttcaatttcttatttctgtgttactgaggaccctaatcacttagggatgtaattttatagtataaactttctgtacagtttttcttatagtctaataagtaaaaagtgtccttcaaattatgataattgcctatgtacatggataaattaaaacactgcacacggagtacttgatgtcttcttttgattttaaaaaatacaaaaacactgattttaacttttattcatgcagaagattatctagaagaaaacccaagtcagaataaagagaacttgcccaattacagtcactgaaagattatgggggtagctttttctccagagtagaactttaagtaacatatgtggttttttttatattaagtaaaatatgagtatgaagcttctctgacaaactttaaatactttttaatatttttcagccttaacatattatttgttaaagtcaaagaatgcagatattttagacaagatattaaaccaatgtatttagctgattatat

SEQ ID NO: 109055 - DNA, 1119 bp, Homo sapiens
acccctgtaatttacaaattacccagtctcaggtagtatctttatggcagtgtgagaactgactaatacatgtgtcattattgagttgttagttctttaggctctgacgccatatgactgtttcagcacatgggtgttgaatacctcacaagtgggggagagtgcaggaagtccacactacttctgctggaaggcccatgtggcctggcctcttgccttgtctctccaccgcctctgtgccccagccacagtgagctgcttacatgttttcaaatgggttgtgttcctttccctcccagcggctttgtccacactgttccctttgcttagaatgttttctccaaggctctctagaacctgtttttacctgatttataccagaaaaccttagcccccagcccagaaccattcttcctcatggaagctcttccagatccttcagggtgtattgggttcttctaagttgctgtgatcttgcagttttcctttttagcttacctcaacttaaaataatgaagaatctctgataatgtgggtgtgggtgtctctctcttccttaaattggaagctccttgagggcagggactgcgtccgttttgttatcgatgattatattgatagtgcctagcaaaagtaggcacaaaataaatatttttttgaatgatatataaaaagagtaaattagaataacccttttggaggatgaattggcaatatgaataaaaagacctaaaagggggatggtggtgggctaaatgccttttggcttagcaattccatttctaataacttgtcctaaagaaaccatcagacaaatatacatgtaaatatattttaagaaagcgtcttcactgccagattttataatagcctaaagtataatagaaagccactctaatttacaataataggggatttgttaagtacatcatattacatacctaaagtgaaatattaagtagtcattaaatggttttgttagagaacatattgacatggaataatgttgatgacattttcacacggaagattcatagtggtgccatttttataaaaacaaatatatctgcatgatatgtacaccagtgtctctgaatgatgaatttctattggcttatt

SEQ ID NO: 109056 - DNA, 1101 bp, Homo sapiens
caagtctagcaatatttagcaagtagggagatttaattgtataaaggaagagtatagatacttccaaaaatgcaatttcacattgttatgaactatgtgctgtatatcccccccacccccctgcaaaacaaatcctttaaaaagaaagccaccatgagactggggtatttattttgtcatcagtaggaaactgtctagattaatacttaaagataggggtaagaagatcatgttcctcaggggtcagtgctatttataggattttaatctgtaaaggcaacatttgagaaaggacatgattgaaatatttgaatcaaagagtatgaatagacaggaaaatatttatttgcagaatttccaaactaattcttatattattagccccgatgctgaaccttaagtcgtggcatttagagtaataaagaaatggctggcaaagggtttgtatttcatctttattacatgaattacatgcaggtcacatgcaatacacagatgctctcctatttaatcacctgaatataactacatggagatatttaacagccctgtggggtaaagggtcctggatacagaacatctggggtttgtttctggccctatctctaaccaactttatgaccacagattcctcatgaaggagcccagacacttgatcacagtgtttggcaaatagtaacaattaattaaatgaataaataatgagtgaactaaaaagctacttccagcttgaagactatggatttcattctagaaacaatgagaaatatagtataaaaatgtctccgaatcttttcatcaccttccttgttgggtgatacaaagttggttcctccactaattaaaaatccagatctatctctattagacaggttggccttcttggatgcatggtagctctcttttatttctgtagagccaatgggttaatcttaacttactagtctatacgtgtagatactttggagatggattctatgtacacctaaaattattttcttctcactttcacttacagagctatattttaatgaaaatatgtcctttaaaaaattaacatattaaatgtttttattttctagcaaaccacgagattatatt

SEQ ID NO: 109057 - DNA, 1479 bp, Homo sapiens
ccttccaagttcaggctgtgggtggaacctgttgctttagctcacgtttcccttcccctccgggctgcacgctgaggatgacctcagcgaggtgtgtgtaaggggaatggagggtaagtgcgagaaaggactcctgcctggcaaggagacaggggaagcgggtaggggcgaatgttctaaagggttgggcgagccaccagagactctttccgccacctccaatcaaggggaccttaaaggaggggaagaggtagatatcaggtgagggtgcccttggcacatccgctgcctttgcttccttagatatttcaggtacctgagtcaaacctatgctggcgttttcaaaaacgtacgggctgcctgagtctggcagctaatctcctttggaagaaggttctattaaatgaaaaataccaacacttggaaaaacatagatgcatcacagagcgcctactaaggatttcctgtgaaccaaccattctgacctgtaagaactgggaaactaggaaatgcccttttctctgtggtgattgtgaaaaatattacttaattttataacaaatcggagagaaccaatttctctgaacttccagatttgggcctgttgctaattgttcccagtgaattctagcctggaccaaatgaattccctggcgtggcacagtccagatggaagaagaggggaatgcatgggattcctaagtagggagtggctgccaccctgaggattcttctaagccctagtgggatgtggtgctgagatcctttttgaagtgatttctgtgaggcacgactctcctgtgctaggtagacctgagccagggaaggtaatctaacctttcaactcctctggaagcagcaatcttaggaataactggaaaaggggccttccggtctggccagctgttttgtaaaacggtactgatgattatttaaattgtcttttatggtaacatctgtaaacagcctgtcttgtgctccaaatacggtttgattttgagattgctgtggagccctgcctgccactccagcggggtggaggtggccctgtgagtaggaagatgtaagtaggaaacatttggtgtgctgggaattagatagctgtttttcagttcaccatatgacatggcatggcttagatcacaaaaagctccctgctctgtggcaggacacaggtagacagataagtactgatcacctggggtgatgagagagagttgtggtttcattccaagttttgaatattaggacctcctcagccacccacccagactccctctgagctctgggctcatccccctgttgcccagatggtccatgttcagggaatgcaaaataaggcctaagaaaaatgtttggcaaagtaagtctagtgccaaaaatgcatggcatttcaaagccaaatataaacatctttgaattacctgtacttttaaattattttccgaccagataatttctggatcagatgggaaagta

SEQ ID NO: 109058 - DNA, 3903 bp, Homo sapiens
ctcctgtatttgaatgggttgattttcctcctctaagactttcttcctttatgaaacccgagttattgttgacctgggggaacggggtaaatggacctgtcaggataagggaggggttcttccctcggtcgcctgactcactccctctgctgtgaatccctccttgttttgataacggagccacttacagtttcttcccggaggctactgcctcaattcaggaaagccagacagggaggggtgctggagtggaaaagagggagggaggagaggagggctgcatctataataagaagcactggcaggttcacacttgtctcaacatcttttttgcccctgagagaagagcagataaatgacttaaaagaaaaccatcatgaaggtagctcccctgtttagcactgctttgagataaagcaacagttgtaatttgaaatcattaatgatgaccctaattagggctgaagggcgtagttgaaaggagctgctttctgtgtgtggcagctgtgtggcaggtgggaaaatgcttgccttgcgggtgtaatttttgcgacaccaggaccccggggctcctgaaaattgggtgcatgcacttctgacttcaggggtgaggatggtaactgtgtttcacagagaaattgccatggttctatcagagagcgcccttggctgacagagcctgctggttagtttcccttgggaaactacttaataaattagcatactcattttaattccagctgtttaggagtttaccatggccattaacagacgtggaatctttccattacagtcaatactatctcttataccttgcaatagaaaatatccttttcccactttgtgcttgagaaaaatacctcattaatacctgggcttgaacaatgagtgggaaataagcaggaggttagtttgctattgcgtgacatttatacattccaggaaaatttagtacttgggtatacatgcaaagttagggtttgatggtgacaatgagctccattattcaaaagttgtggaacaaattgtttttgagcacccatgtatgtgctgtgtgccagggatggttctgagtgctgtagttacacatcagtccacatggggctgaaattctggtgagggaagggtagggatacagactgccttccctccaggaacttaaaatttgatggcttacctagcaccacctcatacccccacccccaacgcatcttctggttattgtgaagactatgaatctttccttcttgggcagtctttgaaaccaatggtgtatcctcacctagtgaacagtttgcatatttgcatatttgggtttctttccttcacttccagctttcctggaaatgccccttctggtcatttcctctacaagttacacagagaaatttagatttcattgtgtcaaagcaaggatgtatacagaaaaaagggagaaggaggtagcatttgaggttaatggtggattttttcatgttttggtttgtgtttgaacaaaattactagtcagtgttggtttagaatactgtttttcaaacagtaagtttcccatgaaatcaccttagcatttaaaaaaatgaaataaaatagaatgtatgatagtgtattgcagggagtcatagtaaagttggtaatttttaaaactttagttttatatgtatggtgggttgcaacataaagtttacttctcactatgggtcgctgttataaaagattgaaaagcactgatttaaatcctgtttagtgctgcctggagtacgtaagggaatttatgaccatgaggacagaaaccggagaagaacaaaggagccgtgtggaagagaaggcctgccttgaaggaactgttcaaatccaatgatattttactcctctttaaaatgtcttgtatgaatatatttaagtggcattaatacacaccactaggaatggggtatacaatgaaaaggggatagcttctcttcaccaagtaagcctattcctacttcagggcttttgcccttctgtaacctctgcttggaagcaagtgtctggttccttctcatcattccagactcagttcaactctcaccagctcagagaagctgtcccccaccacccttcctaaagtaaagtaacagcactgcaccccaactccagcactcctggtgtattgttttcttagtgcttgtcactatctgacattatcttatttagtcctctatttttggtccctctgaaatgtaggcgggagttcttgcctgttttttaactctataacctattgcctggaacatgcctgggatggagtaggttctcaaatattgaatgaatgaatgaatgaatgtttatgacaacaacacaacccatacctaatccaactcccattttacagttgagaaaattgaagcccagagaggttaagtgatttgcctcagacccagtgagaaacttatgaacagggttttgttctttcttgtgacaccagactagttccccgcccccttttttaatgcttaaaataatttgaaataaaaggaaaggaaggagctcccacctccctgaaacttaaagggtttcctattgacaagtctcttattgcacttccttagaattaaggacataagtaaactgggaaatcatcaaaacccccttacttatgagtcttcttttgtagacagggttttgtattgttttgtttcaatgacatactattgggttctgcagagcagggtagtgacagaatccatgtctcctcactccacatccagtgctctttccttcctcttagttgtggtgatgcacgcagaaggatgactgaggtctcaaaaatgggatgacaatcagctatccctaattcagataagattgagaggcaaatttaaaaatgcacaatgtttaggtgggatttaaaacctagcactgaccttcactttgcgatgggtttagaaaactaatctctctcttggtatctgtggaggatgatgagcttggatgctgtcaggaactatctttggtgtcacagcatggaagggcctggggagtcctgatggaaacactctagtgactggatccttgctccatctcagagctgggggctcaagacagacctccagcacctggtccagccctccactgtgatgtcatcacctgggacagccatatccccagtagttcgcattgtgcctggcacaaataaatgcttgaaacatgcagagagggtgaggggctctacccaaaaaccagaactactcccagaagtgccccttccatgggcagcccctgctcatctggtgtcagtgtgcttctcacagtcctgccctgggcttgtattccgtcttgtgcgtgaacactcttaataaattcaagggccatagatggagtaaagaaaggttctggggttggtgcctttgatgtcagattaggagtcctgcttgcagaagttcatgtttctcttaaattcttatcttcttgcctactctaactctggtgcacaggactggacagttttccctcttatgagagcgggccacaaacagtcggctttctctcttctgcttctccaggaccttagtgcatcactgtagccctcttgctcctgttcaaaaggctctgtggacctgttgccaagtggggtgggagggggggcactgcctcagtgtactcttcctcctaaatggaatataattacacatctttttctctgtgtttgtccctgaggcttcctgtccttcatgggacgtgttcctccatgtctagcctgttccctgtctctggagactcagcctattttgacgcttttctttaaaaatagctttattggccaggcatggtggctcaggcctgtaatcccagcactttgggaggccaaggcaggcggatcacctgaggtcaggagttcgagaccagcctggccaacgtggtgaa

SEQ ID NO: 109059 - DNA, 3903 bp, Homo sapiens; identical to SEQ ID NO: 109058

SEQ ID NO: 109060 - DNA, 3903 bp, Homo sapiens; identical to SEQ ID NO: 109058

SEQ ID NO: 109061 - DNA, 3903 bp, Homo sapiens; identical to SEQ ID NO: 109058

SEQ ID NO: 109062 - DNA, 1025 bp, Homo sapiens
tccgcctgctcagttcaagtgattctcctgcctcagcctcctgagtagctgggattacaggcagccaccatcatgcctggctaatttttgtatttttgtagagacggggtgtcaccatgttggtcaagctgatcttgaactcctgacctcaggtaatccgcccaccttcgcctcccaaagtgctgggattacaggtgtgagccactgtgccgggcctgaatatacactttcatttctcttgggtaaataactagaaataagaacggcttgatcacgtggtaggtgtatgtttacctgtgtaagaagctgcctgtcttccaaggaagtactattttactttgccatcacatgatgcttaaatcactgaaagaggtttccccttttcccattgctctattccatctgcatcctgctttccaggacacctcccttcaggtggctgggtggctgctccctccctcttaagagaaaacaacaagagagcaaggagatcacttgtcacatccaaccagtctttactcctgttgtttaaaaaaggaaaggaatcatttttaaattagagaagagctctagctgtagactcaacacattttaagtgcagttttattattttttagtgcctctgacaggtgcattttcctcatttaatgagaagataagaacaattttaattgacacgttaattgaaagcaaattcttctgacgaagttatttccaaagtacttgaaaataatgtgtctttttatttgtttatactattagctagtagcacactttttaaattacctacatttcttcctagaatggtactaattataggttattttcaatgtattattctgtaagaattacagcccagttacttcttccccatcaatgacacactactaaagtagcttgaatggctgagtagtttatttccttagttacttgggctatgtttaaattacacaagtgtctgtttttgtagactgaattaagatgtctttagtattcctacaaaatacagtaaagtttataagttt

SEQ ID NO: 109063 - DNA, 1025 bp, Homo sapiens; identical to SEQ ID NO: 109062

SEQ ID NO: 109064 - DNA, 1025 bp, Homo sapiens; identical to SEQ ID NO: 109062

SEQ ID NO: 109065 - DNA, 1025 bp, Homo sapiens; identical to SEQ ID NO: 109062

SEQ ID NO: 109066 - DNA, 5639 bp, Homo sapiens
gcagcctggggcacagcattgaaaacattctgtgtggaatgcagctatcacttattcctgttagttagagagcatgacatgacagtgttaaaatttttttttctttttactgtaactggaaattaccagggtgaaatgtattctgtgtttcaaccttttaccttgaaatatctagtactataatgaaaagttctttgcctactttcctatttatgatgatttttgcttaagagctgcaaaggctgctctgtctactggcatgtactctagacttcaaagaaatatggttaggtttttgtctttgttgtttttttttttttttaaattaggttgcaggcaaaccacatgtaaacaattcttaaaattttgaaaatataccattagttctggggctatctatgtgtatatacaattaagttattattggatggagcattgtattttagaacagtctttgaaaatgtagtttgattaaaataaatctttgcctaccaattagtttgtacatagtggaccttcaagacatcctcaggaaaattttcaggatgcacatctaaaaaacagaggcagatatcctcatcacacttgaagagcttcttgaacaactcaccactggcatcacctcacctccctccatcccttcctgctctgcctgcatttccagttccagactccttgctggcattcctgacagaaatcttacacctgacaaaaatcaggccagactcatcaatttctgattttggttcccggctcttttggtgacatcataactacttttttttcagacagtctcgctctgtcgcccaggctgcagtacagtggcacaatctcgactcgctgcaacccccatctcccagtttcaagcaattctcatgcctcagcctccggagtagctggtagtactacaggtgcccaccaccatgcccaactaactttttagggatggggtttctccatgttggccagactggtctcgaactcctgacctcaagtgatccacccgccttggcctcccaagtgctgggattataggcgtgagccaccacgcccggcccataactacttttatcttgaattctctcttgtcttcttatgggtatgtctcttaacagtccaactatcttaagtcctccctcccccttaaacacatattacacattccctgaagtgtagacattttatatacagttgttatctggttggttaatgtattttgtgccagcctttctctttagttctttaatttactcaaagttgctacactataaactttcttattagtgctaaagtagtaattccaggtcctttcttaaaagcttatccaaatgctgtgatgttgcatttgcattttatttatttatttattttttgagacggaatcttgctctgtcgcctaggctggagtacagtggcgcaatctcagctcactgcaaactccgcctcccgggttcaagtgattctcctgcctcagcctcctgagtagctgggactacaggtgccagccaccatgcccggctaatttttgtatttttactagagacgggatttcactatgttggccaggctagtctcgaactcctgacctcaagtgatccgcctgcctcagcctcccaaagtgctgggattacaggcatgagccactgcgcccggcctacatttgcactttaaaatagaaatttgtttttatttctggacctctgtcgctgaagagatgaatggtcttgttttcttacttttgaaaatcggtccttagtgttttaatgaaaagggcgtttgcgggtgcttttccttagttgcttgatgctccctgtgctctcagcacaaatgcactttctactgtcacagggagactattttgcactaaacctttgtagaaattcaagtgtcaattgtgaaattgagcattttcaatagaagggtaataggattttagagatagacagggattctgggagatcatctcatcaaatgctattttcaaaggaggaaactaaggtctgtgaagattacacatcttcacctaacttcctcagcccaagcctgacccagcctcaagtcacccgactcctaattcccacttttaatgacctgtgcccccacttcagtgcttcaacagatgccacctttttaaattgttttttttttcttttaaaaatgaatgggtgttccccaaatttaatttggagtacagatccagtttcataatttaagagcttccaaaactggaagtagattctaatttttatcatttgatagaaaagatttcattttgttgatttttttctttttttaaacctatgttgtcagaacaattataaaattgctttcttccttttaaacttcagctcatcactgtgtatatttctagcaacagaacagtgctctccctggatgatagaaagctagcggagagaagatctctgtgtggctcaccccacaagtgaagacagattttgttctatctaaagagtaccctccaaaaggagaaataacaaaaccaagaaaaggctagtaggaaagtatttgtggggttcagaagcagcccataaaatagtctagattaagatgcctggcgtagttagaatatgtgtgagaacttcttattccgacttgtatgccacttacttgtacttagaatttaaaaggcttgctgatttgtagtgtttttgagtgttccctggtgagagcaagaaatagaaaaatgaatataaggacagggaaatacatttggatttttatttgtgtatttccccagttaaatttgtagggctgaactgtccttaattatttgtttcatatccaggatagttgtaataataatcattctccttcacttaccaagtctctcttaaaatctgcaagagctctccttgtttctcagatggtcttgcttctttttgttgtctgtgtgtttgttttgtcttagttttggctactacttcccttttgtgaataattatcttcctgtcttctgaaaatggaagataaaaaaataataaaataaaaagtaattgttgccctttatatatatctgttaaataattatgtcaagcatgttctccactgatccttatcacttgtctttatctgttctcatttatgcatatacttaatctaattttttctctccactgaccgatttttcaatatttgcatcattttatgttattttcatttttttcctactcttggggtatatttcccgtaaagtgtaggtagttcaaaagatgatgtttaggctaggaaaagcccaggtggtaggaatgatcccaaccagtgttttgttcagccccaggttgatagttttttaaaaggtacttgtaaacccatttttttgcttcctctaaccaatatgaggttgtattaaagccaaacttactgaaagctaaagttaccaactttcttagtctgactttgtgtatcagattttccaattattgccacttgtatctgtacattttactgatgcctctgtatctccacccaaacatttcatatgtatgtgtaatcaaataacctctttggcttatccatcatcagcaatatcacattaatcattttttttcttttttttcttccatttctcagagtctcttcttagtatttatggttcatgaaagtgactgtgcatctttcttccttgggatattagcatagtagacccaaacaaaaagcttcaatttttatggattccaagaagcagtgcattagtctgcagctgatttctgcaaattcatcaattcaagagggttttattgcccatgtctgagatgattgatcccttcaaaactctgccgtatagaaataaatgtcttagttattcacagagttagttttttgtttttgttttacaaagtattacaaaaagcttctatcaggaaagtgtgtggggttgggcttttccaggtgcagaggcaggtgattctccatttgccacaggttgctggagctgcttttcaggatgcttgggaaagggcagaaaccctctgcagcctcccagccaggcctgcagacagcggatggtctgtctgtgcctccctgggcataccccagctgattgggtcatgctgttgcccctcagcagcacacaccccttgcttcctcctctgagatctccccactgtggtcctcagcctgcctgtttcgcctttctctcctgtgcaggttaccaattcaaagtccctaagaaagtggctcatctagcacagggtgcctctggtggccaggaccccctgccaggcccactcttgtactgtttgttgttggagagatgagggcaggcactccctagccacccagctgtgccagtgttggcctgctcacacgtgggttgtaggcgtgcctggaacaaaacaattggtaagtcctggcagctcctaaatgaatgtaactggattctgcttccttcttggtttgccatatatggagagaactttgctttctgaaaaattttaaagggaatgaggtaatttcctcataattcctaagatctccggcagtgttgtaaatttagatttgaggttagagtactaaaaaataaaaacaaaagcagaaaagctgctgtgctctgaaatgccagggtgtttttaatgtcaagtccagcagcataatagcttttacctcttttccccacctaaagaaagagtagtgttaaacttatttccaaaataaaaggagtctgaacctctaggaaactggtacagtatcatcttagaaaagaacctaaatgctaatctacactcataaaaataacatgttttcaaatagtttcagaaccaattcagtctcctgtttttctcttcatgataccagtagctaaaaattaccctacttaatgaaaattgcagacaattttttttctttatgcagtcttacataatttttggtccattttgacctagtctgacattttattttgaacaactacatcttaagtgttctgtcttttttttttttttttttttttggaagatttattgtgaagagcgaaagaacaaagcttcaacagtgtggaaggggacctgaatgggttgcccagtgctctgtcctttttgtttccactctaaaattggttcggcaaggagtaagagagtagaccactggcattttatttttgaacactcgaattgtataaccagtaatctgttagagttgttatccatcttacagtgaccccatcatctgacccaaatagcgtttaaaataagagctcgttctagaagaacaactttaggcagcagtaactttaaaacattttgaatacctgctctactgtggtatagtgatctaaatattagatttatttttcttgtgtctcatatagaaactctaaacaaagcagatgaacagttgtgtctgtactaacacgtgactaaaacctctatagagttccagtgtgctgaaagccaaattaaagttctctttttttagtaaacaatcacactgggaatgagaatattagagctaagagggaggccagagcaagggtggtaaacgcggatgcttccagaggtcacatagataacccactggagcagtgggcccagtgggagaggaccatggtgtcctggaaggtatgtcccaggggtaaaggggcagctgctgtcacttgccgcctgacttcgtgccatgccaga

SEQ ID NO: 109067 - DNA, 5639 bp, Homo sapiens; identical to SEQ ID NO: 109066

SEQ ID NO: 109068 - DNA, 5639 bp, Homo sapiens; identical to SEQ ID NO: 109066

SEQ ID NO: 109069 - DNA, 5639 bp, Homo sapiens; identical to SEQ ID NO: 109066

SEQ ID NO: 109070 - DNA, 4212 bp, Homo sapiens
tgagaactatcttgactattacatattggcaaacaactttaaacatacatatacatttgtgagactaacaaatatctgctgtccagaatactgcccctaggctaccagttacccatcttgctcctaatccaacctcctcacttttcatatgagaaaactgagatccaaagaggctaaatgtcttacctgaaatgaggataagttggggcaaggtgggaccatttgccaagaggtctggtgagattgtagaagtaagaaatcttaaggaggaaaacccatgaaggagtgttgctcttatttattgacaccagagtagctttttttttctcctttcaatgcttaaaataatgagaaataataacatccaaaggaaaaaaacaagacccactacacacctctatttcacttaatttttatacacatcccattacttagcatttacttttctctttcatcttcaaagcagttcaaaaattgatttgttatttgtagtcagggaactgtgtcatgatttattttttattatttattaataataaaaagggaagaactccttaagaacagagtatctgaaatataaacacacacacatatgtggcctcagctgtttcatctgctagaaattcatctgagaccacttaattccaaggtgtggtggtgagtctttataaaacttcttgttatacagaatctaatgaaacttcaatattgctcagtcatattgagactttatttaattttagctgtcgtacataatacagtggaggacctgttgaaaatataaaggttgggactcttttttcctctttggaactattggctctaagtacaaagttaacatagattccaaataaactaaacaattttaggaggtttattcacttttatttagaaaaacaggaaacatttttttttttttgagatagagtctcgctctgtcacccaggctggagtgcagtggcgtgatcttggctcactgcacccgcctcccgggttcaggccactctcctaactcagcctcctgagtagctgggactacaggcgcccgccagcgcgcctgccagcacgcccagctaattttttgtatttttagtagagacggggtttcaccatgttagccaggatggtctctatctcctgacctcatgatccacctgcctcggcctcccaaagtgctgggattacaggcgtgagccaccgcgcccggctaggaaacattttttatattagtttttttttaaaaaacttattttggaataattttagatttgcaaataaattacaaagatagtacacagagttctcaaatatccttcagcagcttccccttatgttaatatcttatatgtctaggatacatttttcaagctattcatttttcaagaaatgaacatttacccaatactatcacctaacctacaaactttattgagatttatattggcctttgaaattaaaaagggtatactaaaactattcgacaactgtaataagtaatatatcctcacaggctgtgacttgaggagggaggggagagttaggttcctccacattctacactgcccctccataaagccatcccaaacaggcatgaaatttaagtaaacatggtgctaatatatttgctatgtaaatgcttttgaagacaagtctctagcctcctcttccaatcaggttgccttgcctctatccctcctcggtggaactctggtgctgtctctggagaagacagatggagtgaaggggcagataaagagagaaatatgtgcacacacggcctgtggagggtgaatctccagtgagggggctgttttgtgagttcttaagtgtagaaataaacttgcccacagtctgctttccatctgggctgtggacagccacaagttctcacttgttatttgctctctgatatccagattttttattgttttaaagtaggaaacaacttttcagcttggtagtttacttctttaaagttaagtttctggtggaattgtgaaggctctatgaatgtccagtggaagtcctgggagagggtacattataggcaactcacagaggtgtaagcaacctgtggaacaaatgccactcaggatgtgaaaggactggggttaagtcatgaggaacagattagaaatggcatagaaaagggtttgggactcttgcaggagtggaaaagggaagggagattggcacatcaggatgttcaatatttgttgactgattgaatggtcagaatttcaaaaactaaaccactaatgggcaccaggcatagttttgttgccaatagaaggatgtccccggccaggtgcagtggctcacgcctgtaatcccagcactttgggaggcctgagtgggcagatcaccttgaggtcaggagttggagaccagcctggccaacatggtgaaaccctgtctctaccaaaaaaaaaaaaaaaagttagctggtcatggtggcacacacctgtaatcccagctatttgagaggctaaggcaggagaatcacttgaactcaggaggcagaggttgcagtgagccaagatcgcaccatggcactgcagtccatgagactccatggactccatctcaaaaaaaaaagaaggatgtccccatgactcagtgaattctcatagagcatctggttttgccaacaggatcggtaatttccttttgtttaatttttttttaactaattatgtgttcaatatattgtggattgtgatagcactaactcaacatttctttcaggaaaattgtgttttctggaccacagtaatttgaatagctccttcaacttagatattctcttgaagttcattacatgctgtgctggaggatgggacatattggaaataccctcctctatattcttaggttcttcctcctatgatggatgttcatgggttttggtacccagcatgagttacccttcctaagagctcccagcttccgtttgggggactacctcttccgcgtcatgtgtgattttggtggaagagtaattacaagtagctgactcatgttctgggaacttcagctccagttccttctcctcccctggctctgctgcaggtagaagagctcccgggaaatttatgtctagagcatttgcagcaaggtcctcagggacagtcggaggccctcgcagtgttgactgctgccaaacccatgctatgaagggaccatggctgtgacttctgcttcctgaccttgtttctacttgtttccaaagtgctgctccagtgtctgcctcctgttgattctgtgggtttgttagccagcattggttttaattgcttgcaagtcgggaaccctaattaataacagtgggcagtctcttgacttaggactcaagttcaaaccatgacagttgaagacccagtattaataaatacatttctcttgcccaatcattaaatatcgaaggtgtaatggaccttaaagctcatctggcccaaacccctatactttcctccagtggtgaggaaataaacacaccaagtgaaagagatgttcaaagtgtcataaatgtaacatgccaagttggcatcctacatagagacatcagggttcattcgtctcggcatcttgtccacacaccctcaccgtactcctttacctctgtgacccatagtgtccacttaatgggatgggatgacagggcagaacctagggtggcaccagtgaccttggaaagggtcacagctaactagcccccatagggattcgacctgtgactctggtggtgttaataccaagattcagacactgagctgaaatgtcagcgtctagctgcatccacaggtgtgcctgtgtgctctgatgccagctcagatgcgtccacttgatgaggctgagactgtgcatgaggaggtggttatcagcagctccaggaatcagatcatcatctccttatgattattgggataaaaacaactagttttacagcataaattttatatttttaatgtgaattaaagattgctttctaaccattccttatcttatagaaactgtttttgtgagttctaagtgtagcatgtctctgagttctgtgggggtaaatgttctgaatccattttggagcaagagttatttatttatttattgagacagagttttgctcttgttgcccaggctggagtgcaatggcatgatctcggctcactgcaacctccacctcttaggttcaagcgattcacctgcctcggc

SEQ ID NO: 109071 - DNA, 4212 bp, Homo sapiens; identical to SEQ ID NO: 109070

SEQ ID NO: 109072 - DNA, 4212 bp, Homo sapiens; identical to SEQ ID NO: 109070

SEQ ID NO: 109073 - DNA, 4212 bp, Homo sapiens; identical to SEQ ID NO: 109070

SEQ ID NO: 109074 - DNA, 1041 bp, Homo sapiens
atccagtaatgaattagtgttaaacttctaaggctccaggaacttcttgagtattttggtttaaagtagttggcatatttgagggtttttctcccaggtctactggaagctgtgagctgggaatatagtaaaacagaggtcccagcctttttcctgatgagttatttgtgatttacctgaagctttaggcgcactaacccaagatgaagtaaaggcgttgtaatgccaggtgccaacagaaagtcaggtattctcatgccagccacatgagcactccaccccggggcttctttctaaaacccttctgtgctttgcaggcaggtccaaggaggttagagaaacccctgcagtcccccttccatcccatatgtgatgattggattggggagtcttggttaggagcaaaggataattaccgtgtcagagcacgaccaatgaattgtaacaagctgaggtaaagtttaatttcctcttccacctaccgcaatgaaaagctgttgaatgtcaaatatggtttgcacctttgaagtgaaaatgttttctgccacatgtcatcccgttgagcaagtctacacctgttcatctggtcatgggttagcagaaagaatgaaagagagaaactctgtgcctttgagcgaagacatttttcagtacttattactctgtttcactttccagctttcaccttctctgcagtttttctttcatcttgacactataaggaatgcatgagccttccctatggaacattgtagatcttgtttaaatggtaaaaacatctccagctcagctgaccagttcattagaatagctatgtgctacacaagaaacatgaaatattttgtcaggtaggaatctaaggaatcctggtgacgtgggctttcccgtcagtcgtttgctcttttcccttaacttaagccttgtgctgctttagttatcctgtagaataaatggaaaagtaaatggttttattttattttggagacggagtcttgtgacgcccaggctggagtgcagtggtgccatctcagctcactgcaa

SEQ ID NO: 109075 - DNA, 1041 bp, Homo sapiens; identical to SEQ ID NO: 109074

SEQ ID NO: 109076 - DNA, 1041 bp, Homo sapiens; identical to SEQ ID NO: 109074

SEQ ID NO: 109077 - DNA, 1041 bp, Homo sapiens; identical to SEQ ID NO: 109074

SEQ ID NO: 109078 - DNA, 1152 bp, Homo sapiens
atacacctaccaatggcaatgcacttaaaatgccatatcagaacagttgtgcaacatctcaatttgatagtttttctaagaagcataaccaagcttccataaatgtagtgaaagcttttttcatattaaagacatgttatcgggagatggaatgtttccttcttcctacataactgaacagtgattaaatattgactaagagccaggagttgacagccattggcctcaccctggtaaatgctgatatatgatgctgaatgtaaatacagagccatcctctcagggccatagttttgttggttttttttttttttttctgttgggagatggggagccagcaagttgtagcttatgcttgaggtgtcagattcaagtgttgcaatagaagtgtgtaatttgaaacaagtaattctttaaaaagccacccaactgtcaaaagaaaaatatatttttctaatcaatctgaataataaacagaatgctagttagaagttttagcaaaacatccagggtacccactgaatgctgctgtttgtagaaacaaaagagctatccatcactggggcagcttatactttcatagacaacgattgtttggtttatatgaaacaaactggtcgaaacatcagatttattttggggacatgaatatatgtttgggaaattttaaaacatcttatttttgttgtatgtgtattttcttttttgttgttttaaacatctatttaaaatatgcagttgatattttccctccctctatggggaaaatcaaagataataatttttattacatttctttctgttaataaggttcattataagatcttattatttttatcccaagatttttaaaccctgcaggaaatacctggaagacttactcaacagctgtttgtagtgccatgaagcaaaatctgttaattctttattggttagaatgatttaaacataggtctccttttcagcaaatatagcaatctaaaaagtctgcttttttttccagcaagttttaatagacatttcctaacctctaaatcatctatgatacccttattgtgatggtcatctggacatcaacattgctatcttcaaagtataatgaaattaaaagatacttttaaagattattatagttctcaaattattcaaatt

SEQ ID NO: 109079 - DNA, 1152 bp, Homo sapiens; identical to SEQ ID NO: 109078

SEQ ID NO: 109080 - DNA, 1152 bp, Homo sapiens; identical to SEQ ID NO: 109078

SEQ ID NO: 109081 - DNA, 1152 bp, Homo sapiens; identical to SEQ ID NO: 109078

SEQ ID NO: 109082 - DNA, 1158 bp, Homo sapiens
tcaatgactattcttccttgaaatgtactgagaaatggatttcgtgctgctgaaactgaaatgagaaggaatggtcataaatcatagtttagtttcgcacctttagtcagataagcagtgaagtgactctgagtcaaagcgtgtgtgtgtgtgtgtgtgtgtgtgtgtgtctgcgcgtgtgcactgtgtgtgtgtgtgtgtgtgttttgtggtgtgattgtggtctgtgtgtagtggagggatggttaatagaaatgaagcatcacagctggaccagccacagcacgtagaatccttccctggggcctcagtttacaagacaaataatttagagtaaccccttccccctttaaaaagccgaatatttttgtaaaaattaaagtgagcactgaagacagttttgaagacaaagaagaactcacagtaagcgagtctgagtaggtgcgtgactggccagctttggtattgactggcaaggagaagacttgttgagggttgactttgggtctgattagataccagggatttgacctatgtaatcttatttttgtcctctcaacaaactttgtacccctttttagtaaaaagatgagaacattaaaacctaggaagatttagtaacttccacatagctggtaagtggttgagttagaattccaactcccaggtgacttaatttaaaattgacttcaaagtagctcccatatggactgaatataggatacgagcctctgcctagccttcagtcctttttgtttggtttaggtgttggttgtctttgtaaacactggaagctgctgagtcatctccctcggctttttccatcacactttaccccacatacattcatacacacttggctcaagcttttcggttctttctctggacactagatgactgtcagccttacctgggccctgccccagaggctgccccagcatctggtaggagcttagtgagcggaatggattcctagtgaaataatgaatgtctttccttgtattctgtgtttgaaacctccaggatagcaattccatctgctatatgaaataagaaaaagtaaatattctttggttaacctttgtcattcgcctacttaaacctcaatcacatttctttgaaatcatgccagatttgtggagagcaaattgccaggta

SEQ ID NO: 109083 - DNA, 1158 bp, Homo sapiens; identical to SEQ ID NO: 109082

SEQ ID NO: 109084 - DNA, 1158 bp, Homo sapiens; identical to SEQ ID NO: 109082

SEQ ID NO: 109085 - DNA, 1158 bp, Homo sapiens; identical to SEQ ID NO: 109082

SEQ ID NO: 109086 - DNA, 1050 bp, Homo sapiens
tcttagttttttccttctctaagggaaggaacactttgcagcttaacagcattttcaaagtttcaaacaggactggctactgagttgaagaagcattagttggcccttaagtcctcccctctggccactgttgtccacttcacacatttggaccaacttccctcatctgagcctgaatcctattagccagcactgaaaatctggcatggtttcaaagaaatgtgattgaggtttatgtaggggaatgatgaaggttaaccaaggaatgtttactttttctgatttcatatagcagatggaattgctatcctagaggtttcaaaataatcttatcgagatgacttttgacccgtcttcaatagcattacaacaatccccgcagcctggagactaagctctgctgctgttttgagtgagctggccccacagagggtgtgacgtgggagtagagatgagtgtcggcctcaaagtctgctcccatctctcaggaaagcaccttctttagattaaggtattggggctgacactaaaatagatgatatttgaggctaagttttcaatttcactctttccagaaaaacaaagtactgatagggatctactctaaaagctggttttaaatacaaggcgttacagaagtgccaaatgcagtcactgcacttaaaatcatggcctgtggatagaaacaaagctgaagagtggcctgccgagtgtagagcgttctttcacttgtaagaaattaaatacagagacactcaacacaattcctggatgtgatttcctgttggttcatctacacactctagaagattcctgaggagaggtttattgcccaaaggaattcagtggaggtattttcaggtttggctgatttccaagagccccctctcagggccaaattatccaattccctttcttggtgagttcaccacacttcattcattcaccaaaaatatgcatggagagcctaactactacatactaggcactgagcatacagtgctaaaaataaaaaaagataaaatcctagtcctaatgtaggatacatgc

SEQ ID NO: 109087 - DNA, 1050 bp, Homo sapiens; identical to SEQ ID NO: 109086

SEQ ID NO: 109088 - DNA, 1050 bp, Homo sapiens; identical to SEQ ID NO: 109086

SEQ ID NO: 109089 - DNA, 1050 bp, Homo sapiens; identical to SEQ ID NO: 109086

SEQ ID NO: 109090 - DNA, 1010 bp, Homo sapiens
actacggtggtgagcagaacaatcctgtcagcctgggaggggcagtccatcctgtgggcagctccactgaaaggtgagcagtcagtaattggaaggaactggggatcccagccaatgatccaaaacaggtgatttaattgctgcaaccgctcccaccgccagaagggtcatattctcagttcctgcccaaggcccccctctacctggactttatacttggattaagacaggggcaactttggaggaatggatgttttcagttgaaagctttggtatttactgggctgaaagagtgctcctctctgctcctcagactctactcagcagctgggctcaaagttcatagaaattggaaatgcttttagtgaatcattaaaatgttaccttttacagaaactttttattggatataacttatactgtttttatgaaagaggaacttgagcagcattagaatgtgttaatgtatgtccttcatatgctcggtttcctttcttggtaataatttgagtgaagttacaatctttctgtaaaagactatttccagctgggtgcagtggctcacgcctgtaatcccagcgctttgaaaggcgggcggatcacttgaggtcaggagttccagaacagcctggccaatatggtgaaaccccatctctactaaaaatacaaaaatttagctggccatggtggtatgtacctgtagtcccagcgacttgggaggctggggcaggagaaacacttgaacccaggaggtggaggttgcagtgagccgagattgagcccctgcactccagcctgggtgacagagcgagattgtctcaaaaagaaaacaaaaaggctatttccatctttctctgcacattgagaggacctgactttgaaaaaatacttatacatttcatattttcaaaatttttcatgtccacttagaagcatttttttcccctaagctttggctttctgcctttatcattgctattttaagatttttacatgaaaaatgggatttg

SEQ ID NO: 109091 - DNA, 1010 bp, Homo sapiens; identical to SEQ ID NO: 109090

SEQ ID NO: 109092 - DNA, 1010 bp, Homo sapiens; identical to SEQ ID NO: 109090

SEQ ID NO: 109093 - DNA, 1010 bp, Homo sapiens; identical to SEQ ID NO: 109090

SEQ ID NO: 109094 - DNA, 1046 bp, Homo sapiens
atcagttgtattcacttatctgactataaaacagggtaatattagtgagagaggaatctgttactgataaagaacaaggaaaggaatccattaatcccttttgattatcatacagattattccccagtgattattagaaaatacttttatcttaatgaggaaaaatctcaatttatttttaaaatcctggaaaatggaatgccgggtaatattcttatttaacttttgacattttttaaaaagtcatgttctatttggggtatgaacgtgtgtgcccataataattattttcatctgtgtgtgtctatcttgggcctagaaaaaaaatgactcattttcttctaaagattagaattccatgggcatctctttttggtacaattcctttgtttgttcattcctggagataatggagttggtactgatagtgccctccttgtattgtattcagctcagttcaatgagtctttattagggggcctgtcaagtgccaggctgtgcctcaaaggtatggaggcagaggagactcaggcggtgtggaagagcatggcttggggcataggacagacttggctttgaattccagttctaccgcctaagagtctcaccctgtggagctcagttgcttcatcctggatgtgaggatgaacactggtactgcaaggctgttaaagaattgtatgtggtaaagcacttgacaattgtctggaacataataaaggcttcataaatggtaacatgttgttattattttgataatcatctatggtttgggtacagactttttagtcattgtaaaatttaatagtagagtttttgtttgcttagatatctgtatttcattcacacaattagttggcattttagttgtttattagtttttagtcattggcctagaaggaaatggctacagttcccttgctcatctctagtaaggatttgaagtggctggattgtcatttataaggttttaacaagagaatttttaaaaattcaaatgctttaaccatttttcaggcctttggttttcatatttacttacaagt

SEQ ID NO: 109095 - DNA, 1046 bp, Homo sapiens; identical to SEQ ID NO: 109094

SEQ ID NO: 109096 - DNA, 1046 bp, Homo sapiens; identical to SEQ ID NO: 109094

SEQ ID NO: 109097 - DNA, 1046 bp, Homo sapiens; identical to SEQ ID NO: 109094

SEQ ID NO: 109098 - DNA, 3058 bp, Homo sapiens
cttcatttgggtaggttagaggaggagaatcttgagctgggtcctgaaaaataattagaaatttgccaggaggatgtggaaggagatattccaggcagagggaacaacgtgtgtaaaattatggagacaaggaagagcagtttgctctggggaccatatggccatggagtaggatgtgttgacggaagccaatagtaagagggaggctgtggagcaatgtttctccagggttttgctgcatcagatatatattagtagcatttgatgtgcagattctgggcctctccccaggcataatgaatcaaaatcactgaggttagagtttggcaaactgcattttaaaggaagcaagccatatgaatgtgtaagaactaagattaggtgaaccacagacaaggatggaggcaaaaagtagatcatagcaggccttatgtatgctaaggtgcttggatttgggcagagccactgcaggtcagatagatcactggacacagtgtagaagatggaatgaaagaggtttgttggggagtggtgtctgatggtggtgagaatgcattctagtggggagatactagttttaagaaaaggtactcccgaactaagacaagttgggggcagtagaagagagaacagcagaaatacaagccatataaagcacgttgaatcatcagaagctagggggagagggaagggggaagcattgaggaatcggaggagtgttggttgttgggctggcacaaagtgactgcttggaactcagtgagtctttgatgtgctgcttgcaagggagacctgccagggaggagtgatcatgcacccagccttcccagatttcccagaggaaagcagcgatgtaaaatgtgaacatagcgtgactggagcaatgacatctgcaggtgacagggagaaagccatctgcttagctacagcccccctctcctgacactttttagttcatgatcatgatggtaaaaaaatttggagttttgatttggggcataagatgcaatgcaaagaattgagaaccattgtcttacagcaaagtactgacctattaaatatttgggggtgacagaaagacctgacattgaccatggggaagtgaagtaataatcacccttggagagtatcaaggcaaaagtcatgaaagggaggtaaaactaaaaccatatactctgtatgacaggaagggaaatgactgaaattttctggacaagcaccacagtgtctttcttcccgatgatgtcatttggttagaacaaggacttaaccagctactgaattattacagttttccatgactaactgactttttctgttatgtttggtcttaagctttctgttgcccaggagatccacatctacatgttcaacctcaaacccttcacaattattttttacataaaggactgtgttttttgtttgttttgttttgtaaaatcctctagattaataggaggcaacagtaccactcatttctaaagcatactatttataagttggtaaggttgttgcatgcttttgaacttgaatatttattttgtccctcttggaaacagtatctagcacatcactgtaaaacttgattttattgaatgccctttagtttctcttaggttaaaatgtggagcttatacagtcacttgtaatttcctcagtcttaccttcagattcttcctctaaaggatttttctttcttcctttccatttttactttaaaatgaattaagcatgataccaacttcatgcagtttcttattgtgaagaacacattggtaagattgaaatgttattagtctaattctgtgctatattttgaaataaaatcttctggaacaaatgtaaatctaatgattagaaaatgtcacttacatttctcaaaaaacaaacttacaagcaagcaaatttaaagatcttttttttttttttgagacagtgtcttgctctgttgcccaggctggagtgcagtggcacgatcttggctcactgcaagctctgcctcccaggttcacaccattcccctgcctcagcctcccaagtagctgggactacaggtgcctgccactacactcagctaatttttttgtatttttagtagagatggggtaagatctttagtttttatttgcaattctagaattaggcaacacctcattctatggaacagaatgagtattccaataagctgagcagaggaagttgactttatagagaggaaagggtggaggaaagcaggaagaggcagcagaaaattgattgtttgtttcagttactttctttgcaaaggttaaagcagagggggcttccttatgccagctaaaactggcctgtttggtaatttggctgttatgtttctctgctggtttcttgaaaggtcagatgaacaacttagtttcaacttggtggcatggaacttcagcatgaataactctattttggttttggtctgttgggtctaatacaggagctcagttcaaaccaatggcctcctataaattttatataacaattagtattacacaaactggaaagctggctttgcggaataagagcaggttttggaaatagctggactggatcttaatcttttctgtttctgctagccatgtgaccttgagcaaattacttgacatctctgtgccttaattttgacatctgtaaaatgggagtattaatactacttaatttcacaggctttttaggaggtttaaatggcaatgtgtgtacctggctcaaaattactgttagttatttttccttatctttttcttcttcattatcatgatttactttgttttcataacagccaaacaaggccaggcgcagtggttcacgcccgtaatcccagcattttggaaggcagaagcggggggatcacttgaggtcaggagttcgagaccagcctggccaacatggtgaaaccctgtctctactaaaaatgcaaaaattagttgggcgtggtggtgcacacctgtaatcccagctactcgggagcctgaggcacgagaatcgcttcaacccaggaggcggaggttgcagtgagccgatatcatgccat

SEQ ID NO: 109099 - DNA, 3058 bp, Homo sapiens; identical to SEQ ID NO: 109098

SEQ ID NO: 109100 - DNA, 3058 bp, Homo sapiens; identical to SEQ ID NO: 109098

SEQ ID NO: 109101 - DNA, 3058 bp, Homo sapiens; identical to SEQ ID NO: 109098

SEQ ID NO: 109102 - DNA, 1906 bp, Homo sapiens
gctcctggaattttccaccaagttatcttccacttggggcctcatgtatgcaaatgagaggagttgggtaatgaagagggagagggagacactgaacagggcaattatttgacctacattcctttactctggtgttcaagaggctttattcatatttgtgtgtgcagtcctttgtaactgtttgcaaatttcgtctcctcagacattctttcttcctgaggtaatagatgtgcacaccactggggcactcagacacaggtatgctgtcttggcttctctgttagaaaggaaaggctaaggccactacgcagcacagtgaaaagaagcagacttcagggtccccagacttgcatttgaatcttaaccctgggcaaattacttcacctcgctgagcatcaacttctctctcatctgtgaaataatgaagtagaggattacaaagaggatggcactgaacctggcacacaaaatatatgtttatccaataaaagtctccttgctgccttcttgaggagtgccagggatacgggtgaccggggatacaggtgtcttgtcacaagacggacaagcctgctggccaactgacagacaatccaacaggtttaagtgtgataataagggaatatgtgtaagtgtgataataagggaatatgtggtagtggtgagaacgtatggaagacttaagctgagacctgatgagtgagttaggagcttgccatacagtctggtgggagtgcaagagagagcctggcacacagaagtttcgtaaggctgcctaggacaggagggatgggttggggccagattaaaagggccttctcagcctcattttaaaatttggactttatcctaagaatagtgagaaacttattgcagcattttaagtggagaagtgatgcaacagatttggattctagaaagataacttaaggtagatattagatttgaggggtagctacaccattgcctggggtctagttcagttgggacccccagttgaagtcctccagatgagagatgatggaggactgatcttggaaggcttccaggaagaagaaagtagtgctttcattcattcacttattccccacatattaattgagtatctattatgtgccatgcactaacttcaaagggtatggtagtgaacaaaacaaagcccctacctcagtggagctacattcaacataaaacacagatgagtctatgagtaaatgaatgtaaacaaaacacagataacactctgattttatgaccaagttgatacccacctccctgaacccacctttagaaggagaagtcgagtgtaattgagcagttattactcaggcccacctctccaatgcgcagagatctctggggatatctcttaccaggataatgtcacacctgctccagcagccctttttggggctgccccctccctcactaacaagtactagaagggaaccaattcaaagccagggtcggaaactcagacacttaaaggggcagaatattgttatgagctttatggtacacagatggtatctggagcaagaacgtgaactttgcatcaagaccattgggtctgaggaacagtgacctcaatagtaattgctgctctgtggctgcatgacagtgattctccacatggggcctttactgactggtggcccgtgaaggtcctagtgacataaggaaaagctaaccatgccagatctttcttttgttgttaagggcccatgacctgcagtttccctaacattcatttttatacagggcagaggtatgtgtgcgagctcagataccttaaattcatatgcctttaatacaatccaggcagatttctaaatgagggatgcttccccacaaatggagagtgaaagtgggccagcctaaaaggacctccatagcactgtgcatg

SEQ ID NO: 109103 - DNA, 1906 bp, Homo sapiens; identical to SEQ ID NO: 109102

SEQ ID NO: 109104 - DNA, 1906 bp, Homo sapiens; identical to SEQ ID NO: 109102

SEQ ID NO: 109105 - DNA, 1906 bp, Homo sapiens; identical to SEQ ID NO: 109102

SEQ ID NO: 109106 - DNA, 1443 bp, Homo sapiens
aaatgttggcaactaagtctgtttttttttttttttaatatgcagtttttaatcatctgtgggctggattcttcctttatcttttccaaggctgccttgtaaaaacgtccactgctggcatctgcttttcttccttttcactccccagtcctgggtcctttagtctctcattatatcaaatacgagtgactcaaatttagccaaaattttcttgaatttatggaaaagctatatacaaaagtaagtttctgtatacaagtattttatatcaggaagaattttcagttggggatggtaacagttactgtaagtaagatatggttataaatgttgtttctctaaggggagaaatttctgatgtctagtcaatttacaaacctgtgttctagaacataaacatttgtttgtaagtaaaagaaagaaagtacatgcagatgcattaaatccatacttacacccagtatatatgagtacataatatacttttcttgggaattatcagatactttttcctgaatcaaatgatgaagactatttaaagtagaaaagagagaaaaccagtctattctgcatggacattttgttatcacttttatggtaagcagttccataagtgtgtgcctctgttttggcataataaaattttacattacttcttaaattaagtacaagttttgaaaaggaaaaaaaattaacctcctgttataatcaaaatctttcactttctaaaaatcagagtatcttcttttaaagggagttatttattcaataaaaattctatatttctatataccttacaattttttaaaattctggtacacacagtatccttataatcactttttctttctatttatatccttaaaaacatctgcacgaggtaggaaaaaaactcagattttaatgaaatcataaaaacaaaagaacttgatgcagcccacagcacctgctaaccatacaatgtgtttacagttgttattgctacaattaataatatcactattgtcattataagtgtgattgacagttgaagaaactaagtcttaaggaagttaaggccaccatggttataaaattagtcaattttagagactaaaccttattaaatcacaggtctatggacttaaaatccataacctttcatttataccaataaaaaacaaaagaacaaagagggccttttgttattgtaacacctttatgtgctgggtgcattgtccatattagcttatttatttatttttattttttggcaggtactgtatgaggtttcattttatagataaagaaactgaaaaagaggttaagtcacttaccaaggtcacattgcaagtaaatggcaaagccaaaaaaatgctcctatgtctgaatgccaaggctcctgatctcctggagtgcattgtatctaattgatagttgcaagtaaccagtattttactttta

SEQ ID NO: 109107 - DNA, 1443 bp, Homo sapiens; identical to SEQ ID NO: 109106

SEQ ID NO: 109108 - DNA, 1443 bp, Homo sapiens; identical to SEQ ID NO: 109106

SEQ ID NO: 109109 - DNA, 1443 bp, Homo sapiens; identical to SEQ ID NO: 109106

SEQ ID NO: 109110 - DNA, 1045 bp, Homo sapiens
ttgctaccacattttccaaagcttgcctttgtcccctcggtgtatacttgagatgccttcagtcagatgaaaatcatggaaaaccaaactaacctggcttcacagtgatgagattggttggctcctggttaggaaaggcttcagaatgtgtttgtttcattggcccaatggggcatcaccaggaatgctgttattttttttctttaaacttctctgctctgttttttgccgtcagtttcatttacagctatcctcccacaccttccggttgccaaatgattttcctttcctttgagtttattcatcactgtctagggagagggagaaaaagaaatggtcacttccaagaactctctcaaaagagccaggaactattttcccagtcatcctcagcagatttctcctcaatctcattggcccaaatagggtgtggtgtttatccttgaacccgtaagtggagccaggggatgggataatgagccacaagccctaccacctgatcaacttcccccaagcacctgggctttgcaggaggaattgaaggtgctcaaataaaagttaaggtagttactaaaagaaggagagtggtgttggaagagcaactacagtgcctattagactcctgctgttctgagaatcagctccaacccactcctagcagcacccaaggaactggggctcctagcctgactcacaactcttggaagctgctgacccctagtgtctgaggaaagcatcggctctagaatccagaggcatgggtttacctctcatgagaatcacagcggctgtgacacactcacacacacaaggaggttgtaagcaaattaaaacctttagaagtactttaatgagtaagtgagtttaattgaaagtcttccaaagacactgtaagacttaggcctccctcaccttgctgatcagcaacctcagaacactctctgtagtccttttcacacctgtaaattgtcatccacagtgtgtctttctctctagacagagggtgtgctttttgagggtggggcctaagtgcaaaacacccagc

SEQ ID NO: 109111 - DNA, 1455 bp, Homo sapiens
catgcttagtaaacacttgtatgagtaaacgaaagacccaactgttgttcagctctcctttcctctccccttccatagccatggctttctcttataaatatcagctctaccagcttaattgtactccttttttttttttttttttgagagggagtctcgctctgtcacccaggctggaatgcagtggagcgatctcggctcactgcaacctccgcctcccaggttcgagcaattctcctgcctcagcgtcccgagtagctgggactagaggtgcctgccacccacacccagctaatttttgtatttttagtacagatggagtttcaccaagttggccaggctagtgtcaaactcctgacctcaggtgatccacccgcctcggcctcccaaagtactggattacaggcgtgagccaccgcgcctggccaattgtattcctaataggacaactaagcaatcaattgtgttttgaagctgcatgttatacgaatgggaaaatattccaacaaccccaaatacacatctaagcagctgcttttgtgttgtggaatacccactatctggtcagtagagaaagcagaattttttattataagcagatcaacattgctactgtgaattctttgagcagtaggcaaagctgtgttagaatgggttcttctttggtctgtatgtggcaggtaacaggacttctcctgtgcttcatgatttgggttaggaagagagaggaaaggcaacaacatggtaattataatatagaatgactcaagacaagaaagaataggtttttgttttgttttgctcttaattgacttgtaattcaagcgtgaaatgtggcagctttcaggattggagaaactttgcacaaacccaatattagaagttaactgccattagctgtggagggcaccaaaggacagagaggatttctcaatctgggagctgaaggcgagttctggggaacagcagcagccacagctgtagaaatcctgacagctgttcagtcttggcaggcagggctgctgctcacactggagaagctgcggggcttcctgagcagggccctccactcgcgtggtgcctgtaagacctgctctggagtggaggcatgcaccatctttcttttccccttttcacagaggaggagaaaaatgggcagataagtatcatagcggtcaggtaggtcatgggatagggaaaaaaatcaatcattgaaaaggagtgactggaaaaccacactgtaacattgtgccctaaagtattgtatcagttttgccagcctgcacttgtctcttaattatgtaaactaaatgctatgtgttatcaagattgtcattattacaattttgttactttgtagagaataaacatagataataaatattagttctacatttcagttgacagatttcacaattttgcttcagagtccttctttgggatacatcgccttct

SEQ ID NO: 109112 - DNA, 1087 bp, Homo sapiens
tgtcactgcagtgtgagttgtgaaggagagaagcaaacacacaggcaagtgtttacacctgctgccttcttaagtcctcccaataaccctgtaaggcaggtactacttctcttgtacagaggaggaaattgaggcctagctaagttatgcagtgtgcccaaagcatagctaaacagtgtggccaatttttaaatccagatgtttctaactcaagagccctgttcttcttactataccaaatggctcagccctcaagttgttgtcttagaaataaaaatacaaacaacaaggaacatttgttcagcttagtgtttctcaacagagtaagagatagcttctctggagcccttatgctttcactaaaaattcaattgttttgtttttattttgataagaacccattaatattaagcatattctggttcatcaccttataagcaaggactgctctgtgatataagtaatgctggttctatctgtgtttacattgacaccaaaaactgtttctcaacccccagagatttcaagctaatttacccaatatccattcttcccctctaccttactaacagaaccctaatttgcctggaatcagcaatagtcctatgcttctcagactcccttgcagttacaaatgttcatgtggcaaggttttagctcatgatatctgagctattagatggggcttcccagaaagatccttaaagtggctgacttttaagatagatagaggacatatcaggtattaagctggtaagagcaggtgctacatttgatctcagacaaaaggtcaagaagcaatggtcaatgtctttctcactctccagtctttctcctcatctagccaggaaggaaggtgagatatgaccatgagggcaagaacacatactagcgtggtggaggcaaagatataaggagtctgggtctctaatgactacaaaaaacccctcattataccagcccagggtgtggctgtctgcagacacttcattatatacaaaaaataagctaattacccccctctactaaaaatacaaaattagctgggcgtattggcacatgcctgtaattccagttactcgggaag

SEQ ID NO: 109113 - DNA, 1494 bp, Homo sapiens
cttcttaactaatttttattaaattgggggcatctagttactgcagttgagtaagtgttagccttacctgggaagctgtaaatgattattttgccctcaagtgcagctggcagagtcatccatgtccctgaggcacatctgcagagtgagtgggcccctttgagcctgcccaagccacagctcacagtgaggagggaagtgtagcccaaaggtcttgccaggcttagctcacaaggtggcagtcacttagcatccaggaaagcttcattcattgtcttgaggtgagcaagtggccacttgaccagctttcccacaggtagtcaatagaactaatgacagctggtcacaggcacactcctgccctcgatcccaaggccctaaagtgagagaacttctcgagaatttcattcattccaatattttttggacacctactatatgcctggcactgtgccagatgctagatgggcaatggttgacgtgatacatatggcccttgctctctcacggagcatacaatctagtggagcaaatcaacgttacaaatcccacaaattagagggaaaaaaaaacagtatgctaagtgaatttaaagcaggaccttatttagacagggggctaaggaaaaacctccaactttaagcaagagaggtgactcaggtgaaggcagagggcttacaggttgagaaacagcttgtgtgagggccctgagacagttgcaggcacgagcttggcttttccagaaaactcaaaggccaccagtgtgcctagagctgtgtgagcaagattttgagaggtgcaaagaagtcaggagggtagatcagggccaataacataatgctggataacagcattagagatttaggattttatcctaaatgttgtggaaaaccgaggagtttgaaaccaagatgtgacaaaatctgattatgtttttagaagtatttttaattcacaaagggtaaggtttaatggagggcaagcccttaattttttgtatcactttgggaactaaatcaaggagcatgaaaccatcaaaatgatcgaatcaggggcagccgggtgagtgagtggggctaaatttgtgccatctgaaattagggtcaaagttctgatggcttcagttgtagtgacagttctgctgcagaaatcccgtctgtcctttggaaaataaatttgattttaaaaacctcaaaacatagcccaagtagcttaaaccatcagtacaagtttccactgacatctgccatgcaaatttgtacttcttcagccagttgctcttcctcacagttaacgctggaaatcagaggccatgagaagaaagcaagtgtggatatttgggcatggtagatggtgttcattttcctagattttaaaaatttgattgaaagtcaagagtgaaaacaaaccaaccctaaagtcccttagcatcatctcagataaggggagaagagagatgttggaatgaggtaggtaggtttatctaagatgctg

SEQ ID NO: 109114 - DNA, 1001 bp, Homo sapiens
acctaataagaagtgcagtcaagtccagaaccaggtctttgatttgatccaaaattttatcaactctagaaccatcaaagatggcctagattgcaactttggatgaattagcattagtgtaacctttatatatatatatacatatatatatacatatatacgtatatatatacgtatatatacgtatatatatacgtatatatacgtatatatatacgtatatatatgtatatatacacacacatacacatacataccaatgtagctgaagatttatgtatttatattacagttattaaaggtattattgaaatgttaatgagaaaatgtatcgtacttttgacatttttttttcataatactatcccaaacagattaaaaaacacaatagtccactagagggcacctttcttcaacatcacggtctgttctcttccccagtactctattaacctggttttaatcagccactatcgcctcggagcattgaaaagcttttttattgtcagagattccatgtactgctttagcaaaatgcatttgtattggtaggcaaggctatctgtgctgctaagatacctggaatgataaaggggaagcatgacccttattcccctacacacatacacgcatgcacacaaactttgtgttagtttgagcttagcccttcttgacatgacaacccaacttatttttatttggaaagtcttgccttagccctggcaaatttatactacttttcactttttctgccactgcgttctctgactccaaatgctggaaaacagagagtaaaagagatggtctttaaatgttgacataaattggggacgaaacgatgtagacttcacccagatttacctatccgtcagttgctgtttttctacagcatgtgaatttcagttactgttgggcataaaatactatgggaaaaataataggattgtgtccaataaacaagtactctggcagattctattgaaatataaaaccatctcatt

SEQ ID NO: 109115 - DNA, 1040 bp, Homo sapiens
cttggaaagagatttcttactggtgcagcctctgattccacatccttgccctaggggttttaacctgcagcagctccaaccaagcagctttagggaccagatcaaggccacccagccatctgtgctcctgtatcttcccctatcgccaccacaacttcctctttactcgacattaatttgtaactttactcaccatatcttcagtcccaagactgaatgaatgcctgccagacactcctgacccagttcttctagcacctggcccttattttctattcaccatcatcagtttctccctttgctggctcctttcctgctgcccacctagacatttgggtctcccacatcttaaacatcagctacattggcaacctctccaagctaccagcctaatgctctgatttattaacaagcttgttcacaaactctcaactcagaccctcaacttcttagccacaaccacccagcttccacccctaacacacgactactgaaattattcccttggcataactcgtgacttcctaatagtccaaattaatggcttctggttgtttttctcctccgcgtccctgcagtatttgaagaaactaggctctgtcagcgttccctctcttcttgtcacttctcactgtgttagttttcattctcttctcactttgttgactatgtctcctttgcatccccttgctctctaaatgtgggcttcctacccttatctgcagtctcattttccttagtttcagttaccatcggtcaactgtggtgtgaaaatattaagctattttgagagagagaccacattcacatgactgttactacagtatattgttataattgttctattttattacctgttattgttgttaatctcttactgtgcctaagttataaattaaactttatcacagatatgtacgtatgggaaaaacatggtatgtataaggttcagtactatcttcagtttcaggcatccgctaggggtcttggaatgtataccacatggataaggagggactactgagttagttttctatttc

SEQ ID NO: 109116 - DNA, 1171 bp, Homo sapiens
acttgatgtacttcaaagtaagttgcagacatcagtaagtgccctaaatactttagcctgcatatcatcaatttgagttcatgtttattcttgtttattcttttggggtaaattttatgtacaaagaaatgcacatatcttaatgttttattcaatgtgtattgacaaatatacacacctgtatagccaaacacttaatcaactcacacagcttatgccagaaagtttcctatgccccttccgggtcagttcctgacccaggctattcactttcaaaactgtatgctcgatggcctgaggatgtaactttttactattatatttattgtccaaaaccccctttcattctattgttgctaattgccacaattgaaaaaaaatgcttttctggatttaaagacacaatagtttgtaggtggcagaaacaatattttaataaggaaataatctaatttttcttcccttaaaacataccttgaattgagttttaggtagacccacgctgcagcttcactcttactttatgatagattttgatttcaagagcagcctcagttggctcagtcaaaaggggtttatttctccaagtctggtgggtcctcagttagtattcgtcttagtctgttagggctgctgtaataaaatatcataaactgggtagcttataaacaacagaaatgtatttcttagagttctgaagactgagaagtccaagattaaggcagtgtctcatgaggccccgtttcctgatttatagatggcaatggcatcttcttactgtgtcttcacacagcagaaggggcaaggtagctctcttgggcctcttttaaaaagggcatggatcccatttgtgagggcttcaccctcatgacctaatcacccctcaatggccccaccttttaataccatcatactggtgattagatttccacatatgaagtttgagggcacaacattcagaccataggagcattgttttctatggaacacacttatttggtatgaacccagaaaatcatgtttgtttctttgttttccttgctttgatggctttttgttgttgggcatgccacaactttcttagaccttggtttccatatctgaacaataacagtgtcaggctaaatgatctcttgaggtcccatctaaatttgaaactcaatacttttta

SEQ ID NO: 109117 - DNA, 1343 bp, Homo sapiens
caagtgtttctcataaggtcagatttcacaatggtaaatatgtgcaggcaaaatagtacatttcacaagactcaaggcagtggtttctcagctaagtaacgtgtgcctatgaaatgtatttatatactttgtcttgcttaataactagaaatttgtacttacagatttatttcatagtattttcattttatggtacatttagggccatagatcctaaatattgagcgtcatgcttcacagtaattctttccacgagaaaggggtcagagatgctgagaaaaaaaccaacatgtcacttacacataatacagaacttgagggtaggggatgtcaagtatccatagagagcctaatctacacatggcatggctccaggtgattgaattactataataattaaaataactctctcttttccaagaatctatttatttttgaagggcaaactactataagattattccatatgtcttttcattaggttgaacataaaagcattgtttttgtaggttgaaaattggtcaaatatcagcaatttcatctggagagaaggggttatattagcattctacttcttccaaaggaagataaattgattttattttacatgagctgcaatatataacagtgtcattatgtgtttaatagttttgaagtatttattgcttattttcacaataaaattaagtgtattggttgggtaataatggtcaatagattttgcatctgcatgggattttatagtagaactacctacatgtgtatgttcttttgaagtgctctctctttatacatagctcagcaaaaacagaaacattaaccttgaagccaaatcttaatcccacttagaaaccttcattttagaacccagctggcaccacatgcaactagattcagaaaaggtgctttcttgaagtccttagcttgatgtttgtagtcactgatgatatctgcagttgaatggctttcggaaacttccccaccattttacaaggacttacttattttttaaggatgatattgcagtggttaaaagcaaatttcttagattagcatttttagtcagttgatagaattcatttgaaatattgattccttttctcccataaatgatgtatgccaagatttcttaatgggtagtccatgaatgggggcttcaggggccattcccctgaaaattgcatgcacatttttgtgcttttgtatagatgtacatcattgttgtcgtggttgttattgtcatcataattacagcaataatagccttctatgtgttctacctacccctgcccttgcccacactccatagtctattttcaacacagtttccaaaatgagctttt

SEQ ID NO: 109118 - DNA, 1031 bp, Homo sapiens
tttgatggggaattttttttctatagttaatagtgctgaagagtacttggtcttcattgttttgcctgtttaaagtataattattgtctgccttgttgagatatagttctgtttttccaaagagggagtaacctttgaaatcaataaaaaaattttggagataaatttatatgcattttttttttagctcagatgtctgaaaatctaatttatatgctttaccacaaaaggagcacaatgataagagccccacatggaaaaaaaaaattagcagggcttcattgtgggcctgatctgaaatagaaatttagtacaagcacatcatttctatttaaagtagcatttgggcctcaaacttcatgattcagacttcgagtgattttaagaagtacatatgtgaaacatattttaatccaaaggtctagtatttattcttggaaaggatggtggtgatggggggtgggaaggaaatggggcatctctatggaaaatatcacattgcattgatgcttgcttgaaagtagagacaccctattcatgcacatacataacgcacaaatatataaaatcttggggaactaatcacagttttacatacagaagcccaacattaatagagccctatcccattgaagtcatatcccattatttatttatattctctataacaagggaaagtttgaaatcttggtgtacttagtattcccctgtgcactatatagaagcatcagaaactaccaaacttcctgaaatagaaagtaatttgacaaaactgcttgaattcaaaagaaaacaaccatcagagaggcctaagtgacaatcagtgtaggaaagccattaatggggaaagaacacacagagaaacataatgaggacattaaaattggttccacttggaagctgtgcgatggtcatcagagtgaccacagttgagtttctcgtgcttggttttagttggacaggaagatttacaactatggcccacgatcttttagatgtaggaaaatgtgtgatactctgtctactcccag

SEQ ID NO: 109119 - DNA, 2227 bp, Homo sapiens
ggatgacatcatcagtcaagaatcctcattggatatggaggggaattataaaaaggtaaggggggagagctcttttgtttataaacaattgaaccatttttctaactggagaaagatcacccttgaggagtggccaaattccacactcagtggctattgccataatatagtcaggaaaaactaaatgcacagaatcaaatgcattaagctaggaaagttctttctgcttttcccagcttatgttcattaatatgttacagcagcaactaaaacacacatgttgttattctgaagttgaaaaaattctattatgcatttaactgctaggcaggctttttatgtgaaggaattttttaaaaattattgacatatatttacagttcactggcaaaaaaaattactagaatgtttaacctatttttccaattttttgtttgattttattggcaatgaaaaatatcaagttttagttaacatgtttggggtttttaaaagttgatacagtatctgttcatcttttccctgcccttttttttgaaagtcagtaaatatattttgagaatgttttatatggtaatgttctggtaatcacaggcccgagtaaaaatagctttagttatatgggtgaggtcatgaaattaaactacaagtatatgcttatctgtccacagaagcctaaaacacacactatgtccttccctcttcattatttgccacaagtcaagtgtagttcacaacatggcataacatgaagaataaaatcccttccatcatgggcctggaaatgaagacctctttacctcagaggcaaatatcagttaatgatagaacagtaaaacttgctacttaatttttaatttgatcaaatacatcactaacttttttcccaggaatgacatatagaaagaagcttctgtcgtgatagatccttacgtatagtaatgtaaaatatggtagtttatatcttatatacatatatgtgtgtgtgtgagtgtggggactgttttaagtatatactgtacttcctagaggagttcacaacagcttatgttctttctccacaagctgaaacttaaatatgtgaaagcggtttcagtaacctgccatgttgccgtttgtgtttttcatcccttgtgatccccaagacaggaatgagcaccaaggtgatagttcgctgagtctcataaccctaacacttcccagctgtccgcttctgccggaagcgatgtgcaaaagatgcttgggacactctgccgtaagagtcagattgcttatccagctctgcagaacaagtgtagccatctcatacttctgctattttcagtgtcaaagaactggtcatggtgtcctttgtcagaccatttctcagatagaagaggataggtcagtttgcacttaggaaaaatgaaacataccattgctaatgcattaacaatgaagtcatgactgttctagttttttcctacttagaaacagagggaacccagatgcctggaataagtaagcagtgatacaccagcaacctgagacagggctgactaaagctacagacatgtacggctcaaggagctttaaaacatcaacaacaacaaaacagaattgcactgtgtaacccattatctaacaaaggcagtagaatgccgcatatgatttcagtatctgataggttagtacaaaaaaactgcaagatgaaacttctagatgtgtggagtgctcagagatcagttcattatgttccggatcttaaacatgagggttgttctcttgtcattccggccttttaaataccttcctcaggcaaagtgttttcaaatgtttatgtgtatcgtgattattatgaagacttcattataattatccttcttttttaaacccactctttgtaattttactatgagctagtgaaacagggcaacatacacttttttaaaaatatgaggaataagaaaatagttacctagtataaaaataactttccctaattagaatcttccttttctaattttttcgctaatatttttcctgttttgttggctaagtagaaaattaaattagatgccgtaaagtggggctctgcaggcttttttgaccttgcattcatcagtaagatggttttgagtccatgcctgtaatatacatatattttattcagaaatagcacccaccactataaaatacaatgtgtgtatgtaaaacatatacacaaatagatattttagagaataaa

SEQ ID NO: 109120 - DNA, 2227 bp, Homo sapiens; identical to SEQ ID NO: 109119

SEQ ID NO: 109121 - DNA, 2227 bp, Homo sapiens; identical to SEQ ID NO: 109119

SEQ ID NO: 109122 - DNA, 2227 bp, Homo sapiens; identical to SEQ ID NO: 109119

SEQ ID NO: 109123 - DNA, 2227 bp, Homo sapiens; identical to SEQ ID NO: 109119

SEQ ID NO: 109124 - DNA, 2227 bp, Homo sapiens; identical to SEQ ID NO: 109119

SEQ ID NO: 109125 - DNA, 2227 bp, Homo sapiens; identical to SEQ ID NO: 109119

SEQ ID NO: 109126 - DNA, 2227 bp, Homo sapiens; identical to SEQ ID NO: 109119

SEQ ID NO: 109127 - DNA, 2227 bp, Homo sapiens; identical to SEQ ID NO: 109119

SEQ ID NO: 109128 - DNA, 1083 bp, Homo sapiens
gggcccagggccgggccagccgctcgcttcgctttgttcctcaggggtgccgtctctagtgttgtgcatccaattatggtgaaagattagggaggaccctgtgaaaaaattaaaaggctggaaggaacaatatttaaagtgaagccacagctgcgcctcatgttttttttaaaaggtgaatggaaatgactgcttgagataaactgcaataaacaggaacacagaatgccagctgccattccagacaagctctctgccctccccacacaattactgaggaaaaacagccgtcgacctccattaaccctcacgtcttcctgcctgtgagggctgaatacgcttgaagaaccatgttaagttaccgaagcctgggacctagccccacctcagccacctgggaaaaatctcttccgctttgtgggccaggttctccttttcttaaaaagaaagaattagcctggtcggtcttagatgttataaatataaagcttcctggctcgtggttcaggtttcttatcatatcaccccattggcacacctcggttagccagcatggtcagggaatgggctgtttcaggtaactagaatttccggtgaaatgcaagtgtgttagatgtattcttgttctcacacacacatgcacacaaacgtgcacacacatgtccccttccatgtcatggtcatcttctacagcactctctacttggtctctttcccttctcctcgctagttgccttaggcttccagctctcctcattttcgtgtgtgtgtatggcttttttaaaaattgagatataattcacatacataaaagccacctttttaaagtgtacactttgatggtttttagtatattcataaggctgtgcacatcgtctaattccagaatttttcatcaacccaaaaagaaaccccgtacccatcaggagtcactcccaaatcctttcttctcttagcctctgacaaccgctaatttactttatgtatttataaatggacctgttccagacatttctggctccttttttctccctttctccattcttctcactaccttccccaccccttccttttaatattaat

SEQ ID NO: 109129 - DNA, 1083 bp, Homo sapiens; identical to SEQ ID NO: 109128

SEQ ID NO: 109130 - DNA, 1083 bp, Homo sapiens; identical to SEQ ID NO: 109128

SEQ ID NO: 109131 - DNA, 1083 bp, Homo sapiens; identical to SEQ ID NO: 109128

SEQ ID NO: 109132 - DNA, 1083 bp, Homo sapiens; identical to SEQ ID NO: 109128

SEQ ID NO: 109133 - DNA, 1083 bp, Homo sapiens; identical to SEQ ID NO: 109128

SEQ ID NO: 109134 - DNA, 1083 bp, Homo sapiens; identical to SEQ ID NO: 109128

SEQ ID NO: 109135 - DNA, 1083 bp, Homo sapiens; identical to SEQ ID NO: 109128

SEQ ID NO: 109136 - DNA, 1083 bp, Homo sapiens; identical to SEQ ID NO: 109128

SEQ ID NO: 109137 - DNA, 1017 bp, Homo sapiens
ttcaggtttaggatgttatttcctgaagtgtgttcctgagaaccctagaggccccccagattttcccacaaaaaatatagtttgttaattaaatagattttgaaaatgcagaaaacacccaatcttccacttgtaaatttacgtgcagattagcatgctgaaggcttcttgcttcagagacaccacaatgctgctagtaaggtgggctgggccagaggcaggaaggcagaacctggggaggggatgcaggaatgatcttggtgtgtaagggatggggccatgccatatgccgaaaaaaagggtggaaaggtcctggggacatattagatttgaagatagatgatacctacccatgctgaacattttgctctttatttcattactgaatgcccctctttgttcttgtccagattggggaattgcagtagaacagggcacatcaggaaaggctgagcattggtgttcagagtctgcaagtgctcagtggtctgttctaagatcatggtggcttgcatggcatcattgaaagtcattgtgagcctcatctgctcaggcacagcgggtggcagtagggaatttagcaacagatgaggacaaaaacttcctggggctgaatagcggtgagtttctaatcacatttttactttcatctggggcttgaatagcttttctgcctgatagtgatgagccctgttcctcagttgccctttgtttttgctagcaatactaattttagatgttgtacttttgttttatgagggtatttcccaaggctgttttaggagtggacatggttctgcctgtcataagtgcagccagacagtggtgttttgagtcagcctcttccttttcctgtacccttgtctgtttctcaccctggagcgtattgggcttggctggattaagggggctggtggaagacatatttgccttgcaggtataattcctcagagaacaaaccgcccttgaaaccacacacacatatattttacacatgtgggcaactgaaagaaaatt

SEQ ID NO: 109138 - DNA, 1017 bp, Homo sapiens; identical to SEQ ID NO: 109137

SEQ ID NO: 109139 - DNA, 1017 bp, Homo sapiens; identical to SEQ ID NO: 109137

SEQ ID NO: 109140 - DNA, 1017 bp, Homo sapiens; identical to SEQ ID NO: 109137

SEQ ID NO: 109141 - DNA, 1017 bp, Homo sapiens; identical to SEQ ID NO: 109137

SEQ ID NO: 109142 - DNA, 1017 bp, Homo sapiens; identical to SEQ ID NO: 109137

SEQ ID NO: 109143 - DNA, 1017 bp, Homo sapiens; identical to SEQ ID NO: 109137

SEQ ID NO: 109144 - DNA, 1017 bp, Homo sapiens; identical to SEQ ID NO: 109137

SEQ ID NO: 109145 - DNA, 1017 bp, Homo sapiens; identical to SEQ ID NO: 109137

SEQ ID NO: 109146 - DNA, 1154 bp, Homo sapiens
tatgctttgccagtgttttctctttttctgagaaaacatcacatccatctcagggaagaagtagacccataagtctttgtgccacattttatcctctgcatggtacccaccattattattagtctgaacaccttactctttaatgtggaaaagtgatgagaaaaagcagaaagatctggtattaggaagcatggacttggatcctactgctcctgcctaacagtatggtaacctttcatctccctcagtttcctcatattcaaagcagaaattgttggagtatgaactataatgctaccatctatcacagacttacattaccacaggtcaggtacagctgctaagtaatttacttaagttttctcatttaatcttccagcacctagtgagatcctttacctctggactgggaagagttttccaagcacaaaagccactgacagcatgacagatgaagcaagctattgacttaactacataacatttacagttgaaactcaaaaggacaaatactctactataaaatgtttaaaattctcagacctttgtaggaaaataagcaaagctaggaataagtaattcagagaaaagaaagtacagtcactaaaaacatttaaatatttactctcactagtaatcaaataaattgaaatttaaaaactactttttgcctatgaaattttttaaaaaacttttttttttaagtgaaaatgttcagtgttagccaggatgtagtgaaagctgcaccctcttacattgctggcgggcatgtggattggaacagcttttttcgagagcaatgtgacaaaatgtgtcaagagcctcaacaaatgttcacacttagctgatctgctaattccacttccaggaacttatcctgaggaaataatcagacatgtgggcaggcatttatgtaaagaggctaatttctggtcaggcatggtggctcacgcttgtaatcccagcactttgggaggctgaggcaggcggatcacgaggtcaagagattgagaccatcctggccaacatggtgaaaccctgtctctactaaaaatacaaaaattagctgagcgtagtggcgcgagcctgtagtcccagctactcaggaggctaaggcaggagaattgcttgaacctaggaggtgaatgttgcag

SEQ ID NO: 109147 - DNA, 1154 bp, Homo sapiens; identical to SEQ ID NO: 109146

SEQ ID NO: 109148 - DNA, 1154 bp, Homo sapiens; identical to SEQ ID NO: 109146

SEQ ID NO: 109149 - DNA, 1154 bp, Homo sapiens; identical to SEQ ID NO: 109146

SEQ ID NO: 109150 - DNA, 1154 bp, Homo sapiens; identical to SEQ ID NO: 109146

SEQ ID NO: 109151 - DNA, 1154 bp, Homo sapiens; identical to SEQ ID NO: 109146

SEQ ID NO: 109152 - DNA, 1154 bp, Homo sapiens; identical to SEQ ID NO: 109146

SEQ ID NO: 109153 - DNA, 1154 bp, Homo sapiens; identical to SEQ ID NO: 109146

SEQ ID NO: 109154 - DNA, 1154 bp, Homo sapiens; identical to SEQ ID NO: 109146

SEQ ID NO: 109155 - DNA, 1048 bp, Homo sapiens
attaatgtaaatggaaatatttttaaggtctcctccaatatctgtagctctagtttatcaagaaagatagacatggaatcaagggtatattcacacattcataccctgggataagagttttctttaaagcctgtttcagaccctaggctaatgtcaggccagcatgttgttgaacattaatcattaaaattcatgttgctatctactgattttatatttggatattcagctatactcaacagttttctgcctgttgaggactttggtgagaatctcttttgtctgtgatatggattgagaaaaaggttcactgactgtacaaaatctgcctggcagatatggggatttgaaatgaacttgttttaaataaaggtgtcaagtgatgtgattctgttttggctggaccatcccaagtgccagccttgcatattcggaaaggtggtttgccctaattaaggttccaagcagtacagttgcaagtggttagtgaaataaaaggcattcttgcttccctccataaccttatggttactttcttaaagcttggttttgtgctagcccggcaaaaaataagaactatgaaagcagtctttcacatctgtaaaaaaaacaaaaaatctgtataaaagtagtctttcaccttatggctgtactacacacacacacacacacacacacacacacacacacacacacacatatgctagctcctagtatgatgcagtttcattgatacatgctaaaagggggtgctatatatatagacagagataatcactaagtgtgtacagtagaaagaatgcttatggtgtccaaggattaaaaagtgtgagagaaaaggagagtagagatgaggtttctttgaactagttctcaaacctgttgaaattaaatatctggcactagagcctggggcattctaatgcagcctgttgaagctggatcttgggaaccactgtcttagctgtactttgctgtcatgtattttattctgtgctgtctagtacagtatccactagccacctgtgatggttgagctcttgaaatg

SEQ ID NO: 109156 - DNA, 1048 bp, Homo sapiens; identical to SEQ ID NO: 109155

SEQ ID NO: 109157 - DNA, 1048 bp, Homo sapiens; identical to SEQ ID NO: 109155

SEQ ID NO: 109158 - DNA, 1048 bp, Homo sapiens; identical to SEQ ID NO: 109155

SEQ ID NO: 109159 - DNA, 1048 bp, Homo sapiens; identical to SEQ ID NO: 109155

SEQ ID NO: 109160 - DNA, 1048 bp, Homo sapiens; identical to SEQ ID NO: 109155

SEQ ID NO: 109161 - DNA, 1048 bp, Homo sapiens; identical to SEQ ID NO: 109155

SEQ ID NO: 109162 - DNA, 1048 bp, Homo sapiens; identical to SEQ ID NO: 109155

SEQ ID NO: 109163 - DNA, 1048 bp, Homo sapiens; identical to SEQ ID NO: 109155

SEQ ID NO: 109164 - DNA, 1081 bp, Homo sapiens
gaagttggcacttggaagcttctttgatgatggcccaggaatttataccagctgtagcaaaagtgggaagccaagcctttcctcccggtgagtgttcttttgagttgaatttctgatatgtacacagtggattctgtcacttgactattctaataaaaaaaagcctttaaatcttctgtagtttttttttccccctcgcataatactgccatctttatttgggttttagacagacccttccccacttgtttgtcggtttctttgttgttgttgttgttattattggctcatttcccagctacttgaggtcagatttttatattccattttttttctagccacaatactgattctgtacactgatagaggaatcaagccacactcctaagcaagctgacttatgattagagacatgtggcagactaccaaatttcccattaagcagtcccagatcacccagaatcacccccctgacacatttgattgcaataaatactcgtaactgagaaatacaattcccgctttgatcattcaatgtttattacagttcttaacctgtccttctggtggtttttctttatcttaatttatttcaggatatcattactctttatcataatttatttcagaatattattggtcatttgcgtagcttctaattccaagtaagatatttaaattataattttatccaaaaaacagtgctataggccagagtttctcgaactttaatgtgcttatgaatcatctggggattttgttaaaatgaagactctgattcagtagatctaggtggggctcaagatcctccatttctatgaagccccagctgtgatattcatgctgccattccataggctactttgattagtgaaagtatagacagtctgaaaaattaggcattacaaatacgggtattccaagtgatgaaagcatgtagaatgtttttactaagatgatagtaactgatcagcattctcatggtctcccctcactccccaaatgtctgtttcctctcagtcttccttttggctaaaagcaaatatactctgttaaaatactcagttattttaccatctta

SEQ ID NO: 109165 - DNA, 1014 bp, Homo sapiens
tatctggacaggaaagtcctttttgttattctttttcttcagaagtatgctgcctgttacggctttttttattcctccacataaactttaaataatataatcaagttcaacaaaatactctcttggaattttgactgtaattgcattgattctatagaccaatttaggaagcattacattttctcattgtctttctatccatgaatatggtctgtctcccccttatttagatcttattaggtatttcttaataaggtttagacatattacacatctcttgttatatttatttctttcttaataaggtttagacatattacacatctcttgttatatttatttctagatacttgctattctgataaattctcttcagtaatgctttctcatttgctgctggtgaacagaaatgcaattaactttgtatactagtattatattcagccactttgttattactcctattacttctctactctcctattatttctaataaagttgtctgtagattccctgggatttttaaagaatgatatcatctacaaataatggcagctttatttattcattttcaattctcatgcttttggtttctttgtcttattggattggctaggtaccctaatacagtgaggattagaaatagtagtagttggaatccttagctaatttctcatattaaatgaaatgtttctactgttttcccatttcagatgatgttaattttatgtttcctttaatgattctctttatgagatgatgttccctcccaggtataacttacaaagaatttttatcatgaatgggtatttaactgtatcacatgctttttcttcatctgttgagttgaagaaaaagtacaatttcactctgttaatctattatatgaattaatgaattacatttatagattttcaaaatattaaaccatgctagcatacccagtctaaacctaaagtggttagggagtattatattttttcagatactgttggagtattatattttttcaga

SEQ ID NO: 109166 - DNA, 1014 bp, Homo sapiens; identical to SEQ ID NO: 109165

SEQ ID NO: 109167 - DNA, 1014 bp, Homo sapiens; identical to SEQ ID NO: 109165

SEQ ID NO: 109168 - DNA, 1014 bp, Homo sapiens; identical to SEQ ID NO: 109165

SEQ ID NO: 109169 - DNA, 1014 bp, Homo sapiens; identical to SEQ ID NO: 109165

SEQ ID NO: 109170 - DNA, 1014 bp, Homo sapiens; identical to SEQ ID NO: 109165

SEQ ID NO: 109171 - DNA, 1014 bp, Homo sapiens; identical to SEQ ID NO: 109165

SEQ ID NO: 109172 - DNA, 1014 bp, Homo sapiens; identical to SEQ ID NO: 109165

SEQ ID NO: 109173 - DNA, 1014 bp, Homo sapiens; identical to SEQ ID NO: 109165

SEQ ID NO: 109174 - DNA, 1032 bp, Homo sapiens
ttatttttcatttgttttgctttctgcccaccaataactaagtataagacactaaaagctgtttataaactgtggttggggctagttggcatgcatcatctgcttagagagcccttccctgaccaccctattaaaagtaaacgttctcgtacccatcactttgtccggtcttaccctgcttatcttcttaccctgatttgtttgttggggggggtgggggggggcttattataacctaacgttgtagtatatatactttgttctgtctttctctagctctaaaatataagctctaagagagcaagacttcgtctctattttgttcaccactgtaactattgcctaaaatagtatctaatacataatcactaaatatttgttgaataaatgaatggtgaacttcactatagaatggctgaataaggacacagctctttcattgggatgcatctaattgaaagtatctaggagtcttttctcttgggctatgaattgcgactgagagaaaccctccaacctcatcttgaggcattttaaacctggctgccaatgttttaagactctagcaggggaaagataggaactgtagcatataaaattttacttaatttccttgatttcagtaaagcatctctttgccacctcagctgtgcctgagcatgctccagtctcaacctcttaagacaataaatttcctgattctgccaggccacaggtggtcagggcagatagcagggcaagagggtcctttcaggtgttaaatcaatctttgtgttcggtcctacttcactcccctactttcagctgtatctgagcatttcgaggatcctgcagtagaaatgcatgtgcttcctctaccagcctcccctgtgggcacatggtagattgaggtagttaagtcaaatactccccacccatctgcatattatcttctaaaatttcatcaaaatcccttgtgtgctgttgtttccatttcctttttctttgtgcatatagatttgtaccttctttttttctttaatattattttag

SEQ ID NO: 109175 - DNA, 1032 bp, Homo sapiens; identical to SEQ ID NO: 109174

SEQ ID NO: 109176 - DNA, 1032 bp, Homo sapiens; identical to SEQ ID NO: 109174

SEQ ID NO: 109177 - DNA, 1032 bp, Homo sapiens; identical to SEQ ID NO: 109174

SEQ ID NO: 109178 - DNA, 1032 bp, Homo sapiens; identical to SEQ ID NO: 109174

SEQ ID NO: 109179 - DNA, 1032 bp, Homo sapiens; identical to SEQ ID NO: 109174

SEQ ID NO: 109180 - DNA, 1032 bp, Homo sapiens; identical to SEQ ID NO: 109174

SEQ ID NO: 109181 - DNA, 1032 bp, Homo sapiens; identical to SEQ ID NO: 109174

SEQ ID NO: 109182 - DNA, 1032 bp, Homo sapiens; identical to SEQ ID NO: 109174

SEQ ID NO: 109183 - DNA, 2134 bp, Homo sapiens
ggagtttcaactgttcctgtgagcgtgagttcctctcagttgtctgttgggttttagccccactggatttttctagatgttgctatctcctaaagcacttcttaagagtgacaagttgttaaatgaaagctaggcttacaataatcccataaagacatttcatgcctaatagtgcagcaaaataatatttgatgttgcttcataactcaactaattaaatttgacttatactgaaatgtggcaagtagagtgtcatttttttcttcaaaatttgctaatccacacattatcagccctttacaaactgaaactgtataacctttgtcattttttctatttaaaagtgtttccgtaaaaagttttttaaagcttaaaatgaaatgagaaaaatgaattatctatttttgaaataaggtttctaagaaatattagggttagtcatattcttgaagaaacattttttctattattactagtatgatactttcctataaaatatgttttcattggccaaactaattatcagttagcattatgtttcagatgatgagcttgtatagcttagtgtaattaaaggaatagaaacaggcttagctgctgtgggaacacaagatagtctttattaatagatatctgggaaatcttttattttttaaacattacaacctgacctaacattgtgaaggaagttttctctgccttctccttttaccttttctcagagtaaccacgaaataaatttgattctcacctctcttcttaccttaccccaagagagaacttatttacatacatatacatataaacacagtctttttcataaagtgtgcaatgggatgatgtgacctgaaataggctataccattttctccaaaggctgaatattatgaaaaacagaaattccccagagaacttttgagcagctgctttgaataatgattactgtttacttaactcaaccattccaacatcacccaatcaaaactcatttctttcttggccttataggtttattggtaaatggctgagacaaggccaataatggacacctgccatctccttttgtgtttgggctggagggcaaggagtggggggcaccctaactgggagctgttatcaactggaccaataacagtgaatccagagagacttcaaagaaataggattcacagggactttaaaagtgaggaactgagaatctgtatatacaatgtgccacgaatcacaggtcgaaccagcatcattttgccaagaaagtcaatcatccttttgtctctaacagtaataattgttgtatgattttctggaagaagtaagcacaacggttatatctgcccagcgttaatgaggaaagaggttgtctagttccaactcagtgaaattgcctgtctgtggcatctttcttgaaataatagatgcatactgtagcaacctatttataacatgcaacatatctttaacatttcatattagtctcatacatatatactaaagatttgctttaaaaacccttcatataagtatttccaaggtgtgtgtcattgcaaatggtagctaatgatgacttcttttttttcactatttgaaaggccactgggtagtctaaaaaaaaaaaaaacaaaaactatcattttttatgcccctcctctaaggattgcttccagtattcaaaaatattacacaatttcaaaagtgaagcaagatttgaagtagatcttttgaggagtaataagattaaaatggcaaaacaaatctaattatgtaagcaattcttctccttcacaaacctgaaagaaaagcaaattggtatttgtgaaattttctttgtctaataaatagtctcactttacaataacaccaatgaccctggtttaattaggtgcaattaattttatgcaagctgaatttgacatcttgctagaggcataaccagctgtaccctgtcttatgaatttttttttatcaccaatgagaattcaattgcctgagctattgcaaaagagggggaggcaggaagaaaaagaccacagggctgcattttatatttaaaaatggctctagtagacagctgaatgtttaattaaaagagtttctaggaattatttttcattggtgcatcatctttgacaagcta

SEQ ID NO: 109184 - DNA, 2134 bp, Homo sapiens; identical to SEQ ID NO: 109183

SEQ ID NO: 109185 - DNA, 2134 bp, Homo sapiens; identical to SEQ ID NO: 109183

SEQ ID NO: 109186 - DNA, 2134 bp, Homo sapiens; identical to SEQ ID NO: 109183

SEQ ID NO: 109187 - DNA, 2134 bp, Homo sapiens; identical to SEQ ID NO: 109183

SEQ ID NO: 109188 - DNA, 2134 bp, Homo sapiens; identical to SEQ ID NO: 109183

SEQ ID NO: 109189 - DNA, 2134 bp, Homo sapiens; identical to SEQ ID NO: 109183

SEQ ID NO: 109190 - DNA, 2134 bp, Homo sapiens; identical to SEQ ID NO: 109183

SEQ ID NO: 109191 - DNA, 2134 bp, Homo sapiens; identical to SEQ ID NO: 109183

SEQ ID NO: 109192 - DNA, 1078 bp, Homo sapiens
ttattacctggtttgtgggctgatagagttaagtactgcaatcatgccaccacctacctgaggtacagcagctgagatacatccctattttaggctgggagcagtggctcacgcctgtaatcccagcactttaggaggccaaggcaggtggatcacctgaggtcaggagttcaagatcagcacagccaacatgatgaaacccccatctctactaaaaatacaaaaattagccaggagtggtggcgggcgcctataatcccagctactcaggaggctgaggcaggagaatcgctttaaccctggaggcagaggttgcagtgagccgagatcaccccattgcactccagcctgggtgacaagagcgaaactctgtttcaaagaataaaaaataaagactgcaaaatgtaaataaccatgcttcatagaatcaatgcaatcttattgatccactgcattctttttcacgactgcgtagaattcaaacagtcacaaactaaatcatgaaagccagtgtttttgagatgaagcttaccatggaaccaagcctaaatggtggccccaaaatgtttctaaacatgaacataaaaagtggtaaagcagtgctttaatggtcaaaagaataaaagaatttgcaattaagattttcgcctacttcaggaatatgcctcagaaacacacacaggcactgactctccgctgtcatgttttttacccagtccgcatgaacattttcaaaggtctggaaggggaaaagtatttcttctctaaccttcattgcctcaacagctgaaactcatcagcaggtggggtagataggtgtttaaactctgtctgagctgagcagaataaataggcagcctggctttaaaaatacaaacagttaaatttatatcaattacgttagagtctgtaatttactgcagatccaaggaggagaatgaaatcaagactggattgaggagggatgtcaacagttgaatcagagtccatccacagaaatgttctcttataagaaaatatgtttcttgctgcccacggatctcccaccacctccagcaccctgccaaaaacaaaagtc

SEQ ID NO: 109193 - DNA, 1078 bp, Homo sapiens; identical to SEQ ID NO: 109192

SEQ ID NO: 109194 - DNA, 1078 bp, Homo sapiens; identical to SEQ ID NO: 109192

SEQ ID NO: 109195 - DNA, 1078 bp, Homo sapiens; identical to SEQ ID NO: 109192

SEQ ID NO: 109196 - DNA, 1078 bp, Homo sapiens; identical to SEQ ID NO: 109192

SEQ ID NO: 109197 - DNA, 1078 bp, Homo sapiens; identical to SEQ ID NO: 109192

SEQ ID NO: 109198 - DNA, 1078 bp, Homo sapiens; identical to SEQ ID NO: 109192

SEQ ID NO: 109199 - DNA, 1078 bp, Homo sapiens; identical to SEQ ID NO: 109192

SEQ ID NO: 109200 - DNA, 1078 bp, Homo sapiens; identical to SEQ ID NO: 109192

SEQ ID NO: 109201 - DNA, 1040 bp, Homo sapiens
tgccagctttttgttttggttttgtttttgttttgctttctttcttttttttttctttcttctctttttttctaccattaatgaatttgtttcctcctttttaaagtgctctgacatctcaagacggactttcctaaagtatcagtgttgtgatattgtgtaatttaacctctctgagccgttttctcatatgtgaaacagggttcacagtgcctgcttcatgtgtatctgagggttagacataaaatagtaaaatgcctggcacttagtagatgctcaaaaacagtaacttttaatttcagaatacagattacttggaaattacttggccttatttaacatggaagtagataacatttgctgcctacgagagatggctgttttattcctcgtatcagaagaggcctcgttctggtctttcattcatgctagagaacatttcagttgaaaatgcattttcccaacattaagatcctataattccaaatttaattacatgaaagtggtcattagtgaaggaaatggacactgatgtagaattagaaccaacagccgtctgaggaatgcaagtatttatagctctctggagattcgggttaggatacaggggcgatgtttctccaaagaaaagctggtgagtgatagtttcccttttctattagttgcctaagtcagtgaggagattctgtggctatgtggtgccacagaatggccggtgtgcttaccagccatcatgtgaacatgtacagatggaagggtccagaactagtcttagaagagcaagcagaaaaaagaaagtatgcataagattaggaggagaaaacccagagagggtcattcacactccaactacctttggagctgccttcatcagcttctgctgaggaagccgaacacctgagtcctgtaaggtggggatcaggacaggatataaagagacataatgtcctccccagtcctctctttggcatatagttggaaactacccataacttctctgggcacataactactggagggtcagcttttctatctctctc

SEQ ID NO: 109202 - DNA, 1040 bp, Homo sapiens; identical to SEQ ID NO: 109201

SEQ ID NO: 109203 - DNA, 1040 bp, Homo sapiens; identical to SEQ ID NO: 109201

SEQ ID NO: 109204 - DNA, 1040 bp, Homo sapiens; identical to SEQ ID NO: 109201

SEQ ID NO: 109205 - DNA, 1040 bp, Homo sapiens; identical to SEQ ID NO: 109201

SEQ ID NO: 109206 - DNA, 1040 bp, Homo sapiens; identical to SEQ ID NO: 109201

SEQ ID NO: 109207 - DNA, 1040 bp, Homo sapiens; identical to SEQ ID NO: 109201

SEQ ID NO: 109208 - DNA, 1040 bp, Homo sapiens; identical to SEQ ID NO: 109201

SEQ ID NO: 109209 - DNA, 1040 bp, Homo sapiens; identical to SEQ ID NO: 109201

SEQ ID NO: 109210 - DNA, 1050 bp, Homo sapiens
aaaagaagtcagcgtggccgcagaacaacagaatttatgatcagactttcttctgagtgaaaatacatatatctggacattgtaaactttattttgctttgtgttttgtattgcgggttattttacatttttataatctgtgtatccagtagccagacccttcttctcaagactttattcaataaatagaaaatgctacataatcctagattcaaattagggtttgtctttaaaatgtgtctgtttttaatttgctaacagcttttttcccaccatcttccaatccatagaacttgagtattattattaaaagggggttgattttatttttttagaccgacagacattaaaatttctaaacctgcatggaatcaaagggtaacctgaacatattagatttctccaggaaaaaaatatatatgtgtgtctgtgtctgtgtgtgtgtgtgtgtgtgtgtgtgtgtgtgtgtgtgtgtttatgtatgtatgtatatccaatggataaaagtaaaaaggtggcaaatcccagctcagtagaagaacaaactgcctaatagaccatgtgttgtctcagagagttgattctacatcagggattattgtgacaggacaagcagtattagagtaagtgactttagagagtcatttcacctctaaaattctgttccttttgtttagactttcagtaaatagagaatggagagcaactcacatgtacaggtcacttgccctgcactaagctctgaatgaactattttaatccttcctgcataacactgggtttgctactattcaacccattttatcgatgaggaaaactgagggtcatagagcttttgtaatgtgcctggagaaagaagtaaggattcagaacctaagttcagctcactccaagcatcttcagatgatcagagtggggtgtgttgctttctaacccctagttctgggcctggctcccccttgcctgtgccatgagggtagggagcaaatagagctgggcagattgagggaatggctgcattttcttacaggggttgtaagctgggatttt

SEQ ID NO: 109211 - DNA, 1050 bp, Homo sapiens; identical to SEQ ID NO: 109210

SEQ ID NO: 109212 - DNA, 1050 bp, Homo sapiens; identical to SEQ ID NO: 109210

SEQ ID NO: 109213 - DNA, 1050 bp, Homo sapiens; identical to SEQ ID NO: 109210

SEQ ID NO: 109214 - DNA, 1050 bp, Homo sapiens; identical to SEQ ID NO: 109210

SEQ ID NO: 109215 - DNA, 1050 bp, Homo sapiens; identical to SEQ ID NO: 109210

SEQ ID NO: 109216 - DNA, 1050 bp, Homo sapiens; identical to SEQ ID NO: 109210

SEQ ID NO: 109217 - DNA, 1050 bp, Homo sapiens; identical to SEQ ID NO: 109210

SEQ ID NO: 109218 - DNA, 1050 bp, Homo sapiens; identical to SEQ ID NO: 109210

SEQ ID NO: 109219 - DNA, 1039 bp, Homo sapiens
ttgcccgaggaccccattcatcttgattgacaggactgtaaactcaaagactcaacacatttttattgtgcaccaactatctgtttggtattgtgctgggtgctctaacatggggccttaaattatttttcacttaccatgaaactggcgaggaaaaaactcacagaacattggaaaatcctctactaagagttatttatatgtggagagtaatattggttgctcatttctccatgtgaagaacacataagactactttctgttagcaaaatcagacagttctattggctgaagccaaataacaaacagctaagtagaactagtgtcctgtttgtttctgcccagactgcagagtgggatgaacttgcagatatgctttgtcaacgacagtggcagtgataaggacagtgatgctgatgacagtaagactgaaaccagcttggacacccccttgtctcccatggtgagtccaaacagcaccagctgaagctcggtgttgtgatttccgggccatttagcttcttttctgttgtaaggtgaatcaggaacaaacatttcagagattaaagaagaaaagtttcttggaattgcatgctcctaaaatttgacaatgattaaaaagtcaaagttgtaataaaatagagatatataagctttcttaaagttaataactattttcatattaaaccattagagaaatcaccagcctgggcaacatggcaaaaccctgtctctataaaaaaatacaaacattagctgatcatggtgcctatagtcccagctactcaggaggctgaggcgggaggatcagctgagcccaggagttcaaggctgcagtgagctatgatgacacctctgcactccagccggggcaacatagtgagaccctgtctctaacgagagagagtgtattagttcattttcatgttgccgataaagacatatccaagactgggcaatttacaaaagaaagaggtttaatggacttacagttccacatggctaatgaggccttgcaatcatggcggaaggcaaggag

SEQ ID NO: 109220 - DNA, 1050 bp, Homo sapiens
gggatgataatgcctgtgtcagagtatgattgtgaggattcagtgagataaagtattcaaagcacatagcacagtgcttgtagcatggtataaattattaaatagtagctgatactaattttttccatgtcattgatattattgatgttccttgataattcatttgtggctataacattgactcacaacccatattaaagacgagtcaaaaagcttttgatgctggtagtgttgtgttttgatgccagttgcatattaggtaatgtagtgtggatgtagggccccacattgggaaagacacagactgggaaagcttttaatcactgaattgcagtgggtgggtgagtgggtcttttaagagaaaactgggtcttaacgttcagtgtgtttgtggctctgttcactcctccatttcttctcctttgtatcttcagctgccacacatgcctcatataagtgaatgcttgatgaaaagaagtttaaaacccaccgacctgagagacatgactattgggcagctacaagtgatagtcaatgatctccattcccagatagaaagtaagtgtaagatatgcttgaaaataggatattcaatgtaaaacattatgggataatgctgcttccttggtccaactttttcatacaacatttcattgggttcctgtgtgattgcaaggaaaataagagaatcacaaggctcttttttgttgctgttgttttagctgtaaaatgttcagaagctttaagaatttttcaagattcacaatagttataggtcccttctatttattttaaatccccagctcctagcacagtgcatgtacctgacttacaacacctgtttctggaacacagttcagtagttacaagtcatttgctatacaagtatactttctactttagttgtatacacattcatcgtaggtatcatcatcatcaataaaatcaaattagacacatttcctaggactccaggtggtggagtatgtggaaccaatatgtgaaaattacagggtgacaaaatacagacttttcttcccagaataaaga

SEQ ID NO: 109221 - DNA, 1091 bp, Homo sapiens
tatgagccaaacagggaaatgtgaatactaactgaatgttttagtaaggattgatttattttaggtgtgataaaggtgttgcagttatgtgaatttaaaaaagaaaagctggccgggcgcggtggctcatgcctgtgatcccagcactttgggaggccgaggtgggcagatcacgaggtcaggagatcgagaccatcctggctaacatggtgaaaccccatctctattaaaaatacaaaaaattagctgggcatggtggtgggcacctgtagtccagctactcgggaggctgaggcaggagaatggcgtgaacccgggaggcggagcttgcagtgagccgagatctcgccactgcactccagcctgggtgacagagcgagacaccatctcaaaaaaaaaaaaagaaagaaagaaaagaaaagcctctgtcttttagagatacctactgaagcatttacagataaaataatgtgatagctggaatttgctttaaaataatccagtagaagtcggagagagaaatgattcaagcttggccatgagttgataattgttgaagctagttggatacatggaaattcattaaactgttttctctgcttttgtagcagtttgaaaattttccataataaaaagcttaaaacttcatattggaaaaacaattctatgcattaagggttcagatatgtagacactctactaagtgacagtataaaaggctacacaagagcacactggaaaaaatgaaatttttccacaagatccaaataaaaaaaattggacatattcagtgccaagttaacacattgaatattgttttaaaattaagagaaagggtcaaacattttgattaagaaaccatagattcacaggattttttaaaaaaattctacaactgcattttaattttagttgaaaattaattactagagttgctattctttcaaggactaaaagcactttctgatattttaccactaaaacatcttccttagacttttaaacactgaaattgccatctagtccttttcaggaatagatgaaattttagacctctttgtgtgatttttttttttggggggctctctttt

SEQ ID NO: 109222 - DNA, 1091 bp, Homo sapiens; identical to SEQ ID NO: 109221

SEQ ID NO: 109223 - DNA, 1091 bp, Homo sapiens; identical to SEQ ID NO: 109221

SEQ ID NO: 109224 - DNA, 1091 bp, Homo sapiens; identical to SEQ ID NO: 109221

SEQ ID NO: 109225 - DNA, 1091 bp, Homo sapiens; identical to SEQ ID NO: 109221

SEQ ID NO: 109226 - DNA, 1091 bp, Homo sapiens; identical to SEQ ID NO: 109221

SEQ ID NO: 109227 - DNA, 1091 bp, Homo sapiens; identical to SEQ ID NO: 109221

SEQ ID NO: 109228 - DNA, 1091 bp, Homo sapiens; identical to SEQ ID NO: 109221

SEQ ID NO: 109229 - DNA, 1091 bp, Homo sapiens; identical to SEQ ID NO: 109221

SEQ ID NO: 109230 - DNA, 1037 bp, Homo sapiens
tagaaggctctccaaagaaggaacacctcttggcacaatgatgtaaggagttaaccacatggtctacaacaatcccagagaagctcgaaaacatatgtagtgataataatgctcccagcacctaccatagacctcatctcaatgtgtaatgctgggtaaaataattgtctaatgctgcaatgatataaaaaatagttttggtagcaaaataaatgctggaaaaatatgtttaagctttcttttttaagacttacgggcagcactgttttgtatgttttacatattatattgccttatccctagccaaaaacaaaacaaaacagtaagccttctcatactctttgaacatatttgcctgcatctgaaatatcacaataacactcaaataatattattgccatctaaagatgtattcaggcactacaccaccagcaattataaaacatcccttttttgttagtttaagaagtttgcatgcaggtgttaagattatgggaaatcggtggtgaaatatacaatcagggcctacatttttttaaaaaaatatataaattcttgtaaactatgatttacctgtgacagcagagatcttttctctgtctctcagaatagtattgtcatttcttttttggcaagaagaagaggcccctcctcttctctctaagtgttaggctaatacttaggtttgcagtgtatgtttttataactttcagatggtgtgaccatcggaaacagggcaggcaaaaccatggagttaaaaggagaggagtcactaatttaaaggtgttggaggcattctttgaattggagcagtcctaccatgggccccaggggcatgatgtccttgcctagcctgcctcttggtgggaagaagcttctacatctgctcttggctgcagaaaagtaactttcctcattggagggacctgaggatacttaaacatccctaaaggcagcagccccagagtcctgcagccagatctcagaaggcggagggggtggctgtggggactgctgggacatgtggtccacctctt

SEQ ID NO: 109231 - DNA, 1037 bp, Homo sapiens; identical to SEQ ID NO: 109230

SEQ ID NO: 109232 - DNA, 1037 bp, Homo sapiens; identical to SEQ ID NO: 109230

SEQ ID NO: 109233 - DNA, 1037 bp, Homo sapiens; identical to SEQ ID NO: 109230

SEQ ID NO: 109234 - DNA, 1037 bp, Homo sapiens; identical to SEQ ID NO: 109230

SEQ ID NO: 109235 - DNA, 1037 bp, Homo sapiens; identical to SEQ ID NO: 109230

SEQ ID NO: 109236 - DNA, 1037 bp, Homo sapiens; identical to SEQ ID NO: 109230

SEQ ID NO: 109237 - DNA, 1037 bp, Homo sapiens; identical to SEQ ID NO: 109230

SEQ ID NO: 109238 - DNA, 1037 bp, Homo sapiens; identical to SEQ ID NO: 109230

SEQ ID NO: 109239 - DNA, 1003 bp, Homo sapiens
ttgattctaatctatttcactgtcagtaactctgaacttcagtttgcaggatgctgtagctattgattgaaaagcagtttggatctctctacatgatgctaaataattgtattaattgttttacagacatgctgaaagtcagcagaagcacatggcagagaaaatgcctgcaaagtgaaaagaagccattcaaccagagaacaagctagaatttattttgcttctgtggttgtaaaaatgctgttgctaaaggtggcgcagaaacaaatatcagtgttagtcattgataatgtctgaagcttaatgtccagtgattggcctttgcttcttaatttattttaattttttacttgtgccacttaatatcaggcattttaataaaatattgttacaaaaaatgtacagtactgacaccaccacaaatcatggttaataaaagagagtagttttaactttatttttatttgtttagagattttaagttggaacagtattttcccattgactacttttcattcttcactgtagttttaaagaagaactgtaaatgacggtgctatacaagtcaaaaaatacatgcctgcctcgtagtgaagttgtagctctccgtaatatgtatattttactcagttttcaacattttgtgaatgttgactacctgaagttcctttttagatgtgctattaacattctgttggattcagagggttccttgaaagttttatgtataaatatgtaaaataaaaattaaaactttgtttcatatcatatgtctttttgctcactaacaaggcttatactggcttaacccttctgcaactaaattccccaccaggaaacttttatcagtgaaaaaacaaattgctccagaggacacacaagtggcaaattgcccagaaaattatgagcgtgagtgcgtgtctgtgagtatgtgtgtgtgagagagtgatccgaagaacaccaaaggtcagtagcatcagagcctgcacttctattattgctt

SEQ ID NO: 109240 - DNA, 1050 bp, Homo sapiens
gattgttcaataactgaggaggtatttatatttatttgtcttttattctaatatttttaccatgcattgaacgcaacaggagggtatttcagcaaattcacgacaaggtaatcgtcttatcactttttgtaggccattaatggtcaggaaattgcccatactctgtcattattgtttaataaatcattaaattatttcattaaaaaagaaaaacaggtatggtcaaacgaggaagcatatgtgacataaaaaacatgaaggatatcttattttcactatttgagaagaatatattttatttttagtactgtggcataatatataactttttataataataactgtatgcattatgtagtatagcttttaattgtatcattcatcacagttatatgtaaaaataattgacatgtatatgccataccatgaagcatatgatgttgtgcactttctcctccatttttcatttggaatacattccacaacatgatccaaaacataagaacttacgacttgtaactcgtttaaagccattaattgtgcagtaatgtgctacaggattcaatcagcttctcttaagaaacaagtgtcattgtatcagtttcctgttctgtgacacgccctttaaaagtaaaagataatataacatattttaatacattgtgtgtaatgtacatatgcatattgtctatgtactatatacacattgtttataatattgttattacagtttgtcattcacctgaaaggagaaggaaaagtacgaaaggtttctctgcttgggaaaaggtgaatgttgttatatcaagaacgattacacacatggatctcatacatgtttttagaacattgttcttctgattgaagaagtctgatgctcctgaaaaatcttaaaatatctgacttgtattgaagaaaattatttaattaaatttttaaaggctggttgaaaaagtctgacagttctgagaattttttaaatgtctgaattgtaataaaaaaatggtttactttaaacttctaaaaactaatgaccttgtgactaaagaa

SEQ ID NO: 109241 - DNA, 1062 bp, Homo sapiens
taagcacattttattttcactgacttctcaagagtagggaaataatggtcctgcatattgtaatccatctggaatgcaaaaaacatgattgattttctaaatttaggtgctagatatataaatatgtatattgtgtatgtacagttggttctcctgtatctgtgggttctgcatctgcagatgcaaccaactgcaggtagaaaatgtatttttttaattttttgaaaatatttttaagaaagaaaatataacatttaaaactgcaaattaatacgttatagcaactatttacataacatttatattgtattaagtgttataagtcatctagaggcgatgtaaagtatatgggatgatatgcataggttatatgcaaatactacaccactttatatcagggagctgattttgacctttgcagggggtcctaaaaccaatctctatggatacctagggatgactgtagtgtgtgtgtgtgtgtgtgtgtgtgtgtgtaatcaccagttgattacaagcaatttgttatgggtgttcaatatcataaccaaggggaaaatgtcttcttgagatagaatgatagttttaagaggccattaattgctacattctgcaaatgtgagtatgcttcaaccatggaaaatgggcattggcaattatgtcaaagggcatgaaatgtactctataaggaaaacaagattcaattgtaaaggccagagggaatattaaggaaacggactcagttaacaatttgaaaggcaatatgctaagtaccttaatgttgtactttttgtatacagtttctctcaagtggaattaataaaggaaacaattcaaagctgaaactcatataaacatgaatatgatgtctagatttatacaatattctgatctgacttttattaaaaattttatgaattgtaattaatttgggtttccagcttgagagaaataatgatgtatgttgagttttattttgagcaacaaacattaaccatctcttcaaaagtgtaagtttcctaaaccaatcaatagtagaatatttggcaagttcatatctgacct

SEQ ID NO: 109242 - DNA, 1036 bp, Homo sapiens
cttcttaactttgatgctctctttttctctaatcttttgatgctctctttttctctaatcttttggaagtcacacagtctatctgtttactcttagttactttggagtaaacaaaaatgtcttacactatctaagcatatttcttcttttttttttctattgcagctccaaatagattgggagaaaatcaaagccaaaattgagatggaaattacaaaagaaagagagcaatcatcaagcagccaatccagcaagagtataggtttaaagccctaaatgccatgcgtatctttaagaaattttatcttttgaaacacgttctgattaaccaagggtaagcatgttttggttgctaaagaaaaaagcataatctttaaccgagtataagtacttgctgtgtatttagtgtaaaagtacatgcagaaagatgaaacacaaagtaattgatgtatttctatcttttatattttttagtccaataattagcaaaatattactatgtacttaagagatacctgtgtagtgtcgattatatgtcagttttttgcccattacttcatccctaaatcttcagcatgaacaaatattaatgtcgataataaaacattggactctttgaaatgtatgttaccattaatttctatttgacctctaaattgtaaaatgcctccaaaagtttatttatagaacaaaaatacatgaggatggatttgtacaaatgtataaaatgccactatttatacaccaagttcatagcagcattactggaatagcaaaagatggaaacagctcaagtgtctatcatgaatggataaacaaatgtgctataatacatacaatggaatattatttagctttaaaaaggaatgaaattctgataaatactacctcaggataaaccttgaaaacactatgctaagtgaaataagccagacacaaaaggccaaatatgatgccacttttatgaggtaccagcataggcaagttcacagaaacagaaaggagaatagtggttgccagggactgcagggaggag

SEQ ID NO: 109243 - DNA, 1098 bp, Homo sapiens
gacattattggatctttggacaaacattgcatctttgtggtgtactttaacatagtcctctgtcccctgaattagttgcatattggttgttgaatctaggaacttgattagatttaggtttttttttttttgataagacttcattatagtagtgttagatgtttttgtaatgactggctgtagtggtttttcatggtattttttgtgatgttagtagccattgatgatcattgcccaaatctattaatttgagcttacaaaatggtgatattctatcattccagaaggatagaatttgttagatgctaaatacattagattgcttttaatatccctgaatctctatatttgtttaaatcctctagaagggaacagattttgttttgttcatatgtgatattccacttgagaagcatagtcttgctggtttatgcttctgtctttcatgtttgaatttgaaaattgcctgcaacctaataaggtacagctcttgaagagttataggtaagcaagttatctgtttgctatccactttggacatttggtagtagtctgttctcaaaaactgaagttaagagaggtagaaactagaaactctaaatatgcatgttaatcctttatgtgcatattaataaaaataatttctgatctcagttatacaaagtgatttcgcttcattcaagttatgcaaaaatcatattttgaagttataacatctttttatataacttccttctatttaaaatacatggatttattccagccttagaatctaatgtcacatttgtttggttgccaaataaccattttaaaactagagacatactgttcccaaaacccttagataatttggagtaagttccctcctaaatgtggagaagaaacatttttttacccagtatgtgcttttagagaacatttaaaatagcacatatcatttgaatgtttacccttagccattgctattcaatcgatacatattttattataataataataatgacaatgatagataattcttaggatctagcatctaaatgcaggattagacatcatattctattctttctacataattaaatgtattgatgtttcata

SEQ ID NO: 109244 - DNA, 1041 bp, Homo sapiens
tgttctgtctgtcttaaaatcaactcttgattatctttggaaaatatttaatcttgaaatatctgccccgttttattacaggagctgatctccccaactatcagttagataaatcattgctaagcagcccctaaaaagaaaaacactttagaagtaatgctaaaataatcatctactttaaaaaattattttacagactgcaccttatttgcgtgtatgccttttcctccactaactctaaaaattagggggcttactggagatacggagaggatagttctgaaagcctccctcaagagtttagggaaattctcagactgggagcttagcttagctcccaaagcaagtgtttgtgacaaatataggttcttcaagacttctccatagttctctggtattctggaactttgagttgaatattttacaataaggccacaaatttgtaacaccgtattgatgacttatggagaatctcacttgttagtaattaatctttttctactccaactgaatgtactgtaattcaattcagacactgattactcagagttagtgcgatgccaaaagttggctggacatggtggcttacgcctgcaatcccagcattttgggaggccaagatgggtggatcacttgagctcaggagtttgagaccagcctgcgcaacatggtgaaaccacatttctacaaaatatacaaaacttaggcaggcatagtggcacgcccctgtactcccagctacttgggaggctgaggtgggaagatagcttgagccctcttgaggcagaggttgcagtgagctgagatcacgccactgcaccacagcctgggcatcagagcaggaccctgtctccaaaaaagaaaaaaaaagttaaggacaaaggcctgccaagactgacctcacttcagatgccagcactagttttgtgggggtgggggttcccaagggcacttgcatttctgaccaactggctaaaaatttggggaccccatcagcccctcaagttcaataatttgttagaatgactcagaactcaggaa

SEQ ID NO: 109245 - DNA, 1047 bp, Homo sapiens
aattaataattactaaatcagtaattagtaatcactaattattagcagtaatttatttattttgctttgtccatgtatttacttactgaaatgattatcagattctttgcattagccaagattagttgcctaccagtttgcttactcactgcttccttccccttccctccttcatcttctggatttgaacgtgggatttaatctgaggtagagaattggctttatgaaaattactgagaaattcagaatatataggagtaataaaacttattttaaactgtggaacaatttttattatttaaggatgggtttttctgtttgtaaatgttctctttacccaccccgatctttgattcatgttaccctataaaaacaaaatgatctgtttgttcatttattaatccatttattcaataagcatgttcatggcttacatttatatagtattttagagtttacagaatgcttcacagaaatcttttcatttcaacccaacaataacattgggaggcctgcaggaaaaataatcatgttcatcatattactgttattacagtttctgtttttctggtacctgctttataacaggtcttttgccagacaaaatgtaagtcatcattatccccattttacaaataaggaagctaatgcttagcaggttaagcttgttaagatcaagtgggcaggcacagtggctcatgcctgtaatcccagcactttgggaggcagaggcgggtggatcatgaggtcaggagatctagaccatcctggctaacacggtgaaaccctgcctctactaaaaatacaaaaaattagccgggtgtggtggcaggcgcctgtagtcccagctactcgggaggctgaggcaggagaatggcgtgaacctgggaagaggagcttgcagtgagccgagattgtgccactggactccagcctgggcgacagagcgagactccatctcaaaaaaaaaaaaaaaaaagaaaaaatcaagtggctgacaggtggtgaaaccatatttctaatccagatatgtctaacaaaaagcta

SEQ ID NO: 109246 - DNA, 1086 bp, Homo sapiens
gtgagactaaacaatcgcaattgtttttgtttgcccaacttagaattttacagtttccttagaggcttctttggcttttggtttatccgtgtttcattaactcagaaaccagagatcatgttgagtcatgattgttaaatctacaccttgacctgctggtgctgttttcctacagtagacttatttgccctaccgtctctctgaacctcagcttttgtgggacatgatagcctgtagtgaaaaagtttcttaatctgcctcttgcctccaggaagcagcccagtggataattctttccaaaagagatccttgatgtctctgttagaaggaagtgcctaggagggaaagcgtgcaggtacaaagggtgaggcatttctagtgtcccaaagttacctttgtttctctcctgccactctaactttaggatggggtataaatttggcttttaatagtcatcaaagttcaaaagtgtcttaattcttacaggacattttatgtcttgtaaaaataagagctaataatagagtaatattgaagatgaaatgagataatatatgtaaaacaaaaatgatagctattgctatgattatgattatagctataggattaaatgagtgttttgcaaatgtgcaaacagaatgtttagacttatgtcaatctgaggagtctaaatattgtgatcatatagaagaattaggtgatgcgaatatcaggaaattaatcctggagctgccctgagttgaacagagtaataggtgtattttaaaattcagcacagaggccgggcacgatggctcacacctatcatcccagcactttgggaggccgaggcgggtggatcacaaggtcagaagttaagaccagcctgaccaacatagtgaaaccccgtctctactaaaaatacaaaaaattagccgggcgtggtggcttgtgcctgtagtcccagttactcagaaggctgaggcaggagaatcacttgaaccctggaggcagaggttgcagtgggctgagatcacgccactgcactccagcctgggtgacagagcaagactcttgtctcaaaaaaaaaaaaaaaaaattcagcac

SEQ ID NO: 109247 - DNA, 1025 bp, Homo sapiens
tggctcatctttgtctctccttcagggcctctagcccagtgccttgcctttaatatattaataattagttgaagaaaggtacaaggagaagatcaaagtaccatgtgccaatgcaaatcctcaaaaagaaggattcgaccttcctcttattccttttgcctgtatcaattgcctctatcttcagtattcataattcatattattactataaaaatttagaagcatgggcaggtctattcaaatattctgttagcccacatatccagattttaaaatttggataatattgtcactagattactaataattcggtatattatactttttctttattctgtttatttattttaaaattataaaactttttatttagataatttaaaacacacacagactagtatactgaatccccatgtactcatcacccagccccagtaatcactagttcatgcttaagcctgcccagtccatgtcctatctactttccttgctccccaaattcagacattgtatttcatttataaatattttagtatatataactaaaagataaggactctgttttaatataaccacactaccattatcatattatataataataataataatttcttaatattatcaaatatccacaaagtgtttaaatgtccagttgtttcctacatgccacaaaactttgtttgaatcaggatccagttttacatattgcaatggctgatgtatcttttaagtctcttttggtctgaagagtccccttctatctctgttttctgtcctgcattttgtttgttgaagaaccaagttatctgtctggtagagtttctcagtctggactgggctgattgtatctccatcatgtgatttgacatgtccctctatcttctgtgtttcctttaagaaggatgtaggatctagatgatggtttaatgtatatttcttctaattaacctgggatctaaaccattataatattctgtatatgacatagaatccattgtgagttctaatcaactaattggggt

SEQ ID NO: 109248 - DNA, 1103 bp, Homo sapiens
taagaggactaaagagtccttagttcctcattctgtaccccaaccgtgccttttaccacaactaaagccttaaagtcacatcctgtataactcaatgggagttgtatttactgaattatttccttgagggtagatgtttgtcacagtttggtatacacgccaggaaagtataattttactgagtgtatttatgaagatttgataggctataaattaaaacattaatttacttttttgtacaaaaattataactataataatggaaataaagatggcttatataattctacaaccttagctagtaagtccctgtcactcctttccagtcctcaccaagaactacatttgaaatatctgaaattttgacttctatttttggggagtttattaaggttaaacttcgttcatttggagatttatttttgaagtacaggtcaactcctggctactcccagagaatattcccagaaaatatactcatcaagtacagaaaaaggaggagtaccttctgaggttggccatctcatcaggaagaatttctgtgggttcctttgatacagaacaatccttgatgtcattgactaaacaggatatttagacattttataacacctgaactgtggaagacatgtttcagggttttttttttttttttttttggactgggtctagattagactttctaacctgtataaaccattgggacttgctcacaattgaattgtgtttttattagggagaaaatagcacacaaaaagtagggtacctcttaaacaaaagcatttgtcttactgaaatttattcagtaagacattgatttattgattatatcatcagttgggcttttcatttgaataaacaattaaattttattgattgcccacaaaccctgaaattcagatttcattctactaagaatgtaaattccttaatgattcattcatttattcattgattcgttgattcacagaaagtcaattactacaatagtctgatttaggagtcctagacaatttttaaaagatggttttgtaaatatagttgggttactatttcatagattaactacataaccttgattcacctgcctaatgactaggcag

SEQ ID NO: 109249 - DNA, 1054 bp, Homo sapiens
cacttgagaggctgaagtgggcagatcacttgagcccaggagctggagatcagcctgggcaacatgggaaaaccccatctgtacaaaaaatacaaaagttagccgggcatagtggtgcatccctgtagtcccagctactcagaaggctgaggtgagaggatcatctgagcccgtgggcgttggggctacagtgagctgtgatcatgccgctgcactccagcctgggcaccagagtaagaccctttctcaaaaaaaatcaatcaatacaaattaataaataaataattgtaatacaaaggaatgtgcttaaggtgctgttggtggcaggtgggagtggaccagagggtggagattaatgttctggggagagtgaatgtattgggaagggttcctggcaaatattgcagcatcttttgaactgggctttgaagaatgaagaaatgggaaaggaaatgggcttgttggcattggagtgaagctgttaagaagcttagcatcataagaggcttagagacagaagaccgtgagacctaaaagtcaggtgagtgggagctaactccttgggccagagtgtaggccgtgtgaaggatagtactgccaaggggaccaaaacactgacagtcctggatgttaaaagaaggggtttggcatttattctataagcatacaaaacctttaaaaaattgaccaggaaagtaaagataatgccaatcttttagacagattcccttttcagtaataataaagttaaactagaggaggtagagattaaatagaggtggccagtaagatttcaaattgtctatgctagtaaggcagcgattaaggcttgaatagaggcagtgacaacagtagttggaaaagtggatagttctcagagactgagagggatgtaccctgtaagagtaaagacttcaaagagggataaattaggaaatatatgtggagggatgatggttttggatatgtagaacttgaagctctgtgatggagatctctttggatcaagtagaaatgtgttggagctcagaggtaaaggctaaaatattaattt

SEQ ID NO: 109250 - DNA, 1002 bp, Homo sapiens
agtaatctcttatattttacactgttttgtctttctttgcttggtacctgatgtaccatggtaacactattatttcaagccaagaaatataggaaatactcaagggcttttttttatgttagtgaatctctagaaaggcagttacaagctaaatattttcaaaaaataattgtgaaacgtttgaagcatatcttatatagaattggaggtctagttaagtaaatcatagtacgaaaagatattgagtatctccttacttaaaaatccccgataacttcataatattaacaccctttccaaattaagttgtatgtttgatttctatactgatggaggggaacagacacactaagaatctgaaaccacactatttagaggagcatcttaattttttatgttaatagaaaggagtggccataaagtcaatccaatggtccttcctattggaagttagattacatatgattttttctgtgtaacagattttcttaattagattttacataggaacagtaagcagttttaatgtttacctgagtatgtatcagctgatctttaggttgccaaaaaacttgctgactattcctcagaactatttgataaagtcatattgtgaaacattttcgataactgacttccaaaaatttccaaattttatttttaaaaccatgtttacttttaggataaggttcaaatcacttgcatttctttagctgtatattaactgaatgttagcaaaggtaaccagaaatactaagtagtatttcttttctaagcttaaatgtttgctacagataatctcaaggcagaatatttattcatgagtagaaaattcagagttcatagaagtagccgtgggtaagtttcagttaacagcaaaagtcaacttattgttactttagtaataaatgtacctttagaacataaatcttactttaatctcctagtaggcagatggatttacttttggcttcatagatttttcttttaagactcattatt

SEQ ID NO: 109251 - DNA, 1010 bp, Homo sapiens
gcaaaagaatacatgcttattttaataacttacatgatacagacatatataaagaaaaaagtatagttccctttgctccctacctatcccccaacagttcagtgtagattctttgataccttttgatctactaagtctcttttgtataccttttggctttgtgtatagaatattgtataacacaagttttaaattttcatgtggtcagatcttttctcccccaccttttggcatctggatttctttcttgctttccatttttacaattcttttaatagatgcttattttcttttatatagaaaaaaataccagtcataaaatggaaaatacatttagaatcttgaaaccatttgaccctattttacttataccttataatctgcatctgtgaattattcattaagattaaagacttttgtatgttttatgtctctttaacatggtgacacatcaagaattagtaagctgtgtgggctggactactgctgaagagctgtattcatgtagtgatgatcaccagatagtgaagtggaacttgttaaccagtgaaacaactcaaatagtaaagcttcctgatgatatttaccctattgattttcactggtttccaaaaagtttgggtgtaaagaaacaaacccaggcagaaagctttgtcctcacaagttctgatggtaagttttaaataaacattatatgctcgccattgtatttaaaagacttaatagtatgatttatgctttgagttgttttacaaaactggtatttgtggatctgcatatttttatccacatattgtatttcttttctgaatagtcacttggtttgtgtatgggctatgaaattattgtcatggaagaaagttagtttaactggcatatactaggattgaatatgggtctttggctttaatatatatatatatatatatatatatttagagatggggtctcactctgttgcccaggccagagtgcagtggtgtgatcatagctcactgtagcttcaaact

SEQ ID NO: 109252 - DNA, 1041 bp, Homo sapiens
tcttattttaaaattcttactgacgtttttcttactctacttaagtactatacttaaatacttaaaaagcagtttttgtttactttagtaggatcttaaaaagaagctttttttttttttttttgagacagagtctcactctgtcacccaggctggagtacagtggtgtgatctcaactcactgcaaccctctacctcctgggttcaagtgattctcctgcctcagcctcctgagcagctcagattataggcacccgccaacatgcccggctaatttttgtatttttagtagagacggggtttcaccatgttggccaggctggtctcgaactctcgacctcaggtgatccacccgccccagcctcccaaagtgctgggattacaggcatgagccaccgcgcctggccaaaatgaagcattttttaaaccaaactgtttctttgctagtgtgatctagcatgtattcattccactgtgctctatttctttacattcatgataaagtgaaggacaagttggggaaatctgagcagtcagatcctcattatttcacatgggaaggtggcaattaataatattttctcaaacacatgaccctatattttgtcagcaagagtccccagttatgtgtcaaggagatatgacaggccccactatcatcattcttagacatttagactaattctgctcaaagtatcctttgtagactttattgcaggtctgtgaaagaataggtaaataaattgaaagtaagggctgagaaatttttgtagcaatttgacattgttataatgtccaatttttctaatattttatttttattgtatcttacgaaatatccatatgcaatggattcgaaataaagaaaaatctggtccttcatcagaactaggaaagcactgatttaaacatttggtcagacattttaaattggtaggtgttttcatttatattatcttgtttgcttatttaactattaagtgaagatgtaattatttttattcccccttaaatagtttttactgtcttttcaaaaaaaat

SEQ ID NO: 109253 - DNA, 3205 bp, Homo sapiens
agctaaagggcgggcagacgaaagcgggcggcgagtcgccagttagtcttcaccgctctggagagagttgctagccacgggatcctgacccggacacgaactcgtttctccacgtcggtgcgcgcttgcatccctggccccgaaagcgtgggaatgtccggaaatgctggcgtatgggagttccttaattagaaatgcgttagcgaatattatacgcttatactatgggcggacgggtggagagccttaaaaacaacaacaacaaactaagcagttgctcaatcgttgattgatcctcaggcacgtctagattttcccacttacataggtcttgttaagaaaccagtcctgccttcttgccactcgtgtctttcgatggctcccttcccgaagtcccgctgcctctaagcggagtgttaagcggggctctcggaagccggtggaccgagatttccccgggtggggcgggcgcggtgtagcggcccgcgggctgacttgctcccggctgtcccccggccccagcgaccatgccccgtaaaggcacccagccctccactgcccggcgcagagaggaagggccgccgccgccgtcccctgacggcgccagcagcgacgcggagcctgagccgccgtccggccgcacggagagcccagccaccgccgcaggtgagtgacccgccgcgactcggcgggaacgcgcgctgtgggactggcaggcaaacgcgcccagcccgaggctggctggggttgttgagcgcggagttgacatctgaaggtccggtgtcggtccggtagaggctcaggaaagccatttggcaactttgagataggattcccgtgcaattttggtgtaacggcgctggaagggatgggggcgagcaaacgggttcagttgtgaatttttgtttgtgacctgtggaatggtacaggtcacaaacaaaaattcaatatctttattgtattcccgctaaaatcgagacggtcaatcaagagagcaagtggacttttttcccagagacaatcaatatgactatgtgagcatgatgaaaagttttttgaccctaacctcacctccgtggtgttagattgccgttaaagagaagacgataatttatttgaagccactgtagcttttgtgagtccaggagttgggtgacattattaaaccctcgtggcagtgtcgctgaagttcatgagtttccaaaatgaaggttccaggtgctcagcggtacggagaattgcatctagagccttaggatttaacctcctgtttaggataggcagcaggaaatagcttgttacggttttcccagatttgctctatgatgtagtgttttgactcttaagaggtataggtgtatagaattttgtgaccggtggcatttctttcaagaatttcttttttagtaaaaccaagctgaaggtttagtcacccccgtgagtttaagataataacatatttaagtggaaaatatagactcctaagtttcataaataacatccctccatcccctactttaaagatgggcagtcattagttctccgaactaattgcactaatgtaggcttttcccccgccgtttgccttcgttttcctttcctttcactgacttagagactgcaagtgaggaacttgataatagaagtttagaagagattttgaacagcattcctcctcccccgcctccagcaatgaccaatgaagctggagctcctcggcttatgataactcatattgtaaaccagaacttcaaatcctatgctggggagaaaattctgggacctttccataaggtatttgtatggaaataactattttataactttttaaataactattgtaaggtaatacgtttttacaagatgtttcagttttgtaactatcctaaaattcattcactccctatttatcctgatagtctttctgtctctctctctcacacacacacacacacgtttcatatgattttaacactgaaattatcttttgtttatctggttatctttggtacctctagttacaaagttttccattgaatggagtcggtgtgtgtttctgtttgaaagagtattttcccttggataatttttttttcttaaagccttctatggaacccttagataatttaactataaaatgagttttctaaaacgtctgcgttagaattggagcattcttattgaatgttgaagcttttaagagagaacttgatgtaagaaaactcaagtcgtatgcctgtgattagcaatgagaacttttaaatacttgcagtttttaactgcaagtaaaaaaatctaacagtttcagttaaaatcagtagtattagcatgaccttatgaacttttccgtgttttgtttttgtttttttaatgcagcgcttttcctgtattatcgggccaaatggcagtggcaaatccaatgttattgattctatgctttttgtgtttggctatcgagcacaaaaaataagatctaaaaaactctcagtattaatacataattctgatgaacacaaggacattcagagttgtacagtagaagttcattttcaaaagataattgataaggtaagggatttttactgttattggcaagttcaagtaaggaaaatggacttaaatgcattacatattttatttttggctttaagaaatttgtatgtaattacagcggaaagcattggtttcattatctctgaccgtattttattttgggggagtggtggtgcctgttaaaatacttattttttagctaaagaaatgaagtataaatagttcatagtaatcctttttggaataaaagcattgagcagttttagggtcctgagtactaaataggcattattttactataaatattcagttcatttttaaagttatattttgattgctttagaataaattagctaaacttgaaaatgtagcagttagccggttttaccatcttcattatttcagtgcattttaactctaatgttagtggcccctgagtatctgtgatatgaaagagctttgcttcagtttgactactgctgtaattaagtcctttagaaatgggggaaggacaagctaatgtttgttttctagaaatggagacaactagaggtaaaatgtctagattatttacctgttgagactttttctcttctgtttaataatgtaggaaattgattgttcaaaaatgactcgatggaacctaaaaata

SEQ ID NO: 109254 - DNA, 1023 bp, Homo sapiens
ttttcctttttttaatacaaagtgctttaattacacagaatcatctattttaatttggtttcttttgtgctttctattgtacaagttgggttggaaaatagattgccaggaaatcagattttattccattgcatattaattacatttgatttatctaaattttagaagcctttgcttcagtatgacagaacttttaaggttaagggaaagtgttaaagtagatttgcaattgatttttttaaaaatctgtttaaaagaaaatcaagggaatttagttgttatttctttgtgattctttttactttaaattaacggcacactctttaccctcccacacaaaaaaactaaagtgtatcacccggttactaccttccttcctttttctttgaatcatcattttaaaaagctgcagctttttaatctgtcaacatgttaataatttgtgtgggttttggatatggtgggaatcttgtctacgtcttctcaatcataaacgtttttaggcttgtttggaggtgggttttttcgttggctggttggtttggcttcttgatttttgtgatctttgagaaagggaccaaaacagcatggaaaagtatcaattctttgctaagttgggttattaatgagaactactggcagtttgtgtgcatgttcaattgaagtttttaatccatagaattagtttcagtatgaaatgagtgaattttgaagtaggcctatgacttaataccaacaattgttttctggttttgtttttcctcaaaacaggaaggggatgattatgaagtcattcctaacagtaatttctatgtatccagaacggcctgcagagataatacttctgtctatcacataagtggaaagaaaaagacatttaaggatgttggaaatcttcttcgaagccatggaattgacttggaccataatagatttttaattttacaggtaagtttattaaagacttcaaagattctcttattcttgttacttttttttctataaagctaggttggatgaatc

SEQ ID NO: 109255 - DNA, 1080 bp, Homo sapiens
ttttaatatcttttgttaccaggcacagtatatttgcaatacttcaacctaaacttatttaaaaattaatgttgaggaaattaattgcagatatatttctaaacaagattggaatttatagaatgtggcattaaaggattttgtgtgtttttaaaatcaaattgaactgttttattgacttacatattctgggacttggtttggttaataatggataaaaagttatgtccctatataatactaaatttgatgatgataccaatttgcaggaaattgtacttatgtttatcttttgcttaatcttttaccgtcatcctgggataatcaaagttttacatttatccaaagattcatcaaaatacactgcattttaacccttctaaggataatttttttctctgtacagcatctctgtacgtaattcagtaataaaggaagctaatgtaatattgtcccaacgaagtaaataatttataaattgtcaaatttatattacatttgtgcttctgaagtatatgggatgctaaagccaatttgttcacatgataatctgaacctttttatgtgatctttacaattgtttaaaaaacatttcttcccaaataatacaaaggtgaatgttccaagttaacagattcagtttgactcaattaaatttatagataaggaccttaggaactcacttgttaggaataagaaacagggattggactacggtagaactaatagtgcccaattaaaactttgagggaaagtgacaatggtttctatggattgttttttttaagtcgcttatgaaaatctcagactcctaactggcaatttaaagcatttgatggtaagtaaaaatgtgatttttattaccttctctcctactgaataacatctatcttaaaaactgatttgggaggctgagaaattggaaacagcatcgtagtatcaacatccaagacctaaatcattacttggaataaaacatgtagactatttggccagtaatagtgattaacagcaaaagtaatctaaatttagtaaaaataaacatttatttttgagattaaaaagaaccaaattttttag

SEQ ID NO: 109256 - DNA, 2906 bp, Homo sapiens
tgtcaaagttttcaacttcatatgcttttgtcttcatattacaaaatctaaagtttgaaacacgaaccaggctgggtgcattagctcacgcctataatcccagcactttggaaggctgaggcaggcagatcacttgagcccaggagttggagaccagcctaggcaacatggtgaaactatgtctctatagaaaatacaaaaattagctgggcatggtgacacacccctatagtcccacctactcaggaggctgaggtgggaggactgcttaaacccaggaggcagaggttgcagtgagccaacatcgtaccactgcactccagcctgggtgacagaccttgtctctaaataaataaataatagccaagttcttttttttttttttaattattttgtaatttggagatttaattaacctaggtctgagttgttgcctagccatctgttcttttttccaatgtacttctcttaagcttgtcacataaactacttgggttctagtctcttagtctgtagaaatgagcctatgctataatatcaaaagaaatttttagttttttcagtaatgcctcagttttccaaaggtgtctgattcaatatccacaactagggtgaaggtggtggagagcagcaaggaagctacctctaaccaaccagaaatagatatcaagaagtccagctactaacaagttactctttctgttttattttagaaagatactaaccttggtggtttagttccttggcctctggtagcttacaaagatcaaattagagtaaaatgtattggaggaagataaagaacactaatttatagtatagtataataaaagatatagaaaataaaaagatgatcaagataaaaacttaaacctcagtaattttaggccatttaatttttatgcaaacactcatatttgctgtaagaatcactgaaaccctccttcatagtaattacaagtaaaaataaagagaagaataattgaggccttactaggacaacaaaactttgttatagctatgtactgtttgagttttctgtagttgatgcttgctaaaatttggattacatttgaataaggataaagggcatcatacctattcattcctcttagatttctaagctgtatttcagtaaattgattctcaaagagtggtataactggatcataatatccttgtttgccactcaagaaagtgttccataacttaagataacagtggtgggaaaaatcatttaagaccttgtttcatatgctttaagatacaagaaatagagataacactgggaacatatgaaactttgtcagcatcagataatagtgttgtagcgacttgaaacattttttgtctgtgattgtgccagtcactatttgtgacttggattgaaccttgatatgactttaaattcaggttgatgttttaaaattatttctgaaatatattgagcttattgccctaaattaaaactatattctgtaattttacatgagttatgtaagttttctgaagaaataaggaggaatcctttaggcacagactgtcaatctacagattacataggagatggcacaaatggaaaaagaaggaagaaaggaaatggtagcaagtggtagggcaggcaaaggacatcaaagaacagagcaacaagaaaagtcccaggttgtcattgtaataccacagtagtcttaatagtcaaaggacaagtaaaggcctgttaatagcctgttgattcaataatgctaatctgataatatggtaactggtttaaaaaaaagcaatacggtataataatcttaagactgctgtaatcccagcactttgggaggcccagacgggcggatcacgaggtcaggagatcgagaccatcctggctaacacggtgaaaccccgtctctactaaaaaatacaaaaattagccgggcatggtggcgcgtgcctgtagtcccagctacacaggaggctgaggcaggagaatggcgtgaacccgggaggcggagcttgcagtgagtcgagatcgcgccactgcactccagcctgggcgacagagcgaaactccgtctcaaaaaaaaaaaaaaaaaaaaaaaaaaagactgaatgttatacaggagttgagatgtaactattttgctttgtaaatatcctgcctttaaaaaaaaaaatgctcaactctattagaggaaatcatagctgtatctttcattttatttggagagagaggaacaaacaaccaaaaatgagcaaccattgttatttacccaaagctaagctgtttcttaatagctgtactctatctcttcagtaagtaatttgccaggagaaatacaatgtttttaaggaatatttttgtcagcgtaaactgttaaacactgaatcccaacttttagctatctgaaaaatgtatacttaaataatacattatggccatttgactcaaatgtaagttcttttgggatggtttttcattttcttaaaataagtgttcagatattctccttgaattgggtagaatattaattgtcagatattgttttttatttggatgataaacactaacccacaggatttaaactacaacttctagactaggcatggtgggtcatgcccttaatcccagcattttgggaggctgaggcaaaaggatcgcttgagcccaggagttcgagaccagcctgggcaacatagagggaccaccatgtgtacaaaaaaaatttttttttaaagattagctgggtgtggtggtgtgcatctgtagtcccggctacttgggacactgaggtgggcggatcgcttgagtctgaaaggtcaaggctgcagtgagctgagaccacaccactgtactccagcttaggtgacagaacaagaccctgtctcaaaaaaataataaatgagtgaacaaacaaact

SEQ ID NO: 109257 - DNA, 2449 bp, Homo sapiens
tgtaatccaaaggtttgggcatttttccaggcttcaatcctgtctaaaacttaaactcttgctgcaaacatttagagagaactaacagttgaaagcagaataaaatactttatataaatatctacatattttcacttatataccgattcatacataatataatgaatgttatggaaaataacttttggggtaacagttttactttgataatcattgtgcttatagactgtcagaagtatcgaaaagtgatttatgcaaataaaattatttcttaatgagtagattttcaaataagctgttttgtccactgttattgaattgtttactttttgtaattatgttgaggcttttggtgaattatgatgctctcattagtaagttttaccccacatttttaaggttcacctgtattcacttaggaaataggaatcactaagatatttgaattaagaaaacaatatactatttttaatgtgtaattctttttgttgacttttttcgtctttgctattttgttgaaaataagaggtatatcttttttcatttgcctgtacctattcttccattgtaatagtctagagtacaaacaagctactcctataacgtagcagcatttggcctgaacatactcagacacaattttctctccaccatcaaactaaatgactgcctagcagtcagccttgatggttacttattatggattttttttctctttactcttcataattaaactgcataaatgcaaatatgtaaagttaatctaagattttaattacagttcaaagttgttatattagtgattacaaactgaaagttttctgatgtcttatgtaccagtgccattagttttctctagtcaaggtggtctgtttgatttctgttattaccatgagaaataggtaatatccttttctgtcaaaggctcttgtttttagaaaactgaacatgtaagtttttgactacctttgaaacccattacttgttaaggaactcctaaaaaccatgtttgtagagaaagttggtaatactactttgggacagggttcctaacacagtttaaccatgcaagtgtttttgaaaattctttgttttagaacaggagcttcaattgtgttattaacaattgataatgtttccactataatcagattgcagattaagtgaaagctttcctaaattttacttaaagaaacaagttttatttatttatattgaacattctagttggggaaatgagtgtgtgtaagtgggtgtatattacacttttataaggatttatctaagggaatataaattcatgtttcatatctccctgtgtaaaattaaaactcttaggaataccagtgaaaataacatttttatttataccttattaaatcattgcactactaactgtacattatttagatgtttattactcttggctttattatttaactgctcccaattctcacttaagattgatttagctaaacatacacagtgagtatgaaatataacttttttttaaagggtgaagttgaacaaattgctatgatgaaaccaaaaggccagactgaacacgatgagggtatgcttgaatatttagaagatataattggttgtggacggctaaatgaacctattaaagtcttgtgtcggagagttgaaatattaaatgaacacagaggagagaaggtgaatcatctgtagactttcattgtaaatcagaatgtttcatttatgatctaacaaattttagtaagtcagatattcatgttataatacttaatgaagaagtgttatattgaaatttatatcttaacatttaagatgaacattctccttattaactgtttttatctaatgtttgcatattttaagttcatattgtacatatgaagtgtgtattcagtctttaaacttttaatttctgtagttaaacagggtaaagatggtggaaaaggaaaaggatgccttagaaggagagaaaaacatagctatcgaatttcttaccttggaaaatgaaatatttagaaaaaagaatcatgtttgtcaatattatatgtaagtgccttgattgatattaccaatttttatattagtttttaaccattaagtcaaagcccttctcttttcctagagaaacatgaagactgaagtgaaaaaaaatctctaaatattgttttgtgtgactgaatgtgttagctcatgcctgtaattccagcactttgggaggctaaggcaggaggatcacttgaggctgggagttcaagaccagcctgggcaacatagcaagaccccatctctacaaaaaaaggaattatgtggtgaacttatccaatgtgaggactatctggctgtgacacctgtcatcccgttgatcaccagggttgaatttattaaattaggcatattaattcattgaagttgactttttagtatcctgctttaagttgggaggtag

SEQ ID NO: 109258 - DNA, 1975 bp, Homo sapiens
actgttttttgagatgggctgtttcacccagggtggagtgcagtgtgtgatcacggctcactgcaatctcaaccttccggactcagttgatcctcccacctccacttcatgagtagctgggactacagggcacacaccaacacacctggctaattattattattattattgttgctgggatttttttgtttttattttttcttttttctttttttggtagagatggggtttcgccatgttgcccaagctggtctcaaacttctgagttcaggcagtctgcctgcctcagcctcctaaagtgctgggattacaggcgtcggccaccacattggtacaatgaaatcgatttttgttcctaaattctagccttgacccagggggattttcccctcatagcctaggcagtcatatattgactagttaataatattttagaaacagttagttttactaaaattgttatacagttttggaaatggcattttaggagcttcaatttctttttttttttttcctccctatagttatgagttgcagaaacgaattgctgaaatggaaactcaaaaggaaaaaattcatgaagataccaaagaaattaatgagaagagcaatatactatcaaatgaaatgaaagctaagaataaagatgtaaaagatacagaaaagtaataatattttgggaagtactaaaagtatttagataattgtattacatgtgtatttatatataaagttacttctagcacattgtgagtgtaagacatttgccagcatatcaagtggtggcccccttagtgaaaaaaaaaaacttgccttgcatccagttccttgttacagatgaaattccctactctgaagtcttagaaccgtggggatgctaccccctagtggcgtagcacagtaacaaacaataagcatttggcttcacagtttaatcttttagtagtccacaaatctgatagagggataggatttgggtttttctagatagatttttaagggttttatcatgtccctacttgatgccatttttcaatgacactagtatctctaattatttttaaataaaaaaatttgtatagtaagtttattgtatagtaacttgtaagtatattcgtaaaaggtaaaaccaaaattttactcctatggtaaaatttttatatacctagacattgtagtcactggaaaatgtgttattttccctccaacttagaaaggcaaaatagctgtcataatcaaaaatacaggtgcttcttcaactatggggagagggatcatcttggaataaggagagttttaggatcctgccttattaagagcctggacatatttatagaggaagtgttccaggtaggaaatgtggttttaaaatatgtgcacattcaaaataatgacttacaatatacttgctttgctaggaaactgaataaaattacaaaatttattgaggagaataaagaaaaatttacacagctagatttggaagatgttcaagttagagaaaagttaaaacatgccacgagtaaagccaaaaaactggagaaacaacttcaaaaagataaagaaaaggtaggtgttagaaaaaaattcttaaaatttcacgtctgaatatcatacctagttttcatggatgtgtttgccccttattgcctaagagaatgaattagtattctaaatgttgttttaaggtttgtctctgaacatgattttaccccctcaagggaaaccttgcttctactgactttattttgcaggaggttttttgtttggttttggaattttgcagagatggggtctcagtctgttgtccaggctagcgtgcagtggtatgattatagtcttgaactcctgggcttaagaaacctacctcagcctcccaaagtaacgtggactacaggtgtgagccattgctcctagcttgactttgagttttaaagtttatattacaataatatgttattgggaaaacatttac

SEQ ID NO: 109259 - DNA, 1050 bp, Homo sapiens
atggagtaaaatattagccctacatgatgactctggaagagtaaagttgtgaaagattttagggttggggagatggtaaagataatttgtggtaagttatgatataccaggaaggatagtttagaaaattccgtgtagtcagagcatatttatagctaaagaagaataattacaacctgaaatcaggagagaaggatgacagacctgaggccctgccagagacagttttccttcataagaggtcaggtgtttgtagaagtagttttactattagattgagagaatatagaaattacagtgaatagtcgggaaaatacttgttaaagctagctaatttaactctgattataaagaaaagaagaactagaggaccctgagaaatgcctttaaatatgtcaaatattgatagtattgggtaacataaagatgtatgctcctataacttgttttataatctcaggttgaagaatttaaaagtatacctgccaagagtaacaatatcattaatgaaacaacaaccagaaacaatgccctcgagaaggaaaaagagaaagaagaaaaaaaattaaaggaagttatggatagccttaaacaggaaacacaagggcttcagaaagaaaaagaagtaagttttttttttttatcagtgtttattttggtggcttttttttttttaacttaaagattattttttcaaaaatactgaaacctgaactggtaagtttggacttttaatgtccaacattcctaaaactagtcaacctagacttagatgactattcttttaattcctgctgacatgttttttaaaaagtttactaaatgagagtttgtagtagtagcagaaggtgtgatgtcaaatacagtaccttgattattatatatgccactcctaagcgtgttgaatcatcatattttgttgccacctgtaaaacctggagccacactaagcgcaggttaatgtctcttttgtttttgcttctatagctcttgtgtaatagttaaaagctgtggctcttgtttcagttcttggttcaaatcctaggtcaa

SEQ ID NO: 109260 - DNA, 4256 bp, Homo sapiens
aacgagagcatgaagttgtcacattgatatgtattatctaccccaacaagagtaagcataaaattatctttgtttgtatgtaccacagcatttttgacagtgctaagcatgttaaatacctatgttaatggataatggtaattgactgcattaaaaagtcatggtagagtctgctttggcatatcaacatgttctaatgtcaaactataaaacttaacaggttagaatacctgtgtgatgaagtgtcacttaatagagtctgctttggaatatggacatgttctaatgtcagattataaaactttacaggttagaatacctgtgtgataaagtgtcaatggataatgcagtagctttcatgatgggatacttcatagttagtggattttcactgtttgcttatttaatatatattgagtactcatgtgccctgcaccccatgttaatgacaaagctaggcctcaaatgtctttattcctcagcgtaatgatcgatctcacaaagctcttgtgaaatcagttgggaaaagactatgtacagtgaatattgacaactaggcaaaaactgaatctagtccacttgtgagaatttcttatttctatatactgtgcttatagaatctcctttcttaaatcgaatataaaatgtatggtttcatttcagtgtaggtttgaaagtaaatatctgtccagatttaatgaactcatattttaacagagtcgagagaaagaacttatgggtttcagcaaatcggtaaatgaagcacgttcaaagatggatgtagcccagtcagaacttgatatctatctcagtcgtcataatactgcagtgtctcaattaactaaggctaaggaagctctaattgcagcttctgagactctcaaagaaaggaaagctgcaatcagagatatagaaggaaaactccctcaaactgaacaagaattaaaggaggtaaatctttgcttctctgttgcatcagaacatcattcgtccacttcagctttatacatttttgtttttaatctccgcgtcagaggtgactagtgataaattttcttcattttgtataatctcaaaagaatgaggtcagcatttcagtattccatatgtgaactgagactatcaagaaactatattatccccagaagcaccatatagtaagtaaatcaccaccaccaccccactgtagaaataatttaaacaaaagaaagtttgtgtttctttaaatcttaagtatagacaatttaaagataaataaaaaacaagtgtatatgtatttatataatgaatatacaaacaactatcttaatgtgttttgggttttgaatttatggatgtagtttctttgcttgcattccaaaatgttataaactaactaagatgtatagcttatcggtgcctgtcccccatccttgagtgaattagatgtctaaggaatttcgtaaactttaatctccaaagatctccaaaacctcagtaggcaaggtggcaataaaaaaaaaatctgtttgaagtgtaattatactgaaaataaatatgagtctttttcattttagttaatgcatgctatttggtcatcagggaatttcatgaccaggtagaatttaaatgtaaattaagttagatccagtgactgcttctgtcttcctgggattcggtttcttttgggatgaattatgtcagtaacttggtttaaactttatgccagtacagtaagtaatagacataatttaaatctagtggatggaggaatataccagttagaaaagatggctgctgagaagttggagattgagaaacagaggttgtgtttatgtgtgcatgtttgtggttcctttcttgttgggagcctggcatttttgtatagcaataggactatccagtcatctttcgtttcagaggtgtgctttttctccagtaccccccagccccgttcagctaaaataaagcacagcataaccgtagtcctgcccagtcattttctgggtcagcttttcattagggcagagctgaagaattagggcacacttatgtataactatgtagtatcaaactgggatttccacagccccagctatacttctctatcaggatgaactgtttgctcctgaaaaaaatattacacctaatgttttcttttattgacccaagtaatttatgccccttttaaacccatccatattttccacaaccaaaccagcaattgccatacaggtgctcagttttggttcaaatttttattgttggtctttctttctttattgttattaaagcattacaactaattcagtgctatgactggtcatatttagaagttaatgcttctggatttcattttattttcacttttagaaagaaaaagaacttcaaaaacttacacaagaagaaacaaactttaaaagtttggttcatgatctctttcaaaaagttgaagaagcaaagagctcattagcaatgaatcgaagtagggggaaagtccttgatgcaataattcaagaaaaaaaatctggcaggattccaggaatatatggaagattggtaaagtagatttttggggggcatggctttactttttttttttaagaaagtgtaacttatttttttgccttgacaaccatatttcaagtgtcactgtatataaaataagattcattttgtttgttttaaggcacatttatttttaaacattttgcccttacagtttcttgtttacttagctttagataaatacaattatttcatacatatcaagaaaaatactagtaatgtcacacaaacttaaaaccattttatccttttttttaaaagagagactttagccaggcacaatggtgtgtgcctgtagtcccagctgttggagaggcagaggcagaaggatcacttgagcctaggagttcaagtccatcctgggcaatatagcaagactgttttttaaaaaatgaaaattaaaaaaaatttttttatatatttggggtttcacaccattttacttaggtttgggctagcatttaaggatataacaagggataatctaaaaatccaaggctagcaatagtgaggaccattactgcttcttagcttcgagggaagggagttgtggtccagaggagatggggaaaatggataccttaaccccacctatttcctgccctccagtcttagctgaaacctcaaattggctgaaggtggagagtcaaaggagccagttgatgcagtccttaagtcagcctttcggagaagggaacaaattgatgtaaaaattacccaacatgattgcttctgcatcttgtatcgggacttccaccttattttcttaaagataaacagtttgatcctattcatttgctctcaaagaaagcccaaaccagtgaatactgctagatagttgtgtaatagataaacagataaatgtgtttcatcaggatttacataattttagatgcttttcaataattcaaagttttctgagttttgcttatagttcatttaggttttaagcttcatgttgttttcataaaatgaaaacagttctttcattttgtgctcattagaaattcaagctgcatattcataaacttatacatattttgtattttgttgtgtacccttttgttctctttaaaaccatgtctacataaagtttttcaattaaaagaagtttttaaaacttgatgaatgaaatggtcctgtgcttttctgcctaactcttttttcaccccactcttcattattagggggacttaggagccattgatgaaaaatacgacgtggctatatcatcctgttgtcatgcactggactacattgttgttgattctattgatatagcccaagaatgtgtaaacttccttaaaagacaaaatattggagttgcaacctttataggtttagataaggtgggtattcgtaataacctacctataattggaattttttttttttgagacgtagtctcgctctgtcacccaggctggagtgcagtggcatgatcttggctcactgcaagctccgcctcccgggttcacaccattctcctgcctcagcctcccgagtatctggtactacaggtgcccgccaccacacccagctaatttttttgtattttcagtagagaggggtttcactgtgttagccaggatggtctggatctcctgaccttgtgatccgcccacctcggcctcccagagtgctgggattacaggcgtgagccaccacacccagccctataattgaatttttaagtgctaagtgtgttt

SEQ ID NO: 109261 - DNA, 1413 bp, Homo sapiens
attttcttggcatccttgttgaaaccacccaaccattaatgtaaaggtttatttctgggctttcagttttattacttgtgctggtataggacactgtcttgattattgcagcattgtaataagttttaaaatcaggaagtctgagtcctctaattttgttctttatcatattgactgttctgggtccctataatttgtatatatgacttttaagatccagatggtcaattactgccacaaaaaaaggcgaggaagtaactgggattttgatacaggttgtattgaatttgtagatcagtttagatagtataggcatcttaacggtattaaatctttagaaccacaaacatgagatgtcttccgtttaggtctaattttagaaccttttgtgtataattcttgtttcttttgttgaatttattcctatgggtttttttttgtttttttttttgagttttcttttttgttaactgttgtttttgtttgtttgtttgtttacttttagatggctgtatgggcgaaaaagatgaccgaaattcaaactcctgaaaatactcctcgtttatttgatttagtaaaagtaaaagatgagaaaattcgccaagctttttattttgctttacgagataccttagtagctgacaacttggatcaagccacaagagtagcatatcaaaaagatagaagatggagagtggtaactttacagggacaaatcatagaacagtcaggtaatagtgtttttgtttcttggtttgtttttttttccccccacagcattgactttatttaatcttgttggggagacatctgaagctgacttctctcccctgttttccaggtacaatgactggtggtggaagcaaagtaatgaaaggaagaatgggttcctcacttgttattgaaatctctgaagaagaggtcagcatatctaaaattgtatccagacttttttttttttttaaatagctttaccgaggtatatacttactacaaaatttggccattttaagtatggtgtactcaaattttaatagatggcgttttctataaatgactagggattttttatgtaaagccctttaaagttttagaaaacaaaatattaatcagaaactatatgctcaaagtacactttttaattagtacatttggatcatacagatattccataacttacataattatttctgttttacatttaatttattggggttttttttgtattattgctgtattacataattttttacttcaaaataattctttaaaagtatagcaaagacttgatgcaaatctcaacttcagagtattttaaacttttttcctcctcaaaaacatgttctgaaatagcttgaacaccttttcccaaagtgttgtgctttgatttttttccctcccgtattttgaaaa

SEQ ID NO: 109262 - DNA, 1022 bp, Homo sapiens
attgggattggaacaggtggtttgattttgttctggtctttaagatcagaagttttaggctgggcgcggtggctcacacctgtaatcccagcactttgggagtctgaggctgtcagatcacaaggtcaggagttcaagaccagcctggccaacatagggaaaccacgtctctactaaaaacacaaaaattagccgggcgtggtggcacgcacctgtaacagtcccagctactcaggaggctgaggcaggagaatcgcttgaacccgggaggcggaggttgcagtgagctgagaccgcgccattgcactccagcctgggcgacagaagttttagttttcttcgtaagttgacttttctgtcaatctgaaatggctcttagagaaaactttctttgtaggtaaacaaaatggaatcacagttgcaaaacgactctaaaaaagcaatgcaaatccaagaacagaaagtacaacttgaagaaagagtagttaagttacggcatagtgaacgagaaatgaggaacacactagaaaaatttactgcaagcatccaggtatgtgtgtgtgtgtgtgtgtgtgtgtgtgtgtactgaaactattgggattcaactggaatttatcagaaccattttgctatttgcttacaatttattaaatatataagggagggaggatctataggcagatataactcttgatgattttgtttcactgagtactaatagataacgccctgtcacagtgttgttccaaccacagctattcctgttttccgtttgtactccatagaaacattactttccttaacaactatatgaccctttatttttattctcttttcaaagtggaattttttttaattatgaaaaagcaatgcacgcccactgtttttttaataagtttccagaaaatacccaaatgatcaccttcattttgacgtatgttctttcaacttttctaatacctagtttgcatgtaatgtatttatatatgtggtagatatgtgtagatatataaagtgtgcat

SEQ ID NO: 109263 - DNA, 1026 bp, Homo sapiens
actcttcgttgtcacaggaaggaacgctaattcatcttatatcctccactttgttttaatgtggagaactgcgaagttatgttagcagaagaaaataaccacaatttcttcattgtgggcaagttaatattgagttaggcacatagtgtatctaaggctaaaaatcattatgaactcagtagtcaaggaagtgccctaagaaaaagttgtaaagatattttaaaagaagctgagaacatgaagccattaagaaatggtgtgtttacagccgagctagtgtgtttaactttgtgcattgttgtaacaccatttgttttgatacaggatatcgtttttttttttaaggtgctttttcccatatgcctaaaatttgttttaatgcatcacgtcaagtcatagcaactgaagaaatgtacatctaacaaatgatgttcattagcataaaaacacaaattaggttctttattttttaatttcagaatatgatgctgtggctgagaaagctggtaaagtagaagctgaggttaaacgcttacacaataccatcgtagaaatcaataatcataaactcaaggcccaacaagacaaacttgataaaataaataagcaattagatgaatgtgcttctgctattactaaagcccaagtagcaatcaagactgctgacaggtagagtatgcatgttaccctaacttgttttccctttccctgccttcacattggaaagggggttactatgtaatgttccataaaatgtttctcttactgttaatttattgaacctgtctgacacattacctaatgggacttccatgacggaaaacctataatgaacatttatcctatggccaattaaaaaggctggtaaacaggtatgccataggaaagtacaggtagactgtaactccccagttgctgtgagggcatagaaatcagttttgtttctctggtctcggggagggagtagttggtccttaatttaaatagatacaggccttaaaagaataagtaaaagaggtaaaaatg

SEQ ID NO: 109264 - DNA, 3946 bp, Homo sapiens
atattgattatctggttaaattaatccagagtgttttgctcagagataaggaggtaataagggagaagtagtgtcttgcttttttggaagtacttgttgccttgtcttgaattgggaagtatttgaaggtacaactttatgggtgtagagatttaacaatctctgacgagaaaatgacaaaagaatttgataatctaatggacagtgttgcatcagtctaaagttgaatgatacaagcagcttatataagaaaggcatttataattaaaaatatacaactcatcccataagtgtttgtataaacctacaaaaactgatttaaggatggtttagtaaatcataaacttaaaaatatatgaatagaaaaaatgtcacattaaatttcatgaaaagttctttagtaggttttcagaaacaataacaaatcaccttaccacatttttgatgcatcattttgcttctttagaaaccttcaaaaggcacaagactctgtcttgcgtacagagaaagaaataaaagatactgagaaagaggtggatgacctaacagcagagctgaaaagtcttgaggacaaagcagcagaggtcgtaaagaatacaaatgctgcagaggtatgagttgctttgtattgaagaggagatgggatgatactggaaccaatttaaagagctggatatatgacagtgcctagaatgtagtaagcactcatagacttaaagttttataactatcaatttttatttgtacaataagaatactataatttgtgaatttaaatgcttaaattattttaaaatggaaggggcatgaggagagattggtaattccttcatctctgtaatgtgaaaatgatggctctatttggaaaattctatctagcagttcttttcggtgtttaggaatccttaccagagatccagaaagaacatcgcaatctgcttcaagaattaaaagttattcaagaaaatgaacatgctcttcaaaaagatgcacttagtattaagttgaaacttgaacaaatagatggtcacattgctgaacataattctaaaataaaatattggcacaaagaggtgagattgttaccgtttagtttaattttaaacatattctttatgaaaaaggagggtttggggaggattgttttagggggttggggttcttaaattttgtttgtgagctacattgtgatttttaattctgtgatcacttctaaggtttataggggacataacaatataaattgttatatacagaaaagtctgagtaacgattagaattagacaactaccctttcaccctagggctgatctggacatttaagaaaagattacatggacacttttgagtgttacaactatttttcttgaagtcctttgaaaaataattgataaatcagtcacaactcctgttgttttcatagctgtgtaatttgtcatatttttttttaaacaatgaattgtatgtaatattatgccttctctaactctcccctaaattgaacttttagatttcaaaaatatcactgcatcctatagaagataatcctattgaagagatttcggttctaagcccagaggatcttgaagcgatcaagaatccagattctataacaaatcaaattgcacttttggaagcccggtgtcatgaaatgaaaccaaacctcggtgccatcgcagagtataaaaagaaggtatgaatgaactgtgtatgtatactagttggagttctttttagtccttagcctaaattctgatctttagttttgtataattaacaatgctgttggccgggcgtggtggctcacgcctgtaatcccagcactttgggaggccaaaggcgggtggatcacaaggtcaggagttcgagaccagctgggccaacatagtgaaacctcatctctattaaagatacaaaaaattagccaggcgttgtggcacgtgcctgtaatcccgggtactcgggaggctgaggcaggagaatcgcttgaacctgggaggtggaggttgccgtgagccgagatcgcgccattgcactccagcctgggcgtcagggcaagactacgtctcaaaacaaagtaataattaacaatgctaattatcatatcaaatttatctgaatagattttccctatcataatcttttcacaggaagaattgtatttgcaacgggtagcagaattggacaaaattacttatgaaagagacagttttagacaggcatatgaagatcttcggaaacaaaggcttaatgaatttatggcaggtttttatataataacaaataaattaaaggaaaattaccaaatgcttactttgggaggggacgccgaactcgagcttgtagacagcttggatcctttctctgaaggaatcatgttcaggtgtgtaattatgctgagtttataatcccactgttacctttttctacatattctccaaactcagtatttcttggaggtaggatgtgaaggcaagatgtacaacttgtttcatttactagtaaatactaatttgcttgcatgctatttatgcttgcagtttacaggggcagacagccagtatttacaaaatatttgtctagttcatcttttcttaaattttcaaggcatttttaacatgaggattgagaaattgtatttgataaggagaaagaatagcaagaagtataatacttagcttgctctttaaatcttaaaactttggtatgtgctcctatgtatgcatcctccaataacgtttttataaaataacagaaaagagaattcatatttgtgaaaagcaagttacagattcctaaaaaagatagtagaactcaattatggaaagcaaatcacaaagtcttaactttagctttacaggtaatttgactatgattttcttaatcatttcagtgttcgaccacctaagaaaagttggaaaaagatcttcaacctttcgggaggagagaaaacacttagttcattggctttagtatttgctcttcaccactacaagcccactcccctttacttcatggatgagattgatgcagcccttgattttaaaaatgtgtccattgttgcattttatatatatgtaagtaatcattttgggattttcattccagaaacttttaggggtatcctaaacattacacatggaattctttatttcttacaattgagctttttctttattgtctaataactccatctccatctcctctggtatcagtggagaccaaattattttttatttgaaccaaatatttccattttggaggagtaaaatataaattaaaaatgcaaattagtagcagaatcacagctagaatcctaggtcatcttcctagatcttttccactagaagtcaaaataaccaaattcctttcacactcaaatactgttttatgaattattcctgccatcattcctttacatgttatcaatgtaatgtttattgtccaaaaaatatttgaggttacatgtttgtgtgatttacctgttattacttaatgtttgacttttctttgtttctctttaggaacaaacaaaaaatgcacagttcataataatttctcttcgaaataatatgtttgagatttcggatagacttattggaatttacaagacatacaacataacaaaaagtgttgctgtaaatccaaaagaaattgcatctaagggactttgttgaactttatgctgaagattcttcaagttgattcagtgtattactgatttttttctatttgtaaaggattatgagttgtataaaatacatactccctaaactagatcatgaaactggtttctgttttatgcagttgtcatttgtaaagtctaataaaatattctctataattgcttctagattacaaaaatatgacaatcttgtaagtagcagactatggagaaaaatgagttacctggagggtcaggtaacttgccaaactaaaaagtatg

SEQ ID NO: 109265 - DNA, 3220 bp, Homo sapiens
tgtatttttagtagagatggagtttctccatgttggtcaggctggtctcaaactcccaacctcaggtgatccgcccgcctcggcctcccaaagtgctgggattatatgcgtgaaccactgcgcctggccatggcacttgggtttttaagttttgcctaaggtactttcaacagtggtataacttgatttttctctatcaaggggtaagctagtctttagaattgtggctgatgcattgagggtaggtataaaggaaagcagtaggaggtggtagggtgcaaaatggtcaggcttctgttactggaaatatcagtagtagcttgccaagaggtcaagttacttgtgtcagagatggtctctgaactatcgctacgtttctttttctgtctcagagaaatacggatcgagagactttcatgaaggaaagatgactaatggtcttctttttgttctttaccatttagtgctctagtttttcacttaaaaattaattcacagttactatagtcaactcttatctttcaaactgatttttattataagaattaattcaaaatttttctgtcttctaaatctgcaagttaaaattattgctttagagaattatactatgctgatcctggggtttaagcgttcttgtattctaatttgagaagctaaaaaatttatggtagtaacagttactgtggagaaatttgatagcttgctttagaaaccattattgagccaactgggacatgtttcctccttttgtgttaaagaatatacttttgctaagcctaacttgttgtaatagaaatagtcttgtctactcattatatgtgcttggttttgattttatcatcttaaatgttaaaatgttgcacaaaatagttgtaatcactaagtagactttaacagaacactttgaattttagtctttattatgtagtgtattagtctgttttcatgctgctgataaagacatacctgagactgggtaatttataaggaaaaagaggtttaatggactcacagttccacatggctggggagacctcacaatcatggcagaaggtgaaaggcacgtctcacatggcggcagacaagaaaagagaatgagtgaagcaaaaggggtttcctcttacaaaaccatcagatctcgtgatactacaagaacagtatgggggaactgcccccatgactaaagttatctaccgctgagtccctcccacaacatgtgggaattatgggagctacaattcaagatgagatttgggtggagacacagccaaaccatatcacatagcaacaaatttaaataacttaaatttgaagcattttactacaaattaatgataattgctttgtttgggatgattttggtccctaaggaataaactcttaattgtgatcagttattcactatatatactaggaaatgaattactcagaaaacttcattttaaaaataccttgttctcttttaaatgacaagcagtatggtaacaatttggaggttaatgcctagaatgttaaataatatgtacaggtgtctctatgtaaacttaaaatacatttttctcttgacaggaaatgcacaattttgaggaagagttaacttgtcccatatgttatagtatttttgaagatcctcgtgtactgccatgctctcatacattttgtagaaattgtttggaaaacattcttcaggcatctggtaacttttatatatggagacctttacgaattccactcaagtgccctaattgcagaagtattactgaaattgctccaactggcattgaatctttacctgttaattttgcactaagggctattattgaaaagtaccagcaagaagaccatccagatattgtcacctgccctgaacattacaggcaaccattaaatgtttactgtctattagataaaaaattagtttgtggtcattgccttaccataggtcaacatcatggtcatcctatagatgaccttcaaagtgcctatttgaaagaaaaggacactcctcaaaaactgcttgaacagttgactgacacacactggacagatcttacccatcttattgaaaagctgaaagaacaaaaatctcattctgagaaaatgatccaaggcgataaggaagctgttctccagtattttaaggagcttaatgatacattagaacagaaaaaaaaaagtttcctaacggctctctgtgatgttggcaatctaattaatcaagaatatactccacaaattgaaagaatgaaggaaatacgagagcagcagcttgaattaatggcactgacaatatctttacaagaagagtctccacttaaatttcttgaaaaagttgatgatgtacgccagcatgtacagatcttgaaacaaagaccacttcctgaggttcaacccgttgaaatttatcctcgagtaagcaaaatattgaaagaagaatggagcagaacagaaattggacaaattaagaacgttctcattcccaaaatgaaaatttctccaaaaaggatgtcatgttcctggcctggtaaggatgaaaaggaagttgaatttttaaaaattttaaacattgttgtagttacattaatttcagtaatactgatgtcgatactctttttcaaccaacacatcataacctttttaagtgaaatcactttaatatggttttctgaagcctctctatctgtttaccaaagtttatctaacagtctgcataaggtaaagaatatactgtgtcacattttctatttgttgaaggaatttgtgtggaaaatagtttcccattgaaaatgtcaacctgaattgtttaaatgggcttattctgtacattgctaaacaaaaaatggggtagcatggataaagagcaaactaagctttattagtgctgcaactaatataaacaaatgtttatatttgttgcttcttttggttagcaatgatatgtcaaagttatatctgaaatagtcaaatctttgggaaacagaatctagtaacaatttgaaaagtaatacactatcccatttttattggctttatgatggttgacataatgttgctgtgacatttaaacattcttgtaccaatattgtcttttaccattattatatactgcagttaattggctttacagttctttatatatatagcaaaatcctgaaagaacatatacctttattttgatgtggcttgaagcttttgaatgggtgaataaggatgatag

SEQ ID NO: 109266 - DNA, 1044 bp, Homo sapiens
ccgtggctcatggctcattgcagcctggacctcccaggctcaagcaatcctccctcctcagcctcctgagtagctgggactaacaggcgtgcgccaccatacttagctaagttttttattttttgtagagatggggtttcactgtgttgccagggctggtctcgaattgctgggctcaagtgatcctcccaccttggccttccacagtgctgggattacaggtatgagccattacaccaggccaatttttattcttttttttccacttttcctcttttttttttttagttgaattattttatattccttttggtttggtaagtaaagtgtatggtgtcagctctgcccatgtaatttttttttagctctgtagattttactgaagagtatttctgttgtttcacatgaataaattatgtcgtggctgtgtacagaattctcagctcatatccctttccttctagtctttgtggacattgctacattctgttctagcattccttgttgctggtgatgttctggttatttcctgctgtgtaacaaacatctgaaagcttggctggccagatattcaagatgtctttttcactcatgtgtctggaaactccttgcccttctatttggcctgtctcttcagcaaagtagcctggacttcttacatagcagtttgtggctccgaggcagcaacctgccaaactagttaagggctatacctagaactcaccacatcacttatactgtatcctattggtcagaacagtcacatggcccacacatattctaatgggggagaatagatttcatctccatgtgcagggagtagcagcaaagtcacattataggacagctcatgtgggagataattattgtggccattccaattttggaaattccagtctcccagaggaggattctgagacctttggtttagttttccttttttcatccttcttttctgtgtggatacttgtagaattgttcttatttctttaaaattgtattatatttttaattgcttaatagttaaaagcgaaaccatgattt

SEQ ID NO: 109267 - DNA, 1256 bp, Homo sapiens
cactatttttgtatatttatatgtgacagaattatttttaaaaatcttgtttctcagactttctgcgataatgttaaaaaaatcttatatatgtttataaatggtgcagttgtagttatttcttaagtaagtcttgacttgcatgaaatgtatttcttctttatcagttaggtccacaaagatgtgagccccagtttgggtggtggcaccacttgaattttcccatacttaaagctgactcactagaagtcttgggacaagtcatcgaattctataatgtaataaatatattttcctttcagaggttgtgaaatgtaatgaacgttttacaactgttcatgtttagagttgaaaggcaggaaagcattagtgaattaaaacttaaaaactggtttacacaggagaatgggtaatgatattttcggtgctatttaatcatctattatactgtctattacctaatatgccagttagacatcagggaggctcactagtgaattggccctctggagaaagacttaataaaaagtttggaaattcagaaatgtatttgttttgacacttaaacacactagacattagtgaaataatttgtaagtagagtgatttagcctcaggtttctttctgagaagattcatttttttatattaatatttctcggttttaaaagagaagcaggaaatcttgaacttggtttttacatgagcttagtactcactagaggaaaatacattttacatggattattttacttttttgctttttaaaaacatacagtagtataaattgattcaaattcatttagcaaaaggaagactggataataggcaagacgcttgaaaattttttaaagttttttttttattgtgtaaaatatgctaaacataaaatttaccattttaatctttttaagtatgcagtttggtggtattaaatacattcaaattgttttgtaattatcaccatcaactatctccgttaactttttcatcttcccaaactgaaactgtgtacccattaaaccagcagtcctcaacctttttggcaccagggaccggtcttgtggaaggcaatttttctgtggacgggtgggggtgggtggtgcatggttttgggataaaactgttctaccgcacatcatcaggcattagttagattctcacagtgagccacaacctagatccctcgcgtgcgcagttcacagtagggttcacgctgttatgagaatctaatgctgacactggcaggaggcgga

SEQ ID NO: 109268 - DNA, 1732 bp, Homo sapiens
agcccttcggggcagaggagggcggggactcggggcggctctcagcatccgcctggagctcgtggcgctgtgtttccgtgctgtggagttgcctggtccgcttcctccccgcggtgagtctaaggacctttacggatgcggagaaggtggttctgagtcctttttcttttcctgtagcacagtctggtgtgcctagtgtgttgggcggggagtcctgggggcgcgacgatggagggagtggcttgggacctgcactcattccctcttgtcccatactggagtttggggagccactttcccgtccctccactgtggagctgcgttcctgtgagggaggaggccctctgtggtggcgagggtgagctgagcggacgccgccgagtcggtcagtcccgcggggttggggacgggcgggtgccgaggtggaggcgcgttaggagggaggcctgggagagtggagctttgagaaggggaagggaagagtactgccattttgagcccctttgtgggaggtgctcgcaggacttaagtgaggtaggtgcagttacccattttacagatgtgaagcctcacttttgagaggtatttggtaatactgacccaggtcccacagcattgaaatggcagaacagagagatgagcaaactatactaaatcagttataatttagagctggcaaggtattttactcccatggatgcttttgtcttgcagttaattttaagcactctaaaatgaccgtgaatgttttttctgccatcaccattgttgggtaatattgtcgagagctcataagctacttgacgttgtgaaaagaggtcctttgtgacagtctgtttggtcagagttaggattttcaaggaacaagcgatacctctactgcagctccagcaactgtgttggtgtttgtggcttttctgaaaacacgatgaagcatcgtgaagataaatatcaaagacagtgaactaacaaccatttttatgacatgagacaataaattgaaaacattaaagataacattattttaattttagaataagaataaaagattctggaggagttggagaagagtgtattcagcccccaaaccacgagatcaacaaagtaggtaatctgggagattaaataaatatgaaaaacaattaagtttttacagagtgtatgatttaaactacaaagtgaaatttagaagtcttttgaaaaaacattgtgttggcggtgtataaaactccaaccattttatcgaaggagcggagcataaagtgaaaaataaacaactcccttctctgatctgtaccttaaaagtagtcacttaactcttttgtacatccttctagaaattttacaagaatgtgtacatctcaaaacacatgcaaagttgttattttatacatacagatctgcagaactacacaaaactgcaaattaagttacctggatactttttcactatgcattcatgtattggtctttttaaatgagtaagtagctatttaatctggcaaggtgaaattttgattttaggtgatgttagttttgacattgcctttcactaaacacgttgatgaatatttcccaccagatatatttttactttgaaaagtacagcaaaagcaattaaagccttaatttctcaagtcaattccggttaaattgaattaatagtctttttttgttttgtttctagtttttatttttattttttagtttagggaaacaggttgatatcaaa

SEQ ID NO: 109269 - DNA, 1141 bp, Homo sapiens
tggatttccatgtttgttagaagatgctgagtgcagcctcagggtaggtacagggtgatgtgggagggtgaggaagtctagagacaagagctcacaggcttctgtgggtaataacagcaagtcgttttggtgtgattggaacatgaggaagggggcgtgagcagaaggcaagggggtgaggaggctagagagggaggtggggtctgatctaaaaggtctagctggtggagagccaaagtgggagtctgggacctggtaatgtctgtgctttagagagaacactttggctgcaaaagggtgaaaaaaatcagagaagagcttactagcaggctttgagccaaggtaatcaaccttttagactctgaggcagaaggcagaactggtagcttcctccagtggcctcaagttgttatcccagtgtgctgtactaaagttgtcattttctgtgtgctgtgatgagaaacagatgacaaagcactgccatagaggggagcaaaaccctaggtgaggagactggtttgataggaattccaactggaaatcatattgacctgaaccaagaagtcaagacctgattctggactttgtaacttactggttgtaagtagtgaaaggtaaatagaagtaagtaagagacccctagtctgggacaactagaagggtgatggtaccattcactgaaatagggaacataggtgaagagtttgtggggaaagactatgagttaggacatgctaatgataggtacctggaagacatccaagaagcgatgtccagtaagcatgtaaatatgtggctctgaaggggaggaggaggtctgggttacagttatgaatctgggaatctcagcatatctagtaattgaagccatatggtcagtgagtaatggtggccaagagaaatgtgtggagtaaaaggaaaatggggctcaggagaggaacatcaacatgtaggctagggcccagggaaggagttccaaaagagaagatgggccaggtaggaaggagaaaggtcaaaggaggtggtgtcctgaaagccaaaattaagagcctttctagaagatagaagtggctaagtcctttctagaagacgggaggttaagggtataacactgtggatgctggctgtgtgtggctgtaaa

SEQ ID NO: 109270 - DNA, 1845 bp, Homo sapiens
tactctaatattacccaagattttctccagcctgtttttactcttactttgaaacagctgtttaaaatgactcgtaatctgcttaaatctacatgctttttgtggttctcaatccagttacctaccttccagataattccctcactgtcctgtcctctccattcctctgatgtttaagccctgtgagccacctttcccccatcctttgtgcatagttaccattttactctttcttgttgcccaggcaggaatgcagtggtgccatcttggctcactgcaacctccacctcctaggttcaagcgattctcctgcctcagcctcctgagtagctgggaccacaagcgtgcaccaccacgcccggctaatttttgtatttttagtagagatggggtttcaccacgttggccaggctggtctcgaactcctgacctcagatgatccaccctccttggcctcccaaagtgctgggattgcaggcgtgagccaccgcctggccaccattttactctttttaggtacagtaatctaatatccaaagtcttggactcagctaaagagggtatttaccttaaaaaaaaaaaaaaaaagactccatcttttgattcataattgtggtgggggcggggaatcaagacaaccttagtcactttggtattaccataattcttgtcttttcagggttgtcctgttcagctgcataaaacatcatgtattctaggtatttcctaccttcacttacatttttacttgccgatgtgctgccttcataaatgggtatattccgccacacatctagtaagcccccaatgcagtacacaatgtgtatcactgataaaactcgcacttctgccatgtcagtattatattcagttgagtggtctttagcatagtggcagtcctagtcatcctaaccttttagttaaggtaaaattacatatgtttatagaactcatatagacaagctagtttttaaaatcttccttttaaccagtttaggatgatctaggatagctaagttacctacatggtgactgttcggtctaattcagaaacagaagtactaaaagaatactaaaaagtttttacccattatctctatccctgttttctttttgcaattctcagctgcagggagcaagaaaatacacagcagataggaaatgtttgtttgcatcctggctttctcaaccgcactttacgtccttgaatattctagatatttactccttcaagaagtcaggagtatatccaggcctacctatcatccttgccatccccattaaccctcatttttcagtatgtgttttacatttatggttatttttcagtctatagtatctgttcactcattgctctatcacatctgagtttctccgtctttctttccactagattgtaagctccttaagggcaaggtcggcatataagcaaagttctgtaaacaccgtgaaggtaccatgagttctatgggtactcaataaatgcttgtgataatgatgcaatttctcagatgaactgattgtagtgactacctctaaaagccttcaatctacagtttttaaatttgtctcattgcatctgagttttagaaagccttcgatagaaagggaagatacttcatagcttgccagatgaatgcccatttccttatttccttttcctcacttttgatattttgcccagtgtctggtctggatatctgacatccataagggtattgaaatggatccttgtgtggttttcagataccagttatatatattatgaagcagaggtaacctaatattgtctaacactattgatacagtttatattttggaaatactgtatggatgatttattga

SEQ ID NO: 109271 - DNA, 2614 bp, Homo sapiens
tgggaggatcacttgagcccaagaggttgaggctgcaatgagctatgtttgtgctactcatctccagcctgggtgacagagtgagaccccatctcaaaaaagaaagaaagaaaaaaaaaaccttctataaactgtttcaattttctaaaggatggtaagacagtgttggcattcatcatctctccagacctttttttaagggtaatgggattagtactataatactgtttatatatattttaaaactaattatcacattctttttcttttttttcacctagattgatgaagaccctagccttgttccagaggcaattcaaggcggaacatttggtttcaattcatctgccaatgtaccaacagaagggttccagttttagaaagatgttgtggaagttaggtacaatgcagcactgagatatatatatatatatgtgtgtgtgtatatatatatatatatacatatatataaaaaggtttgatccatcaagcttggctcatgggatctgctgctgcattaaatcgggaaagaaaatgtgaagatttcatttggaatcacagaaaatgcccaaatgaggtcaagatggcgagtgggtgcgagtgagaatgagtggcaaaatgtaatgaaaactttacatgaatgcttatttaggttgttcaaagtaaaaagggctacaggtcacagatcgtcagtgcctgagaaagaacattgacttactctatatcaattgaggggaaagtgcagtaccgtcatcttcaagccttgtaagcataaaagagaataggctgcccatataagtcaaaggaaaatgagcccaggccttgctatgaagcagtgtgtgaatggacaatgttgaatgaatgtctggctcagtgatggagagccaggttcatctttgaaatctagggctcttcactcatgaagcagactcctagtcctggagtgactgtgtacgagagcgtggttgtggtgctgtatgtgaacgcatgcaagcttgattcaccttcagggggctgataacctagtaaatcatcaaaatgagatcataagtgttaatgtacactggacatgaaaacaaagactggtttagcagcagacattggtttactctgcagcctgtgttttctgtttccccctttcccacctccttccccccacccaatccttttttttttcttttttgcttttcttttctttttttttagtttttatttactttacctagtatgcctttttttagttgcttctcaagtcagaaaacttttcaggaaggtttccctgtgcatttgcaccagatgaatgtttgatgctatgaaaagctttccatatcatcaaaactaatttgtgtagatttttgcatgaaaaaaatcataaatttccctcaaaatagactgtgttgcagtacacaagttgccataatagtataaaacagtaaaatgtgcttaaaaggccatccttttcattttcagagataacataaagatctttgcatgaggtaaatctacagcatagttcatttttagattttgttgagtcctgtaaagaagaagaagaaaaaagtttcagttgtggtagaataccgtgctgtgtttaaatgttacttgttttcaaactttgttttctatgaaaatgatatggaaacttctaaaatggaatttggtgcatatgtactgctgaataaagaccgatgaagaggtttgagtagatgtacaaatcaagtaatggtttgaacacctttaataatatgcctaatctgttcaattgttttagaatctttttatcttagatgtaggcagccatgaacaatctattttgagccactttagggagaaaactttgtatttttaaaacttgcataaaagttatgcaagtggtttttataaattggaataatacctcagttttgaggttatgcacactaaattaaatgtgacataaattaatttgtacaaaaagaactctttataaggtggctcattgtaggaaatcctgtgccttcccctttgagcacaagtgttgcatgaacaacagtttgctataagaaacataccagattagccaccattagcatctatatctactttgtgtttaaaaatcaactggtaattctgaaacactgtagaatggataaaaattattttgtgatcataactctttgttgaactagagtatttttgcagcattccttgtcatcagaaacatggttaaagtttaaaactagaagcagcagaaaactagcttgtaaaatttatccaagtagagtgcaggctaggctgtcttggggaaataaacattaaaacttaaagcaatgttttacatggggtgtgtgtgtgtggtgtgtggatttttttttttttataaagttagagtataattcaatggcttacattagcttcctgtctttttacctagaaccagcataataagaaatttctttggttctgtcatttcagtatggacatattaatattttagcccactgagtttgtccagttgacaccatcagtgcttcagttttctctctatccaaagcaaggttttaactttccttcattctccagtaaaacagaccgagacaacttgaactatattttgagtattgctatatcttca

SEQ ID NO: 109272 - DNA, 1028 bp, Homo sapiens
tacctcactggaggtaagacccaggaatccccagtggattgtgccataggagtggcaggccattggtgattcatctaggggatggggtgcattcaggtggaacatggatatctggggaatgaagcctttggagaaaggaggcaggaagagaccagttaagaaagtatttatggccgggcacagtggctcacacctgtaatcccagcactttgggaggcccgaggcgggcagatcacctgaggccagaagttcaagaccagcctggtcagcatgatgaaaccccgtctctactaaaaatatgaaacattagctgggtgtggtagcgcacacctgtaatcctagctgcttgggaggctgaggcacgagaatcatttgaacccaggaggcagaggctgcagtgagccaagatcacgccactgcactccagcctgggcaacagagtgagactctgtctcaaaaaaaataaaataaaataaagtatatagtggccaagccacaataaatgaaggcagtaataatagagacaaaggggagatgaggagatttaaagtccagtggatggactttcaagtttttgaggtttgattgtgggatattgagggaaaggggaacttgggctttctcttaaatttcaagctattgttgattatcaccaaataagaatacaactgtaggatgaaccgtttaaatgaggaaggcaaataacaaattgtgttttggacagtttgagttttaggtagctatgaaatttcctggtagaattacacaagcattttagttttatgcatgtgaagctcagaaaagaaatgaagctatagatttgcaagtcctcagcctatgtgtagtagccagattttttaatgggaagatcaccagaatgagtgtgtaggtgagaagtgagcctaagataactttctccatttaagaaatggatagaggaagtacactcatgaaggggcaatttcacttttttcaaagactttaaaattatttttcctctaaagtaaaacaggatccaatttgtgtat

SEQ ID NO: 109273 - DNA, 1055 bp, Homo sapiens
tgggcaacatagtgagacccccgtctctatatattaaataaataaataaatcctgcgcaacatagtgagaccccatctctctatatttaattaattaattaattaaattaaaaatagcatacagcctccattaacagcctccttaactgatttcataatttcttactcttaaagggaaaaatctttgaaggaagtatttcttatggcaaagaaatgtttaatatgaagttgagtgattcctttattttaactttacgttgtttttttctaagttcgggaaaaaggaaactaaatttaaaagaaaaggaggttagattaataatgtgggcacacttaacatgagagagatgaggtcatatttctatactcgaaatttcaaaatcagaattattccagtgagataacatggcacacaaagtttacctatattgcattattttatgttgtttttattcttcaggtggcttaccttatccaacaaaatgttatcccacctttttgcaacttgctgactgtaaaagatgcacaagttgtgcaagtagtactcgatggactaagtaatatattaaaaatggctgaagatgaggcagaaaccataggcaatcttatagaagaatgtggaggtaagtttattataagctcttattccacatcttaatgttctctttgtaactacctttatttgccgactaatatagcacatctatatttttctgtcttagatattcaagtaacagaataaagtaaatattgtattctatatgtgcagtcctgctcagcctcttgcatatgcttaggtaactgaattgctgccatatattgaacaggcactgtgataagttactgggaagacagtggtaaacaagacacagtccttgccctcaaggcatgtagtctagtcttgataaatatgaactgatttaatgtgctaattaccctaatagaaatgtacaacaaaatgggatgcctaatccattctggaagaagcaggaagtgcacctgagctggattttgagagatgaataaggattaataaggtaaaaagggatgaaagg

SEQ ID NO: 109274 - DNA, 1061 bp, Homo sapiens
gcgtgatctcagctcactacaacctccacttcctaggttcaaggaacattctcccacctcagcctcttgagtggttgggatcacaggcacacaccatcatgtgtagctaatttttttctatttttgatacagtcagggttttgccatgttggccaggctgctcttgaactcctggcctcaaatgatccttccaccccagcctcccaaagtgctgagattacaggtgtgaaccaccatgcctggccggattactgatttttaatgtagaccagggaagttcattatagcaacatgcatggcatctgaaacaagtattgacagacacttattttttcctactcctcttctttttgttcttcctctttcacttccctacttctttttttttcttccttgccaaccatccttatttactcacctggcaagtttagttaactcttatcttcattggtgctgaaataagggtactctactgaaatgtgctgtttagggactttctaaattgttgcttttcacttatttaaatttattttttattgtttaaattctttcacataatatttatcccaaagaatttgcatttagaaagagccaaaaacagagtgtgagaagttctcagagatataagcagtagctgttaagctacagttgtaatgggggagacgcagcaagctccctctacctttctgaggtaaatagtatattttaatctgctaatggcttagaatctgtaaagtacaataatcgcataagagaaaccgttagtctgtagcctaagtcattatgcctgaacatcaaaataaactgtgtggagctgtttttaatttctcctgctcaacccctggagatttctgtttcagaaaatatttcttagaaacttgagctttaaaatgctcttcaggtgatactgatacatagtcagattagagaccctgtaccttaaaattaaagcactttaaagaaggaacacttagctaaatacagaaagaattaatataattggctggacatggtggctcacgcctgaaatcccagcactttgggaggccgaggtgggcaga

SEQ ID NO: 109275 - DNA, 1027 bp, Homo sapiens
agggggctgggcgcggtggcttaacgcctgtaatcccagcagtttgggacgccgaggccaggggatcacttgaggtcaggagtttgagaccagcctggccagcatggtgaaacccccgtctctactaaaaatataaaagttggctgggtgtagtgtcacatgcctgtaatcccagctacttgggaggctgaggtgggagaattgctcgaacctgggaagcagaggttgtagtgagccaaggtggcaccactgcactccagcctgagtgacagactgagaccctgtctcaaaaaaaataagtagtgatagcaccaaacgtagggctatgctgtataaatcctcttgaaattcaaagatggtgttatgtaaaacatagaacttgaaatggactttgaatagagtttgaatacatagaagaccgggcatttcaagtgaggggtttaggataggttcagtcttatttcagttgaaatgctgtgacagacaactaacctattgtttagttacacagaataagattagttataagatggagccaacttgtgaagtagtttaaagctaggtcaaggagtttacattgataaaggtagtaaataagcagccatcacatagtttatatagggaaatgatttggttaagctttcataaacattgcttttatatagtaatacagggtgttccagtgggtaaagatatgattaggccacactgaggacttatcagctaaacctgtagtctcccacatgtgaaaatagacactaggttttgtttttatcttataagctccatgagagcagtgatgtgtctgtcttttttacctcagattctctagcatctctctggctgttttcctatcagttgctgtgcttattccatttctctttagttgctgagatgaaaatgttgttgaacttttatggccttaaatttggtgtgtaaagtagaaggaagaattagggactaatatcagctataacatatttcagcagactacctgcttttgtcatttgactctcttgtgacctag

SEQ ID NO: 109276 - DNA, 1562 bp, Homo sapiens
caaagtaaaccaaaacaaggtaaaaaacaggatagatagacgtgtcagaatcatggtaaatctaacagtgttttctatgagataaggaaattgtgggtgagcaggagggctcctttggctttttttcgctttttttttttaaatagttgaatttactaatcttgtacgtgtgttattttttgtaatatcatcggttcatatgaggggtgagattatgggctcttttattctttgtacctctgtatttttataaaccttatattatagtttttaaaattgtgatatagccaatattgtattaataatttcaaagagatttttcatgttttgcaatatgaatgggaaatgaagattgaaaatcatctacatagtatgatttttattatgagtaagatttgactttatatccatatggctaaaagaaaagattagaggtgtatattgaaatgttaatagtggttttctctggataatggaatttgaggtgattttaaaaatattttcctttaatttttttgtagactatgagaagacaacgaaatgaagttgtagttgaattaaggaaggtgagtctgattaatattgggtacttctaagcataattctaacaacattatagcattatatacaagatgccaaatatatattatgtttttaggtaaaatgtataacctattgtataactaaattttatttactaaatttagttaaactttttaaaatctcaactgctaagcatttttctttagaaaaaggagagattttgactaaatttgacaggcttttgaagttgaaaggatacaactagttacttgttcattatgcaaaaacagatataaagaacttaaagtataagtcattgagatacagttgtattaaatagttctgctattaatgggcagtagtaagtccctgaaaagaacttgttgcaaacttcttcaacttttaagtattatagttgagaatatatttataaatttgctccaagcattttaagtgaagttgaaatggcccttgatttttgtaagacattgttggtttttgtctaactttgaactgcccaacttctgctttgactttgcttttaggtggtaaagaggagctcccagatcatgtataaaatggtttagtacttttaaataaatatttgtgtttggttctggcttaaactgtacactatattttttagtcaaacttttgtttttgttttgttttgtttgtttttacatagttcacggttcattaaaaatgtaatatttgggaactgggactcaaattagtgttgcgtgagtggttaattcacagtttggtttaattttttacatttgaattttacttttaaaaggcacttcatatttcagtttttaggcacaggattgcctgagctttgtatgaaagtattcaggttttctttttaactcaaattctctgtttggtttttttttttttttttttttttttaagaataaaagagatgaacatctcttaaagagaaggaatgtaccacatgaagatatctgtgaagactctgatatagatggtgattatagagtggtaagtca

SEQ ID NO: 109277 - DNA, 1054 bp, Homo sapiens
ttgtgttggtaatactacttttgctttagtgtgaaccattggctctccaattcacttgaactctgacttcgagaagtgtggaaaacaatatggcttagtggttaagtggctttgtgtgagactgtctgggttgtaatcctagccacctttggacaaacaatctaacttctctaagcctcagttttcttatttttaaaaagaaataaagggttgttttattcttacctcataaggctataatgattatatgagatagatgttaacacttaccgtagtatttagctaattatttttactcattttgcagcctattttgttattttaacattgactcctggtgttttaaaaaatctatatctgtaccaaataaagttgcatagtatattagaaagtgataaatggtatagagataaataaggcagggaagagagagagagagagaaagtacccaaatagagagttggcagatggtcaggaagggaaaagccttcccatagaggtaaggaactgagcactgcaggtagtaggggaagagcattccaaactgaggaaatagcagcagcagtaatactaagctaacacatacactgctgtgtaccagggacagtttaagtactttacatattttagctgatttaatccttaacagcagtcctgtaaagagggtgtttttactatcccaattttatagataaggaaactgaagtgcagagagctagtaagtagtatggctaaaaaaattgaacccaggcagtttgactttggagtccatcttctgagaagttactgtatagtgtattagttaaggccttgctacaagagactttacagtgtgttcgagaaatagcagagttggtgtgagtatagcagaatgaatgaagataatggtaggagctaaggtccaagcagtggtatttagggaaggaatgaggtgggaagatttgactggacgtaagccactgtaaagactgggcttttaagtccgaagtggagcgtgtgagagtctttggatatttttgaacaggaggatgatatgatctgactttttacaaaa

SEQ ID NO: 109278 - DNA, 2849 bp, Homo sapiens
atcacttcttaaagagataagaacttgattctgcttgagaagacttttgcccatcactagtagaacttcaggcctttaatactagtgttaataagtgctacctgtgagaaataaatctacagattgaaaatttgaactaaacttacttcttaaatgaacttttctaaatgaaggattgtaatatgggtttttatccttaggagatattaattattgacccacttgagtaagcatttaacagtgttaggcatttaaactttcccttttattgtcataatgtaatttatttgctaattacatgcagtttgccaacataaatactatttgacaaaggcatgaataagcaccatgatggttgctgctgcagagagagagaaataagaaataggaaaacatacttttctagttatgctgttttagcttttggttcaccatgtaatcgggttgaacaactgttttacctaccaaatgtgtttgggttgtgatgataatttgggttgaaatcaccagtaactcacttttctctagaaagtatagcttagctttatgttatgtgattgatttgtctccttgcctacctgttcatttctggcttctgatattcttcagcagattccacacatgccatctttcatagttctctctttttgtacatgctatattttctacctggaatgcctttctctaaatggattgccgttcagtcttaaaaattaagcttacatgttatctttagtaattaccctctttactgtcagagtgcgttgtgtgcatgttattaatacgtgtattaaataagtacagtcaagtaacatgtttagaatggtgtttggcacttgctgtttgctaagtttgggccttattactattttactaagttatatttctgtatcagaagagtgctacctccttaagggcatagatatgcagtgtctggtccatctttgtatttctaatgcttggcaattaggtgattaataaatgtttgaatgaatgctttccaggagtctctaaattagtaatactgttaactcatgttggggagggaaggcgtgtgtgtgtgtgtgtgtgtgtgtgtgtgtgtgcgcgtatataacttttaaaaaccgctttattacctctcataaaattcaccaattttaagtgtagaattcaatgatatttagtaaattttcatagttatgcaaccattatcacaattcagttttagaatatatcctagtcaccacacagaagatctctcgtgcctgtacaaattttttaattcttattttcttttttttttggtagtgctgttacctaagtattaaccttcccaaggtatcaatgaaagtcaggctgggtgaaataaaatgaagacattgtatttcttatctttgtattatttagaaagaattttctttaacatttttctctagtgagattgagtcctaactaaatcctaactttgctcaagaaaatttaaaatatccaaaattgtacagtaattactatgtcatattttaaactaacaatttttagggctttaaagaaaaaccatgtgttggtaaaactgacttgaaaattagcaggaatcaagtagccactaatcagaaattaaggagcaattaagtggaaagaaaatactagaatctacacctcattaaagcagggtaagtgtttagtccctagtgcttaatacagtgatggatgcatagtaaatgttcattaaatacacaaactgcattccttttaaatagagctagcattctgttttgacttgcttaaaattttttgtcaatttcttatccccttttgcctgaatttataattttataactgtttgacaagcaaagaaatataaaatacctgagtgatctgcctaaactctacccacctcctttgaggaaatagcagcaacagtcctcaacctcccccacttacagtcgctgtcctttatatagctctctggcctatacataagcctttggccagtttgtcagctttctggaattctaattgacaccactgcttactgcatcagtgtaagtcatgtgaattcacaactaatatattttcatgtagtatacaaagcctgctctttaaggacaggcttagaagtcttatatatccctttcatggggtcccgaagaacaactattgtttggagtaaaaaacatgcccaaatgctgccaggctgtggtgcatagggtgtctttctaccagttcattcattctctaccttggagaggaaaagaaaacccttgctctataatgaagggattgtcaaatctcttattttgcaaagtttctgtgaaagtggtaatagcctggtcttatgttgttactacagtgctaagttggtttgataaatgctttattagtagtttcaaattatcaaaaaacctccagactttgttgtaacaaatgagtatcaagtaaaaagaaaatctttcgggtcaggcgcggtggctcacgcttgtaatcccagcactttgggaggccgaggcgggtggatcatgaggtcaggagttcgagaccagcctggctaacacggtgaaaccccatctctactaaaaacacaaaaacttagccgggcgtggtggcatgagcctgtagtcccagctactcaggaggctgaggcaggagaattgcttgaacccaggaggcggaggttgcagtgagccgagatcccgttactgtactccagcctgggcgacaaagtgagactccgtctcaccaaaaaaaaaaaaaaaagaaaagaaaaagaaaatttttcgtaaatctctggatttaataaatgagatgtaatataatgggagaaaattttttggagtaaacaaaacatttatgtaaatatgcagtatgta

SEQ ID NO: 109279 - DNA, 1051 bp, Homo sapiens
actcccactaccagtcttctgtggtgtgaggagtataggggtatcacatgagaagtgtaacatcatttgactgcttcttcaggagcacccccggaaagagcagtttcttttagacaaggtggtaaatatgacattatgttagttaatgtccacctccgttcttactttcctgttaactttctactcactgtcataatctggggcaaagcattattgtctcatctccagagtggttaccttgtttctgctattgcctttctccagttcataaaataacctgcatgttttttaaaaaataataataataataaagtaaatcaattctcacctctcctgcttcattagcttctgaccacatttagcttccatactccttactgagaacttcaaggccataccaaatttggtccttgtctacttctccgtctcactctactatctgccttagttacttatactcttattcatttatcttcttttaattccactaacacattagtggtgttctcctcttcaccccttcacacatgctgctctgtctgtgagaatgctttctctgcgcctccagtccccgtctctttccttcatttacatggttatttctcatcctttgaatctcgcttcaaagtcatttactcacagaggccattcctgaaaaagttaattgcaagttaaacccccctgttttccttaagagcactgatgatatatttgtgtgtttactcaatgttagtttctcccgtcagactataagctccctgaaacttacctattttgtacaccactatattcttaagtctcattacagagcctggtatgtagtcagcatttaagtaaatatttgagggaattaaatgaaattttttttttaagaaaacaggagggtactctgattagaattagtaactaaattagaatttttatttttaaggttatcttgtgtattatataaatttatggaatacaagtgcagttttgttacatgtatagattgcgtagtgatgaagtcagaatttttaagtcaattttttctcttgatagaagtaatgca

SEQ ID NO: 109280 - DNA, 1268 bp, Homo sapiens
ttactcccttattttcagtggctgttttttctctctgcttgtataacttgttacattgaacaagtaatagggaaaggttttaatacagagacatgtagctgctcattgaagggcagtttaggcacaccaaattagtgatccttttaaagttgtaatttctgagtgttagagttgaaagttattcatagatttcaatctgatatttgttcctacctctctctaccattctgactcctctaaaatgtggtcatgttaagtttcttgaaacacaaacgcaccaaagaaggcatatgttcagtatccatttaaaataattatcaggaactatcagatgatattcaccatggcgtggctgcttcttacagtgttgtagaagatccccagtcttagtttgagaatagtaaccatagaaaagagggtatatacagtgcaacacaggaaatgggtagtgaccaaacttgaaataaaaaacttgtcaggataaagtaaattaagctcatataatttatgttttttaaagtagaggggaattttcttgtagatttcctaataaacctgcatactttttatgaaagttctgagtgtctaggttcaaatagagcataaaatataactagatcttttaaaaacacaactttaagaaaacaacttaccctaaatataaaagaatattaaaatgctacataattagaaacttgtgattatccacacaaacataaaatatgaagtcagcttgaactttaaaaaaaggtgcttggttggcaagagtttaataaattgatcagctgttttgttgttttgaaagagcctcagtgatttgttaaagtgtacagagtgaaaagcattgttaaggtattaagtcttgttaacttttagagactgatctctctcaccacaaatcttggaacatatttactatacttaaaataactactgtctaatttttcacataatagtccaagcatgtgacaatatgaaatatctgatagaaatatagttaggaattaaatgactgtttctgtacttcttgccaactttcctggtttacaaggtagccagtttgagaattgcttcattgatagttttcctggagataccaagatgcccttatttttcgtagtcactaagtatgtcaaatgaatgtacaagattgggaagaattgtaggagtgatttagatttcaaagaatgaagctactttagaaaaaaaaatgcaaaggtagtttttaaacattgatttctaatacctgatagtggttgtgggtcctt

SEQ ID NO: 109281 - DNA, 3027 bp, Homo sapiens
ctgcccccgccgcacccctccgggcccggagccggctcctcccagcgtcgttcgcttcccctttccgttcgctctttccgccccggctctccatcgccccttctgattggtcgaacgcaccggagcctggttagccaatgggcgagccgggctggaggcgatgggcgtggccgcagcgccggggccctcagatcgaggctgcctccccctctcagccggcagcacattccgtcgccttgccgccgcccggccccacagttgtctttgccggagctgcagtcgcgctggggttagggcgggggggcgggcggggagaggagaaggccgcggcggaggcaggtgagaggaggaaggaagcggcggcgcggcgggcacagcagctcaggcggcggcccggttcctgggagtgtcggtgcggcgcgttggttggggcggatcccgcggggcccgggcgggggaaggagtcaccggcccggccatggcggacaacgagaaactggacaaccaacggctcaagaatttcaagaacaaaggccgcgacttggaggtaaactcggggacgacgccggaggggtgggggctgtgggcctggggccggtctccgccgggaccccgagtgtggggattaggggcgggagccgcctccaggcctcggggaatggcgctaggggccggcccgtctgtgacgcctctgctagcgcgccgggaagtttatgtcgggcctgctccgcctccgccggggagcgaggtgcccgggtacggccggcgcggcctaggcctgcccggcggagccggcccggcgcgggtgcgaggggccgggccgcgcggcggggaggccgggcgcggcgcgtgcggaggaggcgtgcgtgtgcggccggtgctgccccggccgggccgcggccccttccccggcagtggcggagattccggctctcgctcgggcaccgacgtctggcgccgcgggaaggagggcggtgggaatgggagggtgagcgtgtggcgaccgagtggggctctgaacttcctcagcgaggcccgaggcgtctccacttaaaggcattttttctggtcttcccgactcccgctttacccctgcctccccccaatatccaaactacaggacaacttctccgttgaaaaaaacacccccggcgtgagaggccatcctggtgatcctaacagtgccttccagcggcctgtgttttactctggatatagctgattcaagatgtggctcacggtgtgccctcttccaggcaaaggataccccttatttcagcttgtccacaaatctctttaccccctcctgagaggagaccaccagctgcattcttacatataaagtctaaagggttatacaaagctgtcatcctctagtctacagtatcctttccctccacctgctggtggtggtagtgggggatggggtgggctagggaatggcaccatcacgtttgattatttaaaaaggaaaaaaaaagcttcattgtcttagatacagctgctcccgagattgtctacataaggtgtatgggttaaatacacacatgcacacacgcatacccacacaccccactgagatttttgatagaagacttcttcccttcagcttttaagagtttagataaatagatttaatacttcccttctgcatcttaatcacgagtttagcttttagggaaagtggtcaagcagtattttttatgttgttctcggtacgttttcataatgaaatcttcaacttcccatggcatttctgaacttgagagtctgcttgactgagatattttttgggctttttacaaagctgttaatattatctttaaagtagttcaagcgttttagtgggtttcataatttgagggacgactaagtgtccagggatgttaattctgtggttcttttaaggttaacatattaccattgtgatccctttttttaatgcaaagatgtcacatctttattgagataatttgcatgccataaaaatgagcttcttaaataacaatgatttttcagtaaatttacttgtttatgaaagaatgtggtgaaaatgttttttactaatatgaatacttagaatgagaaaaaatcacaaatgataaaacttaaaaactggtaagtaccacaaaattacagaatccagaaaaatagcaattaggtgcttgacagatccctataacccttttttcctctacatttctggcttcatttttctggcagcttcattgagatgtaattcgcatgccatacaattcacccacttaaagtggcttttagtgtattcgcagttttgcaaccatcaccacagtccatcttagaacattttcacggccccaaaaagaaacctgtactcattaacagtcactctccaattcccaactaccccagccccaggcaaccagtttttgtcttcttagatttgcctatcctggacatcccatataaatggaattgtacaatttgtgctcttttttaactggcttctttcacatagtgtaatgttttcaaggtttatccgtgttgtaacaagaatgtatcaatgtttcatggccgaatgatccttatggccgaatgatccaatgatcctccagctcatggatataccacattttatttatcccttcttcagttaatgaacattttcattgtttccacttttttagctattttacataatactactaagaacatttttgtgtggatgtatgttttatttctcttggctatatacctaggaatagaattgctagatcatatggaaacttactttgaacctttggtggaattgccagactttctgaagttatccttattttttaaattgatgtttcctcctacctcatatcttttggcactttagtcaaaatcagattaagtcctgaggctgtattagaagaatattgtgatgtgtgacttttaaaaaataagtatatattgacattagccaggtttttttgttttgttttgtttagaaattcatagtgccttatggttgtcctctgatgactttgatatccttgtgca

SEQ ID NO: 109282 - DNA, 1110 bp, Homo sapiens
gcgatcctctcccccaccctcgggcactgctccgcctccctcccggcgggctgtccccgcagtgctcccggacccggcgagccttcggggcgcgcgtcgctggtggtggttgaggctctagcgataataaatgatagaggatacaatgactttgctgtctctgctgggtcgcatcatgcgctacttcttgctgagacccgagacgcttttcctgctgtgcatcagcttggctctatggagttacttcttccacaccgacgaggtgaagaccatcgtgaagtccagccgggacgccgtgaagatggtgaagggcaaggtagccgagatcatgcagaacgatcgactcggggggcttgatgtgctcgaggccgagttttccaagacctgggagttcaagaaccacaacgtggcggtgtactccatccagggccggagagaccacatggaggaccgcttcgaagttctcacggatctggccaacaagacgcacccgtccatcttcgggatcttcgacgggcacgggggagaggtaggagctaccccggggctttgtatttgtgtccgtgtatgtctcgtgtgtgtgtgtgtgtgtgtgtgtgtgtgtgtgtgtgtataaacaacaggacagcgtgtgcgcagcgggagaggatctgggtgcgaggggcgtggtgatgacaccacggtgcctggctggacaaatgcggctcaagttgccaaaagcactgctggatccagacttcttggtgctgagggtccactttagggaaaggagagtcatccacagcatatttgttgctacttaatgtgaggttcccaaggccggaacccagaaaacactgtgctagtttagcaaggagaattaatggtatctccagtgaactttggtcccagaccccagtgcccttgttctagggtttgagctgaactaggcacagagaaggaagacaatatcttatgcttcattaggcaaacaggctatatctgcagagcgagctcattgagggtgaaggaagctgtgactccttcccatcgccttcactctagggaggaatccgaggggcagctctgcgcttctttccaactctatcaactttacaagtgcaatcgggc

SEQ ID NO: 109283 - DNA, 1586 bp, Homo sapiens
ttgattttagtatagatgatgttagctcctgtcacagaagaggaagctttttctgaactttctattatttatgtatattctagctctagaatggtgcagacgataaatgaggagtttaattttatttctaataactcacactagtaagatagaccatcaaaaactagggcccgtctgtaattgtagtactctttagatgcagaggagacattaccttgtatatccttgtacatccatttcatctgtgtatatcaatttcatccctcaccctttttttttcttttaagctgagatgctgatagctggagaagttgtgaccttcctaaggctatgtggctagttcaaggccttcagtttgttgatctctatatgaaaccactggacaaattggcttgaatatttacctagatagatggtgccctggggatacaagggtgaatgaaatataacccctatcctcaaaaagtttcagtctagtgagagagatagacctctacaccaaaaattatagtcatggtgcgcttagagtgttacggtgacacagaggagggacatttaaatcagactggtaggtaggaaggcccaggaaaaaacgccttgaaggtattgtttacttcaagattagcagcataggttttgacttgagatctggctttgaatctgtgctctgctttattctagctgcgacattggacaagttgctgaaacagctttatctgggagtttattatctaaaaaatagggataataatgcctgtaaggtgcaccttcatcagttgtattataccctgtctagagaagtacctaaaggagagaaggatatggaagaggaaaggccaagaagaccaagaagtctgcagtgctggggcagcactattcaagggagagagactcttcctgtgtgagccacaacttttatctctatgaagatgtatgtagtgcagggataatttattagctatcccccaaactctctatatctcaaggttctaactttcagtggactcctgattactaattcaggatttcagttatccagatatttgagaaaagtgtgtcatggctttaggtgtaaattttcttactagtcaaaaggaatattctctatgattaattaagaaattggtattctgatttgtacttcagcctcttatgatttgggttaccatgagttagttctcttgagcatatttaactgtgaattcttcggcaaagatatgtctctggactttttatgctgaggaccagactctctagggctgtggcttcttctagatggatgagattttaaagagccttatctcagtggtcctacaggccagcttcctcccttgattctaaccatgatactgtgtgtggatggttcacagtgtgtgtatgtgtctaaaggtatggcagtgattgtcttcttatataacaagattaaaacaacaaaaaggtaaaaaggagctcgttatataaattgatgtagaaagattattttaagataaaaatgatttttgtctaggaaaatcattgtttttgtgcttacttgtaatttttatctacaggcaaaaggtggttttttttttgttttttttttttaa

SEQ ID NO: 109284 - DNA, 1358 bp, Homo sapiens
cattttagcttgtattatatgtatttatgtaagtttcattgactccttctgaaataagatacacttctgaataaataaattatgactggcacagtgaatgatctgcttttcagacattatagctactgttagtaaatgttcggctttcacattatgatgtataagaggcctagggatttagtatggacaaatgccttatggtttaagagaagattctgattattttggtttaaaatggcacattaaagtttctgcaaaaaatttttttttcaatgaaaccctccttcctatgcctgtgcttaaagacctttttgtatgggaatgtaggaacctgactgctgaccttgctgcgtcttctgaacaggttgttaagaaattcagttcaattaagccaacattttctgtatagtttggcacctgtgaaaagcagtgttatgttctatgtgatgtctaaagatgatttggtgcattctgtgtcctcagggagcattctgtctacttggagagatgagctttttttaaaaaaaatagcagagttacaagatgcctgccacctacaagtgtgtgatggcttgactgaaggagcttgggaaattttggataattttgaagaggaactgacatttaattgtatcctagcatttctgtagacagcgattgggtggagaaaggaggggaagatgatattagagattgaagaaaaaatatggaaatggtacagaggaaataaaatgcaggcaccgttggaagaaggcaggtagtcttatttgtcaggagtaggctttccccaacggtaatcattctagaagctcattcattatttttttccatattcaagtaccctctgtgttttgatatactaaacttatttttaaattaactgtttttttaatgttaagtatatttatttgaaaaagaaacttcatatcagcaccgggagtggaaaaatccatgaaatgaaattcttggcctttaacctgctgagatgctgtctccatcttgatggagcagaatgattctaaaaagatttatctcctagtctctggttgtctctagagttcctctatcctcctccccttgcttttttatgaggagaaaaggtggcttttaaaatttaattgccagccataatttgaagcaaggcagcctgcttgctccctttgcaggtggagagcacttccagtgatgccactttgtgaggagctcaggtttggagtatccctttccgctgtgactcatgtggcagagaagattttatttgtatcatgcctccatgggaaacacagagttatgggcagtgtttcagcatagattccatcctcatttttaatgcaggtaaatgggaagagattatagga

SEQ ID NO: 109285 - DNA, 1524 bp, Homo sapiens
taaacaaaaatgacttatattttattttacttcagagtaccaaaggcttgactttaggataaatatgtaggagtgtggatgtgtttgcataacttttctttatattcaagcttcgactttttttttctttttcaggatcaaaacagtttcctattgcatatattgttaattttaagcagcaaatatcattttctcatttgtttataatactgagttggtatgtttagtttgagtggatgctaatcctgcgttttcattctagaaggctacttaatacattattttcttagccaaacttaagtcaagccaagctttggttatggctagttataatctgtttttaataggaatcctcaaagtcaaagtttaaacaaacaaaagaagccatccttttcaaaatagttattgtaatgataatcccttttatagctttgttttatagttttaggccctcctctgaaaagtacagagcatttttattaatatttatataggcaaaaatcatgcatattgataaactaatatattttcaataaagttgaagtctatgctatgaaaagctgcttaaaaagtgaagatatatgatatggtctgggtctgggtccccaccgaaatctcatcttgtattgtaatttccatgtgttgagggaaggacctcgtggaaggtgattagatcatggggggactagatcattagatctggggattagatcattagatcattagaccttcttgctgttctcatgatactgagtgagttctcatgagatctgatggttttataaggggcttttcccctctttccacttctcattctctctcctgccactctgtgaagagatgatttccactatgattgtaagtttcctgaggcctccccagccatgtggaactgtgagtcaattaagtctcttttctttgtaaattacccaatctcaggtatttcttcatagcagcgttaaaatggactaatacaatataatattgtacttctgaaaaaaaaaagaagctacaagtcttgatcacttgatctctctggaggtttttttttttttcccttctctttctctgtttcttgataatagggcccaattgaatggaaccttagctgcttccaacttttctggaattaaggagggccttgatactcgagtctgttaagattgagacttaacctactttcttccattcctagaagacaagagagttcctgtctgccactgggcgtgaggctcctgaaggcaagtttggggccattgcataccatagtgcaagatgtacaccgtacagtgttactaggtggagagacattattttctaatgtgtgcagagctgtctgctccccaagctaggcatctatgggtctacaataacttggaaacttttctagtttgtacagaagctaaaggcgccgtagcagtaggctgtatttctgagactcacagactttttaccataccatccaccattagtgccctccatgtcctgctcttgtatgagcagctgacagatgatgatctttgt

SEQ ID NO: 109286 - DNA, 2340 bp, Homo sapiens
caagaatatattatcttgttttaagataaaatgtatgtaaagggtttagtatagtgcctggcattgtggtattttatgaagagttagctgtcatcatcattgttctctttaacttgatgttttattttagtgaagaaactaatgaagtctttactcttcatttagcaactctgtttccctcttatttattttttactttctatggaagtacacatattaacaggtatacgttgctattctctaacttaatgaattttcaccaacagaacattaccagtagtaccccagaagccccactcatgttctactgtggtcactatcccttattttttaggaaaagaatggtttttcttttagtgatagagcgactcatggctttttgtaaactcttaatagctatggctgacagatatagcttagggatggccttattatatgcttttattttctttggctttaaaagcatgtctgctggaaagggatttcagtcctgcagattgttacatttagacatgataggctgagtgatcttgtagatcttcctcgccaaataggtgaggtgttctttgcttttatttgtatatactatagaagtccatggaaaccaaaaagttgtccattgtattaaaagaaaaggaaaatggcctagctgcacagacctcttagatgtcccctctaaaagcatttcacattcaagagagctcagggcacatgaaagaaatcctgtggtggaggaaggctgcacaatgctgggtgcactcatttcctgcaataggagagatgattaggctgaaggaccggcaacttctagaagtaatggactacagtgtgtttaccctgcttttgtctgcgcatatttagaaaaccagtggtaatttttcagaaggcagcttctcagaggaagcctaacgatatgggggttgagcttaggccctttatatatcttctttttgaaatcaaagtgcagaacatgttcattctgaaacaccctggacatgagccgtacctatgtgtcttgtttaacttcctgtgcccagcagtggctctgctaaaatactgtatatgtatttcagaatgtcattacttatttttggccagtgttttgttccttaagatttatttggtttttaaagaaattgagatataatttacatgccataaaattcaccactttaaagtgtatgactcactggtttttaatatagttataaggctttatagccattaccactgtctacttctagagcattctcttcactccaagaagaaaccctgtgtctgttagcagtcactctccctattctgtttgttttttttttgccaaataaatgttgtcatgattatctctattacataggagcctgtcttccgcagagtgtcatgacagttgtttgacctttcgcgtataggtttatcacgttcaccttttgttctaaggttgatggaggttgcagttttcagcactaccaccaccaccaccatgttgactgaaattattataggacataaaatgacagtgtgttactcacaatcacttgtgaaagtttcagtgcttatgaacaacagacaactgagcactgtgcagatttctgactatgtgacaaagttggcctgtgctttaaaatttaatgaatagagaagtaaattcttctgggctatgtggaaaggtttagatttatttgtttcttacactaattagttttttgaaaaaaatgcataaaatgtgttcatacttacacttatttctgaaggactggaattggttgttcctaaactaacatgattgactttcttaaaaaacctcatttataatttaaaactattttgaatctgtgtttttattattccagaagtgatatatgctagttgaaaaattttaaaaaatacatagagcttagaaatgttgtaaagtaaaaaaagagttctttgtcatcctttcactttagagtttatgcttcaaatttttaaaaatgcctaattctataacctacttgattctttgctcagtttttaaatacttcagaaatgcttgtttattgaattgtgttattctttattttaatactgtttgaaattgatgaaaaactttaaaatttttgcctttcaaagtggtgattgctaagaaaaactcccagtgatttttcttaaaaattactttgccctcttcatgggccagtggaacttctgagcaactatagaaatgtacatacttcaagacctggaactgtttatcatcaaagaaggccacaatccttaaaaaggcttcctcctttagagcggcttttatagaaaggcttcaggacccaatgacttccaaagtcacatctgtgtcttttcagg

SEQ ID NO: 109287 - DNA, 1589 bp, Homo sapiens
gagaatcctacatttattttaggttacaagtatctaaaaagaatataatttatgtgaattgttatttaaacatgttggatttcactattgccagaacctaataatggctttaacatctttgaaagtgcaacgatgttttcattcttctaggttaacttgtagcaatttaataattttaatgtacttcataatgctatacttgcttttaaaaaaagcgtacctatctatattcacagatatatactgatacctatatgtgtatatattttcactgtttcactatatgtgtatatatttaaaccatttaaaatggtttaatactgttctaatctaccatactgtttcattcacatatagtatcatttactagagttgtgtggtttttggaatgtgacttgatattgataatggactggaaaagttgtaaagagccaagcaaatcatcttctaccatatgaatagttaatcaggaataagagtttcttgcagaaaactggagctttaatggatattagatagcactcactgttgaaagagaaaatggaaagaaaaaaagccacacaatgtaaaatgaggtcgggttacccatactgcttttgcaataaaacagagaagaatttgtaggctttaaagtttaccttgtgagtttaacaatctacaaaaggctggacttaatacttattaaatgtcttttaaaaaatggttttgtttttctctccctacatgctctctcactcaaagacaaacccatttcctatgtaatcactctatcaaacattaatttatctcaacattccttattatgctccataagcactgaattttgtatcaatcagtggtcagttggttagttgaaaggaaagtacttttatttgtcccagataaaccttatttaagggaaggttgaaggaggggaggttgaagaaaaaatgtgctgatcaacaagctaggattggaaagacaaaagtggtgattgtttgggaaagagtatgtcaggaaactactctgaccagtctatctggctctgtggttgttctgagggtgactggaaactttctaagcctttggcacacccagtaaattgttgctcatatttgaagactagcactggggagtgtgtttagttttatccagtccatttttttccttatctccttcaacaaggatttatacagtgtttgcttactctgctagccactgtgctaggtgttaaacactgtggttagactgttagaagtgtgcttcacagtctaagtatccacatttttatagaaaagaattttaaagttcatttcttagaatattttgagttttctatacatttttaagtgttgtataagaaataataaattattttatttagttaaaaagaaaatagtttattatttaaaaagaaagattgattttgttactaaagtaccataaatctgaaagcaaaatgaaggatgtattactttttataacttaaaatgctcaaactaaacatttcaaacagcataaaaatgctcaataaaaaacttaaattttcttctactctggatctctaaaacccctccccagaagtaactgtcattatctgttttctgttg

SEQ ID NO: 109288 - DNA, 1042 bp, Homo sapiens
gtgcaaatatatctatgtgattctagcttccttttcatataaatagaagcatgttatgtaaactcttctgcactgtggacttcttcacttcatgtatttaagagatgaacttagacacatctgcattccttttactggctgctcagtattccattgtgtgagtgaaccattcattatgtaaccatcccttgctgatggacatgtaagttgttccttcatttttgtttgttcccttcattttgttcttacaagacagcggtgcactgtttttttttttttttttacatatgtctttcccacatgtgtatatttttagaagtaaaattgctgggtgaaagagcatgtatagttctaattttaatagatattgccaaattccatttgatagatactgccaaactccatttggcaatatctataaaaaaaaatctaaagggggttgaccaatttatacttccattagtgctatgtgagagttcctaaatcccactttcatgccagagcactgtatctttaaactttttgatttttgcaagttggataaagatggaatctcatttttctctctctctctctctctctctctctctctgtgtgtgtgtgtgtgtgtgtgtgtgtgtgtatatatatatatatatatattttttttttttttttttttttttttttaagacagagtctcactctgttgcccaggctggagtgcagagacatgatcttggctcactgcaacctctgcctctcgagttcaagcgattcttgtgcctcagcctcccaagtagctgggattacaggtgtgagccaccatgttcagttaatttttgtatttttggtagagacaaggttttaccatgttggcccggctggtctcgaactcctgacctcgggttatccacctgcctctgcctcccaaagtgctgggattacaggtgtgagccactgcgcctggcctaattttgttttttaattacgagtaaagttgaacatcttcttatggaataaaagccatttgggtttttttttttttccttccaacttttat

SEQ ID NO: 109289 - DNA, 1079 bp, Homo sapiens
cttagaaattaagcatgcttctttaattgtaatgtataaaagtattttatcagggtataaatgcagcacagtttttgcaaatatgttgtatgtaaatatataacaagagaaaataagctggggaaggcaaactggcctggcagagaagcagcaaattcagggagatgaacaccttttttatactgggggctctactaatagagagagtcatatttgggaacactgattttggaaagcagagggacaggagggagagcctgtgttgtagtggagatactctgagggtaggatgtattattgtcatgaaaacttgacttgctgaggttacattacttaggaatgctctgtgcaattgtatcttttttttggaggtagaacagagtgacagagtcaggcagcagagaagtcacagagggatggcagagattaccatgggaagaccagcaatatctgggtcatttaagagttggcatttagatttatatgtagaacaattttcatattttctcattcatgttaatctcaaagtatgtatgtttgacgtgggaaggaaattgttgaggattatgttagtcagatttaagctgatctgttaagagttattttcaggttgtatttgtacagtgttcatgggaggaggattctgaggggggttaagtcatcctttagtttaaagagagatccagaaggtcttttgacttgtaaacattctcactggctcccagtattttcattcattgtgccaaactcgattagcactactctgtcttctggtctctcactagttttataaggctaaggtcacaatgacagtcactgcactaggcatcccagttttcatgagaccatttaaagagagacataaaatgaacagtgggtttatatgtcaaagaaggagtggaaaaggcataggcttagagtcagtcagatgcaaaatcatgtcacttttgccattgaactccttattaaacctttcctagtctctgtttctcatctgaaaatagtaagtagggataataatatatcctttacagagttttgttaagctttaatgagatatgtacccaaagaactggagc

SEQ ID NO: 109290 - DNA, 1078 bp, Homo sapiens
cctgggagaagataaacctagtatggcatgactgagcccatatttgcctgaggaagataaaagctgctgctttaacttcaggtgagcctcacccccatacagggaataagatttccaggaaggaagaaatgttacttaaggactgggaaagatgaaaatgggaaagtgccacatacatagcagattgtataatatattggtatgtcttttcttcaaaattccgatccaccaataagcatttttttcaaaataatttttcaaagtttgtcatttttaaaaaagacagtccccccttttctaagtaactctagaccagggtttagatctggtcttaacacggttagcatttggggctggatatttgtttattgtcgtggaggctgtcttgtgtactgtaggacatccctggcttctgtcctttagatgatagtggcaaccaagcttcccacccccacaaacaaaactgactgcagacattgccaagtaccctgctgggggcaaaattgcccctgggtgagaaccgctgccctagggttagcaaaacaaccctcagaccccagttgtgactgtgatccgtaagttgggtgcagtgcctcatcaccaacctcattttctctagctgtaaaatgggagactttatgggtgcctttttatcatgtttctagaaccggtttagaagataaaacattaatagtaactttatatggcaaatttatcttgatacaatatcgaacaatttaaaagtaatacagatcatatttacacgttaagtacatttccccaggtgagtaaattgtcttcaatcactgcttaattttattcttgtttaccttttcacttttaggaagactgcaaacttacccccacttacctcttcgtgaagcctcacagggctcccccaggttttctctgtagctctttgatctcatagtggctttgcaaaccagtgctcagtgctactgatttcaactagttattttcccagagaaagccctaataaggttgatcttagggaaatcccttaactgatttcccctaaatctgaatcatggaaccaaccagcaaccagagagttcct

SEQ ID NO: 109291 - DNA, 1038 bp, Homo sapiens
cttagagtgtgtggaggatgcacatttgtggttagcccctatagtactgatgactgatcatcacatgtaagggatctgcctccttcctcacgtttgggaaattgaccttggggaggagtttgaggtgggactcaaatggaggaagggaaatactctctggagacagtgtgaccttctcctggcatctgggttctccacctcctgctgtcaggctgccctgcttgggaagctggctatgttcccagcctacagaggattgctgctcagggcctagagccctagcccagctaggcagatcatctgtgattttttattactacctctgtattccactggcgtatgtaattcagtactgagtgtaatttatatcactttgaagtctaataagtgtgctttttatctgcatcttaatatttgccaaattgtttttttcttctattattgaaagtaataattcctgtattaaatttgagaagtgaaaaagtaggggacgaacttcagaacagtggtacctccactaggattactggggaaaactttgtactattatgcttattacactgctgtctgccacactgctgttcaactttacatttaaaaatgtacttgaggccgggtgcagtggctcatgcctgtaatcccaggactttgggaagccgaggcaggtggatcacttgaggtcaggagttcaagaccagcttggtcaatatggtgatatcctgtctctgctaaaaatacaaaaattagtcaggtgtggtggcaggtgcctgtaatcccagctactcgggaggctgaggcagcagattcgcttgaacccaggagacggaggttgcagtgagccgagatcatgccgttgcactccagcctgggcgacagagtgagactccacctcaaaaataaaataaaataaaaatgaacttgaatctaaattggattctacctcccccacctttaaatctgtcagtagttaaaggtgtagcccatacctgtagcccataggcagaatctggcctgcagacttatttgttctgctcagca

SEQ ID NO: 109292 - DNA, 1034 bp, Homo sapiens
tggtatctgatgtggataacgcacctggaagaaaagccactatcacttagtgaaagctgtcagcagctgcattgtccaataaatgatcagtcctgagctcatggttagtttggagggagtttcaggaaaaaaaatgaaaatagtgaaagagttgaggaaacatttatgaattgggattgcttttattttggagaataatagattgaggtaaaagaattcctgcttgggcacttttttttttttttgtgaatgatgacttgactttgtttctactgagaataagggtagtagacatttggtttagaattaagggagttttagaaattaatgtctaaagaattttttttgtttataaagactatgagatgataatatcaatcatgtgatctgttttctgggagagtgttatgacgaggattgactactgtctgatcagaaaacttctttggatttatttttaactcttctattggaaaatctcttttagttaatcttttgtatctgaaacaattgatctttttcacattgcctgtttatcttactgagaaagctgatttatctacactgaattggcagcagtgccttgttggtgtagtaatttagattttctaagattttctgcttaatcaactctgttttcccctttgagctaactgaggctaagagggaagaatctggttgttccaactgccctttgccaggattttcctctgtgtgtgtgtgtgtgtgtgtgtgtgtgtgtgcgtgcatgtgtggtgggtgagggaagctgggcttcataagagctgcagtgccaggattttcctgtgtgtgtgtgtgtgtgtgtgtgtgtgtgtgtgtgtgtggtgggtgagggaagctgggcttcataagagctgcagtgcaggtaacatggtagagtcctgatagtggcagcctgaggagccctggcctatagctggggggcctccctttccaaccctgctctttgaccccagctggctcattttcagactgggagcagtggcatcacttgacctgggaggagaagcagc

SEQ ID NO: 109293 - DNA, 1101 bp, Homo sapiens
actgccaggcagggaagggctgccaggtgctaatgtcactgtgcctggcaccagcaagcgtcccagaatctgctcccgaggtccagctctgccagcatgaggctgctgtttggaaatgtaaagttctgatctaattctggcaaaatatatttttttttcttgaattgcttagattattatcctgatttcctcttcctttgattggcctgaagtgaaggccattaacagtgccatgatggcaattttatagatgaagaaatgccaaggaaattgattatatttggcatggctctgaagtaaaaaaaattcccatccctacctcataagtcctgcctttacctccctcttcctccctacatggagtttcttaactgaaggctcaactttagttttcaggccaatttggagccaagacaatgtctggctccaaatggtatttaaatagcttcaacccctccgttgtgggagttcagagtatatttccagacagatgacctcctggactctcatggtgcccacggagcctcagctctccccactctctactttgtgccctgacttctagcttcactttgatagcagtgggccttgggagctgactttgtgaaggttattggtaccaagtatgacatcattactagatatagcacttgtgtccttgcttgctcttaccatctctccagtgggacagtagagtcctggcttgagcttagagccctgctgcttaccaatgccacctgcttatctgacttctgaatgttatttactccatcctgtgttttggtacttttttgaggggcatgaagcctggtggaatgaaaaaggcaaatttgatccctgacagacctagctgtaatgctaggcctggcacatcttacttctaatcttaggtatgtttctctccaatcctcagttcttcagaggtaaaaagagggtactgtttcttatcttacaagtttgtaatggttatatgatatactgtatgtaaaatatctagcgtgcttctgagcccttaggaggaattcacatcttaattcctttcctttatctgccatccctgcttggtgtcttgcatcatgactgatattactatgcccttca

SEQ ID NO: 109294 - DNA, 1074 bp, Homo sapiens
gaccattattctaagtgaagtaactcaggaatggagaaccaaacatcgtatgctctcacttataaatgggagctaagctatgaggatgcaaaggcataagaatgatacaatggactttcgggattcagggggtagggtagaaggagggtgagggataaaagactacacattgggtgcagtgtacactgctcagttgcaccacaatgggtgcaccagaatctcagaaatcaccactaaggaacttatctatataatgaaataccacctgttccccaaaaactattgaaattaaaaaagagagagagagagaaaaaagtgagggacttgagacacatttggcatcctttttgcctttcttcttatttctgcacagttaaattttacctatccttcagtacctggctcaaatactcttttacgaggctatatttaattcttccactccagcataaatgctgtctacctgctctgaattctccaagcacaactgttctcagattattttgtggagtactaaatagatgttcattgaaagtagtgctggtcaagtaagtttgggaattcctgtatgtcagggctgctttttagggagcaggtacaggggagggggagggtggtggtacttattagcatattaaaggtgctgaggagcctgcttcatccagtgttaaaaaacttttgattacagaatttttttctccaggaacaatgattagcatttcaaggaaggttcaaattgtctataatggtgcttaataaacattatttcaagaaataactccttattccatcataatatagtatctatcattctaccattagaaattattcccaaggactgtgcagagtgccagatttctgcgacatataatcaaagagaaggggaagggtgaagaacataaagagaaaatagatttttgccaacataaaccaaacattttacattttgcttagggcagggctctgaataagggcacacatccagttctctggactggtactgaacagtgaaaggttataaatgttttgagttctttttccctaggaaggattggtatgtttaagttagatgcc

SEQ ID NO: 109295 - DNA, 1202 bp, Homo sapiens
tccagaactccatcatttgaataaacaagatatcttgtcttctcttatctttgctcctttagttattactgtaccttataggacacctctcatgattacggtccttgaagaaaaagttcctaaggatattttatgttttatatgtattaaaataaaaaatatgtataacaagagtgtttctgggtccaaaattttgatatgtgtatttgttatttaatattatgtcattgtctttaggttctttaaaagtctgtgtcttttaaaaaacattgcatatttattttttgtagataaacttctttcctaactctgttgagcattatgatagtaagtatacatgagcgatatagattagaaggcatatttcaattctgaaatatggtcaatagaaatggtgaaaatatattagtagcaatgacaactagcatgcatccatttgtaagaatgttgcaaatggctgggctgaccacaggtgctttgttacatttatttaacaaatagtggagtatctattatgttcaaggcagtgtcctaggccctgatgcataaaattggatgtgaaattaagaaaagttgaataagaatatctaaaaggaagagctagttaaacgaccatctgtaagaaaaataaaatgagatcaaaaggggaaaacatataaacaaaaaccatgaaagaaaaaagcaatatgaaaagtgaatcttagaagacaaagtaaaaaataaaaggtccctgctcacaaagagatagaactatcttctgttatctcaagaggaaaaaaaagaagcctgctttacataaattattatgcataatttgtacaggcactggactcctggaaggttgccagggtagcttttgttgagatgaaattcaggggacttcttatttataggaaactggttaatgttgtttcctattctttatttactttctttgatttttcttaatgttcttcttgatcactgatgactagagtagtgagagaattttcaaaaatagttgatatatgatatattagtacaaaataatgttaagtttcttaatatattgtgcaaatgtataaatgattttttttttttttttgtatttttagtagagatcgggtttcgccatgttggccaggctggtctcaaattcctgacctcaagtgatctgcccactttggcctcccaaagtgctggcattacaggcatgaaccact

SEQ ID NO: 109296 - DNA, 1004 bp, Homo sapiens
ctctggtcctttgaccagagactaatgttgctgaggtcgatagggaagtaatggaattttgcatctgcaaatgtgatcagcctctgcaagcctggcttccagcagaaatcctcctgttgtcctctgagatacttttttactggctgattttttaaaaaaattaaagagccttctttaaattgaccaataatatttcttgttaccttctcttttccccctcttgtaggggtggcatgcgttgatttacaaaatgaacattgggaaagtgttttgatataagtttgtgtgtgtgtgtgtgtgtgtgtgtgtgtgtgtgtgtatgtatgtgtgtgttttaagctccaagggtaagagttacagaactggggaaaacgtgtgcatactctaatatccagaaagactgctacttttaaagatgacacttggagagttaagatagaaagtataaaaacatgtggccaaatcataatgcctgacaaagtgatagctattagactgtgtttttatgcaggcctctgcatactctatctaattgactaatgactgaaacagattcatgtgtgtagaaaccagatgggtcagtgggtatattaggccattcttgcattgtgataaaggaatactggaggctaggtaatttataaagaaagaggtttaattggcttacagttctacaggctgtataagcatggcactgcatctgcttggcttctagggaggcctcatggaacttttactcaaggcagaaggtgaggcgggagcaggcatgtcacaaagtgagagaaagagcaagagaggtaggggagaggcaccacacacttttaaacaaccagatctcacaagaattcacttgctattttgaggagagtacccagcctccctcatgagggatccaccctcatgacgcaaacacctcccaccaggccgcacctccagcattggtgattacatttcagcatgagatttgaggggtggggagtggggagtcatccaagctctcagta

SEQ ID NO: 109297 - DNA, 1965 bp, Homo sapiens
tattttcagtttgtaatgacaacattaggaggaaaattgattagtacttttaaaacagtaggaaaattatttctgcccaaacattgattagcctttgaatggactttcttataattcttttcttccacagactgcagggtgcagcacagtcatattttaggcagagtcaagcagagaaacctacttgccgctattaaacttattactgccttttccagtgggtgcaaataactttgtctccagtagttacactctcctggcttgataacacataaggacttctttgtttattttgattaaagagactaaagatacttttgtcttatgtgaaatgtgaatacagtgaaatattgaaattttttgatgacatatattcctccttttggcttataaatgtcaacttgtttagcttccttgcatgagtgctttaaaatttattagctgaagctcaggtaatattaatttgttcctggttaaatgttatataaaatataggaataaagaaaactgaggtccttaccctcaggtaacttatatatttgaggagttaagacatagaaataagataaataggagagtttatgatgagccccagatgagtgggttggaatattacataaccaatacagggtttcagaaggagagagattttgtgtgcgtgcatcctgaaatagttggggaggactcatgcaggagctggaacttggagataggaagaattcatgcaggtggaagagggtaggagggatgctggtgccattagcagagagggctagaccagaacatgcctgctttttcaacagtgagtagatctgtttggctctaatagaggactcatgatggggggtaatgaataatgggaaataaaactagagaggtaggttgaattcaaattgggaggggctttgaatgccaggcaagggaatttggactttattctgtagaaaatggatgaacagtgaaggttcttagccaggaataagaagaaaattgaagaaattgctttgtagtttagttagagcagaagcagcgtacagctctgaacccaagtgccttagatggaagataagggcaaaaagaactgtatgcaagctctgtcttcacttctgatgagatgcaggaagaagttagctgcttaattctctttatttttccttctctcatttaaggcttgtattaaatctctttttcagtcttaaaatgcattaattcaaatttgaccttccttactgtctgatagttgaatatccaaagctattttcagttgttccagattgtcacagattttgatgtctaggtgccaactggaagggccaaacctggcctgcggaggattgtttttaaaatctgattctaaattaagcactttgagacagaagaaatgagatgtggcctagttctaactcaccatttagctaaatgtatatgtatttttttctctgcctaaatatttgtcttattcttttagacccaaaaatctcagagccaagaatatttagattccctttcactctttcactttttccaatagtttttggcttttactattcttaataagttacacttataaaggaatgtctccaaatctaattcttttttttaaaaaaaattgttttaaattcctggccctcctcctatcctgtatctcacaaattattaaaatggaattgaatttatttcttgaaggagaagctactgataggatttagacttttaaatatctaaaattaagttctaaacaatagtgttcctattagcaatagaaattgtggttatagagaaacatagtatagtgtaagctttagagcacgcctgtccaacccgcggtccatgtgccatatgcagcccaggacggctttgaatgaggcccaacaaaaattcgtaaactttcttaaaacattatgattttttttttgtgtgtgtatggcaattcttttatatatatatatatatatatatatatat

SEQ ID NO: 109298 - DNA, 1098 bp, Homo sapiens
tattatttatttattttttactagttttttatgtgtagcttacttcaaaatatatttgaggtaatttacagtaagagactcattataacagggccactatgatataagaggtcaaaaacagtagtagaaaggaaagaataccaaaaactcaaactgaaattaatgtagtattgctattaggcaaagcatataaatccagaactctgaatctggtagcatttttttcttctatcatggtgcaaaatttatttctcctaagaacttgcttttcttaaacaagtcaaatcacactgtttcttccctctttaaagttccctcttgattctcacagccaaaagtcatgtttcatattaatgtttgagacttattcaaggtcacatatatttggggggcaaacatggcatatcttcttgtagtatcaatttttcctaaaaaatttagagaagaaccaatattttatattaattttaaaacattgcttaatgtaaaaaatagatatagagtggaatgaagaatttgcctgaaatcaatgcaagatttcaaatagatatgctcaattgtgatctcagctgagaaaaaatgaagtgaaaatagagtagaataacgaatttgcctgaaaggaatgcaagacttcaaataaatgttgtgctcaattgtgatctcaactggtaagtgtgatctcaggaacccttctgcccttcctagtacatattttctctttgccagtagtgatgctgccttggaaatacctgcaaaaactgcaaagttctggcttaccaaaccaaacacacacacccagggacataccaaaaacaaaacaaaacaaaacaaagcaaaaacctcagaaacaaaacaacccaacaaatgcccaagccttatttccaaatcctaagattggtataaaaccactcacaatatgctaaacttctctcagattgggaccaatattgggccttttccagattcttcttgcctggaacaccaccatgcttcctgcccagactatcagatcaccactccttcctcgggtctcagctgtgaaatttctgtacaagttgctatgttccctaggcattgtgtttctgactctgtcctctg

SEQ ID NO: 109299 - DNA, 1002 bp, Homo sapiens
agcatgtaaggtcaaactttaattaacttttctttgcctatactggactttccctacacaagtaggtacttatattctgatcacaagtccccacacgtcggttgtagatagcaatgtcaagttagtgcatacccagctactaaagtttactggactttcaggtgttcttggcatgccaggcaggtggtacccagttatttagagagatctttctttcagaccttagacatgtcttttacatataaattacttaggtactttgaccgcatcatgtggttcagtttgttttacaatgaagactagagcttggggaagggtggtttttgttgcccatgcttacctgaaattcagaaaacttatcttgaaggagccagagccagttggtatatctctgagaactgtccttagactcttagctgggtggtgttttcctagtccttgtgtaaaaggataaagatggtggaatgtataaggtaaagtgtttttaggatatacgtatctgggtgccacaaagggcatgagtagggaacagtgaaggataagggtgaaaccattcattgatcctaatcatggaaagccttgaataccaggcttagaagtttggattttctcaatgtgcaaaaatcggtagcatttctatataccaacaatatccaagctgagtgccaaatcaagaacacaattcaattcacagtagagacacatacacacacacacacatacacacacatacacccctaggaatacggcagatcagggaggtaaaagatttcaatgagaattacaaaacactgttgaaagaaatcagagataacaaacaaatgaaaaaaacattccatgctcatggataggaagtaccagtattgttaaaatggccatattgcccaaagcaatttacagattcaatgctatttctatcaaactaccaatgacattgttcaaagaattagaaaaaaactattctaaaattcatgtggaaccaaaaaaaaaaaaaaaaaagag

SEQ ID NO: 109300 - DNA, 1264 bp, Homo sapiens
tttaaaagaaagaagttaatattcttgatgttacacttctttttaaaaaaatgccttttgtttccaggaaaaatacggaaattttttttgcttccaaaaggtcatggtttcttccttctaattacattctttaaaattctgacagtgtgggctttgcaaattataccatcataactcttgaatgtgcttttcataaaattcaacacattttatctttagcctccgaagtccttatgacttataccattattcatacaaactacaggtttagaatcaagtaaacaaaattcctgctttaatatacaactacagttgttttttggttgtgtttctggttggataatccagatcagactttgtgactaggagctgtaagtaaggtggctgccttaaaatgtaatgcaaaaacagtcctttttagtctttttgtcttgtggctgggaccatatggttttctgaagttcatatgtataatagtccttttttgtgtgggctccattcatttatattctactgtttattgtttattcattctttcattttgagtatctattctatattagtcttgtgaatatagaaatgcaaggcatggtgcctgctcttaaagaggttaaaggcttatgggagaggcaggcatataaacaaataattacagcctaaaataataaatgctattgtagcggtaagacaaagtccttcttgtggcttaaactctctagcccacattccccagctaattattttcttctgtggattttcatccttgtctctcaatctctttttcagatatatgcatatccatattgcttacttaatcttttctgcttccaggttcccattttgggtgtggaagccttttgcagtgactgtgtcctgtcatgactcttttggtagccctctccagtattccagctttgcctttaaattttaacggagagaaaaataatgtatctcattcttggtgaaacatttaggctgtttagttgacatttgaaatggcagagtctattgttctaaaaggaaaattatccatactgtgtaatgtggactattgatagaatatggaatcaggcatatctttttatgtatttatgaaagtaaagcagtgcttccattttagcacaaataactttcaaagcaaagttatttaaaatttctcttttcttttcttttttttcttttttctttcttctcgctctgtcatccaggctggagtgcaatagcatggtcttggctcactgcaagaaccgcctcccagattcaa

SEQ ID NO: 109301 - DNA, 1026 bp, Homo sapiens
gtgtagccaccttctagcaatggcatcagttcaacttttgcttccattgctagatttcctctggctgatattcctgcttctttctcataaagacctctgtgcccacctaatacattgggaccacctaagtaatgcaggaaaatattcccatctcaagactcttacctttatcacatctgcagagtcccgtttgccatgtaaggtaatgtattcacaggtgttagggactagggcgtggacatatttgagggggggccatgattctgcctaccacactgatgatgatgatgctaatgaagatgatgaggaaaattagctgctgttagtatttcactcactcccaaaattacttttagtattttgtcaaagaaaataagttctatcccaaaacatgtaacaagagcaagcctggcctgatcaggggattgagcttctgatttgataaaagcttcctcaccccttcagttgaaagtggtttccttcagatagcttcctggaaacttctgggctgtgcacattagtccctttcaattcaggcactgaaatgctagcaaaatgaaggtatgttttctggaaaccagctatcaatctagcacaagcgactattaggaaaatcaaggaggtgctgcggggatgtggaataggacacctgggttttgatttaaagtaacttaaaggaattgcttatagcagagagttaacattcatatgggaaattttgagcaacctgtttgactcaggtcccggtgagagggcagtcttacataggagatgtacagaaagttttagtctccattcctaatcctaggcacacgcacacacacacacacacacacacacacacacacacacacacaaaattctgaaaccctaatactgtcaaatccccagtgagtttcaattttcaatgacaactatggataaaaatggtcatatttaggagagtaggggggaaaaaagctttaataaagtggcagcagaataaaatgattatcagttttttaaaagcactagtgtaaagaatac

SEQ ID NO: 109302 - DNA, 1069 bp, Homo sapiens
tttctttgaaaacacaaatcagacaaattgttacacagcaggatcctttgctaattttgacagccacttattcatttactagcctttgtccgacacaatacctgtgtggcttttatttttccagactttccactgacacattttcacaatttgggtgtttttgtccaaaacgtgtcatgtattttgtcatatatatgacaaatataaattggaatttttaaacttcaaataaaataccacattaaactagtgattttaaactgaagatgatagaatttttaaaatacagacttggagaccacattcaaaacacttcatagcaaatgagaggccctcagttatctggtcttacctcagctttctagtcgtctttgtcactttttcagcccctggggtactactcagtgctgtctgccagcctgctaagttcactttttcctgcttagcacttgttattcctctttttccactaaatgcctttagttattaaattattgtttcctacagaaatttaacttcatcatttttgttgtctggagaaagctttgttgtcatcactcagtggtgagaaggttgactttctcatgaaagctccaaccctaggtcttaggtttgatgtaagtcatgtgctgctgtggaaactgtctagtgcctgtacagtgtgatccgaagttactggactgtgagggggcagtctatcaagtatggacagctatcaagtatgttgtacagtttgatctttaacaatttaaaatcaatattgggttccttggtcacacaaatagcctagttcttcaagtaagcagttctttctgcctgaaacctcatgtcccactgttctacttgagcacccttccaggtatcaagggcttaattatagggtatacatagtcccctgcaagccccttatgcatctgaaaatgcaggtatgaaccttcattctgagagtaagttagctagtctaaatgaatatttgagatggaaaaaaacatctagatggatataggtagatgaagtaaccctgggtaggtaaagaagctgattttagcagtgcctgaaagactcttga

SEQ ID NO: 109303 - DNA, 1055 bp, Homo sapiens
ttaaatagataacttcaaagtaattggcttgaaatccaaggatctattctgggatgctttagaaatttttattcccttttcacctcagctttaaaatatatataaatgtcaaggcttcagactttaaaactgttgctgttgtactccaaactattttcttataattggcactgttcaaatcctttttggaacaggatttgagcttgagtgagaagagaaggtagtttggaagaatcaagaagtatgtaacagtgggatctaaaaatctaaacaaaaagaggttaaagggacagatctgatgtatttcagaggagcaagagtagaaaggtgatacattatcaaaaaggtcttcatgcacatgaagtgttctattccagacttaggggattagctgttcttcatctctgctaagggcaaaataaaaggaaattattttgagacagaagcatgaagagattaagattagagaaggaatactttaaaaatacatgtttgttaaaccaagaacctcagccatctaaacaagagtaaatatgccaataattctaccatcttcgtctgattaggctatgaaatcttgaatcttccttggatagcttttaaactgatatggaatggttagtatgttttatggttatttccagttctaagattgagtgatccacttcatttcagcaggctctgtacgtattatggacttgtttccctctgttttttcctctgttgtctccttccttttttttttcttattttgtataatatttaagagtattttacatgtaggtgtcatttataattttttccttactaaagtattccttttttattatggttcacattgtaattcaagtagcataattataacatttttattgagcagaaaatgaccacttttgtattttaattaaagcatcttttttttaattatttatcttatccagcagtcattgaacactaaagctgtgttatgtgcaacacagatcttctctcattttacccagaacaatcttttcctgagaaataagtctttgcccaaagcaagacactcctgcagt

SEQ ID NO: 109304 - DNA, 1025 bp, Homo sapiens
aattggaccttgctctagtagaattattattattattattattatttgaggcagattctcactctatcgcccaggttagagtgcagtggtgcagtcttggctcactccaacctctgtcccccgggttcaagcaattctcctgcctcagcctcctgagaagctgggactacaggcacatgccaccaagcctggctaatttttgtatttttgtagagagagggtttcaccatgttggctaggctggtcttgaactcctgacctcaagcaattcacccccctcagcctcccagagttctagtagaattgtgatcctaattaatttaatacacgtcactatgagaaaatggacttgcatcatggattgaggatttggcctttattccaaattaaaacctgattattaaccaggctctagtcttatcctttgctgacagaaaatggtatggtcttttatatcaaaattgtagagggctattaattttctgtctatatcagacatttcctaggtttttggctacccagagtctgaacctctgtttttatctggcatgaattctttgttatgtggggttttgtgggaggcggggttccttttccagaaggggtcagattttcttgtctttagaagctaggctgcagccatgtgaattaggttcagccaatcactattactcacccagaactttgaatcttgagtgcataactcaaagatgcagagacagtttattctttttagcagtggtggtgttgagagtccagcgacatcattgtctagttgcagcagtggtgatgagaaaggtgtgttaaccagactcttttgtggctgagtccctgtgtcctagcctcccttcagcctcccttgattctagctcacttccaggtcaggcttctagcttttccttcaagatatttctgtatccttcaaatatactttttccctttaagtctgccaaaatggatttctattgcttgtaaccaagaactctgactgatacactgcgtgaaaactaagctaactgtggcag

SEQ ID NO: 109305 - DNA, 1036 bp, Homo sapiens
atgtggatgaatagaatgtgtagaattaataatgatgtgtgggttccaaggcaaggccctaaaaggtgatacaacctcctcctggtcctctttctttcctgtgacatgtgccttggaaactgagtccaggtaccctgaatatgccatattagagagagcacatggaaagactatatagaattagaggggtatgccagaggaaccccagctgttctagccctcagctgtttgagttttcccagtgtaggcaataggacagacatgtgatcaagcaagctgtcccatgacttctcagccccagccttccagctggcccaggtgacatagggtagagcagaaataaactctgagcccttctccaaactgcagattcatgaacaaaatgaacattgttattattttaagcccctttgcattcattttgcatatattatatggcatatatatatttccagaatgatggctattataaatattcaaactgtaacacctaaattctaatctctagcatagaattatgccttcagactcttacaaggcaggattattgatatggaatgtacttatttatttagtttcacatttttgcatcttacagtttaagagagtgtcatttgggctattgtaaaattacttggctggaataacattacagagctttattgctgttagaaacaaggctatcttccatatcaagatgtttaaaatactagttttctgaatatttatagttgtgtgacagctaaatccattaattctaagatgttgcttggtagtcccctgtgcaaataagtctctaaatgtaagttcattccttctattaggatcctaacacatcttttgggaagcaggatgaaaattctacttttcttttggatttgatattccacctaataaggggatttggagagagctttagaaattaaataaaatagctagaagttattgaggatttactatgtgcaaggcactatgctaagtgcctgcaggtcttctcatttaatcattataacaattgtatgaggtagatttttat

SEQ ID NO: 109306 - DNA, 1047 bp, Homo sapiens
taataggatttctgctgggtgctaacagaacacatctgaacacatttcatttatttatgcctgattgaagaatgtccctgttgttaggtcctccctaggaaccatgactaagctccaaacatttattaaactcagaacctgaattattagcaactgagcaactagttctactttgcttgaggatagtgaggacaccttgtgtgcaaggagaaacatttgccttttatgctttgaatgtagcaaagaaagagaaggcaaacagaacattttcatattaaaagtttgaaggttatatcctgccacaggggtaactaagaaactttcccatgtatatggcccctactgggtgcttctgagaaagaaatgctacctttttttttccactctctgttcaaagtcaccaagcatttgggggaaatattttatagaacttttaatttgttttcaattggattactcaaattctgaagttgagcagttccatcccaggaatgaagagtcctctgtaaataggattaaggtctttttaccctagattataattaagggaatagatacctcaagtggagggaagtgtcattaaaaaaagactttctccaaggtccccctccccagttgctatcattataaatgctcattatgttttctttttagcgctgcatgaggtactggtgggtgatggacagcaaagaggacaagggaagagaaagaatttttgtcccaaaggatcctgtgaattagtgagaatatatacacatgaaaatttttagtaataatttgggtgacatatggttaaaagccagaataaattggcagataacaaattcctttaggacattggtcaatcaaatcagaatcccagggcatgcctgttaaaacacagatttctatgtcccacacctagagtttctgattttgtaagtctagggtgtgtgcagcttgataatttggatttctaataagttttcagctggtgcttatgctgctgatctgtccttttctccagtctctcacagtgatacaaattgagaactgctcctgtaggag

SEQ ID NO: 109307 - DNA, 1025 bp, Homo sapiens
gttcaagtgattcgcctgcctcagcctcccgagcagccaggattacaggcgcctgccaccacacccagctaatatttgtatttttagtagagatggggtttcaccatgttggccaggatggtctcgatctcttgacctcgtgatccacccgacttggcctcccaaagtgctgggattacaggtgtgagccaccgtgcctggccaactactgactcttataaagatttattaccagatgatgacattgctcctgatgtctctaactaggtggtcccccttcacttttcttagtcttctgccatgacccctccctgtacctctatagtggaagtggttcacattagttcgtccttaaccttaattctaacataaatgaatgtggaataccgcaaagagaccaaaagagctagctgtatgctagcactggctctgacagctaacaagctttaaggctttgagcaaaggacttctcctctccagatttctttttcctgatttgtaatatgtgcattggattaggtgatctcaaagatacctctcccttctaagattttatattcatcaaaattcatctgccagaatggcactgtgataattagatagactgccagctggatgcagggaaatagcagagctaaaagctccagtctaaactatccctggtgaatattcatttttgcatattttaataacaatactctcagtgtctcacctccacccagtcactcttgcaccctgtcactcacttagcaagaccctttcttttccttcacgttttacaactctgtaatttaacaaaatccattagtaccaacaaaatggagtaacagtgatgttttaatatatggcatgtacccttaatatcattactagtatttgagaaactaaatgaaagatttttaactttgacttttaaggaagaaaaaaaaatcacctttctttatttaatgagtaaaaaggacctccagtaaagagtaatgcaccataattgttattcacttcacactcattcctttttttggcat

SEQ ID NO: 109308 - DNA, 1061 bp, Homo sapiens
ttttaattctttgtattgtctgtgtttggctattagcctatttgaatgtatccactgtctaactgtaaaagttttgagttttggttagtctttctactcaaatggccccataatggttacaatcaagtcttcaagaaactttgttgttggttttcttttttaagtagtaggctatatttatattatgttttatttatgatcacaagcatggtgtaagagtgcttttactgtggaagtttgactttaaaatggcctaccaagaaggaatatgcatcctcgttacatttggaactataaaaataaatacagtgttgttcacacaaacaaataatttttgctggatagttgtttatcagtttcctggagccttgttttataaatactcataaacttggagaaaaagtctacttgagagaagttgacactatatgtagtctgcttattactactttctttttttttaaagtgtatcttacatttagaaacagatactataacatagaagcaaagatgactgatgagattttttcaccaaatatttatggaaaccttccacttaatatgaacacacagagataaatagtgtaggcgtatggtgattaccaagacagagtccttgctctaaaacagtttaccaccaagtagggtatttaagtgcataaacaactaactgtaatgatgagtagtgtcccataaatactgtcttacagggacaggtaatagtataggagtgcacagagtgatttcagagaagctagtgtttgagctaaaccttgagtggtgaatacaattatggtagaggagaggagaattcattttgggcttagggaatggcatgaataaggcacaactcaataaaaatacaaatatgaaggtggggtaagaattattcaagaccgaaccttggtgaacaacatatacaagcaatggcaagagtgaagggtgttcagaaacatggtagaagattaggttgccaagagagaacagggctaaattgtcaaggtcctgagtgctttgctaataattttatgttttctacatagaccttagaaacgtttttg

SEQ ID NO: 109309 - DNA, 1885 bp, Homo sapiens
tctgatggagattttgaggggtagccagacaggtcaccaatcctcaaccatagctgtctagcactgccataggttctgcagagagttctgcagagcagaccttcttagcaaatgcaccttcttccttgtgctgggctttgaccccagagccttccatggaagctataggtctagtgggttggcctcaaccacttgtgagtgagtattccctttatccttctggcctatgacttagactaaaagaagtctgcctgggctccttttactgaggtctaatttttatccttggattcctgccattcctatgcaatgagaaaaacaaaccccagggggagagaaagagagtgtactagcattgccttctagcctagaccctcacaagacaggagtcctgccaagcaagacacagccttttcacatatgggagtaggcaattcaaaggaggaccagtaacttctagtgatgcagatagaggaatccaaaaggagcacacagagtggatccaagaaatttaactgtaccacttcctaacatgtaaaccatttggcattggttccatactaatgccaattcatctgcttctcggagtgatggaggaggagtgttgaaccctgagagtagtttgtatctctgcattcaagagagaaaacaagagaagctggtagaaaaggcttctcaatttgtgagattaatctgtgttacatcagaagtagtgagaaaggagagttaggatttagaaggcttgggaagacctgaataatgtggataatggtatgtgcaaagccataaaatgtgtggttttgatgaggttagaatcatgcctgaaagctgaatggggatttagacatcatgtggggtatgtaatctgcaagctccgtcctgggcccagtgaaaacctttctgtgagctttccctaaggctgtacttcaggcaaattattatacaagggggaatctatttgccatctctgagcaaatccatgcctccctacctactataggttaggaaataatcttttatatctgttggtgttgcatttacaaagggcttccccgtatattatcacatctaactctgcctgttaatcacagaggaataaatcatggcatctgcagagtagagcctctaccagggtgtgtactcttcatacaaccatggacctgccctctgttaacaggattctgtattgggagagcaaacccttaaaagcagggataaagatattaagaggtcttcctgtcttttactaaggtctgaaatgccaccaattctagcaattgatttatctggatcccctaagaccttctattagagtgtgaatatccatgcaaaagagttatgggctcagattgaagtgtgtcatgtagaaattgatgaagaagcgataattatagcagattcattgatagttttatgtatgtactaatttacttgatgttattaagaaattatgaagtttagagcattgctatagtcactgtgaggattaaaatgctgaaaaataaatgatcccttccccaaagattttacagtgtagtaggaggtcctccagtgaagaaagggggagactttggaaacagaatggctgtaggaagtgatgaagaatgatgtagataaccctaagctttcttttgtaaaagttacatttgataacctctttgagttgttcatttggtggcattacatactgtgatggggtaagatgaatatgaaacaggttatcatgggatagatgggatgccctgtggacaaaatccatgaagatggtatatgaatttttgaaaatagatgaggtgttcctggagacatgattaaaaggaagaagaacagaggctcaagtaatagctcaaagagttttaggccccccaacaggtagaagagttgg

SEQ ID NO: 109310 - DNA, 1058 bp, Homo sapiens
tggcggtgcatttgaagccttaagagtaataaagtctcaggacagtcctctccttgggctctgggactcctgataccttcacaaaatgttttttatttttcttctcaggggaagcagatggaatgaacaacttctgtctattatctgctatttttaggcaaggtaaaccatcatctgtgtgccccctttagagaagttgagctaatttagcaaaaacaaacaacaaacaaaaacagtacaacaaatgtcctgttaaaagtctgttttcattagaaattatattcacttgtttctgtttgttttagaaaagaggtaaatgctgaaagagggtgcgatttggtgttgccattgagccacaatttctgtcccagggaaataattatcctctttggaattgtcagtcagttgctcccacagagcttggctatgggctgtgagcaaaacccagctataccagcttgaagcctagaaattttggatacattgaagaatccaatcttctgcaaagggtcggaagcagtgtgggtaatagttaaatattgtattggatagggacattaaaacgtttggctgttctctctctttttatctgaaacttccagaatcaaaaggtctagccaagaaaggaaatcattcctaattttggcaggttctgtaataggaagaaagaatcaagtctagctagccaaatctagcctaataaccaatgggacaacttccaaatgtggaagtcagtgcctacctaccattgttctccaggacaatataaaatagttcaataagccatttagcttaggtgttagaaaaacgcagcatccttagtatagttggtacctgaaaaacatttgctatttcaaggcttgatagagatactggcatatgccttcctcaatctcaatgtaatatatagtacctcatggcctatcaaagagaaaaatctccagagtaaagggagcacttgtgtaatagggtattcttctccatataggacagagataggtcagttatggtacttttgcaaagtgaacctgaaattacaagctaaattctgacttata

SEQ ID NO: 109311 - DNA, 1044 bp, Homo sapiens
ggctttgtttagtattagggctcctagatgagcaatacagcaagagaagagtgtctggcacatagtgtgtagtaggtacccagtaaatgtgtattgaatgaattaattaaatagagaatgaatgactccagatcataccacaaagcctggactaaaccagttagtgaacaattttagaatgttagaggtaagtgacattagaagtcacttaatctactttcctgttgggagatatcaaatgaattagatctatttgctctagaaaatattttaaaggagagatttagagtattggaaaggataccagatttatagttcgatgatctggcttccatagacagctaaactcttgcttttttgtatgaccttggatacgttccttagtttttcgcttctaaagtatggataaaatgagataatggatgtaaaattgtggggtggggttcaagtatttaatctgcctagcacccttcttcacttctagcaacagactgcacacccatcctgaccacagggcatatggcctggtacctcacctcatctgaacacagtgattggctcaggaggtggtcacatgattgaaacagggccaactagagtcttcctgtgggatttttcaatgccatcctgacaggcgtttttctctagtatggtattgctgtaaggatcagcgtttggagctactggtagccaattgctaccttccgactccctctattggagagaatatgatagcatacaaagagtatcagtgctatgtttgaatatttatgtactcaccacagtttgtgttgaaacttaatccccagtgaacagtattatgaggtagggcctttaggagatgattaagtcaccagggcagagccctcaagaatgggactagtgaccttataagagggctggagggaactagctaggtccttttgtccctctttctctcctaccatgcgaggacacctagatggtgccatctatgagaacaggccttcgccggagactgaacctgcgaatacctcgatgttgggcctcccagtttccagaact

SEQ ID NO: 109312 - DNA, 1030 bp, Homo sapiens
atttggggatggggatccttttggggttactcacatcacgctaaataaggcagttaccagctctcaggacagaaagaccaggccttctccataccccaactacacatacaaggagccttaatctaatacaggttttgaaggcacttcttaaagtcatgtcagatgggagacagaagcccaactggcattcgtctggagcttccctgccaccctggccacacctgcctcctggaggtccactctaaagagccttgtaggtagctgcagggcagaagccaaataaggcccagtaggagatctctggtgctactcctatataaatagtggttgccggccaaagaacagttttatctgaccatgttttggctaccttctaagcagctgctctactgtcatagcttcagagttctttttgattaataactcatgagtgttttagagttcacttctaccagttccactggcttcctgaattcccaagggcattttcagttagcattccacagggaactttctggaatacatttggatagcactaatggaagttaatatttctccaagctctatagcccaagattcagaaagggaagggaattttatcagtaattaaccataattttctctgatttatgaaacatagttctctctgtaaacaaatattacttttcatttttcttctatggatctcaagtgcatagaatgtgaaacatcttctttctgtaactgcagaaaagacaggaactcactcataacaaaatttagccagattgctttggctgagtgccgcttgttttctcaacagattgatgagaaagtccgacattaggctgtttttatgttgccatccctcaggggaacatagatgtgtatttgtgctttaaaacaaaaacatcatgaaactagtacaaactattccccctgaatcccttaacctatccctggaatatgtgtaatattgaggggcaaagaattcatcatcactgtggcagtagggaagtaaggtcaactttttgttagactgtaaagcaga

SEQ ID NO: 109313 - DNA, 1031 bp, Homo sapiens
gttgtttgaaagtaccgaaacatgtaatttacaagccccagcctaggtttttgtctatggtgggacgttgcatctctctgcatggtttcttcaactgtaaaataaaggtattggattagatattttcttaaatctcttccagtcgtaacaatgtgtgatttttgtctgtttatttaacagttattggttcattcatttattcactctgtaaacactgactgaatgagcatctttgagccagacacagtacccaccactagaaatgctcagatgaccacgtggcccttaactccaggtgcacagtgtgtgcatttgtatgtgtgctcatgtgggagggcagagagatagccagtaaaaacagacaactagagtgtagtggaattggtgttataggggacggtagatgtgcagaggaggaagaaattaggtttggaattggtaaagagttcttaaatcagaaaatcatgagagaacccgtaaatcttgtgaactgttcatgttgaactttactgccagttgcgtttttaaagacaggctttgaataatgccttgttttcttctttgcttctgtaactgtggttatatgttggtgccttatacagaccaattcttgccttctgccatggcaacacctaccacattcttttttttattgagacagggtctcaccctgttgcccaggctggagtgccgtggcatgatcttagctctctgcaaccttgaactcctgggctcaagggactctccagcctcagcctccagagtagctgatactacaggtttacaccaccatggctaattgttatttgtaaaatttttctgtagagacgggttcttactgtgttgtccaggctggtctcaaactcctggcctcaagtgatcctcccaccttggcctgttaaagtcctggaattacaggaatgagccaccactcacagactcaccaccacattctaactgcagctctccaactgatattaattagtttattttagtttatattaatatgctatcagcattgcctgtttgct

SEQ ID NO: 109314 - DNA, 1119 bp, Homo sapiens
aactgtgttctaaaatttatcacattttaaattatatctattaaataatttgatcactcattctgttaattttttaaatggatgagtaaagaaccacataaattgcttttatatttcactttaatgttcgacccagcagttgccctcagtacaagtttcctatcccttttttattgctcttggttgccttttgtattgtgtagagaaaaaggaatgcagcaaaaatgaggaagtcactgaggagcttgtctttttctttcactttttactatgccataatttcccttactgtggtcatctattttttcaccaaatctccacctctgattctctgttcctaaagaaaacaacagtaaacatgtaagcctctcattgtatctccattagtggaagaagactgtgatggaactgcaagtaactttcctagggactgctccactgtggctagattttttaaaaatgttatgaggaaagcattattttttaaagaactcatatttttaacttttttctcgtttcaaattgcttttttgatctatggtgaattcaatctgagattaagcattaaagaacttgggaaaaccaaaatgccttcacagaattagagatgcatttgatttttgtactcgagaatcagcttgtgagaagtattggcccctgtaaatagagataaactaagccaaatttgtctgtaggccttgcattttaaaatcacacctgaaagtgttatgagcctgatataattgcatttgcaaataaaatgcaagaaggtctagggctcagagtacaattaaatgtattaaatttttctttttgctgtaatgacagtaactttaggcctcttcagttgactgtacctctttgtaaaccttcccctgcaggataatcagcattccacagccactaaagaaaatgagcttgtctaaaaatagttgcctgtttactagattttagcagattttttggggggtggtgggatagggggtgggtaatatgaaagctttacaaaatgaaatgaggtcaaatatgacagatgtgatcaaatgtacttctaatctgtaaatccctgactagctacagttgtgctatttttaaatgtatactttgaagttatactga

SEQ ID NO: 109315 - DNA, 1058 bp, Homo sapiens
cattgtcagatgtcaaatggtctggtttaatgactagcttgttgtcctcttaaagataaccttaggtaggataggcctaaataagactaagaaaattccaggtcttggtagctggcctcattctggctctaaaattcttttgaagagtgggtgtggtggggaagggtcagttggacaagcaggaagcaaagaagcacatatagtctgcagttttgtttttcgcattttataaatttcctcctttcttctagattaaataaggacagcctatcactaacaatctcaaaataaaattgtatatgtcctgaagaacctccaaaactttcaatagccaagaaccatatgaagcaggatccaagtaccacatgaagcaggatccaagtcttatacacaagtaaataggtttgaggaaaattttcagaagagcatatcacagaacatatttggaaaatataatagaaggaaaataatatagaactaaaagttcctattatgtaattactttatatatataagtagcttttgcattcaagacaaataacattactggaaaaatttctctcttggaagacatttccacattccaattttcacattaaaaatgacataatgaaagtgccccaagttgtattgaaatgaccacaagcaccatacttaggtataacaggagttcacctgggactcactaatccagttgtttacagccggactctgttctaattgattagcacctgtgtctcactagttgttaatgtttttattaacactcttgctagaatatgtatttacttgtcaagtagcaaaaattatgtacagaaccagaacaaaacacataaaaattagtttatctggtgtggttcttatccatgtcattcttgtccctctctcttccctcccttttttttccctttgcagcaaattgtaaaggtgactttatcattaccttcttcagggtcacagagttcaaaatgactttcctgagggagatttttgacaggcatctttgaaaagatgtctagggagacttggaactactggatgacattttgatgtcatgg

SEQ ID NO: 109316 - DNA, 1037 bp, Homo sapiens
gacccaaacagctgccagaatggagttactgtatactgagacagggaatgctacaagagaagaagatttgctggaatgatattaggagcttagtttgggacatgctaaatcagacatgcaaagttgggtcaagtaggcaattagatatatgagttttacgctcagtggacagatcaaagctgggaataaaagttaggacatcatcagcatagagatggtatttaaagccagtagactagatgagaccagctagagagtaaatgtaattaagaaagagttctgtggaaggagccctggggtgctttagggtggggacatagggaagaagccgcagacagggaagaaaagccagtgccagtgatgtgggagataattgttttctcagaaaatatccctttttgaatgactctgattatcaaataactttttgtttggtcaatgctaatatatatttctacagtgtttttaatcagttgccataatgctgtttactcctggttacatgagctgtgttgatcctggatcactcttgaatggtaaggccaattcactggatagagtgcccacagtgttttccctatagatgctttaaatgtctttttctttttggaatggaacacatgttattatataggcttacatatgaatagttaaaataaggtaatttatcaagaagttttttaaaaaatatgtgaccgtatttagagatgcagtgtttgttttttaataggatgcaaatcaactgtctataatgttttatctcaatgaaaatcatgtataagaatcccagtcatactatatttgttacctaaccttccttttcattcattactcatcctcagcaatcaataacagcctctctgcagcctcttaaaatgcagtgaacctattgatttcacttgttattgcatctccctcccctgccgctggctacaaattactcttaagtcagaaaaggtggtaagatagtaagactatatatagactgtcctcttctgttctctccaaaaagctttttttttctatttaactaggaa

SEQ ID NO: 109317 - DNA, 1088 bp, Homo sapiens
atatctctaaactggtcattatttacatgcttcagctgcactcactaattaaatccctggagttatttctgacacctaccacctgggacctgtttccagacaaaggctttcctgtggcacacagccgagataggtctgggcccttctgtttcatgtcagaataaatatttcagctctgaggctttttgtttaactggattcagtggttctcttgatttgcgttatttcttttaccaggaatcagtttactaagctagctgttgtttggatgggctaattaaaacctgctcagtgtgtgtgcaggcagcctctaagccaaatattgccctacccagaacttggataaaaacatggcatttgtatttattagaacagatgagccttgtgacttacccctagctaatctgactctagtgtttgcttttttcattgtatgcccttctgaatgtacatcccaccttaaaaagtgaggagtgcccacagttcccagcccttgagaaatcccatggaaaggagagatgtggcctgggtgttcctgagaacagtcctgctgtcaacttcatgggtggcaggtcaccaaaaggtgtgtctatatcacatatgatatttggtctcatgagacacttcggaattagttatttatactatttttatcaaggtttcatgcaaagtggataaccagttatagaagctttgctgatactgccgttcttttgagtggaggcattctatctaggcaactggtaaaaaaaaatccaaatattgtttcagatagttaaatgcattagactatgatctccatctacatcaaacatttattcatttctgtcatattgcatggtcctatattctaggagaggcctatcatattcccctaaggagcttgtagtcttgtgaatgaaacagatatgcaaacaaatatttccagtacaatgtgataaattgtctctcagatttctaaattgggtaagtatgtgtatgatgatgccctaaccaagatatggaacgctgaagaaggaacaggttgaaggaggagagatggagggagatgttaaattggatttcacacgctcacaggacattcaggc

SEQ ID NO: 109318 - DNA, 1061 bp, Homo sapiens
atgttggccaggctggtctcgaactcctaacctcaggtaatctgcctgcctcagcctccgaaagtgctgggattacaggcatgagccaccacacccagcccatcattttcattattactaaagtaacaattttggattcccaggttttttagtcatttagtcattcagtacatatgcattgagcaatgtaatcagggataagacacttggggtttcatggaaaagaaactttttatcatagtgctttgtatactatacaaactcataatgctgggggaggggctgaggattggggtgggcgtgaaggataagatatttgaggtttctgagtcccgttttcctcatctgcttagagggagaatacctgccctccccactctgaatgtttgaaaatcaattgcaagtatgtttgtgagccacttagtagagtttatagtactgaacaaatcgttattacaactttgttatgaatttaactgagaaagttttaaaagtatttataactaggaatctaaaagatgtctgagataccccaagttacataaccctcattaggatttacagttttctcaagctctacttgtcaaatgaattaattgtctaatattatctaagcaaaatacttagttaagcttagaataacttttttgtatactgttactttgtctgcattccagaaattaaatcagaggggagaatgttggtttacaggaatagactgatacataatttgcatttgtgtgtcttccctaaggaaaacaataattattagtccaacacaaaaacatgcccattttgctgaagtacatattgagttcagaagtggacacagattgtcctcataatgaccactgtaatgtacctttattgcttcacaaggtgccatggctttggatggtgtggtgaggatggaagccctacccatatgttatttgcactggaccagaatcttggatggaggaaagaactttggacatatctgggccagaagttctctccacctaccaggagtgagcatgggagcatgagctatacatgtacaggagggtcatcgtgttttc

SEQ ID NO: 109319 - DNA, 1159 bp, Homo sapiens
ctctgggatgctttcagcaatgaagaagcagttcgattcatcaaggagcgcttggatgaacctcactttggggccaagagcatagttttacagtcattttacagaggctgccctgacaatataacagtcatggtggtgaagttcagaaatagcagcaaaacagaagagcagtgaacccttcaggggtctcagctgccttagactaaaggactttcaacacactggtctcttttaatttagtgaaaagtgtgggagttgtaattaggatcatccaccccagacatggaatcccccctccctggtggtcttaggtctataatcagtgacgaacagagggtgcccttggccaatgtagttaagaaactggaaaatggtttcttcatgttttcccaactctttcatccagtgtccaaaatatataagtaaatagctgtagagtcacatatatgaagtgaatagcatatgtgtcatttagtctccctgaagattcttttcaagatcctgttcagggtcctccaggcatcagctgttgtgtcctctctttgtaacagtggacaggacagaccacccagtgctgcaggagacaggccactgcgtcacctgtgagtggtcaggggctgatgtggcaacaccctctgccaagagacagagctgtcctgagaatgctttgtccttctgagcccatgttttctgctcagtagcagcttggaagcagatttggaatggtttactattttggctgctcttggggactgcgagaagcagagagaatgagagaccagtggcaactgcctgcacagcagagataaccctcttcccttgcttcctttaatagttaaatagactttgtataccacctgaccagcctttgtgcatttatcctaatcatgcatgaccgttaaccttttgcttagtccttaccatatgtaataggcagctgttaaattcaccaacagataccctgatttttcatcttacgtgaccaagaaaccacgttaggggaaatgaaaaaagcaagccacaataccatgattccttccattttcaacagtagatgaaggaaatgatactgaatgagtcacagtgttccctggcaagtaagctgtttgcattgagaaaggagtgagctggtgaggttaccaccctgaattgagctcca

SEQ ID NO: 109320 - DNA, 1008 bp, Homo sapiens
gaaactactgggataagcttctccttgacaatggaaaggcagcagtcttcaacatttggttgcaaatctccatccacatcagggagctttccccaggcaaatacaaaccgccccgtggcctgcaggcctgcaggggaggcagcaaagggacctggcagttgcaacacagtaagtcaggaattcaagcgtgaacccatattgataagtgggccagaattatttaggggcctggcttgctgctctccatttcctgtatcgctaatttatcatttttccaaccttggtattttatattatttagagaaaatgctgggtcactctctttgcctaaggtgactcaaacagccaaacgaaacttccgttgcctcccagccctctgtatccacctggttttgttctttccctgtgagcatttgtggttatagcttcccatatgccacattcaccggccacctcctcgccgtggaaccctgccctctcccctcctgctgctgtagagttttcccaaagcagtgtccaggagagaatttgagagagtgaagaaattgccttgtagatgtggagggctgcaatctgtcttgatttctccaagcacttaactttctttgactgcactgagaattgctaatgatttcccatgagatttgcttacttttgtatactgtattttccagcattacagaaccttggttattgttttttagccatagaatcttctagtaaaaaatatctgccaccattttagatttaagcatttgcctatggggagacactgaatatgtggatgtgtgtattaatatttggggtggggacagggaagggaatgtggaaaacaaatgctggctgtgagcagtgctgagatggccaggccaggcggctgagtttgcttggaaattcaggacattctgactcctaagagttgcccccacccaccatcaaactgaaatcagcaccaatggtgtcagcactttacagcccatagccaactttctttatttttaacgtagc

SEQ ID NO: 109321 - DNA, 1067 bp, Homo sapiens
gcagacatcactcctgggggtgccctatggtacactggctgctccccagggacctgggaatgctgaatctagccattagggaaattgatttgagatgtttgcatgtgaagcttccctaagcagcactgccaaagctttggaattgtcacccaaggcttcctagactccctagctagctcgagttcgaattgccaatagtccccatggtgccaaattttgggatggttttacagtcttttagaaatgaagacaggaatggccatgtgcttctgagaccccagcacgatgccaggcccaggtctccattaatgcagtgctctgctgctgctccactggcaatttgtactcttaacataggttgggggagggacagctagggaaattttttttaattaattgtatctaaaattctttcatcataggaataaacaacacatatagaaagctccaaagctgttcccaagacctgtattatttattttatatgaccaacttgccccaaggcaattaactctgaattgctgttctaatgtgacatatctgtgtacatatgtacatagtactggtaaccagtggctgcattttattccttgctgtggactgaggtattggcttcttgaatcttgtatatgtcataagaatattatacagagagtgttatagtgaaggatgtaagctggataatttaaaacagaccttatttcatacaagtgtaattattacatcattttgggtaaatggcaaacaggattgcatgagagtgatggcatcatcatttcaattgaatctgaagtgattctaggaaattgattccactgttggattctaggaaattgagtccactgttttcctttgcgtttaatttcctttgtgtttaatttgaccacagaaacttttttgagtagcacctagtaacattgcaaggaacttgtgtatcaaggtgtatcttgattatcctgattttttttgttctctaagttgttgccagatctctcttgcaactgtgtcaatgaaaggtctgtgtttagaaaaggcagcatatcattgtatatttgaaactataggaa

SEQ ID NO: 109322 - DNA, 1874 bp, Homo sapiens
tccaatgatttcagaaattcttttttcctccttttgacccacaactagactgttcataccctaatagttccccaaaattgccttagcatgtcacaccagcatttgtcatccagctctggagaaatgacatgactgttagatactatgcctgtttaattgcctctggattaagtcattgatagctagacttttgagctagttagctgtagaaataatagaatccagtgtttcccaaagtgtgttccaaagaacacaagttccaaagatgctcttctaaatataggattctaggatgaaataagtttggaaaacacataccatcttagaaagttagtgaacatgagcacatcaaaggctctaatttaaatgtcctgtgaggagagaaaaacacaacaaatatctactgtcagttagcccagtgttttccagattaatttgaccacagaaacttttttgagtggcacctagtaacactgcaaggaacttgtgttctaaagaacaccctttgggaaattctggtatattgaaatattgctgtgttttcattcacgatgactcttagtagcagtacaatttgcaacttagaagcatgagcctttcatatatgaagctgacttgttaataaaagcagtgttaagaagtagtatgacttaatatgaccaacagcagcctcatattgatagcagaacaatcctacttaaagctctaaacatcatccccccctttttttttttaacggaatctcgctctgtcacccaggctggaatgccgtggcgcaatgtcaggtcactgcaagctccgcctcccaggttcacaccattctcctgcctcagcctcctgagcagctgggactacaggcggcctccaccacacctggctaattttttgtatttttagtagagacggggtttcaccatgttagccaggatggtcttgatatcctgaccttgtaatccaccagccttggcctcccaaagtgctgggattacaggtgtgagccactgcacccggccatccctttcttttatatgaataatgagcaagagccctgccatagctaaatatgtctcaaattcattccaagatctttccattgcttttttgcagttacctttgctttttgggttgaatcaaaatgaatatttttatatttcattactatatgatatttaaaaatatacagaaaatcacagaaaaggaaaaacagaaatttgattttaattcacttttgaaattttaacgatttttaaaactaatgatctgttatataataactgaaatgtaaactattaacagttatttactttctttcctttattgtcctctctggattcagtgaaataatttgaaatcaattagagctcataccttctaaaactcctgtcccatatcatcccacctttcatgttttatgtacatagttaagtttggcatgttatctcttgcctaaaatgtgaggccttcctgtagttccacagtagttactcttggctgcagaaataggtttgggaagctatgagagattaccccaaagtcatggatgaaacaaatctagtcgaaaacatggtacagagtgaattaaggcaaaagtcattaacttaaaattacatccaatatttaggaatagctcatcctctgcacattatccaaaatattttaaaaaactaaaagtaagatctcttaggctaggtggcggattgcaaagggcagggggcagttgataccatgaagcttccaatagatgcatttctaaacattttttctaatatgtaaatttgctgatccttagtaatgttaatgctttgtctatttgttatttttaccactgttgaacagcaaactgttgaggctagggttgattattgataattttt
